United States Patent Application Publication US 2005/0228172 A9 - sequence listing, part 94

SEQ ID NO: 428656 - DNA, 595 bp, Homo sapiens
taattgggaggggaacagggagcaggtagaggtatagaagagccaggaatagcagaatactggtaattattgaagattaataatgtttacatggtgacttgttgtagaattctgttcattttacttaagtttgaaattttctgtaataaaaatttgtaagaggttccaggggaataagcacagggagaaatgtttggatattgaacttggcattatatcatttgattgtcaactttaaaaataaaaggtaaaataaatataaagctttttaacttttttcccaaaaataattaagtaggggaaaggggggyattgaaaactggctgagagatttagagaactagaaataaaccacttgcctaaaacaaacgtaatagaaatagctaaattcaaaataattaatacggaattaattgcagcagttttcaaactgttaaatagcccagaaaaaaatggatagaggtttgtctcctaattgatttgaatccatagtttgggattttgtctacatctgattcttttaaaatgctttcttttttaaatttgctttccatatgaggattgatacaattgattctgaaaggcaggtaggttt

SEQ ID NO: 428657 - DNA, 615 bp, Homo sapiens
agactctctagctcacttgctgcacgccactcccacaggccaaaaaccaagtcacagagaacaaagaggtcccatccttgtgccctttctaaaggcgaggaagctttcccaaaaggccatcagcatatttctcttaatatccactggccaaaactctaccacaaggacattcctaaaccaatcactggtagggaagtagaattactatggttggtttagatgagattctaaaccctgggtacatataacaatcatgtggggtttctaaaaattactgatttcctgagccccatccctgagatcctaattcaaatgccccagcattggcatttacttttaaattccctcggtgctttttaatgcacarttgaggttaaaaatgctagatctgtctactaggaaacgtactagagaagcaactaatgatatgccccctaaaattctcctggttctgagaactgcacccactctcaagaggtggaacaccagcctacatatttatatggaacagctctgccctacaataacttacccagtggtagattcctaagtcaaactactcagattctctctcccaagaatatgatcatccaaggtaatcaaacagtattatat

SEQ ID NO: 428658 - DNA, 586 bp, Homo sapiens
tttgctaaatgaggagccactgacactttatgaaatgtcaaggaaaatgtttgttcaggtttctaggtggggctgaagccaagggaagaggagaagatggcrgcccatgtcacaggcacctctgggcaggggttacagcaacattttcccaataagttagcccagggccctatcacagggccaagagccaactagcggtttgatcctacaaaagaaactcctaggaaaccagacccgtgctgtggttgccaaaagcccgcaaattaaaaggacagaaaggcagaaaggcagggcagaagaagatgtaatgataaaaaatctcctaaccacacacatacagacacatatgcgtcacagctatttttgcatcaaattgcaaatttgatctcaaaagagccaaaaatgatgttagagccagcgcgatcatgggaatctttaactctacaaataacagttaaggaaaaaataacagtttcaatggataatatttattttaatcttagtagggcggtatgccagggtcttgacctctttttggcgaatgtcagaaatcagagtatcggtggaaagaaaacaaaagaacttt

SEQ ID NO: 428659 - DNA, 593 bp, Homo sapiens
ctgactcacgagtaaagaagaggtaagaatgcattargggagagagagtgcagatgatcctttcaagaatctgcccccttgggcaagccacttcctctctgtgcctctgtttcctcatctgtagaatgagaaagtggaccctgccagctcagacggacttgttttctttttccttcctgttctccttcagggtttccatcttttgcaataagacagggctgtgtcccaattcctggaagctcctttccaccagccatcttttcttctccttgacattggctgtttccgtgcttcccctcctttcccgtccctgcctccttcctgctcttgctctttttcatgttcccccttttttattctttttcagcacttcacctttccctcctctgcctgggctttctagggtgaagcagccaggcaggggccggtttctgaggtttccctccttcctctcagtggcttccagtggacactcgcccatgcagagacaggaagtggggctttcaaactgcctgctcagcactgtgggagagccctgtcatctccgccgctgcaggaaagagccattaactccagcctgacttgcaaaagga

SEQ ID NO: 428660 - DNA, 610 bp, Homo sapiens
gcagcttgtccttcaggactgactcacgagtaaagaagaggtaagaatgcattaagggagagagagtgcagatgatcctttcaagaatctgcccccttgggcaagccacttcctctctgtgcctctgtttcctcatctgtagaatgagaaagtggaccctgccagctcagacggacttgttttctttttccttcctgttctccttcagggtttccatcttttgcaataagacagggctgtgtcccaattcctggaagctcctttccaccagccatcttttcttctccttgacattggctgtttccgtgcttcccctcctttcccgtccctgcctccttcctgctcttgctctttttcatgttcccccttttttattcttwttcagcacttcacctttccctcctctgcctgggctttctagggtgaagcagccaggcaggggccggtttctgaggtttccctccttcctctcagtggcttccagtggacactcgcccatgcagagacaggaagtggggctttcaaactgcctgctcagcactgtgggagagccctgtcatctccgccgctgcaggaaagagccattaactccagcctgacttgcaaaagg

SEQ ID NO: 428661 - DNA, 610 bp, Homo sapiens
gcagcttgtccttcaggactgactcacgagtaaagaagaggtaagaatgcattaagggagagagagtgcagatgatcctttcaagaatctgcccccttgggcaagccacttcctctctgtgcctctgtttcctcatctgtagaatgagaaagtggaccctgccagctcagacggacttgttttctttttccttcctgttctccttcagggtttccatcttttgcaataagacagggctgtgtcccaattcctggaagctcctttccaccagccatcttttcttctccttgacattggctgtttccgtgcttcccctcctttcccgtccctgcctccttcctgctcttgctctttttcatgttcccccttttttattctttttcagcacttcacctttccctcctctgcctgggctttctagggtgaagcagccaggcaggggccggtttctgaggtttccctccttcctctcagtggcttccagtggacactcgcccatgcagagacaggaagtggggctttcaaactgcctgctcagcactgtgggagagccctgtcatctccrccgctgcaggaaagagccattaactccagcctgacttgcaaaagg

SEQ ID NO: 428662 - DNA, 610 bp, Homo sapiens
gcagcttgtccttcaggactgactcacgagtaaagaagaggtaagaatgcattaagggagagagagtgcagatgatcctttcaagaatctgcccccttgggcaagccacttcctctctgtgcctctgtttcctcatctgtagaatgagaaagtggaccctgccagctcagacggacttgttttctttttccttcctgttctccttcagggtttccatcttttgcaataagacagggctgtgtcccaattcctggaagctcctttccaccagccatcttttcttctccttgacattggctgtttccgtgcttcccctcctttcccgtccctgcctccttcctgctcttgctctttttcatgttcccccttttttattctttttcagcacttcacctttccctcctctgcctgggctttctagggtgaagcagccaggcaggggccggtttctgaggtttccctccttcctctcagtggcttccagtggacactcgcccatgcagagacaggaagtggggctttcaaactgcctgctcagcactgtgggagagccctgtcatctccgmcgctgcaggaaagagccattaactccagcctgacttgcaaaagg

SEQ ID NO: 428663 - DNA, 604 bp, Homo sapiens
gtcatgagacatcaccaattatcagcaacccatgtccaagccatgttggccatcctttccttgccaggagtgtgtaaagcaaaactcaacagcagaggctcagacattgcccatggaggttatcatgggccaaaccagcagcaggcatgtggactgtatccccttatcctgcagagcaggcttgaggagggaagccccagatatcaggaagggaatgggcttgggaggcaggaagacttaggcccaagttttaaaattaaaactcacttttacatttacttttctgataacaaaattatacatgtttattatagtaaaattagaaagtagatgtaagcaacaaataaacataagtcaataaatgtgattcatgacataaacagaattaaaaatgaaaaacgtaatcattttaatagatgcagaaaaagcattcaataaaatccagcctccttttatgataaaatmcctcaacaaactaggcatcaaatgaatatatctcaaaatagtaagaatcatctatgacaaactcacagccaacatcaaaatgaatggggaaaagttgaaagcatttccccctaaaaattagaatgagacaaggatgccc

SEQ ID NO: 428664 - DNA, 547 bp, Homo sapiens
aattcaatactgtcctatatgccattttttcctttcttgcatttaactttagtctccttcaatctgtaacatttccatagccgtctttgtcttttatggcattgatatttttggaagaataaagacctctccccactccttttttagtggaatgttccacattttggatctgtctgattttttttatgattagactcgggttgtagatatctttttaaatgttctaaaatgtggaaacagtagtccattcaaaggatcaatgtaaaacaaaatttaggycacagaaactttgaaataattattagaagccaaattggaaaaccaaaatgtgttgtagaatcaacttcctagaaaatgtttagagtaagatagtttttagtctttcaagtttctatagatgggtggttcgacaactgggttttcaaaaatcaagaaatgtcttggcattgaggtgaacttttgtggctttctttagtttcatcatgaactcgggctccccaaaagccagtggtatctttctgtagaaacaggatttttctttcaactt

SEQ ID NO: 428665 - DNA, 547 bp, Homo sapiens
aattcaatactgtcctatatgccattttttcctttcttgcatttaactttagtctccttcaatctgtaacatttccatagccgtctttgtcttttatggcattgatatttttggaagaataaagacctctccccactccttttttagtggaatgttccacattttggatctgtctgattttttttatgattagactcgggttgtagatatctttttaaatgttctaaaatgtggaaacagtagtccattcaaaggatcaatgtaaaacaaaatttaggccacagaaactttgaaataattattagaagccaaattggaaaaccaaaatgtgttgtagaatcaacttcctagaaaatgtttagagtaagatagtttttagtctttcaagtttctatagatgggtggttcgacaactgggttttcaaaaatcaagaaatgtcttggcattgaggtgaacttwtgtggctttctttagtttcatcatgaactcgggctccccaaaagccagtggtatctttctgtagaaacaggatttttctttcaactt

SEQ ID NO: 428666 - DNA, 547 bp, Homo sapiens
caaattacctcctaaagccccaaattcttaatactgttgcattgaggattaagatttcaacatacgaatttgaggggacacaagttcagatcattggaaccttgaatttcattctctaacagcattgaacggcttgtcatttctttgctcacatctgacttctacatcttacagttgcatgtgcagtatggtagccactacccgcacgtggctatttaaatttaagtttaggccgggcgtggtgactcacacctgtattctcagcactttgcggggaggccaaggcaggtggatcacttgagcccgggagtttgagactaacttgggcaacatggtgaaacgccgtctctaccaaaaatacaaaaattagccagtctcataacccagtctctaaataaataatagattaaaatttaaaaataaaatttaaagtgctgtattaaaaataaatttgtttgaattcattaaattaaatttaaaattcagcctctcggttgtcstagctatattctaagtactcagtggccacatgtgctagcagctacac

SEQ ID NO: 428667 - DNA, 590 bp, Homo sapiens
  misc_feature (1)...(590): n = A,T,C or G
tgccaggtgtcagttntgagatgtaaatgttgatgatgaggtgaggagaagaccaacagagcatggggtctgccatcctgcttaggaccatggcctgctttaggctgcttggtgtatatgatttcatctagctgttcatacctgctttttccygtgccccagcactgaacatagactcgtaccattgttttgtgtaatctgttaattggttgcactgcagcatatatattttttaactatacaaataagttgcttcccttaaagattcatgctctgatctggaaatggattcattaggtaaaagtcttttaatggaaaatgtgttttgagttccagtgggccaatttatgagcagaatttataatgtgggcatttcctgttttcttcaaaagtaaattgaactagtgtatgaagtttcacttaaattttaaatgccaaggtctttatataagtcctttgtgtttttttaattttgaaatttgtataacttgatttgtttgtgtctaatggaatttagaaataaatttaatatagtttttagggctaacctaaaagtaattgggttcatcatggtgtcatatgtaattaaa

SEQ ID NO: 428668 - DNA, 580 bp, Homo sapiens
agtaatactagcttacgatacacactttttactaaaatactgtccccaaacagctcttctgagcctggccagtaagtaagattgtcttatattgatgccctttgtagaaacaaagaactagcaatatgtagaggtagaaactgcaacaggtagcccaggcacagtcttatactggatgctctcatattgctttcctcgcataatatccttttaagttgatggtgtcttctagaacttttattcacttgtaagaaaaaattggaatcttcagtctttccccagagtgttccctctattatgctacttacctgaggtatgattttctgttgataacatcattgcttttatgttagttctaccaagcacacttaatcatatctacttggcttcctttcttattttctttaacaagattctgagccacrcccactctactcaaaattctgccctgtcccacacacacatagccaatccttcagcaggtgacctatttctgtaccactattaactgacttctttacagtttcttgggaagaagtggcccaattagttttgaattgtgtttttgatctcctacccc

SEQ ID NO: 428669 - DNA, 499 bp, Homo sapiens
tgtgcttatcacactgcagtctttttcaataatagcacctactacataggacccaagggcacccattaagtgctcaatgayattttctactagggtttttttttccctctgagagcatttctagcactctcagaagggcaatacaatcaatgtgcaacctccaatagttctgaacttagcaatgtggatgctattgaaatagccatagtgtgtggaaaagaagttgctgatacatcgagcaaatgtgtatcatacataggccagacaaagctggccatgtcctgtcttacactgtttagaaaaatagaatgatttcatttagggcagaagttgaacagaaatagagtcaattcaatttgattttataagtaaactctgctccaagaaatgtggctatgtataaaccaaaaatgcaatttaaacaacacaatacatttcagatttctgaacgttcattcggttttactataaatgaagtttcactttaagtgaattatac

SEQ ID NO: 428670 - DNA, 616 bp, Homo sapiens
actcagaatacaagcacatttgacttgtttcatagctaatattttagcaatagtcttatataatgatttgatatgaaaagcatttgctcttttgtattattatacttatgtgtaggttctacttaagaattcaccatgtaagccttcaagagtgtgcttatcacactgcagtctttttcaataatagcacctactacataggacccaagggcacccattaagtgctcaatgataytttctactagggtttttttttccctctgagagcatttctagcactctcagaagggcaatacaatcaatgtgcaacctccaatagttctgaacttagcaatgtggatgctattgaaatagccatagtgtgtggaaaagaagttgctgatacatcgagcaaatgtgtatcatacataggccagacaaagctggccatgtcctgtcttacactgtttagaaaaatagaatgatttcatttagggcagaagttgaacagaaatagagtcaattcaatttgattttataagtaaactctgctccaagaaatgtggctatgtataaaccaaaaatgcaatttaaacaacacaatacatttcagatttctgaacgttcattcggtttt

SEQ ID NO: 428671 - DNA, 499 bp, Homo sapiens
tgtgcttatcacactgcagtctttttcaataatagcacctactacataggacccaagggcacccattaagtgctcaatgatattttctactagggtttttttttccctctgagagcatttctagcactctcagaagggcaatacaatcaatgtgcaacctccaatagttctgaacttagcaatgtggatgctattgaaatagccatagtgtgtggaaaagaagttgctgatacatcgagcaaatgtgtatcatacataggccagacaaagctggccatgtcctgtcttacactgtttagaaaaatagaatgatttcattkagggcagaagttgaacagaaatagagtcaattcaatttgattttataagtaaactctgctccaagaaatgtggctatgtataaaccaaaaatgcaatttaaacaacacaatacatttcagatttctgaacgttcattcggttttactataaatgaagtttcactttaagtgaattatac

SEQ ID NO: 428672 - DNA, 655 bp, Homo sapiens
tggtttggtatattttcttttgacccttctgtgaaaagccaggccatgtggtacacttccttattagaatactggacaaatataataaaacatcaaccaacaagtcatttcaaatgcaatttgtgaatgttcaagaaaaatgaatatgaatgtgtttcctttttcttcatgaggtgtttacaaatccctaacgcaattgagaaagtcttctttttttaatgtttcttttctttccacactgcaggagcaaattcaaaaatatataattatgaccagatcattggtatcagaaattaactaaatcatcatctcttaaaagaatggctttggagtatgaatgtaataatgatttacacaacttgcatttgttgaatatccactgtgtgctaagttaaaagtcattccatttcaaaaatagtatattaaaaattactgggaggaagaggaggaagatttgaaaaagacttgagtaaatttttgccagtgttgggtatgtctactaccttgaaagtagtgatgatatcacaggtatatccacatgtcaaacgtatcaaattgyactttatatgcactttattcaatgtcagttttaccttaataaatctgtttgaaaagtttctaaaatgaagaagggcaagttaaagcatatttatat

SEQ ID NO: 428673 - DNA, 488 bp, Homo sapiens
ggaaacttcaaacctggtcattgcagaccactctttgaactagctcaaattggtttaggccagccaattcctaattcaaggaaagaggaataggattaataagattaactcattttaacaacattccatccctggaatgggggttgtcttggaagacacccaagcataataagggttcttactgagaataaggagtggagtcacagatactaggcagacaaccaaaaatgttgtcagggctaaagaaataaattgggttaatttttcaaacttctttatcctgaacctttgttcaatcgagagaaaaatggaaaaaagcaagaatattttttaaaaaatactctttgcttcasaaaatagtaagaaatataaccttacaacatcttattactagtgaggctagaaaaagaagagacaaaaattcacatcacattttgtatggttatcaaaatgataccccaaatgccaattccacatggcatccttag

SEQ ID NO: 428674 - DNA, 568 bp, Homo sapiens
gctatctactaagataagctacacaggcagagcagtagagtgtcccattttagaaagaatgaatttgatgtgctgcagatatccatatggtgctgcccatatggacatgacaagtaagccgttccatcagagcttggaagtgagttaatggtctagagatgcagcacacagcctgagacagggtggagaggttttgagctacggaatgccttgtttcagagaagccagtaggagcaggagagagctcaaggtggatgaaataaagatcaaaagagtggaacttacattgagcacamtctacaagcagaaaaaaatgggaattttaatttccatctaggttatccaactcatttttttaaatggaaaaaaagaggaatttgtagcagagctttgtccaaaaataaatgccaaataagtgccacacatatgtttagaactttacttttgctctatcctccaggaactgcagaatggaagagagaagcataaggatatgaaagccacaaatagcacagacgaaacaggacataggacaagaaacagcaaagtgtcatagaataaagaaaat

SEQ ID NO: 428675 - DNA, 500 bp, Homo sapiens
caacagtcatttaaactgtcctgaaatgtattcaagtcattagtagctgatttcacatakctaatcaatttgtagaacaattaaggtcaatttactgttcaatttaaggtcaatatcactgctgaaagaacaaaaaaagtttatgaaaactttgtcaactattccctgagatgacttgtgacttaggttaacttatctcatttgtaggtaatgtcaatatttattttcataaagataaaccagattatgtcttcaatttattatattcatgtatcagaaaatgctcctaactgaaactagtagtcaatcttgtgattgactgtgaattgattaaacaattgtgtgggaaacaagtataatacaaatgtacttcatcaaaaattattaatattttataaaaatgtttgatattatataaaatacatatctagctgtaaatgtcatgttctatttggaattattaaaaattgatcagttatttcttcttcaataccaggaga

SEQ ID NO: 428676 - DNA, 633 bp, Homo sapiens
agttgaatttaatagaataatttccttaacatgatataccagaataaataaagcattgctatttgaaaaaaagagccacagaattagaccgaagyttgcaagatgcaatactctattaatttagctgtagtttttcagttgtagacttctatgatgcttgcaccacagttctttgtgaatgggggatgtggactggattcaggtgaaagaaacaagctgtggcaaaccctgtgtacaactgcagcacacacaaatcaaaaagcaatctttatatgtgatggttatttagagtttgcaatgttctcatcagtaattcctatcttcatgcagaaacgactgacattgatgttatcatagacaaagaaaaaggaaatttatttccttcttagttctcactttttccctccactctttcatcttaagcccatcaccataacatcactggaagactgagggaaggccagagaattatttttgttaaattaatataatcacgctttgcttttgagtaatatgtgtacattttttacttgtccgtctacatgcaaacttcatatatgtagatcattttaaaagaacttatatgtgcacacatatcacaagtaaaattattgtaatagaattataaaaatt

SEQ ID NO: 428677 - DNA, 633 bp, Homo sapiens
agttgaatttaatagaataatttccttaacatgatataccagaataaataaagcattgctatttgaaaaaaagagccacagaattagaccgaagtttgcaagatgcaatactctattaatttagctgtagtttttcagttgtagacttctatgatgcttgcaccacagttctttgtgaatgggggatgtggactggattcaggtgaaagaaacaagctgtggcaaaccctgtgtacaactgcagcacacacaaatcaaaaagcaatctttatatgtgatggttatttagagtttgcaatgttctcatcagtaattcctatcttcatgcagaaacgactgacattgatgttatcatagacaaagaaaaaggaaatttatttccttcttagttctcactttttccctccactctttcatcttaagcccatcaccataacatcactggaagactgagggaaggccagakaattatttttgttaaattaatataatcacgctttgcttttgagtaatatgtgtacattttttacttgtccgtctacatgcaaacttcatatatgtagatcattttaaaagaacttatatgtgcacacatatcacaagtaaaattattgtaatagaattataaaaatt

SEQ ID NO: 428678 - DNA, 584 bp, Homo sapiens
ttcaacaggaatgttcaatcatcagaattgcacaattgctgaggtaaaaggaatctagtaaagatctattatggaaactgagtttcttaatttaaatgatggaattgtttttctggtttattccttaaatggcctgagccaaktgtttgactacccatagaaaaactgaccacagattctgtgttaaaatgtttggaaaacaaacttgaagaacagagatggtgcttgtaatctcacagctttccctgtatggccttcaatatatcactcttgttattaacacgaaacctgaggctttacttaaccttatttgataccctaatttgaggagcattatgactcatttacttcaatatcattttctcatactgttacatagtaaacatagttattacaacatatcttcatagagcatttgcaaaacaggaaaagaaatcataagtcaggttgttaccttcatatgcaatattacgtcttatattacattacattttatattacaatggtttgcaatataaaatgtgttttccctccttttctaataattcactctatcatttttctatctacctttccctactgtg

SEQ ID NO: 428679 - DNA, 620 bp, Homo sapiens
agctttccctgtatggccttcaatatatcactcttgttattaacacgaaacctgaggctttacttaaccttatttgataccctaatttgaggagcattatgactcatttacttcaatatcattttctcatactgttacatagtaaacatagttattacaacatatcttcatagagcatttgcaaaacaggaaaagaaatcataagtcaggttgttaccttcatatrcaatattacgtcttatattacattacattttatattacaatggtttgcaatataaaatgtgttttccctccttttctaataattcactctatcatttttctatctacctttccctactgtgccttcatggaatgaattgctcggcctcttttggttttaggcacagttgtctgtttcaagtaggacaatgaaagattagtaaatctcattggaattttcaccctagttttctatgtagataatcaagatttgtggaaatcatagagtactgacatttctctactccactatcctcaataatttttctagtggtaattctagttcctcaaaaattttggtttactgaacttagaaaatttgaaattacatgaaaatgatctccattagactgaaa

SEQ ID NO: 428680 - DNA, 534 bp, Homo sapiens
ttttccaacacttggtattttcaggtattgtaacatttcctcattgaatggatgaaaatagcatcaaattgtggtcttgatctgcattcatctggtcactaatgacttctcttcttatttttattgactatatatatttctttcttttgtgagatgcctgagcatgccattagcctatttttattgagtgtttaaaatatttcaaaataaacaccaataaaaagttatraaatcctacaaaagggaatatgattagtgtgttgagcagctgagaacaaatatatactcattaaatattagtataattacataatattgaaaacttaaaaacacaaaaactatcataccttcacatttatgagcacatatagcatccaagctgcacacttaaaaatattttgcaaggctgggcatggtggcttatgcttgtaatcccaacactttgcagggccaaggcgggaagcttgcttgaggccaagagtacaagaccagcatgggcaacacagcgagatcccatctctaattttttaaaaa

SEQ ID NO: 428681 - DNA, 608 bp, Homo sapiens
aatatatactcattaaatattagtataattacataatattgaaaacttaaaaacacaaaaactatcataccttcacatttatgagcacatatagcatccaagctgcacacttaaaaatattttgcaaggctgggcatggtggcttatgcttgtaatcccaacactttgcagggccaaggcgggaagcttgcttgaggccaagagtacaagaccagcatgggcaacacagcgagatcccatctctaattttttaaaaagatttttatagtatatacaaaaatggtacatactatggtactaaatatttggtactaatcatagtaaacaaggaaaacatgacaagggccattaatatgtaatactaaattataacagcttttcaaaactagagaacccaagaatgttgggcttctcaaagcccaaaaggctttatgrattttatggtaaaactatcttttcacctatttctgaccatatcacaaattgtatatattttagaaacaaaaaaaaattctaatagaattttagtcccaaaaggtataatatatagttaatataattttttcaagaatagcccaaaaaatatgactttcttctgcaaaatgaat

SEQ ID NO: 428682 - DNA, 593 bp, Homo sapiens
gggcttctcaaagcccaaaaggctttatggattttatggtaaaactatcttttcacctatttctgaccatatcacaaattgtatatattttagaaacaaaaaaaaattctaatagaattttagtcccaaaaggtawaatatatagttaatataattttttcaagaatagcccaaaaaatatgactttcttctgcaaaatgaatgtacatatgccttatacaaaatttatgttgaataaatgtactatgtttgtgttatgaatctttcttccttaacaaaaatgggctccttaactttaaaacacagagaaacttactttagaagtcccattttagcacaaggataaaaaatgttaaccaagcaattaaactggattgactttagtgcataagattcaggtgtgttcaattacaagtttgtcctgccaacgagcatctctttgaggtgtagctggttggcatgacagcaggacaggttgcaatggctggaatatacaaggtcagacaattctttgaaatttttcattctgtacatttatatctctgacccctcagaatgagaggtaaaataaacacacttgtgctaaagcaatt

SEQ ID NO: 428683 - DNA, 571 bp, Homo sapiens
tactctgcaaagcctctaacacagtgccgcgtacaaatagatcattaacaattgcttcataatgacgaaagggtttaagtacacatttatttctctcttttttttcacttttcagtgcacaagaaatatatacctttttttgtaataatgtaaatagtgatataaatgaggtgaagatacatagtgacacatccaagggttcagtgaatgaaagtctacaagagctgcctggattgaaagatgtctctggaaaatcaggaaaattgaatgtaattttctgatccacaagggtttattttgtytgtttgtttgcttgcttgcttgttttttgtttgtttttcatatcagaaagagtgaatgcagacgtaattgagctcataacttcaaatgagaaataagcagcagtcacaaatgaaattgtcatcaaagaacctattctcataggctgaatgattattttaaatgctgggggagtgaactggagagaagagagcaaagatgggagtgtctgagcaaaatgttctcccagggcccatcgcttctaacagagtcactatccattgtgatgcaa

SEQ ID NO: 428684 - DNA, 578 bp, Homo sapiens
acacaattatctatttttcttaatgttccccaactgctcctagcccatgtcttatgatcctatgatacttataatgctctctctttatatatgtatttgtgtgtaccatatgtataaatacataattatatatgtacatattgtacttatataatctcacaacaatcctgcaagataaaaactattttcttcactttatccataaaactggtaatcagagagattaagtccttggcacaaaaacactctcctagtgatttcagatttaacctgggcccatggctctgcacttactgcayggactcctacaattttttaccctaaacattggataagctgaagcttacagagagagctgtttctgggttattgcaaggaaaacactaccttgaatgatcagacttaccaagggtgctgggtctatcagcaaaggatacttgggttccttccatagcatcttggacaaaatctctgagatgtacactactgcaggtctcagtccatggacccaactatgctctgggcacaaagtgcaataccaaaacagcatgccctccctctcacagaccaagaatagg

SEQ ID NO: 428685 - DNA, 578 bp, Homo sapiens
acacaattatctatttttcttaatgttccccaactgctcctagcccatgtcttatgatcctatgatacttataatgctctctctttatatatgtatttgtgtgtaccatatgtataaatacataattatatatgtacatattgtacttatataatctcacaacaatcctgcaagataaaaactattttcttcactttatccataaaactggtaatcagagagattaagtccttggcacaaaaacactctcctagtgatttcagatttaacctgggcccatggctctgcacttactgcatggactcctacaattttttaccctaaacattggataagctgaagcttacagagagagctgtttctgggttattgcaaggaaaacactaccttgaatgatcagacttaccaagggtgctgggtctatcagcaaaggatacttgsgttccttccatagcatcttggacaaaatctctgagatgtacactactgcaggtctcagtccatggacccaactatgctctgggcacaaagtgcaataccaaaacagcatgccctccctctcacagaccaagaatagg

SEQ ID NO: 428686 - DNA, 622 bp, Homo sapiens
tttttattttggatgtgtaaagaggtcaactatttaagaagagatgacaaagtactttaaacacactttaataactggtcaagagggatgaactaacatttgcaagtattctataacttagaaaagatacattttaaagatcactttaaaaattcaagggagaaattgcgtttgttatgggaatgacaaayagatacataagggatgaactacaaatgaattgtactcttgttatgcaaatataagaacatagggctgttggtcaggtgtggtggctcacttcaggtcaggagttcgacaccggcctggccaatatggtgaaaccccgtttctactaaaaataaaaaataaataaaaatatagcaagatgtggtggccagtgcctgtaatcccagctattcagaaggctgaggcaggagaatcgcttgaacacaggaggcagaggttgcagtgagctgagattgcaccattgcaccccagaaactccatctcaaaaaaataaaaacaaacaaaaacagagggctgagctttgttactcttctcactgagtcaaccctattacctgtacctacaacagtgcctgacagctaggaggggctcaaaagtcatctgctgatgacta

SEQ ID NO: 428687 - DNA, 576 bp, Homo sapiens
actcattatgccttaataacatcatgaaggtgataacattattaccatattaatagaataagttctgattatttttaatgtcagctatagtaattgcattgaacataagacaaaatatgtgaaagtgatgtaaattcttatctaaaaatattttatatatatttctttaaaacatgcaaatcartaccaagtcatatattaagagaaaaagccagaaattcaaggtcaaagaatactttacattttcaagaattgaatttaggtcacctaaatctttttgaaattgttctcattactaatttacgatatacatgaagaaatagctgaattgcatgccatattttaaaaaaatatgtatcatatatttacttggctcttcttatttctagacatggagattaggggttttaagccagggaaggcctggttcatctcccacctcagcaactcagtacacacaaaatcttgggcaagccccttgggtttctgagcttctgtttcctcgtttccaaatagggacaatattgactacccctcctaccaaacttgttgtttaagttgtttcaagtatcaaat

SEQ ID NO: 428688 - DNA, 620 bp, Homo sapiens
cagaataatgtttactgatttgtccttaaaaatcccttttttaaaaatcgcattttcctgtcttctcaaaaacattaaataacatcaaggatgaatgcatgaaaaagtttatattttctcttttgcatttttgaaaaggaaccacaatataatcttattctgattattygatttatattctcccaaggccattactgcctcctggcatcattatatgcttgtgtaaggtttatatggtgtctcttttaattgcttaaactaatctattcaatgactgcaaatctaatgcacactggaacaggcagcccataaattccatccttcagaggtatccttgaacatgtgtttgtcctgatgaagagcagaaacaaaacaagaataataaaatgaaagaaagtcttgtcaaataatatatctgaaagaacttagaaacccaaaacatattttagttaaagaaataaaaataaattagtccttgctgtttcacatttttgtaaggaattattctaattacactcagttaagtcttcgagctattgttaaaggtgtaccatatggaaggataatattcgatcttaatatattagataatatatgatcttaatataattaatgttatt

SEQ ID NO: 428689 - DNA, 625 bp, Homo sapiens
tttctcctaattcccaccagccatatactgaacactatgatgccttttgaaataatgctttagtccttcagaaatctaaaggttcacttttatttttttaatcctttctagtaacataagttgatacaagcaagaacaaaagcaaactgttaaaatcaagatgcccaaacatggctatttaattaaaagaatgctcatgagactagacagaactccacagacagctagaaaaggaggaggaaacgaccaatattggaggtcctcaaagaaaaaggaagaggtgacagaatgggtgtctaggccagtgtttcaaaatactttgatcatgtacatgaatcagtttaaaaaataaaaygtgaagataaacctgctaatcatctattcatttttaatcatatccatgtactttcattgttagctaacctatcaaggcatgatacaaaccttgggtgaaagtcatcattcataacagatggacagtttaaataactgatttcaaataacctttacattttcaattttttgtattacttcttattggatcagatcatgttagtttttaaaaggtataatgtgtctgacctaaaacttattctaacagtagaggagccatttccccaaggtt

SEQ ID NO: 428690 - DNA, 454 bp, Homo sapiens
aactttataaaaccaaccctgaagcttgaatttatatttgtaagagtatagatccatagagaatggggtgggggagagagagagaaaggagtgcrtaagttcttttttttatagtgcactaaaagcaaacaaacaaaccctacactctgaatacatcatttcaaattgtgtttttgcaagtggagtgtttcatgttttgattttaaattcatttatgcaacttgtacagtatctaggagtaaaaatgtctcactttttaattaccgatttagagtaaaaaggatgttccagaataccctggaaatgtaccaccggctatgtagggggtgttgggcttgaacctcagctctatcatcatctgacttagtttcacagccttggtggccttctccgtactgtgtaagtttagaccaaaggatctcctctgcttatccaagtcgaaaatgtaagatat

SEQ ID NO: 428691 - DNA, 609 bp, Homo sapiens
caagtgctataatatcatccccctccaagaggaactttacaatgagtggaaagtaatacatttctaaataaacctgtggaagagcaattcagtaatcagtgagatacagttaatcacagaaaacagtctataagaggtgaattttgctacgtttttaaagaaaggataagaaggtgaaattggtagagaaaaatagggccttcaagaaaatatttctgttgaaagatagggcatgtacaaagtaagacaggagacggtccctctgtcctttgaggaaaaaaatacacaaagtgtctgctgcctactgtctcatccaatccatctaaytgatattcttcaattctaaaatcccctcattggcaaactacttttcagttgcatgcagttatttatttattttagttttaaatattggaggaaaaatattgattattcattttaagtaattaatagaaatgtatagaagatatggtagtagtctatgtaaagtagtcaatctaaagaacacataaactggagatgtatttaaagttatactgggcaactttcatatgggtatggtttgaggattatctgagccctttgggtgaaactcattttctctatgga

SEQ ID NO: 428692 - DNA, 563 bp, Homo sapiens
tgatccaaagacttagtctgtcatctttaaatgcttttccttacttaccagagacctttaataggtttgggttgggtcattttatttctcattctgttaatagattatctttatacttctycctctgtgataattaataaataatattttgctctttttgaatggtacacctttatatgtttagaatatataccatctatatgcttgacatttgggggatctcgtctaattttcaaaggaagaagaaaaatctggcttgcagggtgtttagagtacggtgatgacagcctttatgccaatttcacaagcattgcagcctgaatcataggctgtactataaacggcagcatatggctggagagtcatagcagcaggataacgtggtagtgcccagatcacagctgtaggcacataaagaaagttttgatgctggtatccatatccctccttctcatcaacaacaaaaaggatgactacttaagattctgttgtcttaaaggctttattaagttattgcccaaggtaggaaagggatattattgtctacatatgtttgccagaat

SEQ ID NO: 428693 - DNA, 553 bp, Homo sapiens
tgttttcaaggtatagtttcaggttattgatagtttgttattgtcttgcattttaattcttgttagtttggagttttgttgttgttgctgttattgttgctgtcactgaccataagaaaatgggagaattatgttcagatgctgaaattcaggagccaatttaaatgataattttcagatagatcttgtaaggtatttagggtaaagtaactctgcaaaccaaatacaaaaaaaaaacaaacactgatttttctccttgcttaggattatccatctgcaaaataaaagcaattgcaatttctgcatgactgcaagaaaaatagatactattccttagtatgctattttacaagtttcttaaaggtacctattgtgcagatatatgtgwttaaaaagtaaaatttattatgagacattcacatatgctcctattttagtttttctacatagactacaaaatataattattcagacttcttttgtagaagtatgtgaattatagatcagagatttatgtaaggatttatatatggattgcttcttttcttagttt

SEQ ID NO: 428694 - DNA, 620 bp, Homo sapiens
gtaattttattttaaataataattatcagatgaacaggctgggagatattcttatggttttaagcaagggaaatggctcttaacttcatataaatgtcttatttgaaaatgtcaaatggattcagaatgttctccttgacaccataaataactattcaaaataatattttaagtggaaattttaataatttagtttattttttgtttttattttttgagacagggtctttgtctgtttcccaggctggagtgcagtgctagaattatagcttattgrgctcaataagttcttgggctcaagtgatcctcctgcctcagcttccctggtagatggaactaaagtgtgtggcactatggtcagctaatatttatttacttattgtagagacagggcctgactatattgtccaggctgttcccaaactcctgggctcaagagatccttgcaccttgggaacttttatttctaaaacccaagtaaagtctttacttcctaagaaatgaaagttgactgggaaatatttcttagttaattgaggccatagaaatttgttcaggattgcaatatgaaaaattaaaccttgtattttacaggtaatcttttaacacgtagtctgatg

SEQ ID NO: 428695 - DNA, 531 bp, Homo sapiens
tgtgaaaacaaacaaacagaatccgaaacaaaatgaattctgtatttcagaagtaaagcacccttttcataaaggaaataaaatattttcctccatggaaaataatagtgtttcaatgaaggatactaataaatttcactagcataaatggaaacaagaaaaagatgtaacataaaaatcatagtgcatattcatgatattaagagaagtctcatgcattaatgtttaggaaggtagataaagatagattattgtgtttaagtatatgggktttttttaaatttaagatcatattcttccaatttggtggcagttttaagtctgtatttgatagaataaatgtttttgtctaatgttacaatgaaaggcagtttcatatactccagattttttgataaatatattaggataatgaccagtaacctctacataatgttttatgactggtgacctagcagtgagcacattataaccagaggattctggaagaagaaaggcaaagatattccctagaaaaacaaatgtttcgat

SEQ ID NO: 428696 - DNA, 531 bp, Homo sapiens
tgtgaaaacaaacaaacagaatccgaaacaaaatgaattctgtatttcagaagtaaagcacccttttcataaaggaaataaaatattttcctccatggaaaataatagtgtttcaatgaaggatactaataaatttcactagcataaatggaaacaagaaaaagatgtaacataaaaatcatagtgcatattcatgatattaagagaagtctcatgcattaatgtttaggaaggtagataaagatagattattgtgtttaagtatatgggttttttttaaatttaagatcatattcttccaatttggtggcagttttaagtctgtatttgatagaataaatgtttttgtctaatgttacaatgaaaggcagtttcatatactccagattttttgataaatatattaggataatgaccagtaacctctacataatgttttatgactggtgacctagcagtgagcacattataaccagaggattctggaagaagaaaggcaaaratattccctagaaaaacaaatgtttcgat

SEQ ID NO: 428697 - DNA, 577 bp, Homo sapiens
gccttggcctcccaaagagctgggattacaggcatgagccaccgcgcctggactggaggtcatatttcaacatgagatttagagggaacaaaacaaccaaaccatatcaggatgaaaagaaagaaaaaataaaaattctgggccaggttacatgaaacactagaatagaggatgaaacctgtcagtttgtgtttgtttgtttgtttaattctcttagcactcacaatgcaatcataaagatatgtagatgcagattgtgatttttgatattatacaatgagagtgcaaagtgatatgagaaaattttatrtgaagaattatctaaattggacacccactggggccttcagggtaaataatgattaatccagtttagagagtggcaacagtgtccacaagtgagaagagaatgtgccagggcccgaggaacaaatcaaggagattagaagagggcaggaatagcaaggagatgataatctggagattgttggtttaaggagttcttggaattgaagaaaattaatagcaatgtgtcaaccaatagagttgttccttgggaaactccataaatgggtct

SEQ ID NO: 428698 - DNA, 609 bp, Homo sapiens
taaagttatatttactcaattatatatgagtgatatataagcagtaaaggcaggattttgggggtagggaataaggatttcagttggagataataaaatggagatgagattattcagaagcaaaatctggtctggagatatattaatacatttttgaatcattagtgtattaggaagtgtcataggtcctagggagtaaaaaattcctggggcackcttgaatttagagttacagaaaagaaagaatagttgacgaaaagagaagcaagtgaaagcagaggtagaaggggaactgagattttaccatagtagcagtggataatacaagtaaaattgttcattatgattgctgtgaaatatatgtccaagtttcttactttgttggagctattgaatggttggatacagtaataaaaaacacaggaacaattggtaatcccttttctttctatatccatctctcaaaattattggttcattttttagaaaaagtactattgctgttttcatgacccacagaattaatgtgatatattttcttttaaatttatttttgtatagcaatagcttatagaatccaaaatgccagtgttaattcatatcataaaa

SEQ ID NO: 428699 - DNA, 526 bp, Homo sapiens
cagtgttcccatgtatttgaatagtttattccgttctattactgaatagcattctactgtgtaaatataacaagcttgttgataaacctgttctggactacgtcttggctattgatgggcatttaggtagttttttcttttgttttttttttttttttttttttttgctatgataaattaagatgttatgaacattggtacacagctcattgtatggataaataggtttcatttcttttggataaatgtctggggtagaatggttagaccatatagtacatttgtttaactttttcaraaactgaaaagttggctttcaaagttgatgttctaatttacagtccctgcagcactgtaaaaagtttgagtcccccttcagtctcaccaggtctatctaactttacacgttttaatggataggtagtgatatttcattgtggtcttaatttgcatttccctaatgactaatgatattgaacatcatatcatgtgcttacttgctatatctgtatcttctttggttatg

SEQ ID NO: 428700 - DNA, 587 bp, Homo sapiens
agataatttaaagttataaatcattacgttttaacaataggaatgcacaaatcagatgtatgattaccctatctatggccaaatggccaattaaaggaaaacaaaaagtatatgggtgatggttacactaaaagcccagacttcaccaccacacactgtgtcaatgttacaaaacttcacttgtaccacctaaatctatagaaatacaataaaataaagataaaacatgatttacgtatagttctacttgatatgtttctttcacctggaagcagatgggcattgcattacagcccaactcaggkttagctcagaaagaaattgaaatataggtaaaatttcaagaagcacatttgattatcttccttgtgtaaagaaaaaagtcacctgagataaagatctacatttcctggattagagattaggaaagaacaagattaaaatatctgtcacatggagctctggggaagagttatgtgtatggaaccgtaagcgtaggcacaggatgtgaggatatgtttttcatgtaacttctcatctactaccaaggagactttcaataatcaagtggacaaaatgacacatcc

SEQ ID NO: 428701 - DNA, 569 bp, Homo sapiens
aaacattcaccctttgtttggagagaacgttcttcctgcctctttggtgataaaatactttattctgaaatggtgataataggtcatttttattatacatatatattttaagttggctttctaccttagtcactaatgttttttagaaatgttttacaaatagtwtactaaaaatgtacagtttggctgggcacagtggctcacaccagtaatcccaacactttggaagaccaacgcagcaggaccacttgtacccaggaattcaagaccagcctgggcagcatatggagaccccatcttttcaaaaaaaatttaacaattagctgggtatggtggtgcacacctgtagttctatccactggggaggctaaagtaggaggattgcttgagcccaggaggtcaagcctgtagtgagctgaaatcgcacccctgtgctccagtttgggtgacagagcaagactctgtctcaaaaaaaaaaaaaatgggttattatgcatcagctataatcaataaagtttttaaaaagatttcccatcatgaaatctgtacacctgtcaatgcctgctgtg

SEQ ID NO: 428702 - DNA, 602 bp, Homo sapiens
tatatttagagagtcacttaggtgggattttctaagcacttttattttaactttcatgaaaaatttcaaacatacagaagtagagagaatattataataaaacttccatgtatccatatctcagcttcaacagtkgtcacctcatagacagtaatgttttatctgtatttgtacttgctctacttgctccttctaaattattttgaatcaaattccacatctttcataaatattcccagatatgtaatatatagtgattatttttaaaacaaccataatactcttatcacaccttaaaaattagcagcaattacctaatattatcaaacacacagatataaagcatgtaaagatgctgctatcttttagcaattgaaaaattaacatttcagaatgtgattagtgttaaagtggtttttgtcttgtgaacattgggaaggggagaacgcatgggaaaggtctttttaaattctgtctgagacagtattcttagagttctgggttttttagtcttaaactaaaatgaattaagtctcaatttgctatcaaaatatacaagctgttatacattggccactaaggtgaagtgcaagcacacttgt

SEQ ID NO: 428703 - DNA, 613 bp, Homo sapiens
aaacaaccaaccaaaaaaacacaaaaaccccaaacaaccccaactaatagtgactttatcactaaagatatttaattatctcacataacaagaaattgggaaaaaggcattctggctagtctagcagcttagtgatgttatcaagcagccaggtatttttcattattggaggtagcctttttatccttgtgcttgttgctcagtactttcaagatagctgtgtgctctaggtatcacaaccagttgaaagacaagaagagcaactggtgaggaatggcatggagggcatggcagggacagtctatctaccagtttccttccgcagctctctcttctttgcagcataggattaaatttcctagaagcccccatcagtcttccatacacctctttgtccagaactaggtcacatggctagtactagttgcagtggagtttactgtagctctaatgtcctcttaactgtgttaaacattgcttcattttaaaayactcttaggaaggaatgaaacaaacatggcatgtatcaattaatattgagtttagcaattagtaactgcaaaatcacacttagtagattaaaataagtaaagagtttatattattctgcaac

SEQ ID NO: 428704 - DNA, 537 bp, Homo sapiens
actgttggtgggaatgtaaattagttcagccactgtggaaagcagtttggagatttctcaaagaacttaataaagaactaccattcaacccagcaatcccattactggatatatatacaaaagaaaataaatcattctaccaaaaagattcatgtaccccacatgttcatcaaagtactcttcacaatagcaaggacatggaattaacctaggtrtccatcaatggtggattggataaagaaaatgtagtattccacaccatggaatactacacagccataaaaaggaatgaaataatgtcctttgcagcaacatggatacaactggaagccattatcctaaggagtaaatacaaaaacagaaaaccaaatattgcatgttctcatttatattaataagtgggagctaaacactaagtactcatggacatatatgtggccaacaatagacactggggactactatgaggggagggacggagggggcaagggttgaaaactaactcttgggcattatgctcattagctgggtgattag

SEQ ID NO: 428705 - DNA, 491 bp, Homo sapiens
ggcagccttcagaatcatggcagattcagagagactcccgggataccttctggtcagagcaaatttatagacaaaaaaaaaaaaaaaaaaaggaaagtgacatacagaaaccagaagtgaggtacagaaacagatggattggttacagcttggtgtttgacttatctgaacacagtttgaacagtcagcagcatatgcrttgttgaagtatggatgctgggattggctgagattgcagctattgttacagaagcatactcctaaattaggttttctactaagtctacttacttgtctacctactaagttaggttatggttcatcctcaaggacttacgtatggaagtatggaggttttctcaggccacatttagttcaatttaacaagaacaagatatacagactgtgtaccctgcactactccggaatgtctcctataccaagtttccctttaaaagtcctatggtaaattttaaaatgtaagatggtat

SEQ ID NO: 428706 - DNA, 587 bp, Homo sapiens
aattttaaaatgtaagatggtatttagaacactagattgccatcttctcaggttgctggttctccgattaaacctgcttttcctcccaccaaactttgtctcttgcgttctgtctggctttctaccggcaagcagccaaacctagagtaggttacattactttgttttttgtttgtttggttgttttgttttgtttttttgagatggagtcttgctgtttcccaggctggagtgcagtggtgtgatcttggcttactccygggttcaagtgattctcctgcctcagcctcctgggtagctgggattacaggcgcgtacccccatgcccggctgatttttgtatttttagtggagacggggtttcaccatgttggtcaggttggtcttgaactcctgaccttgtgatctgcctgcctcagcctcccaaactgctgggattacaggtgtgagccactgcgcccagccacattactttgaaatgtagattcaaccatataaattaggaacaattttatacacagaaatttgtggtacatgtatgaattttaaaaacataccatgaacatatgctcacatgtttaaaaagt

SEQ ID NO: 428707 - DNA, 634 bp, Homo sapiens
tgtttgaagtctcacaggcaacacaccttggcatcatgaagtagaatgccatccccagccacctccaagccttcccctkacatctgtacagatctttgattcctgttagagccctaactcacagtttccttcccggcaggcttgtagagcgatttacactggccgtgggaaatcacgtcttttctaccgattgcactcattgtgcgatcctctcagggattctgggtgagctgatatgagggacatttgtgatgggattgaaagccaagccgtgcatagacagagttagctggagaagagactcctgcaatacactatctcctgcaaaaactggagcagatttgggggttgcattcctgtctgaatggagacaacgatggaaccaagttgcccgattctgtgcagatcatatgaggaactacattgtttgtcatgctaattaatacacagcttctacactggatcccatgacctcaggggaggggctgactgggtggggaactagtggggtgtgagtaaccaaattcccttggaagaaaggaagagtgagcttgtgggttgagaagggtcccagcgaatgtaccttctcatatggctgtgagaaatagtaattcattattttttaatcattacc

SEQ ID NO: 428708 - DNA, 634 bp, Homo sapiens
tgtttgaagtctcacaggcaacacaccttggcatcatgaagtagaatgccatccccagccacctccaagccttcccctgacatctgtacagatctttgattcctgttagagccctaactcacagtttccttcccggcaggcttgtagagcgatttacactggccgtgggaaatcacgtcttttctaccgattgcactcattgtgcgatcctctcagggattctgggtgagctgatatgagggacatttgtgatgggattgaaagccaagccgtgcatagacagagttagctggagaagagactcctgcaatacactatctcctgcaaaaactggagcagatttgggggttgcattcctgtctgaatggagacaaygatggaaccaagttgcccgattctgtgcagatcatatgaggaactacattgtttgtcatgctaattaatacacagcttctacactggatcccatgacctcaggggaggggctgactgggtggggaactagtggggtgtgagtaaccaaattcccttggaagaaaggaagagtgagcttgtgggttgagaagggtcccagcgaatgtaccttctcatatggctgtgagaaatagtaattcattattttttaatcattacc

SEQ ID NO: 428709 - DNA, 575 bp, Homo sapiens
tgcaacagaaatggtaaagaaaattaatatgaactgacgtctttgatgagagtaagagtagtaagactatgtggggaaaaataatctgaacaatttgaatcaggttctattgactcartgatcaagccctagaatataaacccaaggagggctgatatgtttatctgttttgttcattaatgtatcccaagggttgagaacaatgccagacatattacagatgcttagcacatgtttgttgaatgaatgaaccttaatatgttaaaaaaaaaaaagaggaggcatgaaactccattatattaggccaattcattctccagttcatttactctatgttttccccaactgtggtgccacacaatgatacttttgatcatacagtttaaaggacaaaaaggtagagaataaaatgccttttcccttcccctaccttgagctccttttccatacaacctctgaatatttgggcaataaagtcaaaagtctgcagctggagaacagtggtatcagtttcatgtacttaatgtgtgaatgcagtatgtaattgcaagagaaaagagaaagtgctagctttc

SEQ ID NO: 428710 - DNA, 588 bp, Homo sapiens
attaaacagctttgcctttcctatcttctactctagtaatctttggcattaacatraaatttctgctgtgaccaaacagccttgccgactttacagcatgtaaagaatcccattcatcctgagctgcctgggagataaaggtgggaaatgggtgtaatgtttagtgatacacaaatattgctgcccaatgatcagaatacagattccacagattcaccttccttaaacgtttcagtaatgttttccttattttattttataatatttattttttaagaaatggttagggcatggatttagcttcccaattagtaagtaggtgaatcagtctacatttcaaatgtgggctgtaccagtccatctacttagcttctggagacagcttcaacaaaacccagaacaggctgcactcccttttgtcctgaccccaatcttgcttatgaaagagaacacttttagatgtgaaaaaaatggcaaataatgagttgtttctctactctggacttcttgtgaaatacaactacaattccttcatctctccctagtccctaagtttaagctgatgtcactaatgtgatcacagtgctc

SEQ ID NO: 428711 - DNA, 588 bp, Homo sapiens
attaaacagctttgcctttcctatcttctactctagtaatctttggcattaacatgaaatttckgctgtgaccaaacagccttgccgactttacagcatgtaaagaatcccattcatcctgagctgcctgggagataaaggtgggaaatgggtgtaatgtttagtgatacacaaatattgctgcccaatgatcagaatacagattccacagattcaccttccttaaacgtttcagtaatgttttccttattttattttataatatttattttttaagaaatggttagggcatggatttagcttcccaattagtaagtaggtgaatcagtctacatttcaaatgtgggctgtaccagtccatctacttagcttctggagacagcttcaacaaaacccagaacaggctgcactcccttttgtcctgaccccaatcttgcttatgaaagagaacacttttagatgtgaaaaaaatggcaaataatgagttgtttctctactctggacttcttgtgaaatacaactacaattccttcatctctccctagtccctaagtttaagctgatgtcactaatgtgatcacagtgctc

SEQ ID NO: 428712 - DNA, 588 bp, Homo sapiens
attaaacagctttgcctttcctatcttctactctagtaatctttggcattaacatgaaatttctgctgtgaccaaacagccttgccgactttacagcatgtaaagaatcccattcatcctgagctgcctgggagataaaggtgggaaatgggtgtaatgtttagtgatacacaaatattgctgcccaatgatcagaatacrgattccacagattcaccttccttaaacgtttcagtaatgttttccttattttattttataatatttattttttaagaaatggttagggcatggatttagcttcccaattagtaagtaggtgaatcagtctacatttcaaatgtgggctgtaccagtccatctacttagcttctggagacagcttcaacaaaacccagaacaggctgcactcccttttgtcctgaccccaatcttgcttatgaaagagaacacttttagatgtgaaaaaaatggcaaataatgagttgtttctctactctggacttcttgtgaaatacaactacaattccttcatctctccctagtccctaagtttaagctgatgtcactaatgtgatcacagtgctc

SEQ ID NO: 428713 - DNA, 557 bp, Homo sapiens
gacgtttgagtagggaaattaatatctcaagactttcagtagggaagaaggaggtgaacttggtcaaaagttagaaaactttcaagaggctgtttgaaaagtgtaaataattttattwtcactttccttccttgtaagagatacttgagggatatgaatttggtgagagacaggaaaagaagaccctcatggtatgctgtcgcaaacaacaacagtagcaagataaaaactgttataagttctatagattgtatttgcccagaagtttctcaatttgtaccagaagtcctgaagttacgtgtcctggaaagaacttccttcatatagttccgttcttatagacagcaatatcatatctttaggttctgaatctgtgtttttcccccccctcaaaactaggaaatactttggtaacagaattgaaaaggagttgtgctttatcatttctgttttgccaggaaggcattcttattcctagtggtagcaatatccaatatctgtctatcagataacaacaacaacaaaaaaaaactaaatcacaagtgtgaatgcccgtt

SEQ ID NO: 428714 - DNA, 518 bp, Homo sapiens
aacaggttagtttgtattctctggagtttagagaatataaatgaaataatacatatgtactcttcatctggcttctttcactcagcataatgattttgagagtcaccctaattgagcatattatcaatagttcattcatctttattgtaacagtccattgcatrggtatatcacaatttgcttatccattcacctgttgataatgtctgtgttctttccagtgcttgactattgcaaacaaagctgctataaacatttgtatacaagtctatgtatatatggacatatatttccttttcttatgggataatacctaggagtggaatggttgagccatacagtaagtgtttaacttttgaagtcactgccaaactgcattagcagtttatgagaactccagttcatcctcgcccatattttgtatggttttcctttctaattttagcaattctaatacgtgtgaagtggtagtgtattgtggtttttgatttgcatttccctaatatctaatgatgtgg

SEQ ID NO: 428715 - DNA, 633 bp, Homo sapiens
tgtacttgtactggagtgtgcacaccgggctttcttccctccgggtggaacaaagtctgcagtgtaatgataatgaatgttcccagccctgtgagttcaggctgaggctgaaccctcatgacaaactgcaccctgctgggtgtttactccttccctaccttgcttttccacttccccactgttttttccttggcacatttcctcaatcacttgaactcaaatcctcatctcaggatgcactctggggaaccagatctaaggagtgaatgaacaaagactttcttgcttttctttgtcaagggatctgtaagtttctaccattgtcagaagctaagccaccccacccgcctacccaagccctgctatcccctgagagaggcagagcagagctttcggcaccagctctctcccactctccccacactaccctcttcctagggcaaatccttgtcttgctcaggtgtaaytgtaatttctagtcattgttatctggatccattcctgtttatgtcataaaacaggtagttaacgtatcaggctaaatgtctatcagatgaaaactggcagaaaattaagcaaagatctttaaagagtgtaacataatagcagaaaatgtttgaggatataagaaaa

SEQ ID NO: 428716 - DNA, 633 bp, Homo sapiens
tgtacttgtactggagtgtgcacaccgggctttcttccctccgggtggaacaaagtctgcagtgtaatgataatgaatgttcccagccctgtgagttcaggctgaggctgaaccctcatgacaaactgcaccctgctgggtgtttactccttccctaccttgcttttccacttccccactgttttttccttggcacatttcctcaatcacttgaactcaaatcctcatctcaggatgcactctggggaaccagatctaaggagtgaatgaacaaagactttcttgcttttctttgtcaagggatctgtaagtttctaccattgtcagaagctaagccaccccacccgcctacccaagccctgctatcccctgagagaggcagagcagagctttcggcaccagctctctcccactctccccacactaccctcttcctagggcaaatccttgtcttgctcaggtgtaattgtaatttctagtcattgttatctggatccattmctgtttatgtcataaaacaggtagttaacgtatcaggctaaatgtctatcagatgaaaactggcagaaaattaagcaaagatctttaaagagtgtaacataatagcagaaaatgtttgaggatataagaaaa

SEQ ID NO: 428717 - DNA, 607 bp, Homo sapiens
tcagaattaaccaatcaggaaatgcttggaaagtccacgcctcagcatttagtgcttgggaaattctacttccagatcccagaggggacagagcagatttccagtgagcattcctaacttgaaaaacctgtccttgaatgtttctccttagtcctagagatgctctttcagaatgtgaacctcctgygtctgtgacgagatgtagaaggtctatactcagagttagtaggatgtccacgtgatagtgcctaggcctgccttatggcagttttgagaaaggtgatttcagagtggcttcagaggggatgactaaagcccacaatcttggtccaaaatatcctaatctccctacaaaaacgattttcttgccttggactatgtccagtctgccaactagtacagctgtttctggtttttgactcactgatttacctggcatgacatttcctcttgtttcaagattctttctctaagttcctcctgactcctctttccctttaagtattcctgaaactggctcttgcctggtccctttatttcattattcttccatcttgctggtagtatggtggaaattggacatagggtttggtgtcagatacacctg

SEQ ID NO: 428718 - DNA, 534 bp, Homo sapiens
tgcccttactgggttatttctgtggaatttggaaggatctttgaattgaagatgtggtgggagcgcgcagagaacagagaatccgtaagcttgagtttcttagacccagtttcttaaagccaaagtagcggggagatcttggcaagtcaagaaaccttcttgaacttcagttcccttgcctcagggggagaatactccagccataccccactgtgtggtttagaaggttaatggcctggagggagggaagtgttttgaagcctataaagtatcctgtgaaggtatcaccacattgctgcccactgaaacactgccggccgccgacagaactttgtttggagccgagttaagacagcatctttawggcagtgctggggttttcgtgattaccggtccagagtgtcaggacacctctgtttctcaaaccccagtttctgcactgccacatgaaactgctcattactgagtgacagcagaggacaggaactttgccttcttcattaacttctttagggcctttacaaagtgggagat

SEQ ID NO: 428719 - DNA, 581 bp, Homo sapiens
agctaccatcaatttacacccaaccactatttataaaaatacctatttcagacaaggcattatactaaacacaaatacaaagaagacaatttctcagccatctaagagtttaaaatctcatgaaaggctgggtgtggtggctcgtgcctgtaatcccagcaatttgggaggccgaggcaagcggatcacctgaggtcaggagtttgagaccagcctggccaacatggtgaaagctcgtctctactaaaaatacaaaaattagctgggcgtgatggtgtgcggctgtaatcccagctatttgggaggctgaggcagaagaatggtttgaacatgggaggtagaggttgctgtgagccgagatcgcaccactctactccggcctgggcaacagagaaagactccatctcaaaaaaaaaaaaaaaaaaaaaaaaatctcatgaaggagctgagatacgaacagacctaaaccacatacacacacaaaaaacacagttgcattgcatgggccttgagaagttctgaggcaaggttctrcactacacaactccagggaaagacgagcatgcagatggcactggagc

SEQ ID NO: 428720 - DNA, 568 bp, Homo sapiens
tatatagctgaagaaatgggagacaaaaggagggcttctctgcctccccagggtcttggtttgcctggaggatggaaggaaaatataagaarcacttgcagatagcatacagtctggctttgaatgatcagatgtgaatatgtttcttgggatttgagggaggttggacaaggggtaggtgtggaagtgcagagtgagttggagaaagaagtctggcaaagaagttgtaatgactcaggaaagggaatagggttgtctctttccctatgggtagaggtagatattttaggaaaaaagagagagagagaaaaaggataaaattttgttatgatccccccaaaacttgttatgtaagatatatatctactgataggacattttgaaaattagtatcagctttatatttgggcacatgatttcactgagatggttcttgggcagagcagattaaaatgatgttcctgaaatgaaactagagtctccaaaataattggctcattttaagcaaaatattattgatgatcaacagtgactggcacataataattgtttaaatatttgttggcta

SEQ ID NO: 428721 - DNA, 568 bp, Homo sapiens
tatatagctgaagaaatgggagacaaaaggagggcttctctgcctccccagggtcttggtttgcctggaggatggaaggaaaatataagaagcacttgcagatagcatacagtctggctttgaatgatcagatgtgaatatgtttcttgggatttgagggaggttggacaaggggtaggtgtggaagtgcagagtgagttggagaaagaagtctggcaaagaagttgtaatgactcaggaaagggaatagggttgtctctttccctatgggtagaggtagatattttaggaaaaaagagagagagagaaaaaggataaaaytttgttatgatccccccaaaacttgttatgtaagatatatatctactgataggacattttgaaaattagtatcagctttatatttgggcacatgatttcactgagatggttcttgggcagagcagattaaaatgatgttcctgaaatgaaactagagtctccaaaataattggctcattttaagcaaaatattattgatgatcaacagtgactggcacataataattgtttaaatatttgttggcta

SEQ ID NO: 428722 - DNA, 568 bp, Homo sapiens
tatatagctgaagaaatgggagacaaaaggagggcttctctgcctccccagggtcttggtttgcctggaggatggaaggaaaatataagaagcacttgcagatagcatacagtctggctttgaatgatcagatgtgaatatgtttcttgggatttgagggaggttggacaaggggtaggtgtggaagtgcagagtgagttggagaaagaagtctggcaaagaagttgtaatgactcaggaaagggaatagggttgtctctttccctatgggtagaggtagatattttaggaaaaaagagagagagagaaaaaggataaaattttgttatgatccccccaaaacttgttatgtaagatatatatctactgataggacattttgaaaattagtatcagctttatatttgggcacatgatttcactgagatggttcttkggcagagcagattaaaatgatgttcctgaaatgaaactagagtctccaaaataattggctcattttaagcaaaatattattgatgatcaacagtgactggcacataataattgtttaaatatttgttggcta

SEQ ID NO: 428723 - DNA, 537 bp, Homo sapiens
attattaagataaatagagctttgttgattcccttcccctagtgaatggattcctccccacacattcacaaatttggtaatagagaatatgttaccagagaaaaaggaatacttttattgattttttcttttttacaaacatcatgtgcaagcaccacagyatgattttatgctatctttatcccagaatgagtgaaatgttaaattttatctaatattggcttctaggggcaatagggagtgaaatagattaaagtggattatctcagaggcggggcagattgaaattccagtgctttgatgtgggagacaggtgtagtatggcattagaaatagtgctggaaatcctaaactgagaccattaggtatttgaatgctgtttgcatgaataataccaaataatttgcatatatatgtctttgcagaggctgaaaatgaacatgtagcacttctgccttgggattctaagcaaaggccttgttggctgaatgttgcctttgggaggaaagatcattctaggggagtttactattgaac

SEQ ID NO: 428724 - DNA, 562 bp, Homo sapiens
aaaatatgacagataaaaatatcccagcatcacagtccttgtactttggggctgttattaagtaaaataaaataagggttacataaacacaagcactrcaattccatggcaatcaatctgataaccaaggggtctactaagtgactaatgggtgggatgatttatggccctggtccctgggcaggacagagtggggcagcatgaggtttcatcatgctactcaagatgatgtgcaatgttaaacttatgaattgtttatttctggaattttacatttaatatttttggaccatgaaagtaactgaaactgaaaagtcaaaccacagataatgagagactactgtaattctctgtactttctgctctattgtggcatgagcttaactgctctaaataaaaataaaatctttaaaagtaaaaaaaaaaaggtggcttatttcatctacatataaaaatatatatgcatatatggtaaatgttacatttttttaaagtagaatatggattatgagcggttcccatggtaatgcctcatggtgcagtattgtgggcataacgacac

SEQ ID NO: 428725 - DNA, 562 bp, Homo sapiens
aaaatatgacagataaaaatatcccagcatcacagtccttgtactttggggctgttattaagtaaaataaaataagggttacataaacacaagcactacaattccatggcaatcaatctgataaccaaggggtctactaagtgactaatgggtgggatgatttrtggccctggtccctgggcaggacagagtggggcagcatgaggtttcatcatgctactcaagatgatgtgcaatgttaaacttatgaattgtttatttctggaattttacatttaatatttttggaccatgaaagtaactgaaactgaaaagtcaaaccacagataatgagagactactgtaattctctgtactttctgctctattgtggcatgagcttaactgctctaaataaaaataaaatctttaaaagtaaaaaaaaaaaggtggcttatttcatctacatataaaaatatatatgcatatatggtaaatgttacatttttttaaagtagaatatggattatgagcggttcccatggtaatgcctcatggtgcagtattgtgggcataacgacac

SEQ ID NO: 428726 - DNA, 562 bp, Homo sapiens
aaaatatgacagataaaaatatcccagcatcacagtccttgtactttggggctgttattaagtaaaataaaataagggttacataaacacaagcactacaattccatggcaatcaatctgataaccaaggggtctactaagtgactaatgggtgggatgatttatggccctgrtccctgggcaggacagagtggggcagcatgaggtttcatcatgctactcaagatgatgtgcaatgttaaacttatgaattgtttatttctggaattttacatttaatatttttggaccatgaaagtaactgaaactgaaaagtcaaaccacagataatgagagactactgtaattctctgtactttctgctctattgtggcatgagcttaactgctctaaataaaaataaaatctttaaaagtaaaaaaaaaaaggtggcttatttcatctacatataaaaatatatatgcatatatggtaaatgttacatttttttaaagtagaatatggattatgagcggttcccatggtaatgcctcatggtgcagtattgtgggcataacgacac

SEQ ID NO: 428727 - DNA, 562 bp, Homo sapiens
aaaatatgacagataaaaatatcccagcatcacagtccttgtactttggggctgttattaagtaaaataaaataagggttacataaacacaagcactacaattccatggcaatcaatctgataaccaaggggtctactaagtgactaatgggtgggatgatttatggccctggtccctgggcaggacagagtgggrcagcatgaggtttcatcatgctactcaagatgatgtgcaatgttaaacttatgaattgtttatttctggaattttacatttaatatttttggaccatgaaagtaactgaaactgaaaagtcaaaccacagataatgagagactactgtaattctctgtactttctgctctattgtggcatgagcttaactgctctaaataaaaataaaatctttaaaagtaaaaaaaaaaaggtggcttatttcatctacatataaaaatatatatgcatatatggtaaatgttacatttttttaaagtagaatatggattatgagcggttcccatggtaatgcctcatggtgcagtattgtgggcataacgacac

SEQ ID NO: 428728 - DNA, 540 bp, Homo sapiens
taacgttgataggtgagttttatagcaaaaatctgtcagaaaatattagggaaatagaaatgacatatttaagttacaaattattagagaaaataaagaaaaratttaaatcaattaaaacataagaaaatagaaaaaccacattaagggatggtataaacagaaattacataagatatttgagaaataacagtaatataataattattaataaaaaagacctagaaaagacaaagattataaaactgcattaaactactaaatttatttatatattttttaaataaacatacataaaaacaaagaacaaattttcagaataaaagagtgataaaagatgatctagccaaatatgtagtaactggaaatagcggagatagccacgtttatatctgacaatatagactttacataaaatttttactagaaaataagaattcaaattacccttaaatatctaaatcttttaaaatgtataaatgtaaatattcctaacagcacatcttcagaatatatacattaaaaatttatgttctggtt

SEQ ID NO: 428729 - DNA, 540 bp, Homo sapiens
taacgttgataggtgagttttatagcaaaaatctgtcagaaaatattagggaaatagaaatgacatatttaagttacaaattattagagaaaataaagaaaagatttaaatcaattaaaacataagaaaatagaaaaaccacattaagggatggtataaacagaaattacataagatatttgagaaataacagtaatataataattattaataaaaaagacctagaaaagacaaagattataaaactgcattaaactactaaatttatytatatattttttaaataaacatacataaaaacaaagaacaaattttcagaataaaagagtgataaaagatgatctagccaaatatgtagtaactggaaatagcggagatagccacgtttatatctgacaatatagactttacataaaatttttactagaaaataagaattcaaattacccttaaatatctaaatcttttaaaatgtataaatgtaaatattcctaacagcacatcttcagaatatatacattaaaaatttatgttctggtt

SEQ ID NO: 428730 - DNA, 540 bp, Homo sapiens
taacgttgataggtgagttttatagcaaaaatctgtcagaaaatattagggaaatagaaatgacatatttaagttacaaattattagagaaaataaagaaaagatttaaatcaattaaaacataagaaaatagaaaaaccacattaagggatggtataaacagaaattacataagatatttgagaaataacagtaatataataattattaataaaaaagacctagaaaagacaaagattataaaactgcattaaactactaaatttatttatatattttttaaataaacatayataaaaacaaagaacaaattttcagaataaaagagtgataaaagatgatctagccaaatatgtagtaactggaaatagcggagatagccacgtttatatctgacaatatagactttacataaaatttttactagaaaataagaattcaaattacccttaaatatctaaatcttttaaaatgtataaatgtaaatattcctaacagcacatcttcagaatatatacattaaaaatttatgttctggtt

SEQ ID NO: 428731 - DNA, 540 bp, Homo sapiens
taacgttgataggtgagttttatagcaaaaatctgtcagaaaatattagggaaatagaaatgacatatttaagttacaaattattagagaaaataaagaaaagatttaaatcaattaaaacataagaaaatagaaaaaccacattaagggatggtataaacagaaattacataagatatttgagaaataacagtaatataataattattaataaaaaagacctagaaaagacaaagattataaaactgcattaaactactaaatttatttatatattttttaaataaacatacrtaaaaacaaagaacaaattttcagaataaaagagtgataaaagatgatctagccaaatatgtagtaactggaaatagcggagatagccacgtttatatctgacaatatagactttacataaaatttttactagaaaataagaattcaaattacccttaaatatctaaatcttttaaaatgtataaatgtaaatattcctaacagcacatcttcagaatatatacattaaaaatttatgttctggtt

SEQ ID NO: 428732 - DNA, 567 bp, Homo sapiens
gacacctcatacaggagagctcttgctggcatctgacagatgcctctctgggacgaagcttccacaagaaggaacaggcagcaatcyttgttgttctgcagcctttgctggtgaaacccaggcaaagggggtctggagtggacctccagcaaactccagcagacctgcagaagaggggcctgagtgatagaatgaaaactaacaaacagaaaggaatagcttcaacatcaacaaaaaggacatccagacagaaactccatttgaaagtcaccaacatcaaagaccaaaggtagataaattcatgaagatgaggaaaaaccattgcaaaaagcctgaaaattccaaaaaccagaatacttcttctcctccaaaggatcataactcctcgccagcaagggaacaaaactggatggagaatgagtttgacaaatggacagaagtaggcttcagaagctgggtaatagcaaactcctctgagctaaagcagcatgttctaaaccattgaaaagaagctaagaatcttgaaaaaaggttagcggaattgctaactaaaataagagtttagag

SEQ ID NO: 428733 - DNA, 567 bp, Homo sapiens
gacacctcatacaggagagctcttgctggcatctgacagatgcctctctgggacgaagcttccacaagaaggaacaggcagcaatccttgttgttctgcagcctttgctggtgaaacccaggcaaagggggtctggagtggacctccagcaaactccagcagacctgcagaagaggggcctgagtgatagaatgaaaactaacaaacagaaaggaatagcttcaacatcaacaaaaaggacatccagacagaaactccatttgaaagtcaccaacatcaaagaccaaaggtagataaattcatgaagatgaggaaaarccattgcaaaaagcctgaaaattccaaaaaccagaatacttcttctcctccaaaggatcataactcctcgccagcaagggaacaaaactggatggagaatgagtttgacaaatggacagaagtaggcttcagaagctgggtaatagcaaactcctctgagctaaagcagcatgttctaaaccattgaaaagaagctaagaatcttgaaaaaaggttagcggaattgctaactaaaataagagtttagag

SEQ ID NO: 428734 - DNA, 567 bp, Homo sapiens
gacacctcatacaggagagctcttgctggcatctgacagatgcctctctgggacgaagcttccacaagaaggaacaggcagcaatccttgttgttctgcagcctttgctggtgaaacccaggcaaagggggtctggagtggacctccagcaaactccagcagacctgcagaagaggggcctgagtgatagaatgaaaactaacaaacagaaaggaatagcttcaacatcaacaaaaaggacatccagacagaaactccatttgaaagtcaccaacatcaaagaccaaaggtagataaattcatgaagatgaggaaaaaccattgcaaaaagcctgaaaattccaaaaaccagaatacttcttctcctccaaaggatcataactcctcrccagcaagggaacaaaactggatggagaatgagtttgacaaatggacagaagtaggcttcagaagctgggtaatagcaaactcctctgagctaaagcagcatgttctaaaccattgaaaagaagctaagaatcttgaaaaaaggttagcggaattgctaactaaaataagagtttagag

SEQ ID NO: 428735 - DNA, 570 bp, Homo sapiens
atgagcccaacatgacaactcagaaaggacctgaaaacttacattatggtatgtaatgatttaggtgataacttgaaaaccctgtacatcagtctttacgtagttttgaatccaaagcactgataatgaatagttgattttggagatagcttaacagcaacttaaattccgtagattctctgggtcgaagtacccttgtatgttgtttttataaatgtattgcttttagttttattgtctttttgaaatttcatgctaattgagaaaaggcatagttgagagtgaggagaagctaaacagtgctgtaacacaaattttaaaaagaatagacatctaactatcgtgtcatctgcaattttaaatgaaaattatttttagcaaatcgtattgctagggagtaggttgggaggaagaacaaaaaccgtttagaagctgtaatttttttwaaaaaaatatcatttaagatataaatctaagaatatataatagtatttccccgaaagcagtgtatactttcagaggggacgaaaggagaaaaggattaatttcatttatttacctgtatatttc

SEQ ID NO: 428736 - DNA, 571 bp, Homo sapiens
ttactagttaataattctttatgttaaattttccctgttagtattactggtgtggattctgtctccagacaatcccgactgatatacatagtactataaacactgaaacattattctatcaagatgtatgctgtggtggccttgggatgatggaaaggggacataggtatggatggatatgtgaggggktatgtatgtagaagagccagctcttcttggtgagaagtcagcagattacatgaaaatttaaaaactaaaacaaaagcatgcactgaagtatgtttagaaatatggctgcagtgaccaggagaaagagcacagtgttaggaaaggtgctgcctttggagagcaacaggagaggaatctggagagggcagggcgctgctggtttttattatatgtctctcaatgctatagcagccccccttctcctcgggggatatggttcaagaccccccagtggatgtcagaaaccacggatagcaccaaaccctatatatactatgttttggtctgataatctagatggctactaagtgactgacaggtgggcagcaagtacagtgtggag

SEQ ID NO: 428737 - DNA, 585 bp, Homo sapiens
taaggaccactgcaattggattttgcagtgggggacagagattgggytcaactttgaacacaacatgagtgggtggttatttatagccaaagctcagggtggaggtcagaggatggaaaattactaagaggaaacattacgaggaaggggaattctggctaagctgacctcacaagattcttgccaaaagcaggtcccagtgctcagacattacctggggcagcgtggaggttgaggaacctgattagatattgagggtgagggatgaactgacttaacagggtcctcagataaaaccgtattttacaaggaagtgcacagaaaggcctaggagaaggttcaggagccaaactaaagtttggtcaggcagatactcttttccattactgaaaaaaaaaaaaattcaaacagggatgctctgggaagtcagggggctggagaagcagcaccaatcccaaagtaaaggaagaaaccgaagagattaatgtagttcagaaactgtcttgtagtttctcaactatccaaagagtaagaagtcacctcatactcttgcttatttcagacctcttgatatcttccactatt

SEQ ID NO: 428738 - DNA, 585 bp, Homo sapiens
taaggaccactgcaattggattttgcagtgggggacagagattgggctcaactttgaacacaacatgagtgggtggttatttatagccaaagctcagggtggaggtcagaggatggaaaattactaagaggaaacattacgaggaaggggaattctggctaagctgacctcacaagattcttgccaaaagcaggtcccagtgctcagacattacctggggcagcgtggaggttgaggaacctgattagatattgagggtgagggatgaactgacttaacagggtcctcagataaaaccgtattttacaaggaagtgcacagaaaggcctaggagaaggttcaggagccaaactaaagtttgrtcaggcagatactcttttccattactgaaaaaaaaaaaaattcaaacagggatgctctgggaagtcagggggctggagaagcagcaccaatcccaaagtaaaggaagaaaccgaagagattaatgtagttcagaaactgtcttgtagtttctcaactatccaaagagtaagaagtcacctcatactcttgcttatttcagacctcttgatatcttccactatt

SEQ ID NO: 428739 - DNA, 458 bp, Homo sapiens
aaagaatagcatcttacaccatattttataaggttattataagcataaaatcaagtgagataattctttggaaagaattacataaatctaaaatagcacaataattattgttgttgcaccagtataattttaccctccaaaccctctgaagagtagctttggaaaataacatataaattcatctgcagtaatatagaaaatttcagcatggatatgaaaattaatacatgcytgtaaagtggtttcccaaaggtatgcagcattataagaataataaatcaccataaatcagatacaatagatacattttgcacttaacacagtgaatgatttagggtccatgcaattttcatcagagaagttcacttagggcttaccaccaaatagctccacagtagcaggtagagagcaatataacaatgacctttaaaccacccagtgactcattagagaagttc

SEQ ID NO: 428740 - DNA, 458 bp, Homo sapiens
aaagaatagcatcttacaccatattttataaggttattataagcataaaatcaagtgagataattctttggaaagaattacataaatctaaaatagcacaataattattgttgttgcaccagtataattttaccctccaaaccctctgaagagtagctttggaaaataacatataaattcatctgcagtaatatagaaaatttcagcatggatatgaaaattaatacatgcctgtaaagtggtttcccaaaggtatgcagcattataagaataataaatcaccataaatcagatacaatagatacattttgcacttaacacagtgaatgatttagggtccatgcaattttcatcagagaagttcacttagggcttaycaccaaatagctccacagtagcaggtagagagcaatataacaatgacctttaaaccacccagtgactcattagagaagttc

SEQ ID NO: 428741 - DNA, 635 bp, Homo sapiens
cttttcattaaaaatattttattactgctttctttgtaaacaagctcagtacttttaagtttatgccaagacagagggttttccctgatttccttctttaaaaggacagtggcatttcatgacattaacttttccaaattatttcatyggtgtttgtgttgacattgacccacaacactgtggcagcattcatatggtatgcacttcctagctatggctaagattatgcatatagcttccagtttttaaaatgggagtcaacaacagatttttgtacctctactttcttttcctatctgttacctctttggaattgtcctatccagaatatttataaaagtcataatgtctttaagtagtatctaataagtagccttcattcactggaaatgtcatatgattaattttttctttaaaaaaaatccctctactaatgcctaaactgaaaacatcttgtactgaatcactataaaacatatattaactttacacctgtggatattactgttaactattttgaaagataactataaagacatagtttcagcactctaaaattgggaaatgtaatctgtttgacgtttaagtaagaaaaatgccaaagaaaatataatcacatataacacagaacagat

SEQ ID NO: 428742 - DNA, 529 bp, Homo sapiens
taatcatatttattatttagggttctgttaaatacacacaaatgtgtatataaaacttcatttcygtctggctgatctaaaattgtgagaagtaaatgaaatgtgatatgttagccacagctttatcactagtttctctgtttatattaaaacaagctcagccagatttcttttgcagtggcaagagcacataacataatgtgtttcaggctatttgcatccagtgaggcatagtaagcatagtgggcacctggtttgccctgccctcataattcataccacagtgttttctttcataagcacaagagagctcacatgattacattataaaataaaacatttctcccaaacatttcactggtttgttttgttttgttttgttttgttttttgccatccccattctaatcccaaataatccttcaaattatggtgtagtggctaaaagaatcggttttgaatttaggtagattgggttcaaatccagaaaaattacttatgagcttatttctgaacctgtaaaatataca

SEQ ID NO: 428743 - DNA, 558 bp, Homo sapiens
gcaaataggcactccaggcaacccacactgcttgaattctgcccctgggaggaatatttggggtactcatttgcattgcatgttggttaccaaaaagcacattcagttcacagccattttaaagcactccttgtcagatcctgggaacaaactgaagtgtctaaacaaaggtgactgaggcagtgagtyctcttctgtaactcataggaagacaatatgccttctattgggaacataaatattctttttagatgtgtatcacgcaaacggagccaaccaactcatgtgaatacctattattagagaaagaatctctgaccatattggccccttttctgccttaatctctggattccaatgtcttggagcttccaactgagctcctcttctcagaaagagtagtatctcactcttctgtttctgcatctgctttctatttataaagagtgcactttgggaaaagaaatgtttctttcttcaatccacagcaatatttattgctgcaggggaattccagtcttgttctttggcagcctcacagctctcaagtcaaatagg

SEQ ID NO: 428744 - DNA, 598 bp, Homo sapiens
  misc_feature (1)...(598): n = A,T,C or G
ggagtgctttattatgatggtcagattttgacagtgaatataaatgaactgggagaacccccaactgtttctgtctctttggtatgtacaagaccagttcttcaggaatgtattcttaacagtgggataattattttagacacgctggtgtaatggacttcgtcagtctcattcacaaagctcattttaatgtggatcaattatcaactacactcagagaatcccctggagttaaattccagccatttttactagtgacactcaacaggcaaaaatggsctttctcaacctcacaatcaaggactatgcaaagaaaatgcataaaagtagctcaatagatcacantaataattgtttatgcacaatagctgcaaataactatctccttaaggaataccttgctgtgtacctattgcttttaatctcacctaattcctttcagtatattagttttgctccacataggtacaatacagacatttttcataacatgcaaacaacggtaaatcacatcttaccctatgtttacaacccaatgcaaatatttaacatgtatctcatttctttattttcaaagcaccttctatcatgtgaaaga

SEQ ID NO: 428745 - DNA, 549 bp, Homo sapiens
atattggcattctgcactgagctagtagcacacagacaggatttggggaggaaatattgagtacaatattgtatctattgggaaataagtgcctgatgttaagcaggcctggtgcttggatggttatgtggagtatgagtttaaggggacatagtagcagggaaaaggagaccccttaagaagggagctgctagtgcaggaaaaagatgatggctgaaatggggcagtgacagcagggactaagtgacagattcaaggagcatttaggaggtaaaatgtttygttccccttcattctctactattcaaaattatacacaagcccaaaactatgttaattgcttttatggaatgagttatcacaaactagaaaattgtgcatggtgaagactttggcttatgtttttaatttcctttttcccttctgatatctagagtcttctcaacgttaatacaagaaatgaatcaaagaaatgttccagccctctcattttgtgggagtaatggggtgatttactgacaaagattctttgcttgaccaaactttagc

SEQ ID NO: 428746 - DNA, 549 bp, Homo sapiens
atattggcattctgcactgagctagtagcacacagacaggatttggggaggaaatattgagtacaatattgtatctattgggaaataagtgcctgatgttaagcaggcctggtgcttggatggttatgtggagtatgagtttaaggggacatagtagcagggaaaaggagaccccttaagaagggagctgctagtgcaggaaaaagatgatggctgaaatggggcagtgacagcagggactaagtgacagattcaaggagcatttaggaggtaaaatgtttcgttccccttcattctctactattcaaaattatacacaagcccaaaactatgttaattgcttttatggaatgagttatcacaaactagaaaattgtgcatggtraagactttggcttatgtttttaatttcctttttcccttctgatatctagagtcttctcaacgttaatacaagaaatgaatcaaagaaatgttccagccctctcattttgtgggagtaatggggtgatttactgacaaagattctttgcttgaccaaactttagc

SEQ ID NO: 428747 - DNA, 606 bp, Homo sapiens
  misc_feature (1)...(606): n = A,T,C or G
attaggagtgtgagaacagactaatacacatttaatatattgaattttaatttaatattgtataacaacccaaaagaaacttgcagactggaaaatgtagtcactgtaatccctaagccattcttgcacaacagatcatggcatcatctattctatcttcaaaacaatggatggaaaagtgtgagatgtaatgnagncattagaatgattctatcattcgaccacaaaactatatccatagtcgcacattttatgtacatcatacaaattcacatatctggtttgctgcagaattctttataaagattacatcaattctttagtttaatatggtctttgtatttgcaatacccnanagacaatgacaaaattgatttttatagcaaastgtgtaacaatgtattttatccttcatgataaccacaagatgataaactgacagtttttaaatgtgtgtcaaatttaaaagagatcaccaaattgagggagttactnatgcattccctggtgataactgacagagcctttggtattctcaaatgtctgattcaaatacatatcagaaatctaaagaaatgcacttcagaacaaatttcttgaaggtga

SEQ ID NO: 428748 - DNA, 648 bp, Homo sapiens
tgcccaatacttctatcctatcccaacattttcttcttcaactcttaccaaactcagatgtcaaataaaaagtgttcacagatagattaaacctgtgaagctttgatttatcccccactcctaaccacagtttaacatacatagcaaatamcactctgacctctgtatctaccgctatgaaggtacccaccacacctgaatatttatttgcttacttatctgtgtccttgcctcctggagaaaaaaaaccatgccttcttcatttttagactttctgctcctcgtttggtgctattgacggaataaagacatgcatgaataagtaactgaatgaatgaaaaactgaatggattgatttaaggaaacaatttcactctttgaagtggaagacaaggataaaagaaaattgggaaggtaatggaaactattgaagactaggaaaaatctgagttcagatacaatacaacaaatgattaagaagtatttcaggaatctgttaccagtggacagaatactgaatccctacagtaactgcaaatgcacagttactcttgcagttactctttcattaaagtggaattcttaacccaaatctcatgttggaatgtgactcccaatgttgaaggtggggcctggtggaaggtgttg

SEQ ID NO: 428749 - DNA, 648 bp, Homo sapiens
tgcccaatacttctatcctatcccaacattttcttcttcaactcttaccaaactcagatgtcaaataaaaagtgttcacagatagattaaacctgtgaagctttgatttatcccccactcctaaccacagtttaacatacatagcaaataacactctgacctctgtatctaccgctatgaaggtacccaccacacctgaatatttatttgcttacttatctgtgtccttgcctcctggagaaaaaaaaccatgccttcttcatttttagactttctgytcctcgtttggtgctattgacggaataaagacatgcatgaataagtaactgaatgaatgaaaaactgaatggattgatttaaggaaacaatttcactctttgaagtggaagacaaggataaaagaaaattgggaaggtaatggaaactattgaagactaggaaaaatctgagttcagatacaatacaacaaatgattaagaagtatttcaggaatctgttaccagtggacagaatactgaatccctacagtaactgcaaatgcacagttactcttgcagttactctttcattaaagtggaattcttaacccaaatctcatgttggaatgtgactcccaatgttgaaggtggggcctggtggaaggtgttg

SEQ ID NO: 428750 - DNA, 648 bp, Homo sapiens
tgcccaatacttctatcctatcccaacattttcttcttcaactcttaccaaactcagatgtcaaataaaaagtgttcacagatagattaaacctgtgaagctttgatttatcccccactcctaaccacagtttaacatacatagcaaataacactctgacctctgtatctaccgctatgaaggtacccaccacacctgaatatttatttgcttacttatctgtgtccttgcctcctggagaaaaaaaaccatgccttcttcatttttagactttctgctcctcgtttggtgytattgacggaataaagacatgcatgaataagtaactgaatgaatgaaaaactgaatggattgatttaaggaaacaatttcactctttgaagtggaagacaaggataaaagaaaattgggaaggtaatggaaactattgaagactaggaaaaatctgagttcagatacaatacaacaaatgattaagaagtatttcaggaatctgttaccagtggacagaatactgaatccctacagtaactgcaaatgcacagttactcttgcagttactctttcattaaagtggaattcttaacccaaatctcatgttggaatgtgactcccaatgttgaaggtggggcctggtggaaggtgttg

SEQ ID NO: 428751 - DNA, 506 bp, Homo sapiens
gataaaataggtcaggacacatagctgtggaatatrcttttcagaaacacatttatcaacaacattttggtagaataaaataaaattgcaaattattaatcaagtttcttactttttcaaagggtcttttttcataaatgtggataaatattggaattacttgtcaagaatttatattgatcaaataggaaaatatcattaaaagataattttcaaaaagaagtaaaatcatgactcatacagatataaagcaaacatgtattaaagatcttacttaactcattgttcagtgagagaactaggcagatattataagcaattcaaaagaaaatccaaaaacaaacaattaaacagacacatttctagatcaagactattgaaataaatgtgcaaatggagacaaaactattttttccacagcgggagaacagttcagttgcatgtctatggacaaaaattattttgcaatgccattagctacctacaagttacaattggaagaaatc

SEQ ID NO: 428752 - DNA, 632 bp, Homo sapiens
ccacccatctcagacactcacttcttttcatacatataactacttaaatatccatgtttaacatggctatcttagacacatagaaagtgtacttaccaccttaccagagggtgaaaaaagacaaagacaaattactgcatctaacctcaagtctgaaatttttgtgttatgacaatattcttcttggtggtacctcaaacctgaccaattatatagctatataatgaatttaactataacttctaattaatatacaatggtaaaagaacattaagaaacaataactgcacttagaagactggagaaggttaaagaaacaccatgataactaatttcaaagcataaaccatatatcattggtcagagtaacaagaattccctgtccttgctaatggaattccttgggtcggccaaaatgaacacattcactaccactatatctcagaagatctcacttattagcctccataacgcagattttccttctagcagctayactgctggagcttagaattgccttagaagtaaaagaatgcaggcctttgtttaccaggcttgaggtttctctagaagtatggcttccttaaactttggtaagtttttcgtcaatttacttaagtaaaaggagttga

SEQ ID NO: 428753 - DNA, 576 bp, Homo sapiens
tgattatttaaggtggtagagttgggttttttttttccttttctctgctctttcacaaatttttgttaaggttggttaaaaaacatgcaaaattcctaggctaaaagggcyttcatatttgattaaccatattattgcttcaaaactcctgaatcagctacttcccctgacgctgggagtaaaggcgacatctgcaggctcttccagcacagtcgagagctactcctcatcctgatgactcagtgttgtggcatctccttaaattgtgcaccagaggcaggctcctcatctccttgcccttgccccagccctgcctgaaagcatcactccatgattttcttgtgtctacttttgtttgaaagccagctggggaagacactgttcctaaaggtagtctgcctgccgtcactggctgcttataagtctcatctgcctttgggtttctgcagtttcactctaacgtacccagctatgaatttcctttcatttatcccacttgggacataccaggtttcttgaatctgtatttcaatttgctgtattagttctagaaaattatcagccattatattttca

SEQ ID NO: 428754 - DNA, 555 bp, Homo sapiens
aataaagaatgggtaagcagaatctcaagttatataattttttttgatgaagtcaattccaacaacgtgaaagccactgccctgggtgatgataagcaaatgatgcctgaatgtgaaggtcatactcggctttagctgatttcaaacaaataaacaaaaacaaaaaacaaaaaccctccaccacaaatgatgatttcggaaagttatctcacccctggaatcacctgtgatgagagcatgatccttctagctgcatcctcttcatccttcaagctcccgcaccatgaggcccgaccctcccggggttgcacagctgcaccccacaattccacactgaaatctcggggtccctccgccacatccgcacagcacatctgccctgagcaattgttccctgcccctccctcaaaagacctaggcccagttccacctcacagctgaaataagacatccagtgcactgcacgmgcccgggcagggatgcttgctggagttgacatctgttccagtcaacccccaccttcctgaacggcacatgcacctcggtaggagacga

SEQ ID NO: 428755 - DNA, 424 bp, Homo sapiens
ccggaaggtgaaaatacattcttttctgtacatttagaattaatgaatcctatagacctgtggaaactgcttttaaacatctgattttccattaagatataattaaaattaatggcacagagaagctttagttctctggagcccccccccccycggcaggagaatatttgttctgtatatttttaagagggtttggggggcattaaattatgctttgattgtattccatcaatgagaatataagacacacacattattataagaaacaaataagcacttattaactgtgtgtgcattcatgggacacagaaatggtctcaggctgagcttatagtgaagcaaattaaaattagtgttttgacttttgttcattataaagtaaatactagcctaaagattcctaatcagttgccaaatacctatc

SEQ ID NO: 428756 - DNA, 606 bp, Homo sapiens
gggctttgatttattcttagcttgttgagttttaatcattttatagatatctacaggcttccataataatggtaactgtttcctccatctcgaattgagaaggatgatgaatgatgttcactctcagtggtckgcagatactaagtgtgctaaggcaaagtcacacactctcacattcctactcgtgttcacactactactctgtgatgaaaccgaaactagatttataatctttaattttatttttatttacataggaaagaaaccgattcagtagcaggtcaaatagggtcatttggggattcaaccaacttattcattaattaaaacacctatctatatgatatgtatgtgaagactacatgtataggacttatgatcaaattaaagagaaaaataagtaagtatagaagcatctttgcaaaacagtttgtgccacagaagagtcaatgttatcttccatgatgcagcctggatttccagttcttgcgcttcccagtcttgtggcctcaggcaagttacttaaccaccctacatcctgtttttctcatgataagaggggataaaactgtacctgtgtcacagggctttgagaggaaccaatga

SEQ ID NO: 428757 - DNA, 582 bp, Homo sapiens
aggtgagacttacttcagacttttgagttgatgctgaaatgagttaagacttttttgggaatactggggtggaataaatggctttagcattgtgagaaagacattgaatgttgggggccaggggaagaatgctrtagtttgaatgtgtctcccaaaaagcatgtgtcagaaacttcatccccaatgcaacagtgttgagaggtggagcctgataagtcattaggtcataaagcctctgccctcatgagtgggttaatgctgttttctcaggagtgggtgacttatcatgagtgggtttgtcataaagtaggttcagccacctcttgttctcctgctgttgtgcactcttgcccttctgccttctgcctgagatcatgcaggaagaagttcctcaccagattccagcaccatgttcctggacttcccagcctccagaactgtaagaaataacttacttttttatataaattactcaatctcaggtattctattatagtaaaccaaaatggagagactttgggtttgaaacatggacaaacttctgaaagtgcggcaaaaactctttaagatcctatagacttt

SEQ ID NO: 428758 - DNA, 582 bp, Homo sapiens
aggtgagacttacttcagacttttgagttgatgctgaaatgagttaagacttttttgggaatactggggtggaataaatggctttagcattgtgagaaagacattgaatgttgggggccaggggaagaatgctatagtttgaatgtgtctcccaaaaagcatgtgtcagaaacttcatccccaatgcaacagtgttgagaggtggagcctgataagtcattaggtcataaagcctctgccctcatgagtgggttaatgctgttttctcaggagtgggtgacttatcatgagtgggtttgtcataaagtaggttcagccacctcttgttctcctgctgttgtgcactcttgcccttctgccttctgcctgagatcatgcaggaagaagttcctcaccagattccagcaccatgttcctggacttcccagcctccagaactgtaagaaataacttmcttttttatataaattactcaatctcaggtattctattatagtaaaccaaaatggagagactttgggtttgaaacatggacaaacttctgaaagtgcggcaaaaactctttaagatcctatagacttt

SEQ ID NO: 428759 - DNA, 567 bp, Homo sapiens
gacgctgcctctatgacccgtttaaaacagtccaacccacaggagcagacagcagcacagtggccaccggatccaggatgagggagatggggagacgctgggcgagtgagctcatcacggtgcctaaacagttcacagtgccatgtcacacactggaaattsgcccaagagaacttcttcagtgttctcaccaccaaaaaaagaaagaaaatgttaactgtgtaaggaaatggatgtgtaaattagcttgattttggtgatgatttcacaatgtatattaagatatcaaattatacactgtgaatatatacaatttttctctgtcagttataccttaagaaagatggaggaaattaaataaataaaatgagattgttagggtgggcctaagttaataagactaacgtccttctcagaagaggaagtgtgggcaagtgcacgcggggagaaggtctcttgaacctggggacagctacttgcagccaaggagaggtctccgcagcaacaccctgcagacaccttggtcctggacttccagcccccagcactgagcgacaatcaagtctg

SEQ ID NO: 428760 - DNA, 567 bp, Homo sapiens
gacgctgcctctatgacccgtttaaaacagtccaacccacaggagcagacagcagcacagtggccaccggatccaggatgagggagatggggagacgctgggcgagtgagctcatcacggtgcctaaacagttcacagtgccatgtcacacactggaaattggcccaagagaacttcttcagtgttctcaccacyaaaaaaagaaagaaaatgttaactgtgtaaggaaatggatgtgtaaattagcttgattttggtgatgatttcacaatgtatattaagatatcaaattatacactgtgaatatatacaatttttctctgtcagttataccttaagaaagatggaggaaattaaataaataaaatgagattgttagggtgggcctaagttaataagactaacgtccttctcagaagaggaagtgtgggcaagtgcacgcggggagaaggtctcttgaacctggggacagctacttgcagccaaggagaggtctccgcagcaacaccctgcagacaccttggtcctggacttccagcccccagcactgagcgacaatcaagtctg

SEQ ID NO: 428761 - DNA, 574 bp, Homo sapiens
ctatacatcctgtagagtctcaaagtgcatgaattgtagatgattgctggaaatgtctgcacgggatgagaccccagtagccaccggcactttacaaagcttccctcctgcccctccccctcattgtcactcccctcaaaaaaaacccactgtgctcactccatggctaatgattcgttttccctgatcttgaacttcatacatgcagaatcagagtgtgcagaatcaggctcacccatgcctggcttcttcaactcagcatgttggagattcatccgttggttkaatgtaataatcatttgttcttttttattcctcacttgtgttccattctaagaacataccacaatttacttagccattctcttgtcaacacgttatttgtgttattttcagttgtttgtgctcatttctcttacataaatccccgggtttaggagggattatcttagctttgtagtaaatacagggatatctcattttattgcattttgcaaatattacatgttttaaaaattgaagttttgtggcagccctgcatcgaataggtcttttggctccatttttccaacag

SEQ ID NO: 428762 - DNA, 505 bp, Homo sapiens
atttttacttttgttagattttgaccagataatcaagatcttgtgaaacacatgggattttacattataaagcgggaaaaaaatagctatctaaaagggaaaggaagccttggagttaaatgagaaagatgtccagccattctgactactcaggaaagtagcgtagagctggcctacagatttacaaatcctattagatctccttctctagcaaggatgagggtgggggacagcagttcccccarctgggccatcttcatagagaaactagaccaggaaagaaagaacaggtctcagctgcaaattaaacagacgcagttataattttaaaaactgtcctttgagagagtttggtggcaacaattaagagggaacagaaagactttaagagaaagcaacttgagaagatgtctggctagcttggggaactaaggctaaatttctgaaaagctgatttggctctcagaagcctaaaataaaagaaaccagtgttgccaataccagt

SEQ ID NO: 428763 - DNA, 539 bp, Homo sapiens
agctattaaattcataagcaacaacactgaaaggaataacagatccagacaatgaaagaaacccagaggaggaaacaatgagagagatttcaaataagcaaaagagtacaaataaagtatctgtacttagatgttgaaaacaggctgagaaatggaatcttatacctttcaatatttaattattcagcataggcagagcaagggtaaaagataaagacagctgtgatcataccaaataaaaatcaaatgataaaataaatatgggaggtagttgagactcaaaaagtaaacaagaaataaaactatytagaagagaggagatgttgaagaatttgggaaatgtccgctactctggcttacctagtactatgtgacaaagctcaagatggctctgaggtattctgaagagaaagattttactggttaattgaggggattacttcacagctgttctcctccaacaactattgaataacattatttatggggtatttaccatttgttaggccttaggccaagaggttgtttttgtttaatca

SEQ ID NO: 428764 - DNA, 645 bp, Homo sapiens
ttaccagtgctatcctaaaaacaaagcacaataaaaacaatggctaccaagagatggaagtggtccagtcaaagcaaaagtggactattcaagagcaaaggtcatggcaatagatttttggkgttctcaaggaatttcgcttgttgactttccagaaggctaaagagcaatgacatctgctattataagagtgttttgagaaagttagccaaagcattagcagaaaaatacctgggagaactttaccagaaagtcctttttcaccatgacaatgctcctgctaattcttctcatcaaatgagggcaattttgcaagagttttgatggggaatcattaggcatccatcttacagttctgatttggctccttctgacttcttttggtttcctcatcttaaaaaaatctctaaaagtcacgaattttcttcaggtaataatgtagagaacgtggcattgacatggttaagtttccaggacttaggtctgggatggattctttaggcatggagtaagcaaagacttcgaaaaatgtcttaaccttgatggagattattaagaaataaagtttatatttttaaaatttttatcttttaattctattctcccacaaaactttttgaagtcctcttgtatatgtgtttaagg

SEQ ID NO: 428765 - DNA, 645 bp, Homo sapiens
ttaccagtgctatcctaaaaacaaagcacaataaaaacaatggctaccaagagatggaagtggtccagtcaaagcaaaagtggactattcaagagcaaaggtcatggcaatagatttttggggttctcaaggaatttcgcttgttgactttccagaaggctaaagagcaatgacatctgctattataagagtgttttgagaaagttagccaaagcattagcagaaaaatacctgggagaactttaccagaaagtcctttttcaccatgacaatgctcctgctaattcttctcatcaaatgagggcaattttgcaagagttttgatgggraatcattaggcatccatcttacagttctgatttggctccttctgacttcttttggtttcctcatcttaaaaaaatctctaaaagtcacgaattttcttcaggtaataatgtagagaacgtggcattgacatggttaagtttccaggacttaggtctgggatggattctttaggcatggagtaagcaaagacttcgaaaaatgtcttaaccttgatggagattattaagaaataaagtttatatttttaaaatttttatcttttaattctattctcccacaaaactttttgaagtcctcttgtatatgtgtttaagg

SEQ ID NO: 428766 - DNA, 497 bp, Homo sapiens
tgactgtatttgggcatacagcttataaaaaggtaattaacttaaaacaaagttattatcataaaatggacaccatgtaacctctccagctaagttattaagttaaaatgaagttatatctctgtgtgtgtctctgtactcgtctccccttcttataaggactccaacatgactgggagatgagtagagacacacacacagagaagaccatatgaagacacagggagaaaatggccacatacaagccaaggagagaggcctcagaaggaatcaaccctgctaacaccttgagcttggacttcaactccagaactgtgggaaataaatttctgttgtttaaaccaattagtctgcagtactttgttatggcagcttaagcagaataatacacctactgwatccgtaattccagggatgaataataatttgtgtttaataagctctacaggtgtttctgatgtgaaaaaatttgagaaacactggtgtagactcagaat

SEQ ID NO: 428767 - DNA, 585 bp, Homo sapiens
ctcagcctcctactttcaggcatctaaggatacctctttattcattgatatggtcaccttctcctcacactgactccagcaacrggtgactcttagtgatcagacacagtatcagaatatatgctctcattctctatgagtctgtctatatagcatctattactgtagtcacaggcaattaccttctcagtaagctctttccaaaaacaagactctccagtttttctgaattcaagtgctgctatcaattttgactttgtagatcaaatggacaaaagagataaagttaaagacaaaacagcttttcattctgactgatccggatttgactcctgcttccacctctttagtgttgtgtgaccttggaccagccagtcaacctcctttttttctcatttgcaaaatggaagtaacagtacccagctcacagggtggttgagaggattagagggagtgtgtggagcccctgatacactcctgagcatgtaggagatgctcatttgtcctcatcaccaccctcctcattatcctcattggagggctgagatgaatttctggtatatttcctcagaagtcagcctggtg

SEQ ID NO: 428768 - DNA, 515 bp, Homo sapiens
atagtgggaatagaagaacaaccttcagcaggaaaggaaaaatccctatttgggtcttggctgctgcaagagcattttggttttatttaagaaaattaaaaaacacacctacatgtacagatccctccctcaggaggtgcagccctcagcccatggcagattgcrctgcctcagcagcccaccatctcagagctccactgtatggtctcagcatgtgcctacctcaatctaattagatgtcacatgctgttctgttctattgtttttgtttaattttgatatcctctgtactagtctcctgctacactgagtcacctgcctgaataaaccaagtcacctcccccagtgcaatttcagtttgtgttcttaaatgttccatttccaaagatggataggtttttatttttgtgatttctgttttttaatgatcgctaatacccttctagccccaacgttctgtgattgtgtttctaggtacaaattttttagaagaaattcaatttatattttcccaa

SEQ ID NO: 428769 - DNA, 593 bp, Homo sapiens
tcttcttcctcggaacacttttctttatctgctttctctgtacaattctctcttaattttcgtccaatcacagtggacactcctcctctgcctggtcctcttcgtcccccagaaaggtgccaaggtggagtcctgaatcagcccttctctttgctgcttacactcatctacacttttagtgatcttttccaatctgatggctttccataccatctttacaccagtgtttcctaatttatatcatcttcccattccttgtctttgaactggacttgtgtgtgcaactgtctattcagtgtctcttcttagaaatctaacaggcagtccaaattttacatattccagcttgagcatacccattaaacctgctctcttacagacttgtgcatctcagttatgctaaccccatctttccagttgctcagatcaaaaatcttggtgtcayccttgactttcccccctcccatcagcccatgaacacattttattaatcagcaaactgtattggttctaccttcagaatatatctaaaattgagtaatttctctctatctcaactatgttcatcatgttcaatctaccatcatctgtgg

SEQ ID NO: 428770 - DNA, 579 bp, Homo sapiens
tatttaggtgacctgaagcacttgaaggacaaaacaaagacttaaagcattcaataatttgatgtctgttgtgccatttttatcatgtttgctccacaataaattgaacagactcttgcacttttcccttgggtcctcatgagcatttgtctacaactgttaataagttacatgggatctaagaataaattttcattggaattcagatttcaagtgaaggatcacccaacattgcgatccctcatctaacattatttcagatcctgagttgctgctttgttctgcatacttaaacataagtcccggagcttggaatacttaacaaggggtttgtgttgctgttgttgtttccaaaagtgattaaaattggtaatataaaattaatataagcttcatttatctcttcattccctgaagatgaggagtaagagagtaccatcatcrtattcttgtcaaagtaaatgagttggatttatattctttatcagaccttgtaattgaagccttctagacttgattctacagttttatttctgctttttgtttattggtttgtttacatggcaaagactgcagttt

SEQ ID NO: 428771 - DNA, 682 bp, Homo sapiens
aactccgctggtgtagtgtgggagccagagagtacataaaccagtaagtgtagctgcactgcaatgaaactttattttcaaaaagataatgggctggatttagtgctgacccctgacccctggtctagatcatgtccaatgtcatcaacatgaatcacatcattaattagaacaagactcactttaatcttccatcataataagcaggagttcccaagacaatagttttaatgaaaaaaggctgattggtgtggttctcttcatatccaccaacgatactaaagccccaacttcccaagtaacttcttcgtaaaactatatcgtggcagctatgaagtgtgctataaacaaacagaaaaataaagaaaaaattaacatggaggcttttatagccgcttatttttgttataaccccataccatgttatatttaccactcttggaaaaaagaaaaagggctattaataaatagattattttgacaatccatyttctagcagagacacagtcctaggtagactcaaatttctccaacttttttcagtcttcccaagtgaagacacacacacacacatacacacacacacacaagtagagaacctggttacaaattacacctcagtaacctgtacaaaaaggtcatgtacctatatcagctcactgcattgtcaacaaagtcctca

SEQ ID NO: 428772 - DNA, 588 bp, Homo sapiens
tcacctcttccaatgtcttcatgtgattcttttattggaaaaccaaactaagccattcctctgtataatgagtggtaatgtttactcttcttaggcagtaaactaatgctgttactgcctagtgacctccacgttaactccaggtgacatttttctattccctatttgaaacccttggcttccacaccctatttttgcactttcctaccattacattgacccaaacttacaaatactcttatctttaactcttctttgacccaaactttaaatactgaagttgcctagggctttgttctgggcccacttctttgtcaccctctattttttttttttwaatcaatttatgtcatctttatggcaaggactcataaaatttgtctccagcttagatctcttccacgatctccaactcacatagccactgcttacaatgttcacaaatgaaacttttgactcctatcatcttttccacctcccaatctattttccattttaagcttcccaatttcagtaattggccccaaagctaggcagtagtcatctttgattcttcatcttccacagttcctgaagtgtaccaattct

SEQ ID NO: 428773 - DNA, 558 bp, Homo sapiens
gatcttggcgtcgtttgcttcttaagggaagggagaggtggggtgagtgtttaaatttcctctgtgtgtgtgtggtgtcggcaatgagagtggcactagctgcctttatcgggttttgttctctggaaagggatggggagagatcattccctccgccccagcctgttgcctgtgaattctcacctttctctttaggctggagagggtgggagagagatttgacatcttccagggggtaatttaaaaatatgaatcttgatttggaagcagttgcacacaaagcatcattcaggaaatacatcactcgcttttcaaagctktatgccacgttttaaacaaggacttttgactcatgtagtgtttcttctagtatttcagtttacgttaagtttatgaatccagacgttcgtttgtaccaggagctaaagtacacttatgcatgggctttgctgtgtatattatgctttttaaaatcacagaaatcagaaacaaagttgagtgaaaagcggtggcggtgcaggaggaggaacacttgtgagctccagcttattggaactg

SEQ ID NO: 428774 - DNA, 558 bp, Homo sapiens
gatcttggcgtcgtttgcttcttaagggaagggagaggtggggtgagtgtttaaatttcctctgtgtgtgtgtggtgtcggcaatgagagtggcactagctgcctttatcgggttttgttctctggaaagggatggggagagatcattccctccgccccagcctgttgcctgtgaattctcacctttctctttaggctggagagggtgggagagagatttgacatcttccagggggtaatttaaaaatatgaatcttgatttggaagcagttgcacacaaagcatcattcaggaaatacatcactcgcttttcaaagctttatgccacgttttaaacaaggacttttgactcatgtagtgtttcttytagtatttcagtttacgttaagtttatgaatccagacgttcgtttgtaccaggagctaaagtacacttatgcatgggctttgctgtgtatattatgctttttaaaatcacagaaatcagaaacaaagttgagtgaaaagcggtggcggtgcaggaggaggaacacttgtgagctccagcttattggaactg

SEQ ID NO: 428775 - DNA, 570 bp, Homo sapiens
tttacttcactatcagacggagtggagtggctaaatgctaatacctggctgtctaagtgggtctgggccttactggcactttcctccccaactccccactgatatatacaatggtagaggggaatgcgggtcaccgtaaattctccagtgtactcctgccaccgttttactaccagaagaaagaatgagtcttctcattttcactcctcccgatggtagcaacttcagagggcccttcrcccagtggccattctggctggacaacctgtacaacaagaacagggacctgacagtggagtgggcagggacttctggcagctctgcctgcttccttggccctgatttcatgacagattcctgtgccaggccaattattttaagacttccctgcaatggattgcagaaagttggagaaaatgaggaggccagaaaggtggttcttccctatttctaactttcctaaagcaagaggaaaatatataacggaggaacctcaggatcttttctgttcattcttgagagtaaaaatacaatttttaaaaaataaaatgaactttaaagatttgtttg

SEQ ID NO: 428776 - DNA, 649 bp, Homo sapiens
tttctagtccagcttggctcgctcatgcctcagatattgtttttaaaggcaattggagccttctttgtgagtttaatcaagctaatttttttttctctctctctccagagtttgtcattttatgaattacatatttagttaattcaacatgagctttgtggttgaaaataaatatacatttaaaaattcattttattagatagacctttgtcttaatatacctttcttattggaaattttgatttattatagaataaagatgctttctgtcttcatggaatcatcttgatattatgaagttggcatattttttgaggggatgctgttttcctgggagagagctcagatttctcttatgagctaagagacaaaattgtttcctgttacctcaaatgactaaactttgtggtgataaaagatctctatttaggsttttacctaatacctgtttaccacaattaaactttattttcatttttgaatattaacctcaagagactaaaaaataaaacaaaccaactataacgaagactggagttctgggatttgatatattttggggaacaattaggagggtttgagaggaaaaagcaaacaaacaaaactatagccatcaaggagaacctataattaagaaaaactgaaggcg

SEQ ID NO: 428777 - DNA, 595 bp, Homo sapiens
  misc_feature (1)...(595): n = A,T,C or G
atctttacagtacctagaaagtaagctttggtctggccccccccacatgtgaacctgaggactctgggaggagataaccatgtgcagaattctcatgtcacacagggtgaaaaaatgccttcaggtgaagtacagaatacctgcagatgtttttcatcactgacttggcattaccctctaacacagaccaagcaggtatccttatacctctcaattctttcgtcaggctaggcatttcccactatgttcgtacatttaaccagtttgggtgtgtttrttattgtgaaatttacacagatcacaatcaaaacccaaacattcatttaagatactatgacagaactttccaattacaaacctcaaaacgaatactgtaaagtaagcaaagttttcaacaatgtttttgtattttcaatctctaaagaaattaaagtactttagtttcacagcctttacattnctgtccatttttttaagtagagttatatcatactgattttaaagctaaagaagagagatgagctatgcactgccctgcctcgccatgaaatgtataaacctatattttctactgtggcactaatatcttgatact

SEQ ID NO: 428778 - DNA, 613 bp, Homo sapiens
gttgtgcagccttagaatccttttaaatacagtgctccaggcagccaccacaaatcagtcagaactgccacaagaaatgaaatgtttctgccatctggactctgcagtgagttgttggtagcgcctggatggaaaattcaggatttctggctctcaacccagcatcttttctgtccccattagtctgtctcctcacttctagtsagttcattaacatttattaggttatattagaaaagtaatttacttctataagtaaagtttataaaaatgtgcatccttttttgaacaataacttcatgtatgtgtgttttagtagactaacataaaccactgaataacaaactcacagaagtgagacatgaattaagaattaccaatttgtataccatcttattcaatgctaaacttgcatcagtccaagtgatcacatttggatgaaaatggggtactattgtcttgatgtgtctcttgatgtgattcaatgggaagtatgcaactcccatgtaccattcttgccaaatctactcattaaggaaccatcagagaagtacggagcatgagctatttcacgaaacagctaacctgaaatatttaaaaagtgtcaatttca

SEQ ID NO: 428779 - DNA, 504 bp, Homo sapiens
catttccctcaagcagagtgaatcaccttcattgtgcactgaatttctgcaagctgggcaagtaggagttttaagttgctcttaggtggttyttattcgctgcaggttatgttagcttattttaaaaggtatctaaaatgagcagcattggtgaattaaattgttcaattttgtaattgtttaaatgtaccttttggttttatatttttccccttttcatttattcagaactgtaattaaatatgttttttattatctgctattgagttatcaatgaatagaaaggagatggggaaaatagattataggatcctaacaacattaatttgtttaatgcttgactccatctccatggatagataacacttttggcaccacattattctctgggcaaaataagtattttctatttttaaaaatgtaaataattggccgggtatggtggctcaagcctgtaatgttttggaggctgaagtgggcagattgctttagctcagatgctca

SEQ ID NO: 428780 - DNA, 504 bp, Homo sapiens
catttccctcaagcagagtgaatcaccttcattgtgcactgaatttctgcaagctgggcaagtaggagttttaagttgctcttaggtggtttttattcgctgcaggttatgttagcttattttaaaaggtatctaaaatgagcagcattggtgaatwaaattgttcaattttgtaattgtttaaatgtaccttttggttttatatttttccccttttcatttattcagaactgtaattaaatatgttttttattatctgctattgagttatcaatgaatagaaaggagatggggaaaatagattataggatcctaacaacattaatttgtttaatgcttgactccatctccatggatagataacacttttggcaccacattattctctgggcaaaataagtattttctatttttaaaaatgtaaataattggccgggtatggtggctcaagcctgtaatgttttggaggctgaagtgggcagattgctttagctcagatgctca

SEQ ID NO: 428781 - DNA, 517 bp, Homo sapiens
tatttctatccttcttcccttctgaaaatctatgtttgcaggcagacttagaggcttctagtgtggatgtggaagcctttaactccgtgaccccactgtgtggccagtgcttgagttctagggtatgggcctctggatctattgtgcagtgtttggtctgattctgtcctctggaatcttactcgctttttttgtttttcaaatctgcaaaacgcacccctctcttgctgaccacctcttgcttggtgctacggatacctcctgaaatctggctgctgtttwtatttgttcatcagctcaagtggcccatgctttagccctaagctgctgtgcccttggttcctgtcacagttcagaccttatggattctccttgctgcttgcctgaagctctgaaactttcttgccatacataggccctaggaaccaagatgagtttcccgctcaaacagagaaaatgttcaaaaccccattgcttctgcctgttcccacctcatttccaaaaattaggcaaaagt

SEQ ID NO: 428782 - DNA, 562 bp, Homo sapiens
ttactaaaaaacataactgtgagatggagttctgctcgagtactgtcaggcacttaatatattccaaataaatatggctggagttagattgactgaacttattcacagagggagagagtttggaagtgacttactgataataaaaaaaaaaattttttttaaagggtttgaggtraggtcttacataggaaaagtcattttctgatgttctaacttgctttactaatcttcaggaaacaactgtggtacattttgtcctaaataaatgtttcttaaaggagtactcaagtggttgttaaagttttaagcactctgcatctttttaaataaatgcattgcttagcaagtacaaatgtgagtctcccagattccatcgccccactgacttctgccaaacagtgctagtattaatttttaggtgaaaagacaggtcagaacagtctgaattcaacattatactgatgaacgactattttttaaatggctgcaaaatgtattagtatctctaccaagacgtttcataagtactaaataatgtcagtaggttttgggtctttttttt

SEQ ID NO: 428783 - DNA, 562 bp, Homo sapiens
ttactaaaaaacataactgtgagatggagttctgctcgagtactgtcaggcacttaatatattccaaataaatatggctggagttagattgactgaacttattcacagagggagagagtttggaagtgacttactgataataaaaaaaaaaattttttttaaagggtttgaggtgaggtcttacataggaaaagtcattttctgatgttctaacttgctttactaatcttcaggaaacaactgtggtacattttgtcctaaataaatgtttcttaaaggagtactcaagtggttgttaaagttttaagcactctgcatctttttaaataaatgcattgcttagcaagtacaaatgtgagtctcccagattccatcgccccactgacttctgccaaacagtgctagtattaatttttaggtgaaaagacaggtcagaacagtctgaattcaacattatactgawgaacgactattttttaaatggctgcaaaatgtattagtatctctaccaagacgtttcataagtactaaataatgtcagtaggttttgggtctttttttt

SEQ ID NO: 428784 - DNA, 293 bp, Homo sapiens
tgattaatagtttggctgttatgcaggagaatgtccttatttttggagaaacatgatatgtttagaaggaaaagtcaagatatttgcaacttattttcaaataatcagcaaaaaatgaagtaatgtgtaggtayacatatgtatattttttatttagagagagagagagaaaaaagcaaatatggcaaaaatattaattgacaaatctaggtggtgggtcacatcttccttgtacttttaactttcttgaaggttagaaaatttttagattgcaaagttgggtaaaaaaaaac

SEQ ID NO: 428785 - DNA, 529 bp, Homo sapiens
tatgtgcaaggttttatccttttttcataagctacaatactaagagaaatctaccagttttaaaaaaatctattttcctccaagactcttaatttcattctggaaataagattggatttgggacaggaggccttggtagaaaaatgtacccctaacaatgtcatctatgraaaactgtgccaactctcacctctggaagagtgagtggttgagagcatgtgaaataactcaatagccatttcaaactatgtttaatcatttataaaaatacagatctttatagagaaggctgagtcttctgtggactagaatagaagaggtgagacatgatctgggtgtaacaggatgggtacagcactgggtagatggaggagacatgagaaaagaagtcccatgtgggtgttcattaggtgcatagacttatgcaggagcaagtcttgtgtgctgacactaaggagatgtaactggagtcctgtctgactgttgaagcaaactgagcaatattattggataggtgcaatgaaagcag

SEQ ID NO: 428786 - DNA, 595 bp, Homo sapiens
  misc_feature (1)...(595): n = A,T,C or G
taactcatattatttgtcctttaccacctggggtaaactctatcagtttaccctgctgcttcaaaatatgctctgttaatggttaactgtagtcaccctactgcactaatgaacactagaacttattcattctmtctaactgtatttttgtacctattagccaacctttctttatcacttctcccctctactctccccaacctctggtaagcaacatcctactctctacctctatgacatccatttttatagctcccatatataagtgataacatgcaatatttgtctttctctgcctggcttatttcacttaacatgatgtcctccagatcatcccttttgcaaatgacatgagttcattcttttttaagactgaataatatcccattgtgtatagataccacattttctttattcatttattcgttaatgaacacttggttgattccatattttagccgtagtgaatagtgcaacaataaacatgggaatgcagatatttcttgaacaggtggatttcctttcttttggatccatacccagcaataggattgctaaataatatggcattactgcccttctttcnnnnnnnnnn

SEQ ID NO: 428787 - DNA, 623 bp, Homo sapiens
gtgatgttcgaaaatattttcatatacttgctggccatttttatgtcttttgagaaatgtctgttctgatsatttgcccatttaaaaaattggagtatttatgtttttgctattgagtggtttggattccatatatattcttgttattaatctcttgtcaaatggatagtttgcaaatattttctcccattctgtaggttatctcttcattctgttgactgtttcctttgctgtgcagaagatttttagcttgatataattccatttgtcaattttgctttggttacctgtgcttttgagatcttacctcaaaaatttatgtcctgaagtgttttgtttgtttgtttgtttcggtagcttcatagtttcaggccttacactgaagtatttatttaattcattttggtttgatttttgtattcagtgagagacatgggggtttcattcttttgcatatagatatccagtgttcccagaactatttattgaaaagactgttgttacctcaatgtattttcttaatgcatttgttgataatgagttggctgtaaatgtgtggatttatctctgggttcacaattctgttccattgatctatgtgtctgtttttatgccagtgccat

SEQ ID NO: 428788 - DNA, 462 bp, Homo sapiens
ccctgcctgaaagaatataggtcagttatttaaatgatttacacagagtttgtccctttaataccttgcaaagagtcaggcagagatagtattagtgagttctggcagatgggatacaaatttattacgacaagtcaattttytttttcgtttctaagactactatataataaatgggcctccacagtatattaaattaatggactttatttttcatgtgaaagaagaagaaaaatcttatgaagtgttaccctagaattccaggatagtctttgagtttctggctcataatgtagcttctgaaaagcaattataactttcatcttaaacttctttcaatgacaagtctcgctagagggactgtcactggagtctttctttagagaatgtcttttcttctcaggggaaatgatactcagcagcattcaaaacagttctaggcaaaattcagctatggaaatt

SEQ ID NO: 428789 - DNA, 405 bp, Homo sapiens
acaaccacacaggaaggaaatttgtgctgggaatattaaaaatgtcttatcacttttcctatcccaaatgtagacacaaattcagtcattgatacacactggatattttttcttttgcaggtctctcttatctttactcaatgcactaaatatataaataaatagatgtggtatttgttgttccttagtaatgggarataatgacaacccccgccccccaccactggccagcatttaacctgaatgtctgtacatttgcttagctttccaaaacagtgcaaggtttcacaaagataagacagttcatttacataacccggaataatttggctggcaaactcaaggagatatagtatatggatcaagtttaacacattcatttggattggctgagtcccatacgtt

SEQ ID NO: 428790 - DNA, 588 bp, Homo sapiens
cttatgaaatgaccttacattgcattagatgaaataaacggtctaagtttgggattatttctgctaacatgactgggtcagaaagaaataatgtcttcatgcttgaccatcttcaagttttgtggtgagatttttttaagttatcttcctgatgttgcaagatattacaaatgcattagcaaatactgtctaatktgaaatgcatagccctatcataaaacatgtggtgagagaaatgattttagccccaagtcttcagtatcacagtgaccaaagaaatggtctctcagttgttatttttgtcatgagagggcatgagaagcaatctccccttccccttcccgggaagccccaacatcgagtctaatgcttcctatatcatgcccaatcgaacaaacgtgctagccagtatggaaggtcttcctttcttcatctttagaaatggtgcacttgctactgtagaattctaatccatggcattctgcagcctgcaagctttgatctttattagtttcataatcataacacaagtcttcaatgcactccaggctcactccaatgagaggtgattatatgaaagtagtaaat

SEQ ID NO: 428791 - DNA, 588 bp, Homo sapiens
cttatgaaatgaccttacattgcattagatgaaataaacggtctaagtttgggattatttctgctaacatgactgggtcagaaagaaataatgtcttcatgcttgaccatcttcaagttttgtggtgagatttttttaagttatcttcctgatgttgcaagatattacaaatgcattagcaaatactgtctaatgtgaaatgcatagccctatcataaaacatgtggtgagagaaatgattttagccccaagtcttcagtatcacagtgaccaaagaaatgstctctcagttgttatttttgtcatgagagggcatgagaagcaatctccccttccccttcccgggaagccccaacatcgagtctaatgcttcctatatcatgcccaatcgaacaaacgtgctagccagtatggaaggtcttcctttcttcatctttagaaatggtgcacttgctactgtagaattctaatccatggcattctgcagcctgcaagctttgatctttattagtttcataatcataacacaagtcttcaatgcactccaggctcactccaatgagaggtgattatatgaaagtagtaaat

SEQ ID NO: 428792 - DNA, 588 bp, Homo sapiens
cttatgaaatgaccttacattgcattagatgaaataaacggtctaagtttgggattatttctgctaacatgactgggtcagaaagaaataatgtcttcatgcttgaccatcttcaagttttgtggtgagatttttttaagttatcttcctgatgttgcaagatattacaaatgcattagcaaatactgtctaatgtgaaatgcatagccctatcataaaacatgtggtgagagaaatgattttagccccaagtcttcagtatcacagtgaccaaagaaatggtctctcagttgttatttttgtcatgagaggrcatgagaagcaatctccccttccccttcccgggaagccccaacatcgagtctaatgcttcctatatcatgcccaatcgaacaaacgtgctagccagtatggaaggtcttcctttcttcatctttagaaatggtgcacttgctactgtagaattctaatccatggcattctgcagcctgcaagctttgatctttattagtttcataatcataacacaagtcttcaatgcactccaggctcactccaatgagaggtgattatatgaaagtagtaaat

SEQ ID NO: 428793 - DNA, 628 bp, Homo sapiens
acctggagggtgggaaggaatcttaactagcgacctttgagtggttgcttggttcatgtaaccatgtcaactaggtacttctgctttgttcatgtactttgtgtttttcagtcgaggtggtccactcacattgcttctcaatttccctaacccattcaccctcccctaacagctaagatgcttcattctscatcaatgctacacagtttttcctactaagggagaattctttttgcccttttctgtgctcatatagtgcttttgtagcatgcactattatcactggctacttttcattgtaaatgtttgttttgctttcttactccgggactgcaaaattgcacaaattcagcaatacgatcgtctgtttcttggaactctgaggatgaggactgttactcatctttatatatccagaatttagaacagtgattggcacactgtgggtgttgaggaaatgtttcacaaatgaataaatagcgagtagtctgaagtagccagaagtattttaggaagagacttctggtgggaatgagtatgtgtggtgcctgggcagaggaagagaccacggacagcagtttggataggcgattactgtaaaagataatgaagggtttgccaaagtggt

SEQ ID NO: 428794 - DNA, 628 bp, Homo sapiens
acctggagggtgggaaggaatcttaactagcgacctttgagtggttgcttggttcatgtaaccatgtcaactaggtacttctgctttgttcatgtactttgtgtttttcagtcgaggtggtccactcacattgcttctcaatttccctaacccattcaccctcccctaacagctaagatgcttcattctccatcaatkctacacagtttttcctactaagggagaattctttttgcccttttctgtgctcatatagtgcttttgtagcatgcactattatcactggctacttttcattgtaaatgtttgttttgctttcttactccgggactgcaaaattgcacaaattcagcaatacgatcgtctgtttcttggaactctgaggatgaggactgttactcatctttatatatccagaatttagaacagtgattggcacactgtgggtgttgaggaaatgtttcacaaatgaataaatagcgagtagtctgaagtagccagaagtattttaggaagagacttctggtgggaatgagtatgtgtggtgcctgggcagaggaagagaccacggacagcagtttggataggcgattactgtaaaagataatgaagggtttgccaaagtggt

SEQ ID NO: 428795 - DNA, 601 bp, Homo sapiens
aatggagaggtggaggcagatgcaggagatatttatttcctaggctttttcttaaagctcttttcccctccctcttaatgttatgatttgcttaggtgaactaaacttagtcccactttttggcctgttttaatgcacctattttgaataacaaatgatgacaatgaacaaaagaacacaaggttgaagtagaaaatttaaatgttttagcaagaaaacaaaaacaaaaaccaccaatcatctcatttgtgataaacaaacacmgttaacatttggttgatagcctccggggctttttattggtaagaatttggagacaatctggtagaatggttaccatgacagactcaactgcattcaaattctggctctgatatctgctgtgaaatatttggcaaaacgtgctctatttctctcatgtgtacagtggggattataatgattgtacttagttcatgggattgttctgaggattgcggaagctgataaaattaaagcactaagttcagttcctggaacataggacataaatatatatcctattcatatatatataacaaccatatcaacgtataaatatggtttataaactaaactttct

SEQ ID NO: 428796 - DNA, 601 bp, Homo sapiens
aatggagaggtggaggcagatgcaggagatatttatttcctaggctttttcttaaagctcttttcccctccctcttaatgttatgatttgcttaggtgaactaaacttagtcccactttttggcctgttttaatgcacctattttgaataacaaatgatgacaatgaacaaaagaacacaaggttgaagtagaaaatttaaatgttttagcaagaaaacaaaaacaaaaaccaccaatcatctcatttgtgataaacaaacacagttaacatttggttgatagcctccgrggctttttattggtaagaatttggagacaatctggtagaatggttaccatgacagactcaactgcattcaaattctggctctgatatctgctgtgaaatatttggcaaaacgtgctctatttctctcatgtgtacagtggggattataatgattgtacttagttcatgggattgttctgaggattgcggaagctgataaaattaaagcactaagttcagttcctggaacataggacataaatatatatcctattcatatatatataacaaccatatcaacgtataaatatggtttataaactaaactttct

SEQ ID NO: 428797 - DNA, 506 bp, Homo sapiens
tagaacgtattcctcctacctagctgtaattttgtatcctttaacaactctctccctgtccctgccttccccctacccttcccagactcttttttgacaactaaatcatgtttaaaataatcaccttataattgttatcatccactttgcagggtagcaaaatgtttccaaaatgttgccctacacattttatatttttattttacagcaaaatgcctgagatattaatcattgagaatataataatattagcttagtttgtttaactgcaactactattataarcaggatgaaattaatattccacctgttgggaatgctgtttcttgtttatcagactaatttaacatacttgtattcaaatttttttaagcataataccactgttttattatagaaaatgtctttttactttctgtatccaattctgtccataccaagtagtattacattaagacatgtgtttattactgttgttatactttataaaaaagaagttcctgatt

SEQ ID NO: 428798 - DNA, 453 bp, Homo sapiens
gttctagttagcaacatgagagagagaatatgcttacccaaattaaatgaaggccttaaaaagcacagagtagagatttaattaaagactgttttccatataaatttgtgctgaaaaggaaatgttggttgcttaggatgcacattattttaatgctgggagtcagcattgggtagtggttagaaacagacatggtggtcacaccccycccagctccccgtttgttagcccagtggcatggggcaaattacttaacctctttcagagtccctataaaacaacctgtagtaatatctgcctcatatgattctgttaaggaataaattaaacaatgcttgccttgcagttttagggacatgagaaaaattaataaaaataaccatcacacaggactgaatgtcttccgatcaggccaggtgtatctcatcccataactgttaatcaattgtagaa

SEQ ID NO: 428799 - DNA, 488 bp, Homo sapiens
ttcctatcttctacctgcatcccagaattcttcattaaacctggccaccttctgtacactcttaattaaaagtggaattgattgcattctcaggtattgacattatacagataaaagaggggaagcaagtttttgctaaaatgacctgaatttttttattctgctaatgaacaagccaaacactctcctaaagctaattccgcttactttaataggctgcaatactcatacatattctctaaactttctgaactctgtttcttagagcctcctcaaaagaaaaaaaaatccctccttaatgagatttgtgtttatttgtctactccatcaatttcatcaccacttcaggctacaaaggatatttctactcaagtaaagtgaaaacttggcattcgtagctctattaktgatggggaccacaggtgaggataaggtgctttttgggatagtccagtgagtgaggcaaacatttcagcttgtgattattt

SEQ ID NO: 428800 - DNA, 550 bp, Homo sapiens
actcctgcttccaaagttttagttctcacaaggtctctcttgttcttcattagctctgacagtaatagcatcacattctgttttgtggatgcaacttttatttctctaagttaacattctctcttgcttatttaagccattttttctgatccatacctattaatttagtttctccaatttcctttttagtgggtttttccccttcttgtggcctatttatttcttgtcagagcacactccaaacacttggtgattcttatacatatttacaagtgagaaaataaacagcctaggaacactatgcacgagggctgcagcttgtcaaccaaagggtttcactgcagagtgaacagattttcaaatgtgacctgactcttcaaatgtcaccatctctttcctctggagccagtttctccagaaaattagctttcactaatctgtgtagagatgcatgaggggacagttataggccagtctgccartgctatcggaagtaattgatgggatatctcactgtgtattgtgagactgactccacccccagctgtgc

SEQ ID NO: 428801 - DNA, 628 bp, Homo sapiens
ctaacatagcttgctcctcaaatgcagatcagataatgacagcttaagcactaagtgtatatgctayagaaattaaatgaaaacaaggtacaacaccttctcagaaaagcaaaatacattaaaacgtatgctgagcaatgaaacaaacatttaatccgtgagttcctcataacattataagattttgatttgttgagtctggagaaaaggctcatgagctctgatttatcaaagtaaaatactttggtataaggctaattttaaagaggtatttgataattaaatatttgtaggtgttagcatgtaataagggctaaagagatggttcttttattttaactattatttagtgattgctaaagaaattattcggtttaaaagctgctgttttccaatgatgatagcagtttagagtataaacactctcatcattttttccctttatgccctagagcatactttcacattatacctaatagctttattcaacctgcacaataatttgttcatgtgttctcctgtaacacttaattatgagctccttgaaattaaggaaatattggacatctttgtgtcccagacatttggcttgatgtgtatgaaaagcatgaaagacaaaccatgaatg

SEQ ID NO: 428802 - DNA, 628 bp, Homo sapiens
ctaacatagcttgctcctcaaatgcagatcagataatgacagcttaagcactaagtgtatatgctacagaaattaaatgaaaacaaggtacaacaccttctcagaaaagcaaaatacattaaaacgtatgctgagcaatgaaacaaacatttaatccrtgagttcctcataacattataagattttgatttgttgagtctggagaaaaggctcatgagctctgatttatcaaagtaaaatactttggtataaggctaattttaaagaggtatttgataattaaatatttgtaggtgttagcatgtaataagggctaaagagatggttcttttattttaactattatttagtgattgctaaagaaattattcggtttaaaagctgctgttttccaatgatgatagcagtttagagtataaacactctcatcattttttccctttatgccctagagcatactttcacattatacctaatagctttattcaacctgcacaataatttgttcatgtgttctcctgtaacacttaattatgagctccttgaaattaaggaaatattggacatctttgtgtcccagacatttggcttgatgtgtatgaaaagcatgaaagacaaaccatgaatg

SEQ ID NO: 428803 - DNA, 628 bp, Homo sapiens
ctaacatagcttgctcctcaaatgcagatcagataatgacagcttaagcactaagtgtatatgctacagaaattaaatgaaaacaaggtacaacaccttctcagaaaagcaaaatacattaaaacgtatgctgagcaatgaaacaaacatttaatccgtgagttcctcataacattataagattttgatttgttgagtctggagaaaaggctcatgagctctgatttatcaaagtaaaatactttggtataaggctaattttaaagaggtatttgataattaaatatttgtaggtgttagcatgtaataagggctaaagagatggttcttttattttaactattatttagtgattgctaaagaaattattcggtttaaaagctgctgttttccaatgatgatagcagtttagagtataaacactctcatcattttttccctttatgccctagagcatrctttcacattatacctaatagctttattcaacctgcacaataatttgttcatgtgttctcctgtaacacttaattatgagctccttgaaattaaggaaatattggacatctttgtgtcccagacatttggcttgatgtgtatgaaaagcatgaaagacaaaccatgaatg

SEQ ID NO: 428804 - DNA, 606 bp, Homo sapiens
tcctaataatatataatattaatctcttaaaataaaagcatacacatttttaaaacttcacaacaaccaatcttaggtacacttttagtcttagtgaaataatgtaaaattatataaagaatattaatatttagtggttgacttaaatttccaaaaatgaatgatttacttgtaaagtcaaaaaaatagttaatcattaattaaatgatgaaatatgtaaagccttatctattcattggtartaattataattttcagtagctaataatttactgatttaaaaagcaaaataaataatgaatataattgcactgggatgattaaagagtattttctaaacttattttcttccaagaatatatttcattgtttccctagaaaacagagctataattatggttaggacaattatccacaatatgatcatattcattttttatggcaaagaaaaagaaatacaatcttcaaaaaatttcatagtaacatcctgttcataacaaacaacatatctctttaaataaacaaaaacttaagttaatgttttaaaaggatgtaatgttttaaaatttagatcttaataaaaaaatcaaacaacttgtttttcaa

SEQ ID NO: 428805 - DNA, 597 bp, Homo sapiens
ttaatgcacactatatacacaggacataagtgtaccctgttctcaggatctattgacactttgatataaacgaataatgagaaaatctgctcaaaaatgaaaagcagtaacacaaatcaatttcaacaaaagagataatttatcagacaaaaaactgactattttccaaagrcctggaataagaaaagaaaaaaagagaagctgtttgtttggtactgccaatttcacataagatagatgtgaaatgactacataattaggctgcttatgtactttctaagccaaagtaactttcctaatgagttgtttattactcacataactctccataacttttttgagttattctgttaaggtgtgcattttctctttagcttctttcttttttacctcccatcaggagctaaaattgcttctgcctgattaccccaaagacccatcttgcctttgtaccctcagtagttaaccgacatccaggcgagaagctggaagaacacgtactttaatgattcttgaagtatgagtctgcatcaggtttggattctgtcactgcttccaccactacctttttaccaatccagagtatagtgcaggaca

SEQ ID NO: 428806 - DNA, 535 bp, Homo sapiens
tcttggtgggggtcagacccaagtttaaacatgaaattcacttatgtttcaaatatgcctcatacacatagtctgaaggtaattttatacactattttttaataatttgtgcatgaaacaacgtttgtgtatattgaaccaccggaaagcaaaggtgtctatatctaacaattttccacttgtggtgtcatgtgggaactcaaaaagcttggaattttagagcatttcaggtatcagatttgggaatgccaatgttcaacttgtatcactaaacactaacagcatcaggaaagaaggaagggagaaaaggagggacaaaaaattcagaatgacttcactttcaccgccactccctaagtgctcagaaggctggtaagtaaagctgtcttcttgggctgtttccttgggatataaaacttagtgacctctgccaccccttccctacaaggagtcaacrgtcagaccactctgataagatgcacagaatgccaaacttctgtttttaataatgtaaaaattatcagaacacaaatta

SEQ ID NO: 428807 - DNA, 597 bp, Homo sapiens
cctttccctcctggtctattccactggaccctttktggaggtcagtgcttcacataatacatgctctacgagaagtcaatctcagcttgcttattggacccattttccaatgtaatataaatagataacttgatcacttcctgtttttgtgcctcctcagacacttggataagactttggaaattgtctactaatgagtatacatatcttgaaaaatcatcgctttgagataatttttttaaaaaaattatgtggatagtacttttaattaggaaaaatacacatttataaatctaattctctaaccacttaagagttgattgaaacctaggcacattctcaatgtcaataaaaataaggatttaataaaagagacctgttaaatgcttcaactccttaaaatagatcagatatacatagaatatttcaatgatctcatatcttactattatactgagaattaaaccattacaaagatattgacactttgggccttcaaaacaataatattctctcaagccaaggttttaggttctgatttaacaagttgattattggtctgaaaacaagacctggtttcaccccagggtgattcaa

SEQ ID NO: 428808 - DNA, 597 bp, Homo sapiens
cctttccctcctggtctattccactggaccctttgtggaggtcagtgcttcacataatacatgctctacgagaagtcaatctcagcttgcttattggacccattttccaatgtaatataaatagataacttgatcacttcctgtttttgtgcctcctcagacacttggataagactwtggaaattgtctactaatgagtatacatatcttgaaaaatcatcgctttgagataatttttttaaaaaaattatgtggatagtacttttaattaggaaaaatacacatttataaatctaattctctaaccacttaagagttgattgaaacctaggcacattctcaatgtcaataaaaataaggatttaataaaagagacctgttaaatgcttcaactccttaaaatagatcagatatacatagaatatttcaatgatctcatatcttactattatactgagaattaaaccattacaaagatattgacactttgggccttcaaaacaataatattctctcaagccaaggttttaggttctgatttaacaagttgattattggtctgaaaacaagacctggtttcaccccagggtgattcaa

SEQ ID NO: 428809 - DNA, 517 bp, Homo sapiens
tccttttaaaattttaattaaaatcctagaattggcatgccctttgggtttctagataatgtaaaggtttttgaactatctggaaatgttaaaaattcatgcaaacagaggtcccctgataaagaaatagagccttctgccgctattctttacatatgacaaacataaacaccccaacttaaattttcccttttcttccttgaataaggcagatttataaaacagtctcataactggaatgtatattaacttgttagaatcattgatttaaaactgttctattctttacgcagggaaaaataatgctggatttctcagtttcaagtacagaagatccaactcaataaggrtgtttattgttaaataatcagaaatctagatatagcaaagtcccagggtcagttaattcaggggttccatgacttcttcaagaatccaggttttgttaagtttggaatttgggcacctgttatggaggaagaggctggtgggaagattgggtgagcatccatgtagc

SEQ ID NO: 428810 - DNA, 547 bp, Homo sapiens
ggattacagggatgagccactgcacctggccagcaattcaatttttaactcatgaactttaggggacatattcaaaccatagcagctcctactgaccaagtccayccgtaacaacaaactccactaacagccacatcacctccacggagcaggagagaacagagcaaggggtctggtcctgggcatgcattttagggcttgccctaatacctgatcattcatcgccggcggagtacccagtggaagaaaaagttcaggggactttactctctgggttctatcttgagccagaatttcctctgactctggttacatgtaatagaacagaaagtgacaccacaagcaggcagcagaaaaacaaaacgggcttcttctatagtatgcggtcattaaccaggatgttcataccagcttctgtatgaagaagagcaaaatttgaattcagtgaagtcaaaacaaagataatggtatcattctttttgatgtcaattaagttgtatcactgtttattgggctgatgacatcctgagaaaatgagtgatttctt

SEQ ID NO: 428811 - DNA, 590 bp, Homo sapiens
caaaacacctctgcacacaaatccacacatccagctaagaaagctcaggggctggagagctctggtacaccaccaccagatcttaccacctgggactttgttaatatctcacattcctggttcacaggaatctgtggttttaacaggcacctccaggtgactctcatgatgggccagtttgggaggcagtgctagtgaagaatggcacagatgtggggctgacagcctaaagtttgaaaccagacccatccactcaccagctccgtgaacttggaagacacttgactttctgagcctgggtcttcttgtccataaaagtaagaatatgttttgccccataacgatcctccaggttaggtcttattatcaacatccccactttacagattagaagccaaagtaaagagtgatgaagtacttcrcccaaagccatgctgctgacaagtggcaaagttggtatcaaagcagaagacacctggctccaggtgctatgctctcagtcagacactgttctgcctctcctcccagaaaggaacgctctactgagaaaggcaggagaaaagctttccaggcaaagcactttatgttaa

SEQ ID NO: 428812 - DNA, 605 bp, Homo sapiens
ttgtagcaacttggacacagattttgacaggaggctggggaaggaggtcatctgtgcaatgagccatctgtttagagagactatcaccatggggaaaagcatccaggagatggaaagggaggtgagaaactttcagaggtaaatttcactttttcagttttgcctctgattggccctgggattcaggaccatggagacagtcaatccaaaatctccaaaacaaagtttatacctgcctttagtctaaattataccaagaaacattcccccgacccttcttcatctctacatctcaagatttactgtctgagcatacttgaactttggatagtcaaatatttcactaaggaagtattttagggttcaaaaatagaatcagagaaaaggatgccccaaaacacaagaaagtatcccaagatatagcataatgggatgaagtgatggaagcttcctccaagttaggaatcaactgtgtcctgcttcactgcaatrcagtgacaagatccagtgtagacttccacacatatacacacgcacacacacacacacacacacaaaccctcatattgcatctttgagcattagggcagacaaggagcagaggg

SEQ ID NO: 428813 - DNA, 580 bp, Homo sapiens
aaagcgacttgcccaagttcccaagtagcagcctgccaggctgagaatctaggcagggactccagggagggtaaggcatgtctgtctgcaaggaagttagtctaaatacagttgtgttgttattgttttcctccagtggcaaaatttacatgtgtatatacatatatatatatattttaatttatttatttttttaaattatactttaagttctagggtacatgtgcacaatgtgcaggtttgttacatatgtatacatgtgccatgttggtgtgctgcacccattaactsgtcatttacctaattgaaatgttttaattcccctaacccaaccctacacacattcttccaccacatcttggcctttctcagagagaaactgaatcaaaatcacgcaaagagagtctgtgcttttctcagacaacaaagaaataggcagagcatatcatgctgccagcaaactccagacacttcagaaaaacaaacaaacaaacaaacaatgttcctcattatgtttgaagatatattttgtttggaagtacagagccagaaactacctcatagggaaaagcatctccct

SEQ ID NO: 428814 - DNA, 580 bp, Homo sapiens
aaagcgacttgcccaagttcccaagtagcagcctgccaggctgagaatctaggcagggactccagggagggtaaggcatgtctgtctgcaaggaagttagtctaaatacagttgtgttgttattgttttcctccagtggcaaaatttacatgtgtatatacatatatatatatattttaatttatttatttttttaaattatactttaagttctagggtacatgtgcacaatgtgcaggtttgttacatatgtatacatgtgccatgttggtgtgctgcacccattaactggtcatttacctaattgaaatgttttaattcccctaacccaaccctacacasattcttccaccacatcttggcctttctcagagagaaactgaatcaaaatcacgcaaagagagtctgtgcttttctcagacaacaaagaaataggcagagcatatcatgctgccagcaaactccagacacttcagaaaaacaaacaaacaaacaaacaatgttcctcattatgtttgaagatatattttgtttggaagtacagagccagaaactacctcatagggaaaagcatctccct

SEQ ID NO: 428815 - DNA, 564 bp, Homo sapiens
gattttttcttcttgcagaactaaaacsatacccattaaaaaacaattctcatttgtctcctatccccattccctagtaactttcattctatgttttatagctatgtatttgactactttagatatctaatgtaagtagaatcacacagtatttgtcattttgtaactaacttatttcacttagcataacgttctcaagagtcatccatgttgtagcatgtgacagggtttccttcctttttaaggctgagtaatatttcattatgtggatatacacattttgttaatccattcatctgtccatggacacttgggttgtttccacctcttaactattgtggataatgctgctataaacatgggtgtgcaaatatctctttgagaccctcctttccattatttaggatgcatacccagaagtgggcttactggatcatataatagttctattcttaatttttggagtaattgccatattgttttccatagcagctgcaccatttgcaattctaccaacagtatgcaagagttccaacttttttttacattcttgtcagcacttgt

SEQ ID NO: 428816 - DNA, 590 bp, Homo sapiens
ttaggtcaacttttatcttgaggagtggtccttgtscattttgtacatattttctgatattcacccacattatttatcctggaatgacccatctgctgaaataaaggtctttgagaggagggcatctcttcaactcctgccaagggtcaacaagtaggaacataagggctttatactaaggtagacctgaatttgaggaaactgggttcatcaccaattggctctgtgacaaagagcaaattacttaacttttttgagtctcagtttcctcatctgaagaatgggattattatagctgtcttagaggactgtgttaaggacacaggttttgaagttagatcaaagtctgactcttactctgccattgattagttgcatagtactaggcaagttaacttctctagccttgtttctgcctagtaaaatgaaagataataatacttattttataggattgtcagtaggattcaaataagtaatatatttaaagctcttagtctagaatatggcacaaagcaagcacttaacaaatgatagctattcttagaactaatgagatggcatatatcaagtttccagcataataactg

SEQ ID NO: 428817 - DNA, 546 bp, Homo sapiens
ctcagcctttgtgcataagccccttttcctagaactttattagaaccaactgaaaattgtgtaatttgtaccaaytgtcctttgggctctgttcctctttgttccaaaagctcagtccctttgatatccctgcaacacatttaagcatttccacttggtccactccgtgccagaaatgtcttgcaagtgacacatttctccactacgtctttgctaattaatctacagaacaagaatggcaaaaagggaagggactttccttttgttctcacaaaagagtttgtcatacaagccctgctacaaaaggtgaatcaattggtggcttacgagtcttagagatttgttccaggtcaaaaagtaagtgtccccaattcccacgttaagactgttggagcagaaagcagcatgcatgacccccaaagggtagcattacaagaaaacatgggttaggtttccttgcagtttcgctgcagtagtttcaactgctgggtaggatgcatactgcaaattaccctttggataatttcattccctcattatcacaca

SEQ ID NO: 428818 - DNA, 459 bp, Homo sapiens
gtaattaatgtatagaaagatctctattacaaaataaaacatatttttatatgtcaaattgatgattcttattacataataaaacagtctttggaatgtaaacatttgtattctataggtaatgttctagaaagtaaacttggtcttgcactcgatgaaattcgttcatttctcactggagggaaagtaaatatcagtaaactgtttatagaaaatatcagtaaactgttcaattaggtcatgtgttacaaagtctaacaagaaaagtttataccaaagctgaaaacccaaatgtgtgtctatattttttaataacagataccttgaagaatttttaaaacyagtaattgtgacttgctttaaaacacaattcttagaaatggagctgatagctggccatcacaaacaagtgaggattagggctggaactccccatgcatatatctggggtctctgagc

SEQ ID NO: 428819 - DNA, 506 bp, Homo sapiens
agcccagcacctgacggtcttcacaatctgccccagccatctttccaggttcaccttccaccattcaacagtaacattcagcaaacatctgctgggtgcctatcaggtgccaggcacctgggatgcaacagcaagtaagcagctatcagggtgtggggggagctggcacagagaaagccaagtaagaaaacaactgtgatgctatgaaaattgagtaataagtatggagtgcttgccttaggagcacctaactcaggcttggaggatctgggaaggctttttggacaaagtgagatctaacttggctaagaactaaccaagaaaggagcrgggaggaagaaacagcccatgacgaaagagtgatgtgtgcacaagtccagaaatgaaaatgaacaaggtgcattcccagaaggtaggaacttggagagtgaaggtgccagtggcaagagatgaacccgaagaggtgagcaggggcctgaccacagaaggcctcgaatgccctgtga

SEQ ID NO: 428820 - DNA, 530 bp, Homo sapiens
actagccaatttctctctaagctggtatcacctacatcctacctggacattgatcatatatatatacattttttttttgagacggccgatcatgtatttttaaagtgctgtggcagcagatatttccttctgggattctaaaaatctaagttaaaaaaacttattgactcctaggccaggtgcggtggctcacgcctgtaatcccagcactttgggaggccgaggtgggtggatcacgaagtcaggagatcgagaccatcctggccaacacagtgaaaccctgtctctactaaaaaaaatacaaaaaattagccgggcgtggtggcgggcgcctgtagtcccagctactagggaggccgaggcaggagaatggcgtgaaccaaggaggcrgagcttgcagtgagcagagatcgcgccactgcactccagcctgtctcaaaaaaaaaaaaaaagtgactcctaaggaatacagaaagtgagacttcctttaccgatcttatcatgcaaggtggaatgaaaggactccaggc

SEQ ID NO: 428821 - DNA, 583 bp, Homo sapiens
ttttcttattttttatgtccactatggagacagctctctgtaactcactgcctacttaatgtataagctttcagtaataagccagagtgttcgtcttcrttttttcttcgtaagcatatttttaatatgtgaagctttcatttaaattttaattcatagatttttaatctttttttggtaaaattataattgttatggaaaatacttgtaaattaaccttgagtcatgaaggaaacaggacagaaatactcacctgtacctcttgaccctggttctcatgtcaatattcctctgtggaagagggcctccctatttcctagcccagcagctttgtgcttaaggactatttcttctcagagctctgtgattcctattgtattaagtgcttaagtcttagtgctagtgtggctttttttttttttctgtcagcaagtgaaattggatatacaagtcatattccctcaggctagctgctacttagtactatgcctaggattgcagctatctgctatcagtaagcagggctctcgttttggttactgggtccatcatggcaaatcatgcagccagctgaacagttatt

SEQ ID NO: 428822 - DNA, 553 bp, Homo sapiens
ctgatttatatacactaatacagaatgtaaaattctaaggtttttttccaatcacagatttggggggctataagtcatattctgagttgaataattttcacttcaagagttctgtcctcctcatctattacctgtgaagctagtagggaagtataaatattcactttcatttaagctaaaaactaaagacatttctttatgtgtttccttaataatttgtcaccagtttaggaaacaagtatttagttgaaccgtgtgaaggytgcgattgtcaaaatggtataatggcatatagttcactcaactaatttctattagcttgcaccacacaaatggaggagaaaaaaaggagtaatccattcctaaaaaattatcactcttccaaaccttctgctagcaatctatgaaactaaaaacattaagagttatcacgcctcctgcaaacccttgggagaatttagccatacgctttatctggcactcttatttgcctatcaaataaaggctctctatgccttaattcaacccagttccataattatattgagccatc

SEQ ID NO: 428823 - DNA, 608 bp, Homo sapiens
taagtatcacatttatagtattttaatgaattctcataatccctcttttgttaaataaaattctgaaagtacggcaggggttgccatgcttatagtgtgtttgtttcataaatgttaatgaaatggcaatggaaagccamatttaaagtagaataaaatatggttattaatcttagaacaatattgttgagaaaagatgtaatgttagagatgctgatgctatggcggttcatcataccatatgtatttttgtatttgccatttgttatttactgtttcaggacctgtgcttcatgttttgaatatactattttcacatagcagctactgactcttgttattaaatgagattttatgtcgttcacaaacttcaaatactctaatggtttctgaaacttactttgtgttatcttaatatagccacttcagctttattttgattagtgattgcatgctatgcctttttctatcctttatcttttaacctacagtttttataggcagtctattgagttttgctttttaatccagtctgaccatttctgccttttaattgaagtgtttagaccattttaatttaatctggttattcatatggcagggtttaa

SEQ ID NO: 428824 - DNA, 570 bp, Homo sapiens
cccattttctcttctccacatctgtatgtccagctgcctcttgtacatgactaatgtggatatacaagagcttctgtaactgaacatgttttaaactggactagtccaaacctgttcctcaaytgttgctgaattaaataaacatcaccatcgtttatctaaataaacatcatcattatcatctatctgattgcttaagcctgagtatcctctttattctcttttactctgccaattcatacatacatacacacaagtgaccacatgtatgtccatccaaaagatatttgttgagcacctgatgtgttccaggctttaatcctggtgctaagaatatagtgacaatcaaagtttctgcctctaaggatcttatcttctaatggaggaagagggacaatatcaaatttatgatatgtaaggagtaagtgctttgaaggagaaaaaagtcagaacaatggtgatagagaacaccaggtgaagagtttgctttctatataaggcagtaagggaaggctttgccactaagtttttaacaggattcatttgctgcactgtagtggagagactaca

SEQ ID NO: 428825 - DNA, 570 bp, Homo sapiens
cccattttctcttctccacatctgtatgtccagctgcctcttgtacatgactaatgtggatatacaagagcttctgtaactgaacatgttttaaactggactagtccaaacctgttcctcaactgttgctgaattaaataaacatcaccatcgtttatctaaataaacatcatcattatcatctatctgattgcttaagcctgagtatcctctttattctcttttactctgccaattcatacatacatacacacaagtgaccacatgtatgtccatccaaaagatatttgttgagcacctgatgtgttccaggctttaatcctggtgctaagaatatagtgacaatcaaagtttctgcctctaaggatcttatcttctaatggaggaagagggacaatatcaaatttatgatatgtaaggagtaagtgctttgaaggagaaaaaagtcagarcaatggtgatagagaacaccaggtgaagagtttgctttctatataaggcagtaagggaaggctttgccactaagtttttaacaggattcatttgctgcactgtagtggagagactaca

SEQ ID NO: 428826 - DNA, 543 bp, Homo sapiens
tttggggtgtgtgtgtatatgtagagacatagatatataattagraagatgaatgtacaattacatacattagtatgtatatgtaaatgtatatatataacatatatatcaaatactacactgatagtattttatgtactctataataccagtttataattaccacttatatattttattatacacaagaatattctgtatgaaaattagaaagtaaaaaaggataagattaaaaataaatataaccaaaagttctactattctacctgagccacaatgagttgtcttgcccacatcccattttaaaggttactgctgtatagaatgggaaatcatcatagttttgggccttatgtttgtttgatttgttctatatttctttcattcttaatgaggaggaagagcatgtgatcagaaatgtatgtgaggaagattatttcattagaattgcagagaatggattagagcagcgagtctcagccatggcaacagtgcctgcaaagaacgtttgacagtgtctggagacttttttttttttttttt

SEQ ID NO: 428827 - DNA, 564 bp, Homo sapiens
aaaggaaaggcatccccacaggagatgatggagcgtatgccrgagaggtcactgaatcttgattgtatgccagctaaggcatctgaattttattctgtttgagcagagaacagacatgcacaaatatgtgttttagactgtattgagctaataaagttaatctgcatatttaagttgtattgggatatatcctatgccaggggttcccagaccccaaatcacagagcggtaccagtctgtggcatgttagaaactgggctgcacagcaggaggtgagtggtgagcgagcaagcaaagctgagctctgcctctcctgtcggatcagcagtggcatagattcttaccgtagtgggaacactattgtgaactgcacatgcaagggatctgggttgtgcactctttaagagaatctaaggataaatgtaatgcccttgaatcatcctgaaaccatcccccctctccatccatagcaaaaattggccaggcacagtggctcaagcctgtaatcccagcactttcagaggctgaggcaggtggatctgttgaggtcagaagtttgagacc

SEQ ID NO: 428828 - DNA, 543 bp, Homo sapiens
ggccaggaagaaatgatcatatttaaatccagattctcacaaaactcacttcagtgatgctctccggttggaaagatcatctcctgaattaaaccctctaattcctatggcattacttatattaataaaatcaaactacagagccaatttcataatacacaaatcaccactgccattcttaaatcaaagaaatgaatgaatatgttctattagaatgtaattctgcatgtgaaatgacacaatcagcgccaaactgcaggaggcataaatagaaacagccattttytaagatagtgtactgtaaaactttcattctaatctgcattggtaacataagatcttgaagcattatatttcggatatgatgaagaatgcaattattaaaacgtttcatctcaacaccattaaacctatcgtgtgtattttccagagacctggaaaggatagagattccaaatataaacacacgaatgtttcaacccatgaagaatctttctcacatgtacgtatgtataaaaaatggaggaggaagcatggtaaaat

SEQ ID NO: 428829 - DNA, 587 bp, Homo sapiens
gctgtccatccttgccattccttggcttccatctgcaccactcctatcgctacctccatagccacatggccttcttccctctgtgccttcctatctctgtgtgccctctcctcttcttacaagcacattggtcacattagatctagggcccactctaatcccataggacctcatcttaactatttatatctgcaagatcctaggtccaactgaggtcacattctgaggttctcagttggatctgaatttggggttggggagtgctatttaacccactataatggtgaagagagaaaaagagaaagctaaaggcagaatcatgagacgcacgaacattctggtcgttagtagggaartgttagcaaaggaaagagaaagagagagagagagaccacattcctagctgctgagaggccgggtggggatgcaagcaggtaactgtgtgtgaccatcagaaaacactggtaacggcagttgggtgactaactaatatatttcacccaggactagagtggcagtccaggatgcagaactttcggtgctaaaacccaacagtaccaagcacactggaatggttggacactcta

SEQ ID NO: 428830 - DNA, 587 bp, Homo sapiens
gctgtccatccttgccattccttggcttccatctgcaccactcctatcgctacctccatagccacatggccttcttccctctgtgccttcctatctctgtgtgccctctcctcttcttacaagcacattggtcacattagatctagggcccactctaatcccataggacctcatcttaactatttatatctgcaagatcctaggtccaactgaggtcacattctgaggttctcagttggatctgaatttggggttggggagtgctatttaacccactataatggtgaagagagaaaaagagaaagctaaaggcagaatcatgagacgcacgaacattctggtcgttagtagggaagtgttagcaaaggaaagagaaagagagagagagagaccacattcctagctgctgagaggccgggtggggatgcaagcaggtaactgtgtgtgaccatcagaaaacactggtaacggcagttgggtgactaactaatatatttcrcccaggactagagtggcagtccaggatgcagaactttcggtgctaaaacccaacagtaccaagcacactggaatggttggacactcta

SEQ ID NO: 428831 - DNA, 503 bp, Homo sapiens
agcatttccagctgaatgagtgatttggggttggacaatgtgacagtgaatagatgayatattccttaactagtgagtatgaaactgcatagaaataagatttcacaatgttatgatattaatgtactttctaatattttacatgatccatatgaagacatataatttacagtttagggtagatgtacataggtaacaaaaataactggagactccttttggagaagtctgcaattggatcaattagcatacattcccttacaagtgactcaaaacccaactagcaaagacggaaattttaggaacatttattgtttacccagcaagatgtctgaagagggtggttccaggtgtcagggcctggatttgtgtctctgccattttcttgctttttcccagtcacaagataactaacacagctgcagatatcaaatcctcacatgactgatgactgtaactacagaaaggaagcaggggagatgaacagacctctccctttgtac

SEQ ID NO: 428832 - DNA, 503 bp, Homo sapiens
agcatttccagctgaatgagtgatttggggttggacaatgtgacagtgaatagatgacatattccttaactagtgagtatgaaactgcatagaaataagatttcacaatgttatgatattaatgtactttctaatattttacatgatccatatgaagacatataatttacagtttagggtagatgtacataggtaacaaaaataactggagactccttttggagaagtctgcaattggatcaattagcatacattcccttacaagtgactcaaaacccaactagcaaagacggaaattttaggaacatttattgtttacccagcaagatgtctgaagagggtggttccaggtgtcagggcctggatttgtgtctctgccattttcttgctttttcccagtcacaagataactaacayagctgcagatatcaaatcctcacatgactgatgactgtaactacagaaaggaagcaggggagatgaacagacctctccctttgtac

SEQ ID NO: 428833 - DNA, 559 bp, Homo sapiens
ttgaaagccttgtctttgagctatgaagttcttttttctacttgttcgattctgttgtaactttccagtgtattttgcatttcctaagtgtgtctttcatttccagaagttgtgattgttttttctttatggtatctatttctctggatatttttatccatatactgtattatattttaaatttctttaagttggttttcacttttctttggtgcctccttgagtaacataataatcgaccttctgaaatctttatctgacaatttagagatttcttcttggtttggatccattgctggtgagctagtgtggtcttttggagatgttaaagaaccttgctttgtcatamtaccagaattgtttttctggttctttctcgtttgggtagactacgtcagaggaaagatctggggctcaaaggctgctgttcagatccttttgtcccatggggtgatcctttgatgtggtgcactcccccttcctctagggattgggcttccggagagccagactgcagtgattgttactgctcttctgggtctagccacccagcagagct

SEQ ID NO: 428834 - DNA, 565 bp, Homo sapiens
gggggtgtgtgagaatacacactgtctggtcaactttccctgcaggcatttctctggctaatcctggttttatggaatgagagctgttgtgtgttgagtgcctgctctttgccagattggtgaagtatgctgccttgaatcacatggccagttaagtgggaaagcaggtgggtggtctccatgctgccatgtatattcctgggtggagctaagtccagatgttggyggacagactaaggactcctgcatcctcctagttcaagaagatgacagaagggctatcagtgaaatcactaagcacctacaatctcttagttcttgtacattcaataagcattaattaagcacttactatgtgcctggccctatgctagtcactgggatacgcagctggataggccgtgagccttggctctaagaagactctatgggccctgggagcagagaagggtatcccctaaaccagtggggcagaggtggggactgaaacaaggttcccctgagcaggtggttaatttgtcaaattggctgggcactgtaatgccccggtgtttggtcaaacatt

SEQ ID NO: 428835 - DNA, 565 bp, Homo sapiens
gggggtgtgtgagaatacacactgtctggtcaactttccctgcaggcatttctctggctaatcctggttttatggaatgagagctgttgtgtgttgagtgcctgctctttgccagattggtgaagtatgctgccttgaatcacatggccagttaagtgggaaagcaggtgggtggtctccatgctgccatgtatattcctgggtggagctaagtccagatgttggcggacagactaaggactcctgcatcctcctagttcaagaagatgacagaagggctatcagtgaaatcactaagcacctacaatctcttagttcttgtacattcaataagcattaattaagcacttactatgtgcctggccctatgctagtcactgggatacgcagctggataggccgtgagccttggctctaagaagactctatgggccctgggagcagagaagggtatcccctaaaccagtgrggcagaggtggggactgaaacaaggttcccctgagcaggtggttaatttgtcaaattggctgggcactgtaatgccccggtgtttggtcaaacatt

SEQ ID NO: 428836 - DNA, 619 bp, Homo sapiens
ttgcgattaggggcatacacacagagcagggtgatcttcagtgtgtccaaagaagaaaggaaaggttggggttttgttagaaaaatgctacatactattttgaaaacaagctcattgacactagagaggtttttggaagctggcaagctctgataggtgagtgatgctggcatcacagcaggttgtttcagcagctactaggtaaaactgatttgaggtttacagcaggccatttcagccactgggcttgcagaaaattcagttattggagcaggyactatgtaacattttcctttggccccttgattctgatttagtggggtatgacaagaatgacccaatttgtataatcaactttcacacttgaaagtagaactagcctgaaaaatcatctaaactagtacgtttacagaagggatagttttatcgctatttcaaattatttcatgctcattatcttttcaagtattttgtttcttttctatttctatttcattaagaaccaattgcagcattttaattttttccagaaatgtaaccatgtcattttgattttcaaattagtatgtgattattcatatttgcttatgatttttaaaatcctttttatatatgtgta

SEQ ID NO: 428837 - DNA, 580 bp, Homo sapiens
gcttttctacaggtttatctatcttatcaatttttttcaaagaaacatgttagttctcataatcaaatgtaaggggtaattagataaaagaaattccattcacaaaaagcaatccaaaatctaaaatgcttatgaattattattttacaaatgcatttgtatcttatgaaggaaatataaatctttattactatagaaattataattagccctgtttctgcattgaaacactaatataaaaatatcaattcttcctacattactttatagctttaatttgattccaataagaatgtcaaaaaaattttttgaaataactttaaataccccaaaaggattttgagttttatctggaagartaatcagacaaaaatagcaaagacacttttttttttaaaggagagagggatttgcacatagcagttacttaaattcattatgagactaaaatatttttaaatgcattgctagcatgagaatattttggcaagtcaatgtactttttaaaaatatttgcaaagatatccatgaaagtgacagacattcattgtttacttaatgtccgtggtttcccctacaa

SEQ ID NO: 428838 - DNA, 607 bp, Homo sapiens
ttacagtcataatttttgcaaaggcagtttcattgccttccaggatgatcagttattgtatgtgaactgcctcaggaagggcgtgctcttgagcaagatggctctttgatattgaggraaatcacaaagggactgagagagaggatgagaccagaggactacttgagcccaggagttcgagaccagtctgggcaacatagtgagacctcatctgtataagaaataaaaaaatttggccaggcgtggtggcacacgccagtagtctcatctattcaggaagctgagtggggaggatcatttgagctcagaagttcaaggctgcagtgagccgagatcacgccacttcactccagcctggatgacagagtgagaccctgtctcaaaaagaaaaataagttaataataaaagagaaaataggacatattgaaacttgtgggaaacagctaaagaggcaaatgtatagctataactgcatatactagaaaggaaaaaagaataaaattaatgatttaaatattcatctcaacaaattagaaaaaaattaggaaagtaaatccaattaaaatagaaaaaatagtaaatataacagaatttctaccctagttg

SEQ ID NO: 428839 - DNA, 540 bp, Homo sapiens
tgtccttgttcctaggctttgtcagcaaacagaggtaggaaatgtgtgtgcgtgaatgtgggtgtacatgcagctgtatctatatttatgtctgtatctattcagtagaaaccatgcattcatactgatacctccaattccgattcagtgtcacaggatatattttaaaacttcttcatttttatagttgtaaatccctttgtgatggttagttttatatgtcaacttggccagagtatggtaaccagttatatggtcaacagtctagatgttgctgtgaagatattttaggtgtgattaacatttaaatcagtagactttgagtaaagcagattactctgcatgtggtgggtgggactcatctgactgagatccctcatggaaaaggraattccactttcagactgcctttgtattctggactgcagcatcaatggttccctgggtctccagcttgccagcctgctctgtagattttagacttaccagcccccatcatcatgtgagccaactccttaaaataaatcgctctatcttttt

SEQ ID NO: 428840 - DNA, 540 bp, Homo sapiens
tgtccttgttcctaggctttgtcagcaaacagaggtaggaaatgtgtgtgcgtgaatgtgggtgtacatgcagctgtatctatatttatgtctgtatctattcagtagaaaccatgcattcatactgatacctccaattccgattcagtgtcacaggatatattttaaaacttcttcatttttatagttgtaaatccctttgtgatggttagttttatatgtcaacttggccagagtatggtaaccagttatatggtcaacagtctagatgttgctgtgaagatattttaggtgtgattaacatttaaatcagtagactttgagtaaagcagattactctgcatgtggtgggtgggactcatctgactgagatccctcatggaaaagggaattccactttcagactgcctttgtattctggactgcagcatcartggttccctgggtctccagcttgccagcctgctctgtagattttagacttaccagcccccatcatcatgtgagccaactccttaaaataaatcgctctatcttttt

SEQ ID NO: 428841 - DNA, 598 bp, Homo sapiens
atttttactatgatacaaaactggatatgttgttttgtatttatccttcttgggtttgatagagctttttgaatttgtggattgaagtctctgttgttttggaatattctcaagcaatgtcatataagatacttgtgccctaccagctcctctccttctagggtttcagtaacttgtctgttagatctttgaatcatgtcctgtaagtttcttatcacctttgtttattttccatcttttttctccttctctgttatttagtttggatacttcaaattgacctattgacctattttccagttccaattctcttttaattaatctggaaattctaatctatttaataaagttcttaattttaatatttgccattttcattttagaatttttaaatgattatagtttttggtcagtttctttatcttgccatctatttttaaaaaatgytaatcacatttattttaacatccttctgtgagaactcaaaagtctacattacctggagtctcttcctgtattttatttttacactttttcttgatttctgaacatttaactctttctctcctggtatacctaaaaattttgtaaattaaat

SEQ ID NO: 428842 - DNA, 592 bp, Homo sapiens
ttcttgggttttaattttaaaatccagtttgtgattcttttttttttttttgagacagtcttgctctgtgcccagactggagtgcagtggcgtgatctcagttcactgcaacctccgcctcccaggttcaagcaattctcctgccttagcctcctgagtagctgggattacrggtgtgtgccaccgtaccctgctaattttttgtatttttagtagagacagggtttaccatgttggccaggctggtctcaaacttctgacctcaggtgatccacccaccttgtcctcccaaagtgctgagattacacgcctgagccacggcacccagcccagtttgtgattctttacattcctcttctctctgtcatggtgatcatagaactatatgttgagatgaattctgcatcagcctggattcctataagattattatgagcagtttcccttactgactcatactgaaaggataatgttggtaagagacaaatttttatttggttacctcttgagatttgggggctgtttattattgcgtataaccttgtctatccatctgatactgaaattaattacagagagtgtgctgttactg

SEQ ID NO: 428843 - DNA, 592 bp, Homo sapiens
ttcttgggttttaattttaaaatccagtttgtgattcttttttttttttttgagacagtcttgctctgtgcccagactggagtgcagtggcgtgatctcagttcactgcaacctccgcctcccaggttcaagcaattctcctgccttagcctcctgagtagctgggattacgggtgtgtgccaccgtrccctgctaattttttgtatttttagtagagacagggtttaccatgttggccaggctggtctcaaacttctgacctcaggtgatccacccaccttgtcctcccaaagtgctgagattacacgcctgagccacggcacccagcccagtttgtgattctttacattcctcttctctctgtcatggtgatcatagaactatatgttgagatgaattctgcatcagcctggattcctataagattattatgagcagtttcccttactgactcatactgaaaggataatgttggtaagagacaaatttttatttggttacctcttgagatttgggggctgtttattattgcgtataaccttgtctatccatctgatactgaaattaattacagagagtgtgctgttactg

SEQ ID NO: 428844 - DNA, 592 bp, Homo sapiens
ttcttgggttttaattttaaaatccagtttgtgattcttttttttttttttgagacagtcttgctctgtgcccagactggagtgcagtggcgtgatctcagttcactgcaacctccgcctcccaggttcaagcaattctcctgccttagcctcctgagtagctgggattacgggtgtgtgccaccgtaccctgctaattttttgtatttttagtagagacagggtttaccatgttggccaggctggtctcaaacttctgacctcaggtgatscacccaccttgtcctcccaaagtgctgagattacacgcctgagccacggcacccagcccagtttgtgattctttacattcctcttctctctgtcatggtgatcatagaactatatgttgagatgaattctgcatcagcctggattcctataagattattatgagcagtttcccttactgactcatactgaaaggataatgttggtaagagacaaatttttatttggttacctcttgagatttgggggctgtttattattgcgtataaccttgtctatccatctgatactgaaattaattacagagagtgtgctgttactg

SEQ ID NO: 428845 - DNA, 656 bp, Homo sapiens
ttttgcctctttctccagggaggacttaatgttaatctacctggcagttagagcgggagcagattacctttaccaaatctgggattgagctcgttcaacactggatttttataagagctttgttcttaatcctacagtctggtcctttcaaagtcttttccagaggtctgggttgtttatcggggctgtcwtttttgggagccccagaactcccatgttttcctcctcaggctcattaggctgttgtgaaaactcaactcaactcatagtttcagggttttggtcactgttttctgctttgcttcttggcctcttcacctggctcttcttatagcctgacaaatgcctggaagggaaaaacactatgctccacttcccttctcttcatgatcttgaattctcaaattattatcttcaaacaaatacatggtgtattttctccaacttttctaattgtttcagactaagcttgtggaagaattgttctgcaattctgcactaacatcaggaacaggcaatcttgtaggctttcttcagtgagagaaaggtactcagtttcatgttatactcccagtgactttcacaactcttgatgcatgaaagtgctcagaaattttttcaacgaataaaaatgtgcaagagaagcatgacctaac

SEQ ID NO: 428846 - DNA, 584 bp, Homo sapiens
ctttacattcctcttctctctgtcatggtgatcatagaactatatgttgagatgaattctgcatcagcctggattcctataagattattatgagcagtttccyttactgactcatactgaaaggataatgttggtaagagacaaatttttatttggttacctcttgagatttgggggctgtttattattgcgtataaccttgtctatccatctgatactgaaattaattacagagagtgtgctgttactgaatcaaaaacttaaataaggcgacattgtcatagtagttattgggtggcaaagaaactgttattggaggctggaaagacagtaatctatattttgatgatgtggaacatttgacaaaactgtactttggtaattgtagctctaggaaaagagggagaaaaatgtagtgttggttctttgtgttgattgatattggctgctttttcaagaaatgagatgtgttaaaaaatgaatcagctaatatatgagcagaagtgaagggggattgagagtccgtaaattcatggattgtttttgaattttatataaatgaaattatacaatgtgtattttgt

SEQ ID NO: 428847 - DNA, 578 bp, Homo sapiens
aaacttaaataaggcgacattgtcatagtagttattgggtggcaaagaaactgttattggaggctggaaagacagtaatctatattttgatgatgtggaacatttgacaaaactgtactttggtaattgtagctctaggaaaagagggagaaaamtgtagtgttggttctttgtgttgattgatattggctgctttttcaagaaatgagatgtgttaaaaaatgaatcagctaatatatgagcagaagtgaagggggattgagagtccgtaaattcatggattgtttttgaattttatataaatgaaattatacaatgtgtattttgtgtctggcttcctttgttcagcattatgtttgagattcattcatcttgttctgtgtaactgcatttatttagttttactaaaatatattatttaattatatgaatatatctcaatgttttatccactctactgtcaatggatatttatgttgttttttagttttgactactgtaaataatgtcattgagaacctttttgtacatgtcccatctatgggacagttatctaggaatagaattactgggtcata

SEQ ID NO: 428848 - DNA, 578 bp, Homo sapiens
aaacttaaataaggcgacattgtcatagtagttattgggtggcaaagaaactgttattggaggctggaaagacagtaatctatattttgatgatgtggaacatttgacaaaactgtactttggtaattgtagctctaggaaaagagggagaaaaatgtagtgttggttctttgtgttgattgatattggctgctttttcaagaaatgagatgtgttwaaaaatgaatcagctaatatatgagcagaagtgaagggggattgagagtccgtaaattcatggattgtttttgaattttatataaatgaaattatacaatgtgtattttgtgtctggcttcctttgttcagcattatgtttgagattcattcatcttgttctgtgtaactgcatttatttagttttactaaaatatattatttaattatatgaatatatctcaatgttttatccactctactgtcaatggatatttatgttgttttttagttttgactactgtaaataatgtcattgagaacctttttgtacatgtcccatctatgggacagttatctaggaatagaattactgggtcata

SEQ ID NO: 428849 - DNA, 578 bp, Homo sapiens
aaacttaaataaggcgacattgtcatagtagttattgggtggcaaagaaactgttattggaggctggaaagacagtaatctatattttgatgatgtggaacatttgacaaaactgtactttggtaattgtagctctaggaaaagagggagaaaaatgtagtgttggttctttgtgttgattgatattggctgctttttcaagaaatgagatgtgttaaaaaatgaatcagctaatatatgagcagaagtgaagggggattgagagtccgtaaattcatggattgtttttgaattttatataaatgaaattatacaatgtgtattttgtgtctggcttcctttgttcarcattatgtttgagattcattcatcttgttctgtgtaactgcatttatttagttttactaaaatatattatttaattatatgaatatatctcaatgttttatccactctactgtcaatggatatttatgttgttttttagttttgactactgtaaataatgtcattgagaacctttttgtacatgtcccatctatgggacagttatctaggaatagaattactgggtcata

SEQ ID NO: 428850 - DNA, 578 bp, Homo sapiens
aaacttaaataaggcgacattgtcatagtagttattgggtggcaaagaaactgttattggaggctggaaagacagtaatctatattttgatgatgtggaacatttgacaaaactgtactttggtaattgtagctctaggaaaagagggagaaaaatgtagtgttggttctttgtgttgattgatattggctgctttttcaagaaatgagatgtgttaaaaaatgaatcagctaatatatgagcagaagtgaagggggattgagagtccgtaaattcatggattgtttttgaattttatataaatgaaattatacaatgtgtattttgtgtctggcttcctttgttcagcattatgtttgagattcattcatcttgttctgtgtaactgcatttatttagttttactaaaatatattatttaattatatgaatatatctcaatgttttatccactctactgtcaatggatatttatgttgttttttagttttgactactgtaaataatgtcattragaacctttttgtacatgtcccatctatgggacagttatctaggaatagaattactgggtcata

SEQ ID NO: 428851 - DNA, 592 bp, Homo sapiens
ttattggccttgaattatgtctgctgtgaagtacctgctcaagacttttgttttctagagtcttcttgcattccttggcttgtggtctcacattattttggcctctgcttctgtcatcgtatctctgraactgaccttcctgtgtccctcttataaagccccttgtaataacaacattggcccacctggataattcaggataatctacccatctcaagatgtttaacttaattacattggtgaagtttcttttgctatagaaggtagaatagtcacagattctggggatatgaacatctttggggggcactattcagctatatcctttgtggcttattcaccttgctatgtgctcaagaaagctagactcctgccaataatagtgaataaaattaaaagtccattgtcaataattaaaatttttttttctgtattattgttaaaactaacatttgcttaaattgtagtgccaaaatatttttaatatctctctgaacaatgatgagtgagtgatcttaatttctggaccatctaggtcaataatatttaaatggtaatagaaattttagtctgtttggaataatgtgtactt

SEQ ID NO: 428852 - DNA, 589 bp, Homo sapiens
ccttactctgttcattaaactttgagcaactgcagacaataatatttattacgtattactattattttttgcaattgttgtatcagcattggcatcaggaaaatgacctgcatggtgtgaattagcttgaagaaaacaaaacccccaaacaccaaaaagttaatgcaggctggaacctgctggaattacctaaggagaacaagatcaggaccaggggagtaatatgactcaagtcattcatgaccaaaagcttcataatctctagtgggtacttactacmtcccaggtactgtgccaagtgctttagatatattatttcatttaatcttccctgcaaccttttaggcactattgctggcagtcccattttgtagttgaataattttttcaaggctaggaatggtagagctggggtggaaatccaggcattctgaatccagggtccattttataacagttgctacatatttcatatcattccattatagaacagaactttacattatttttttaaaaaacattctgtagttatagtcttgtgcgatggtttgaatatttgtcccttccaaaacacatgctgaaacttaat

SEQ ID NO: 428853 - DNA, 589 bp, Homo sapiens
ccttactctgttcattaaactttgagcaactgcagacaataatatttattacgtattactattattttttgcaattgttgtatcagcattggcatcaggaaaatgacctgcatggtgtgaattagcttgaagaaaacaaaacccccaaacaccaaaaagttaatgcaggctggaacctgctggaattacctaaggagaacaagatcaggaccaggggagtaatatgactcaagtcattcatgaccaaaagcttcataatctctagtgggtacttactacatcccaggtacygtgccaagtgctttagatatattatttcatttaatcttccctgcaaccttttaggcactattgctggcagtcccattttgtagttgaataattttttcaaggctaggaatggtagagctggggtggaaatccaggcattctgaatccagggtccattttataacagttgctacatatttcatatcattccattatagaacagaactttacattatttttttaaaaaacattctgtagttatagtcttgtgcgatggtttgaatatttgtcccttccaaaacacatgctgaaacttaat

SEQ ID NO: 428854 - DNA, 589 bp, Homo sapiens
ccttactctgttcattaaactttgagcaactgcagacaataatatttattacgtattactattattttttgcaattgttgtatcagcattggcatcaggaaaatgacctgcatggtgtgaattagcttgaagaaaacaaaacccccaaacaccaaaaagttaatgcaggctggaacctgctggaattacctaaggagaacaagatcaggaccaggggagtaatatgactcaagtcattcatgaccaaaagcttcataatctctagtgggtacttactacatcccaggtactgtgccaagtgctttagatatattatttcatttaatcttccctgcaaccttttaggcactattgctggcagtcccattttgtagttgaataattttttcaaggctaggaatggtagagctggggtggaaatccaggcattctgaatccagggtccattttataacagttgctacatattycatatcattccattatagaacagaactttacattatttttttaaaaaacattctgtagttatagtcttgtgcgatggtttgaatatttgtcccttccaaaacacatgctgaaacttaat

SEQ ID NO: 428855 - DNA, 494 bp, Homo sapiens
tggtgggaagtaaaagctgaggaagtcttgaaaatggcatgcactttgaatctgttcttcaggcaacacacagatccatcagcagagtggaagccttgctggcctgaggtttctgagcacaacctgtgaaaaatctttgcatgaacactaagctatgtaaatatatcagtgatttctggaaaaccaggcttggccataaaagcaagaaaaaaaaaaaaaagaatgagcagagacgttatgactgagacacattttacagatttagtctagactagttattaaacaatcagcaacacaataagcctcagagagtaaataaaaatccagagtttctgcagtatattatctaaaatgtccattattcaacaaaaaattacaagatatgcaagaaaacaagtgmgacctatgcccaggaaaaaaacagttaattgaaaatctctggatttctccagattttgcatttagctgagaaagactttaaagcaagtatgatg

SEQ ID NO: 428856 - DNA, 607 bp, Homo sapiens
tgtgtagttatgaaaggcaaaatacaatcatgaaggtataataattatagatgtatatgtaactaataacacagccatacttgaaagaaagtgtgataaaattaagatgaggaaaaggtaatttaagaataataattggagatttaattactgtattctcaaaaactaatggaccaactagacagaaaatcagcaaggttaaaaaaagctagaacaacattatcaaacagctcaatctaactaatatacatactgagtaactacagaatacacattcttttcaggtgcacatataaaattcttcaggataggccrtattctgggccacaaaacaaggctcaatttaaaaactattgaaatcataagtaggttctctgaccactgcggaatttgattacacctctgcaacaacaaaaatcagagaaacttgtacacatatctcaaaattaaccttctatttaacccacgggtgaaagaagaaataaaaatggaaatttaaaagtattttgaactgaatggaaacgaaaatacaacatatcaaaatttagttaaagcaatgtttagaccaagagggcttagcaaggtttataaaatctgcagttgaaat

SEQ ID NO: 428857 - DNA, 607 bp, Homo sapiens
tgtgtagttatgaaaggcaaaatacaatcatgaaggtataataattatagatgtatatgtaactaataacacagccatacttgaaagaaagtgtgataaaattaagatgaggaaaaggtaatttaagaataataattggagatttaattactgtattctcaaaaactaatggaccaactagacagaaaatcagcaaggttaaaaaaagctagaacaacattatcaaacagctcaatctaactaatatacatactgagtaactacagaatacacattcttttcaggtgcacatataaaattcttcaggataggccatattctgggccacaaaacaaggctcaatttaaaaactattgaaatcataagtaggttctctgaccactgcggaatttgattacacctctgcaacaacaaaaatcagagaaacttgtacacatatctcaaaattaaccttctatttaacccacgggtgaaagaagaaataaaaatggaaatttaaaagtattttgaactgaatggaaaygaaaatacaacatatcaaaatttagttaaagcaatgtttagaccaagagggcttagcaaggtttataaaatctgcagttgaaat

SEQ ID NO: 428858 - DNA, 590 bp, Homo sapiens
agagaattattaatatgtcatgaatttttctctctttctaccagaaggcatcccaagaattatgtgtcccagacaaatgactgtttacgtttctgagcctttatgttaaaatctggtgattgtggagcataaaatatttgaaattgttcaatctgtgatgttaaatatcttaagtatataatttataaaataaaataaatcactgaatcaaaagaatcattaaacatatagaaaaattattttaaaaattttgaataaataaaataatgtgtataactataataaatactagatcatatcctaaaggtggcaaaataccaaaaaaattttatattaataccaaattttttatttgacataattgtttcaatgatgaataccaaaatgacagtaacttaaaaaagttagaaagtgagatccgtgtaaggcaaaggtttgtaggtatgtagatcagycctgttgtggtggctttgcttcacaaagcagtaaggacttaagatttcttctagcttacagtttttctgggatgtcctccatttccaaagacaccccatggcccataatggcagctttctctttagccatcatat

SEQ ID NO: 428859 - DNA, 600 bp, Homo sapiens
  misc_feature (1)...(600): n = A,T,C or G
atgctgtgtaacctacacaatcctcccctgtagtttaaatcatctcaaaattacttatgatacctagtaccacgtaaatactaggtaagtagtagttatactgtattgtttttaaacttgtatttttaaaatttttgktttttttattattttttttcaaaatacttttaatctgttggttgaatctgcagctgtggaaccagtagatacatgaggttactgtatttttgcatatgatataagataataaacatgtgtcatataattattgctattattattatgttgggaaaaatagaattatgaataacaattagccnaagtctctaagccttcaataggggtgagatgtggggagaanctacaatgtgaaccaaagcactgggtagggctcaaaggataganaaagtacttaactgagagggatttctggatccatcatttatttataaagcaattcttatgttctttctttagctaaaaaattttccaatcttcatacatatttctacatgtattatacaaattatggtataattattgtattgtttgtaggtaatatgaggtatagactaaaaataagtagttaaagcctactat

SEQ ID NO: 428860 - DNA, 583 bp, Homo sapiens
  misc_feature (1)...(583): n = A,T,C or G
gtccttatgttcctagaacaagtggcctaggcagggctcattgcaaaaagatattatttgtatacacagtcatctttttggtatcctgaggaataggttccaggacttctacagatatcaaactccccagatgatcaagtcccttatataaaatggcatagtatttgcatgctgtgtaacctacacaatcctcccctgtagtttaaatcatctcaaaattacttatgatacctagtaccacgtaaatactaggtaagtagtagttatactgtattgtttttaaacttgtatttttaaaatttttgttttttttattattttttttcaaaatacttttaatctgttggttgaatctgcagctgtggaaccagtagatacatgaggttactgtatttttgcatatgatataagataataaacatgtrtcatataattattgctattattattatgttgggaaaaatagaattatgaataacaattagccnaagtctctaagccttcaataggggtgagatgtggggagaanctacaatgtgaaccaaagcactgggtagggctcaaaggataganaaagtactta

SEQ ID NO: 428861 - DNA, 604 bp, Homo sapiens
aactaaaaaataagtctgccctcagtcacacattaagatatgacacactcatatcattctaaacatatttcttggtataataaccccacattaaaaagattggccaaaattgtaaagctcttttgaggacttttaataggaggtatggactaaaaataagtaggtaaagcctacaattctgaaagaatgttcagggaacctgagtcttaagtaactttttaaaagaaggttctatggtcaaatgtttagtaaaggttatttatccctatattgggatttcagtattcactttaggacagttaagactcagtttttgaaaaaaaaattctttaattctgtttracgtggcatttggcaattgtatttgactacgaaaagcaattacggttggccccctgtatctatgagttatgcattgatagattcaattaaccacagatcaaaaaatattggataaaaagatgtgcctgggctgggtgcagtggctcatgcctgtaatcccagcactttgggaagccgagacaggtggatcacttgaggtcaggagttggaaaccagcctggccaacaggatgaaaccccatctctactaaaaatatgaaaat

SEQ ID NO: 428862 - DNA, 604 bp, Homo sapiens
aactaaaaaataagtctgccctcagtcacacattaagatatgacacactcatatcattctaaacatatttcttggtataataaccccacattaaaaagattggccaaaattgtaaagctcttttgaggacttttaataggaggtatggactaaaaataagtaggtaaagcctacaattctgaaagaatgttcagggaacctgagtcttaagtaactttttaaaagaaggttctatggtcaaatgtttagtaaaggttatttatccctatattgggatttcagtattcactttaggacagttaagactcagtttttgaaaaaaaaattctttaattctgtttgacgtggcatttggcaattgtatttgactacgaaaagcaattacggttggccccctgtatctatgagttatgcattgatagattcaattaaccacagatcaaaaaatattggataaaaagatgtgcctgggctgggtgcagtggctcatgcctgtaatcccagcactttgggaagcygagacaggtggatcacttgaggtcaggagttggaaaccagcctggccaacaggatgaaaccccatctctactaaaaatatgaaaat

SEQ ID NO: 428863 - DNA, 399 bp, Homo sapiens
ggcattctaagtcagaagatgagaaaggaggttggtgcaagatacaggtcataaagatcttgctgataaaacagtgtgcaataaagaagcccgccaacacccaccaaaaccaagatggcaatgaaactaacctttggttgttctcactgctcattacaggctaattataatgctaagagacactctcactrgtgccatgacagtttacaggtgccatggcaatgtcaggaaattacccaatatggtctaaaaaggggaggaaccctcagttccgggaactggctaccccttttccagaaaactcagtaataatccaccccttgtttagcgtataataaagaaagaaccataagaattgacaaccatcagcccttggggctgctctgtctatggagtagc

SEQ ID NO: 428864 - DNA, 399 bp, Homo sapiens
ggcattctaagtcagaagatgagaaaggaggttggtgcaagatacaggtcataaagatcttgctgataaaacagtgtgcaataaagaagcccgccaacacccaccaaaaccaagatggcaatgaaactaacctttggttgttctcactgctcattacaggctaattataatgctaagagacactctcactggtgccatgacagtttacaggtgccatggcaaygtcaggaaattacccaatatggtctaaaaaggggaggaaccctcagttccgggaactggctaccccttttccagaaaactcagtaataatccaccccttgtttagcgtataataaagaaagaaccataagaattgacaaccatcagcccttggggctgctctgtctatggagtagc

SEQ ID NO: 428865 - DNA, 399 bp, Homo sapiens
ggcattctaagtcagaagatgagaaaggaggttggtgcaagatacaggtcataaagatcttgctgataaaacagtgtgcaataaagaagcccgccaacacccaccaaaaccaagatggcaatgaaactaacctttggttgttctcactgctcattacaggctaattataatgctaagagacactctcactggtgccatgacagtttacaggtgccatggcaatgtcaggaaattacccaatatggtctaaaaaggggaggaaccctcagttccgggaactggctaccccttttccagaaaactcagtaataatccaccccttgtttagcktataataaagaaagaaccataagaattgacaaccatcagcccttggggctgctctgtctatggagtagc

SEQ ID NO: 428866 - DNA, 526 bp, Homo sapiens
  misc_feature (1)...(526): n = A,T,C or G
tacacacacagtatatatcatcacagtataaatttttttctgggtatctgaattattgttaaaactgtctttgaatatgtttataaggccattttataagtttcagagataaaatcttttagattttcagttattacccatggatttttgggctttgtgaaaatatatagtacagaaaatttctgcaggtccagcagaaatcaactttatggggatagactgggtataaaaattaatggagagtataaagccactgcagacttcttggattactagtagattcgaaaatgaacaagtatttgcatgagcagtagtttgactgcttattatactttgctcttttctctggtcacattacatgatgtaasccgatgaatcagaaattggatctgcatggggaatgtgggtgaccacaatttcctactaacntagttatacagacattcccaaatcccctgaagtcattttggaaatcaaccaaagctccagatttgttagggacatttgctaaagtgcttacaggtag

SEQ ID NO: 428867 - DNA, 528 bp, Homo sapiens
cttctttctccttttgtatgaattttttttccttttccttatctccttctttcctctccccaaatgtaaaatgaacsttgggacaaatttgtgatccgtagggaatttcaagttctattctgcaggtgtcttttgacattcactatgtctgggttttggggctgatcatatatatcggggacccttaaattatttgaccgtctgggcactgccaggtttctcttatcactaagaatctcccattataggcttcccaatcctttctctcagacggatattaaaaaacaaatgtcatatctttgggttacatggtggcttttacagttgtccagttacagagtgtgtggcagtcataaggttctagaaatgtttaataccgtaacacataacaaaattatagttaaataatactttatattaaataccatctgctatggtgaagaacccgattcttggattatggcattttgatagtagaatgcttcatttagattcttgtggtttgaagtgtaaaggtgaaaaaaaggg

SEQ ID NO: 428868 - DNA, 625 bp, Homo sapiens
actttccttatttcctgggctgatcttaagatacatcttgccatmtacattgttttctcttgtaccttactctggcattaaaatgaattaaaacaatttttttttgtctgctgatttttaccagttactcctgtttttttagccattcctttgtctgtgttcacacattattttattggtactccaattacagcagattttacagcatattataactaatagttcattattttctctgttcctcaaactgtattgtttgaaaacaaccaagtctctttttacctttatattgccagtgactattacagtgctttatatttgtgtttcaaaaatggaaaagcttgcagacatttttccttaattttttgttttactcttgccagtgttttatgctataataaaaataactgaatattccaatatttttcttattctcatttgagggttgttatttatacttatatgccaccagttggcatattttgtatgcactccaaaaagcacctcagggatggccaaaatactgtgaagggaggcttgaaaaaattagattttggcaataatcatccataagcacggattttgaaaatcatctggaaatgataattatcccaggtaaaaaatg

SEQ ID NO: 428869 - DNA, 625 bp, Homo sapiens
actttccttatttcctgggctgatcttaagatacatcttgccatctacattgttttctcttgtaccttactctggcattaaaatgaattaaaacaatttttttttgtctgctgatttttaccagttactcctgtttttttagccattcctttgtctgtgttcacacattattttattggtactccaattacagcagattttacagcatattataactaatagttcattattttctctgttcctcaaactgtattgtttgaaaacaaccaagtctctttttacctttatattgccagtgactattacagtgctttatatttgtgtttcaaaaatggaaaagcttgcagacatttttccttaattttttgttttactmttgccagtgttttatgctataataaaaataactgaatattccaatatttttcttattctcatttgagggttgttatttatacttatatgccaccagttggcatattttgtatgcactccaaaaagcacctcagggatggccaaaatactgtgaagggaggcttgaaaaaattagattttggcaataatcatccataagcacggattttgaaaatcatctggaaatgataattatcccaggtaaaaaatg

SEQ ID NO: 428870 - DNA, 559 bp, Homo sapiens
taatttcctttttcatcagtagatgatattatttttctctgtcaatgatgttctaattgccaatgacattytaatgatgagcatttgaccaattcttattaatgagatataagtctatctgggtatctagggattatgggaaacattttctctctatatattataatacacacacatatggagagtgctatgaaaggagagcactctggctacttgttgccttttgtttttggatgcaattataacatctggctctacagcagccatcttatgctcatgaggagacaaatctaaggataaggagtcaaaatattcaggatggtgaagcaaagtacagaaggagcctaggtttactgatggcattgttcaatggttgaatcaacactgatactgcctacttctggacttgtcaaatgtctgatctaagtcattaagatttctgtcacttgtaaacacactctaatagatacactgccatagttaaggcaaagagcaaaaaggtggggatgtcttcttcagatgtctgcctcactttgtggtgtgcaattgtgtgagactc

SEQ ID NO: 428871 - DNA, 522 bp, Homo sapiens
gagctgaactgaaggaaattgagatgcaataaaccatccaaaagactgatgaaactaaaactttgttttttgaaagaataaatacgactgatagacttctagctagagtaataaagaaaaaaggagaaaagatccaaataaatataattagaaatgacaaagggaacactaccattggcaccccacagaaasacaaaaaaacccttagtgactattatgaacacctctatgcacacaaactaggaaaccttaaagaaataaattcctgaaaacatatgaactcccaagattgagccaggaagaaatgaaaaacctgaacagaccaataatgagttttaaaattgaatcaataataaaaagtctacaacccaaaaagattcctggaccagttggattcacagatggattcacccagacatgtaaagaagagcttagtaccaatcctactgaaactatttcgaaaatttgtggaggggagaactctacttaacttattctataaggccagcatcattctattac

SEQ ID NO: 428872 - DNA, 522 bp, Homo sapiens
gagctgaactgaaggaaattgagatgcaataaaccatccaaaagactgatgaaactaaaactttgttttttgaaagaataaatacgactgatagacttctagctagagtaataaagaaaaaaggagaaaagatccaaataaatataattagaaatgacaaagggaacactaccattggcaccccacagaaagacaaaaaaacccttagtgactattatgaacacctctatgcacacaaactagraaaccttaaagaaataaattcctgaaaacatatgaactcccaagattgagccaggaagaaatgaaaaacctgaacagaccaataatgagttttaaaattgaatcaataataaaaagtctacaacccaaaaagattcctggaccagttggattcacagatggattcacccagacatgtaaagaagagcttagtaccaatcctactgaaactatttcgaaaatttgtggaggggagaactctacttaacttattctataaggccagcatcattctattac

SEQ ID NO: 428873 - DNA, 522 bp, Homo sapiens
gagctgaactgaaggaaattgagatgcaataaaccatccaaaagactgatgaaactaaaactttgttttttgaaagaataaatacgactgatagacttctagctagagtaataaagaaaaaaggagaaaagatccaaataaatataattagaaatgacaaagggaacactaccattggcaccccacagaaagacaaaaaaacccttagtgactattatgaacacctctatgcacacaaactaggaaaccttaaagaaataaattcctgaaaacatatgaactcccaagattgagccaggaagaaatgaaaamcctgaacagaccaataatgagttttaaaattgaatcaataataaaaagtctacaacccaaaaagattcctggaccagttggattcacagatggattcacccagacatgtaaagaagagcttagtaccaatcctactgaaactatttcgaaaatttgtggaggggagaactctacttaacttattctataaggccagcatcattctattac

SEQ ID NO: 428874 - DNA, 594 bp, Homo sapiens
aatgagatctagttaaactgaaaagcctctgcatagcaaaataaactgtcagtaaagagacaacctacggaatggaagaaaatatttgcaaactatgyatctgacaaagttctaatatccagagtcataagaaacttaaatcaacaagcaaaaaacaaccccactgaaaacagggcaaaggacatgaacagacacttatctaaaaaagacatacatacaaccaacaagcatatgaaaaaatgttcaacatgattgatcattagagaaatgcaagtcaaaactacctgagataccatctcatgccagtaagaatggctattaataaaaagtaaaaaaataaaagatgctggtaaggttgtggagaagagggaatgcttatactttgctggtaggaatgtaaattaattcagctactgtggaaagctgtttgaagatttcttatagaatttaaaatggagctgccattcggcccagagctaccattcagctcagcaatctcatactgggtatatacccaaaggagtgtaattcattcaatcataaaggcacatgcatgtacatattcactgcagaactattcacaatagcaaagac

SEQ ID NO: 428875 - DNA, 594 bp, Homo sapiens
aatgagatctagttaaactgaaaagcctctgcatagcaaaataaactgtcagtaaagagacaacctacggaatggaagaaaatatttgcaaactatgtatctgacaaagttctaatatccagagtcataagaaacttaaatcaacaagcaaaaaacaaccccactgaaaacagggcaaaggacatgaacagacacttatctaaaaaagacatacatacaaccaacaagcatatgaaaaaatgttcaacatgattgatcattagagaaatgcaagtcaaaactacctgagataccatctcaygccagtaagaatggctattaataaaaagtaaaaaaataaaagatgctggtaaggttgtggagaagagggaatgcttatactttgctggtaggaatgtaaattaattcagctactgtggaaagctgtttgaagatttcttatagaatttaaaatggagctgccattcggcccagagctaccattcagctcagcaatctcatactgggtatatacccaaaggagtgtaattcattcaatcataaaggcacatgcatgtacatattcactgcagaactattcacaatagcaaagac

SEQ ID NO: 428876 - DNA, 605 bp, Homo sapiens
gggtgtatagcttttaggtgattccgggagctcatgggtctaaaagtccagtgagaattaccrgcctatggtggtgcccttctgccacagattctagtcggcaaacagagattgctaaaacctgtaactcaaagggcaatttggatatgtggggcccgggggagggcagcctgaatgtctcattggaggacttccagaacatcctatgggtcatggcctcactcaaagatagcagcctgtctggtaattcaatagaaaggtactatcaagattctcacataccttcaataaactggaagaatgccagtagccacataggtcctccaatcactaggctttttttaaaatctgttggggcagacaaggccaaaacttggcaatcatctctggaatgagacattcttcccctttccagattaggcccagcaatttcacttgggtactaagtccttctacattgtctgtgttaatggcctagctctgttactgcacatgggtcaacaggatatccactttttaccaggcagttcccttgtctgggctaaccaagagatcaacagagtgaaaggccagtgctccactgggaagcaggacttttactaggg

SEQ ID NO: 428877 - DNA, 623 bp, Homo sapiens
tggggctctcttctatatgaatttagaaccatgtttttaagttatgtttaaaaagtcttttggggattttaattggaatagcactgaatttatacattaacttgagtgagaacagaaatctttataacactgagtcttccaatccatgaatatggtatatcccttcatttaattattcttttatctcctctaataatggtttatatttttctctatgaaagtgttttcaatatttctagaattttctctgagtatcttatawttttttaggctattttgaataagaatttttctactagagtaatctttcaaatcactcaatgatctttgagcattatttgctcaaagcaagacagctgcctaaaatcttttaagatattttcattacccttggtattaacatttagactctgacaggagatgtatatttctcttaaactgtttcttctctccccagcctcatctttcttactagcctcatcattctctttaaattccagccaggtagaacttgtgttaaccttgatttatttttccccttagctcctcatgtctattgaattcatggataagtgctgttaactccaaacctctatatccaaaatgcaaccacttttgtcatc

SEQ ID NO: 428878 - DNA, 591 bp, Homo sapiens
ttaataagtcgatttctctttcatttgtaaattatcatatagtttaatgactacagcttttttgtagatcttgatatctgaagggcaattccttctacacattcttttcatcaaaattattttatctattattggggctctcttctatatgaatttagaaccatgtttttaagttatgtttaaaaagtcttttggggattttaattggaatagcactgaatttatacattaacttgagtgagaacagaaatctttataacactgagtcttccaatccatgaatatggtatatcccttcatttaattattcttttatctcctctaataatggtttatatttttctctatgaaagtgttttcaatatttctagaattttctctgagtatcttatatttttttaggctattttgaataagaatttttctactagagtaatctttcaaatcactcaatgatctttgagcattatttgctcaaagcaagasagctgcctaaaatcttttaagatattttcattacccttggtattaacatttagactctgacaggagatgtatatttctcttaaactgtttcttctctccccagcc

SEQ ID NO: 428879 - DNA, 638 bp, Homo sapiens
ctatgtattaaattaaagcaaaatttaatttcaatgatgacgatgatgatgatgataatgatggtgatgataaactaatctggcatctattaatacaatgctaagtttagttcagctaatgttcttcttacttgacattctcaaatatggcatgatgaagttatttttcactttggcttcagctaaaatgattctttccagttttcaggagaaaacatttgccaggaaacagattatactgtccaacttctaatgagttactatgatcagtgagccaatttttctttagcctaggtaatattttaccagtaatattttaaaaagcataaaatatgatgraagttacctttcctccataaccatacctaataaattcacctcatgttatataccagttcggcttaagaatagtttcaaaacaagcgttgcactttaaaaattgcctagagatctaatttgcagtggtatctaattttcagctagggtgaggtgaagcatcagagcagatacagtttaccttgccacaaaatattgctcagtaagaagtaattatcaatattattattaattaccataattcatttctctcaggggattttcttcccattgactataggtaagtgaaaagcccagaacaa

SEQ ID NO: 428880 - DNA, 563 bp, Homo sapiens
catccttgcctcattcctaatcatagcaatagagtatctaatttttcactgtaagtttaatattagctgtaggtttttcataaatattcaccatcaagttgaggaaattctcactattcctggtttggtgagagtttttatcataagcaggttttggattgtcaaaagactttttctgcatcagttgataaaaaagtgttatctttcattagcctgttgatgtaatgggtaagactgatattctaatgttgaaccaggctttcatatgtgaaataaaatccacttggttatgatgtgtagttctttttatgcattgattctatttgctaatattttgttgacactttttgtatctgtgttcataagagatactagtctgtagtttatctttcttttcgaaaaaataattttattttttaattattgatttaattaatgaataaaaaattatacatgtgtatggtgtatgacatgttttaaaacttgtatacactgtggaatgacaaaatcaaaccaattarcatatgcattgtctcatatgcttgtgtttttgtggtggagac

SEQ ID NO: 428881 - DNA, 469 bp, Homo sapiens
acatattgaagattgttatgtcttcttggataattgacacctttacattatgcaatgcccctctttaaccctgataactttccttgctctgcagttctgtctaaaattaacagaggtactcctgctttcttttgattagtgtttgcatggtatacctttccccatccatttactttcagtctatatttgtctttatatttaaggcagtttcttgtagacaacatatattttggtcttgttttttgatccacactgacaatmtccatcttttaatatgtacatttagagcaatgacattcaaagtgattactgatataattagattaatatctactatatctgttactgtttctatttattgctcttgttctttgttcctatttttgtcttccattctttttctgcatcttcaagttttaattgagtatgtcatatgatcctttttctctcctttttttagtatatgagt

SEQ ID NO: 428882 - DNA, 571 bp, Homo sapiens
cttcaaaattcaggtttttaatggcagactaaatatcactatgtctaaaggcacctcaaactgaaacacagctgagatagaattcatcttcttctctccaaacacactctttcttctgtaaccatttttctggctaacgactatyccgtaaccaaaaattttgaatcactgaggcactttcaactcagatctctttcaaaaccaaccatccatcagtctcaaaattctctagatcatcctatctgaagtctctgaaaactgcatttttctactcacccaaaggaacactgccttagtataaagccacttcctcactgcctggattactatgaaagcttcctaactaggctctattacacaattataaaccttttctaactcaccctctgtttccagaactcagaatgtctgtactaatgataactttgattttatagaagcttactgtttccagagcatctttagatatacttctctggacacttcttttttttttttttttttttttttcttctgagacagagttgcccaggctggagtacaatggtgcaatctcggcttccaggttcaa

SEQ ID NO: 428883 - DNA, 571 bp, Homo sapiens
cttcaaaattcaggtttttaatggcagactaaatatcactatgtctaaaggcacctcaaactgaaacacagctgagatagaattcatcttcttctctccaaacacactctttcttctgtaaccatttttctggctaacgactattcygtaaccaaaaattttgaatcactgaggcactttcaactcagatctctttcaaaaccaaccatccatcagtctcaaaattctctagatcatcctatctgaagtctctgaaaactgcatttttctactcacccaaaggaacactgccttagtataaagccacttcctcactgcctggattactatgaaagcttcctaactaggctctattacacaattataaaccttttctaactcaccctctgtttccagaactcagaatgtctgtactaatgataactttgattttatagaagcttactgtttccagagcatctttagatatacttctctggacacttcttttttttttttttttttttttttcttctgagacagagttgcccaggctggagtacaatggtgcaatctcggcttccaggttcaa

SEQ ID NO: 428884 - DNA, 571 bp, Homo sapiens
cttcaaaattcaggtttttaatggcagactaaatatcactatgtctaaaggcacctcaaactgaaacacagctgagatagaattcatcttcttctctccaaacacactctttcttctgtaaccatttttctggctaacgactattccgtaaccaaaaattttgaatcactgaggcactttcaactcagatctctttcaaaaycaaccatccatcagtctcaaaattctctagatcatcctatctgaagtctctgaaaactgcatttttctactcacccaaaggaacactgccttagtataaagccacttcctcactgcctggattactatgaaagcttcctaactaggctctattacacaattataaaccttttctaactcaccctctgtttccagaactcagaatgtctgtactaatgataactttgattttatagaagcttactgtttccagagcatctttagatatacttctctggacacttcttttttttttttttttttttttttcttctgagacagagttgcccaggctggagtacaatggtgcaatctcggcttccaggttcaa

SEQ ID NO: 428885 - DNA, 571 bp, Homo sapiens
cttcaaaattcaggtttttaatggcagactaaatatcactatgtctaaaggcacctcaaactgaaacacagctgagatagaattcatcttcttctctccaaacacactctttcttctgtaaccatttttctggctaacgactattccgtaaccaaaaattttgaatcactgaggcactttcaactcagatctctttcaaaaccaaccatccatcagtctcaaaattctctagatcatcctatctgaagtctctgaaaactgcatttttctactcacccaaaggaacactgccttagtataaagccacttcctcactgcctggattactaygaaagcttcctaactaggctctattacacaattataaaccttttctaactcaccctctgtttccagaactcagaatgtctgtactaatgataactttgattttatagaagcttactgtttccagagcatctttagatatacttctctggacacttcttttttttttttttttttttttttcttctgagacagagttgcccaggctggagtacaatggtgcaatctcggcttccaggttcaa

SEQ ID NO: 428886 - DNA, 443 bp, Homo sapiens
ttcagctggcctgagaggataagaaggatttggctggaatagggaatggagcctactccaggatgcactaacatcacaaacagaggccacgcttggcgttatgtggcaagtccggctcactaatggccaaacgactgactctaatccaatmtggaaggccccacggtgctgctgatctggcctggagcagtgaaagaataacagcaggcctcctgcagagcagactgctggcgaacagaagggtggtcgttctgaaggtggggagaagaaactcacagatgtcgtaaatgcacagttttaagcacactggcttctgagaaacccacatcaacctggcagaaaaaggaaggaagtcaagactttggggagacctacaaacacgcaaaaacgtcactgcttcatacccaggctcctcccaggccataagagtccagccattgctg

SEQ ID NO: 428887 - DNA, 536 bp, Homo sapiens
aaatggtgcacctccagcatgatatacccaaagaagagtaagtgaagtaagkcagtctttttttggcttttcttgggggaaggggaaatgacagaataccactggttggttaaaactattataaatcctggcagttagagtgttaatttaacacaacccctcctttcccaaccaagtgctctttcttagacccgtctgataatgtgccttcagttaatgaaccttctttcctcccttccttcctcattactccactccctttccccaagggcattttaaaaaattttcttgtagtttgtaatgaagctttgcttcttcctcatcatattagaacctttctacttttatgcccaactactcagtgacaaaaatgtctttaccttgctctgcttaatgtcttctactacccaccacccccagtgtccagttaggatgtatgaaaatttcacttataccagtgtcatcattagggcttctgtgtggctgtctgcagggacatgctctgcattcagagagacactgggagacgacacgtt

SEQ ID NO: 428888 - DNA, 536 bp, Homo sapiens
aaatggtgcacctccagcatgatatacccaaagaagagtaagtgaagtaagtcagtctttttttggcttttcttgggggaaggggaaatgacagaatrccactggttggttaaaactattataaatcctggcagttagagtgttaatttaacacaacccctcctttcccaaccaagtgctctttcttagacccgtctgataatgtgccttcagttaatgaaccttctttcctcccttccttcctcattactccactccctttccccaagggcattttaaaaaattttcttgtagtttgtaatgaagctttgcttcttcctcatcatattagaacctttctacttttatgcccaactactcagtgacaaaaatgtctttaccttgctctgcttaatgtcttctactacccaccacccccagtgtccagttaggatgtatgaaaatttcacttataccagtgtcatcattagggcttctgtgtggctgtctgcagggacatgctctgcattcagagagacactgggagacgacacgtt

SEQ ID NO: 428889 - DNA, 570 bp, Homo sapiens
tgcctgatcctaaggttggtttaggtgttattctctggttctattgttattataatttgagtaactacttatgtgggtttattgcccattaacctgttaggaccycaagagaaggacatgtttcttgttcgctttgagtctccagcattgactcagaggaagtctcaataaagatttaggtatgaacgagaagaaaattactcagatgcactttgacctgactctcaagatccccgagcaacataagccactcaaccagtgccatctccttctatgtaaaacccagtcagcataatccaggtaaccttacttactatatggtttctctagagcctattgaaatgttaaaataggcctgcagacctttattactgtcgatgaagttttttaggaatctatgtacaccaatttggaaccactcctaaggacagtgatgtatggaaatgctgtattcccattatattttaagtacattttcaagagtactgttaagtaaggatatttaaattgctgttacgtgacgttagttctggaacacatttcttttttcacaagttaaatccttaagtc

SEQ ID NO: 428890 - DNA, 614 bp, Homo sapiens
tctcatgctgcagtgctgacatgtgtccctggctgttccatgtcttgtgcctaactttctcctaaagtaagaacaatagctactagactgtttctctgggtgctggcattgacaggctamatgctaagtgactacgatgaagacttgaaatattcttcatttgaaataaacagctaactcccaaattgtacctaactaggggagtttatcatgaagaaatgtttaaatgcttaattttaaaataagaagtaaccagagtgttgcaacatgctgttaaataacccgacaaacttcaatcactatagctgtagtagagtgcattctgcaaggatcccagagtaaccagtattttggaaatgcaatgttgaaccgaccatactaattatctgctgattaggaagtatgacccagtggttgccaagtgactttagtttctttttagttttgagtctgtgcatttcaaaatttggtgttgattgtgtatcagatgagtggctgcttcagaagtcaaaagagttctctactgtgtctggggctctaatttgtcaagctgtgtcctaattgtggcttgtgtttacaaagtgtcatcaatctgaatggggaaaaacaggaca

SEQ ID NO: 428891 - DNA, 576 bp, Homo sapiens
ttataggacagtgacaactagcccatgccaacatttagagtttgaaagaatgagaggaggaggttcaagcaaaggagaaagaaaggaggaaagccagaagaatgtcttggctgctgagtaaagaagctgttcaagratggagtgataatttatgtcagttgctgctgagaagttgaggactaagaattcaccattagatttgaaaacatggagactattgatggctgtgatgagggcagtttcatcagagcggtgtggataccaactacattggattctagagaaaatggaatgtgaggaagcatggctatagctagaattaatttctgccctctaaaatttacatgtgttgtacattatgtatttaaatagcaatgctaatataacaaggaacattcataaacaattaaagagataaagtatattattatgactgtgcttcttataagtacccacatgcttcatatttagtccaagaaaaccattacttccactttatatctacttatattataaaatgttcaattgggcttaaatacatggaaaatttcctatttaagaccctggtgctaattc

SEQ ID NO: 428892 - DNA, 583 bp, Homo sapiens
acagaggcgtttgcttacaccttgcctcagagccggggcatccttcctcgtctcttaccattgctaaagcatgttatcccctgtccggcctgaaaagctaagggagtaataatatgatgatcattatgtgaaaggaaagggacaaatcaggtctgttcttgacttatcacacgccacaagctaatgggtagagtacagagttgtcaggtatgagatccagtttccataacttggttctcaatggctaaatgtaaaacatggagtaaataacagagtttcttttcttgacttttcctctctgaagtattgaagtaatgatgttcctgcataattcatagcatgttatttgtttagtaagtgtaaacctcttgtatctccagagaagtaatccatggaaaacaaaagtgatgtttactactggccttgagaaaattcaacttttatttattcagcaacatttatttacagtcccaggcactgtaagaagcactagattagaaagataaataaaacatggtttctatcctcaagggcctacctgtcttgcagggcagatgtgtrtgtgtatgtgtgtgtgatgtca

SEQ ID NO: 428893 - DNA, 554 bp, Homo sapiens
ttgcttctgctgccagagctctggccatttcactgctcattagcactctccctggaaggtagagagcatgcggaaaggagatattagttgcttatagctctcataataagttaaaagaacagggcttgcgtgactaaaagaaagtatacgtatttttcttacttcagtgaatcactgtttccaagttcattactactataaggtgggatttgaaggcataaaaatggcagaagtggtagcattttagaaatcttgtttatatgtgctaacagtgctcttgaactctatcctgttttacttttccagatatgattcttctccaaycgtgaatttgccaaagcaggaaacggcacaatgttctgacccctgttgaccaagactatcagatctttcaaatgagagggttacttactgtcaacatatgttaacacatatttttaaaaattacatttcatttccatctccttctccctgtgaagagatttagcaaccactgcccagaatttctatcagccctcgcttcacgcacaaactaggcatatcttttcaatgaa

SEQ ID NO: 428894 - DNA, 535 bp, Homo sapiens
attcaacttacatagtagccatatgtggccctgatgcarctaatcaagggctgtgctgtttgtggtgattcacagaggaatgaataatcattttaggataatttgggcaatctcattagtgaaatggaagatttactaaaactgaaaagttcaagaattgagagcacaatcagtgctgccttttcttctagttgaaggtcaggactttataaaagaaaggtagatatggaaaatggctattatctattaaaattaattgctattgttacttaaccaagtagatcagataccacattcacagagaatatatttcaacagacatatgtttcaagtctctcatgactccattttaacaaatcagatctgttgtttgtcggttgaacagttataccaagagaccattcatctataaattatgtctgtttagttgaggcacctagctagaatgttgttcttggtcttaccaggtaactataaaagaaatgtggtagatttagaaagtgttcttatcaaatataaggacaatgtgaaagtg

SEQ ID NO: 428895 - DNA, 567 bp, Homo sapiens
ctctcagaggagaagcagaagttaaattaaacacagaggtttccatcttgtaggacaagaaacaggttaaggtagaggttgaagcagaatatgattttcattttgaaatttgaaggacctatggtgggggaaggggaaactagtagacaaatgtggaaaaaaaaagagtttggtaggggtaagggtggaaattcatatctaggtttcaaaaggtgaagtgctatagagagatggtgamtataaactgcaaatttactaatgttcaaaataaaaagaagaaacaagaagaagcagcaaagaagaaagttgtttgactattttccctgagtgaagtaacttgtacatttagctttttctctctgggctggacctagacaggtcataacataagttaaacgtgtatccatcttttcttcaaacaagtatactcaactcctattgtgttaagaaattgaagccaggatttaaaatgcaagttgggtcataacaccagcagtcaatgaatatttatttatcattagcttgccatattgcttaactaatactcacccaagctaaataattaaa

SEQ ID NO: 428896 - DNA, 567 bp, Homo sapiens
ctctcagaggagaagcagaagttaaattaaacacagaggtttccatcttgtaggacaagaaacaggttaaggtagaggttgaagcagaatatgattttcattttgaaatttgaaggacctatggtgggggaaggggaaactagtagacaaatgtggaaaaaaaaagagtttggtaggggtaagggtggaaattcatatctaggtttcaaaaggtgaagtgctatagagagatggtgaatataaactgcaaatttactaatgttcaaaataaaaagaagaaacaagaagaagcagcaaagaagaaagttgtttgactattttccctgagtgaagtaacttgtacatttagctttttctctctgggctggacctagacaggtcataacrtaagttaaacgtgtatccatcttttcttcaaacaagtatactcaactcctattgtgttaagaaattgaagccaggatttaaaatgcaagttgggtcataacaccagcagtcaatgaatatttatttatcattagcttgccatattgcttaactaatactcacccaagctaaataattaaa

SEQ ID NO: 428897 - DNA, 616 bp, Homo sapiens
tttccttatgtatctgttgagaatctggaccatttggctttcagttttccagtctgtatattgctgattgcatwctcatggtgacatacaaaaatgttccttagtgctttgtgtttcttccaatttggcagctggattcagagacaagatcagactcatgtttgattccttcggcaagacgttagttggtatttggcagggactataggaggcacttaaggtctggttgtctctgtgattttagcagctactgttgcttaatgcctatatccatcagttccttggagattaatggtgacattcaaagtttattatttctcttattgtttattatgaaaggaggcttctcccatctgctgtttgattatttactggtacagttcatatccaaaaggaaggatacctatttgcttctttctttttatttactattttccaaattaatataatcttccctcatcatcctgtaaagctgacaaactttaaaaaatcaatacagtcccatggatttaagcatatttgattggttgcaatccattacaattattattgaaactcgaattgtctcatatttggccactgcaaacattttgagggtggcttctttcatgaacaa

SEQ ID NO: 428898 - DNA, 596 bp, Homo sapiens
ggactgttatgttagtgaaatgatcgttggaaatatatactgctatagggttcttccaggtctgccaacattctgactcatagctgtactttaatatgaacagacataattattagatttcatggaaaagttctataacataaaatctcattgctttttactgggtaattatagatttatctactaaaaattttttttggatgtctcataattttattttatataaaattttactttaaattctgagatacatgtgcagaacatgcaggtttkttacataggtatacatgtgccatggtggtttgctgcacccatcagcccgtcatctaggttttgagccctgcatgcattaggtatttgtcctaatgctctccctccccttgcgtcccgaccccgcaacaggcccctgttatttgaagaaatactctttaaatttccttgctctaatctcatatggttttcataagaacaccagtggaatatatcaaagtgcaagcaagtctgataaatagtaaaacaggaaatgttaattggatgtttaagggtcatttaagaccagaactcaaccttaattcaagcaatatgttcagatataa

SEQ ID NO: 428899 - DNA, 596 bp, Homo sapiens
ggactgttatgttagtgaaatgatcgttggaaatatatactgctatagggttcttccaggtctgccaacattctgactcatagctgtactttaatatgaacagacataattattagatttcatggaaaagttctataacataaaatctcattgctttttactgggtaattatagatttatctactaaaaattttttttggatgtctcataattttattttatataaaattttactttaaattctgagatacatgtgcagaacatgcaggtttgttacataggtatacatgtgccatggtggtttgctgcacccatcagcccgtcatctaggttttgarccctgcatgcattaggtatttgtcctaatgctctccctccccttgcgtcccgaccccgcaacaggcccctgttatttgaagaaatactctttaaatttccttgctctaatctcatatggttttcataagaacaccagtggaatatatcaaagtgcaagcaagtctgataaatagtaaaacaggaaatgttaattggatgtttaagggtcatttaagaccagaactcaaccttaattcaagcaatatgttcagatataa

SEQ ID NO: 428900 - DNA, 616 bp, Homo sapiens
aacaacaacaaaccctccccactcccaccacaggttttgaagtatgcctttgtgtgagttttgtcacttgttgtattaagttgcagcagccagaacaattaaaagcatagtagcttggttatgtcatgtcttcttttcctcctcatttcttattttgttaaacattttcctttgtatttcttatcctataagtgaagcagcacagwgattttcttccttcagacagctctctacagggcctgtctgtgaaatttctccatctctgtcaaacgtcctttcaaaggttagaaaaaagtgctcataaccactgagattttccttttcttacaaatggggattagactgatatcagtatcacagttcagctgggaaaggtgatgggtaaaaaaaattggaagtgggaagcgagatggaaagtgtagattacatgctgatttcttttcagtgaaaatttttatggcatcggagcgcatattggatttaggtgtatgatttgtgacccattgaagtcatctgcattattctgaatcatgcaaatattttgtgatgtgattttgaatcaggtaagagagtagttctagcttatgtgtgtttttccctttttatctcaggcacc

SEQ ID NO: 428901 - DNA, 616 bp, Homo sapiens
aacaacaacaaaccctccccactcccaccacaggttttgaagtatgcctttgtgtgagttttgtcacttgttgtattaagttgcagcagccagaacaattaaaagcatagtagcttggttatgtcatgtcttcttttcctcctcatttcttattttgttaaacattttcctttgtatttcttatcctataagtgaagcagcacagtgattttcttccttcagacagctctctacarggcctgtctgtgaaatttctccatctctgtcaaacgtcctttcaaaggttagaaaaaagtgctcataaccactgagattttccttttcttacaaatggggattagactgatatcagtatcacagttcagctgggaaaggtgatgggtaaaaaaaattggaagtgggaagcgagatggaaagtgtagattacatgctgatttcttttcagtgaaaatttttatggcatcggagcgcatattggatttaggtgtatgatttgtgacccattgaagtcatctgcattattctgaatcatgcaaatattttgtgatgtgattttgaatcaggtaagagagtagttctagcttatgtgtgtttttccctttttatctcaggcacc

SEQ ID NO: 428902 - DNA, 572 bp, Homo sapiens
tcactctggtttatttaacggtgttgcgattgtactgggatatactttttcaggacatgtctagaagttagagaggtgctgtcagatggtaatagcatggtatttcattttctcatgctgcccaacagtttgatgaagagcaccattagaaagaaataaatactagttattcattctatttgaagcttgatgttctcttcctcatcttcaaaactgtctcaacaccactttgtggctagtaccttgttttgactctttatcctgactcggagatcatttcttcctaggtctcttcctcttttctcttcctatttttgtttctttggatatttcattcttaatatagaatttactcyttcctccctgttcctcttgacccttttgttaccgagcagcctcttgattgaactaaaaagtctagatagatttagttctctgctgatcccaagtaacctaacagattaggattttagattatgtcgttcatatgccattctccaatttgaaattctttggtgctttgcattttcttgctgcttaaaatgctatctaatattcatagctttaaatgt

SEQ ID NO: 428903 - DNA, 520 bp, Homo sapiens
tattatatctattcaaaattagttcctgctcatttcactcattttccttctgcaataggtcttgtttccagaattctctgttcaatcaattgtgttactttctggagaataaaaaagttacatcttatatttgtaaccatgtgtatatcactttccttaggacaatgtataatctatggtagatgttcagttaatgtgayttttgtttttagtttttcagtgtcaattacggtcttctttagatggatgggataaagattgatcttttattctctgttttagactttaagggcatgatctctggagtcctatcacctgggtttatctctaactcttgttttgctactttagacagtttacctaatgtctctgtaccttagtttcctcatctgtagaatggagacaatggctatactgaccttaagagagatatgagaactgagtaagagaatccatatcaagaagattttgtgtatgtaacatatatttctagattaatattgctaagaatatttccatg

SEQ ID NO: 428904 - DNA, 595 bp, Homo sapiens
cttctgcctggacatccaggcatttccatacagctcctgaaatctaggccaaggttcccactgacttcccatccacgggtccaataccacatggatgctgccaaggcttgggacttgcaccctctgaagcaacagcctgagttgtacattggccccttttaggcacatgtgatggttaatatttagtgkcaacttgactggattgaaggatgcaaaatattgttcctggaggtgtctgtgtgggtactgccaaaggagattaacatttgaatcagtggactaggagagacagacccaccctcaatcttggtgggcaccatctaatcagctgccagcatggctaggataaaagcaggcagaggaatatggaaggactagacaggctaagtcttctggcctccatctttctcccatgatggatgcttcctgccctcaaacattaaactccaagctattcagcttttggactcttgaacctacaccagtgatttgctaggggctctggggcctttggccacagactgaaggctgcactgttggcttccctacttttaggttttgggactcaaactggcttcctggctcctcagtttgc

SEQ ID NO: 428905 - DNA, 610 bp, Homo sapiens
gtgagtgtgtgtattagcctgttttcacactgccaataaagacatacccaagactgggtaatttacaaagaaaaagaggtttaatggactcacagttccatgtggctggggaggcctcccaatcacggcagaaggtgaaargcacatcttccatggcagtagacaagagagaaaatgagaaccaagcgaaaggggtttccccttataaaaccatcagatctcatgagatttattcaccaccatgagaacagtatgggggaaccacccctatgagccaattatctcccacctggtccctcccacaacatgtgggaattatgggagctacagttcaagatgagatttgggtggggacacagccaaaccatatcagtctgtaatacagtatcgagacaaaaatctgtagctgtaaaatttatagttctgtagagattagaagccctttaagcatctgaggaaacagacttgccaaataaataaataaaatctccaggattggccaatatcagtctatgcctattcagctccaaagataacctcaaaatggcaccaacaggaaatgagctacacaaaatatgtagctacatagtgtatgcatggccaaatgatt

SEQ ID NO: 428906 - DNA, 344 bp, Homo sapiens
tatcctatttcacagtgtctgtaaaagaaccagagcctactttcagcaggcacctggctgtaagttgcaaaactacctcctatcatgaagatgtcagaagtttatttttcctttcaatataaccaattaacatacacagatggcctccccaattaccaggtgaattcaggataaactgtgtatgacaaatggtgctgtcaagtcttctacttgaggactaattatagagacctttctgtctttgcaatctcttgagcagattgtctgtgattcttgtcacatcacattctggttttrttgtgcaataaaacactcttctttctggtctgttattgtggggtttt

SEQ ID NO: 428907 - DNA, 465 bp, Homo sapiens
atttcacctctttcagtgaccatagtgtcttcagacctgaaactgagttggagactattaggcccagaagaacaattagggtgacatgtgtgcattgagtaaatgtgagtatctcaaagttcctctttctcctcctccmcaaattcccaaaaatgtgcagttaacacctgccatttctccatccatccaggacctaaatctacaataccaaattctgaatctcggtcttgagattagaggaaaaagaataactttgatctgaggattgcaagtccttttggttttatcaggttcggagagacataaaaatgagaacataattatgttctactgcctcttttgagctacatgtttacctcttgaaactgtttgctattcctacaagtagatataaattaacctaataatgccacactagatgttataagcaatacctcacagcttaaaaatatatagccaattagt

SEQ ID NO: 428908 - DNA, 465 bp, Homo sapiens
atttcacctctttcagtgaccatagtgtcttcagacctgaaactgagttggagactattaggcccagaagaacaattagggtgacatgtgtgcattgagtaaatgtgagtatctcaaagttcctctttctcctcctccccaaattcccawaaatgtgcagttaacacctgccatttctccatccatccaggacctaaatctacaataccaaattctgaatctcggtcttgagattagaggaaaaagaataactttgatctgaggattgcaagtccttttggttttatcaggttcggagagacataaaaatgagaacataattatgttctactgcctcttttgagctacatgtttacctcttgaaactgtttgctattcctacaagtagatataaattaacctaataatgccacactagatgttataagcaatacctcacagcttaaaaatatatagccaattagt

SEQ ID NO: 428909 - DNA, 593 bp, Homo sapiens
tctaataaaattatcctagaaagccctaaaaattttggttaaattgcttattattatacgttataaaatagagtagtggctaaatggattaaaattatacaaactcttaagtttctcttggacaggcttaggaaagacagaacaagaagtactccagcagtatagagatcataattcaacataggacagtttctccaccccagctctgtccagattcaccattttctgagactcattcaggtctggtcccaccctggagtctctcctcacagaactcattagaggagaccagagatttgggaggtggctcctgctgcctctccagagcttatgctcacaataktctgaaacccaaaagcagataaattagagcaataaactatatattttgaggtcttaacttctttctttctaattaaaaccagtgcttgtagagacattccatcccagtagttactccacaagtcacaagaaagtaaatagaaacacactaaaaaatccctctaaactacacttaaccctttcctttctgtatccctcccatctgtctatatttatctcttatgctatacatttttttaaaaatcagtgag

SEQ ID NO: 428910 - DNA, 593 bp, Homo sapiens
tctaataaaattatcctagaaagccctaaaaattttggttaaattgcttattattatacgttataaaatagagtagtggctaaatggattaaaattatacaaactcttaagtttctcttggacaggcttaggaaagacagaacaagaagtactccagcagtatagagatcataattcaacataggacagtttctccaccccagctctgtccagattcaccattttctgagactcattcaggtctggtcccaccctggagtctctcctcacagaactcattagaggagaccagagatttgggaggtggctcctgctgcctctccagagcttatgctcacaatagtctgaaacccaaaagcagataaattagagcaataaactatatattttgaggtcttaacttctttctttctaattaaaaccagtgcttgtagagacattccatcccagtagttactccacaagtcacaagaaagtaaatagaaacacactaaaaaatccctctaaactacacttaaccctttcctttctgtatccctcccatctgtctatatttatctcttatgcyatacatttttttaaaaatcagtgag

SEQ ID NO: 428911 - DNA, 537 bp, Homo sapiens
tcaaactttattccaaagggaggtcacagggtctactatggttggatttggtaggtacaagttaatgtggcccatatccccattgctgtagcagaaattgttgcgtctgtggcaggaaaagagaaagataaattttgatctttgtggaggagctcactgtccttgaatctcacctgttataaagaacataaatgggtggacatgttctgcatgcctggatctttctacctgtgtttgtggtggtagcaggtgaagagattgtgctgattcctttaaaggcatattccmaagatgcaggtgtgacttgtccagagaatatcacctgagaagaaatgctagagaaggatgatgaagagaaaaatggctttttctcaggtgactgtgtctcagattaggagcagtgttcactctgcctcctggaatgccatatgtttagaacttacaaacctgtacttcttgactttatgctgtttctccctataagtttgtttaaacattttttcttctcatgatagtcaagcaactctgaaatatatt

SEQ ID NO: 428912 - DNA, 616 bp, Homo sapiens
tgatgtgaataaagcatcccatgtaatctggaatttctcttttcttcttagattgtctttgcatatgtctttctttaaaaagtgaagtctctcatctttgtttactggtcataaaaacccaggctctgtcacttaatgaatgtttgacaaaatatttatcttgggccagaaagattggtgtyacttgtgagcttgttagaaattcagaaactcaggttttacctcaggtttcttgaaacaaaatctgcataaaaagatctccagtttattgttgtacacattaaaatttgagaggtactttataactaagcctgactttttaatctgagaaatatgcagaacttatactgtatgattaaatggagcactcaaaaatgtacatgtctatgttcctgttgttaattttgtactttatcattcaaaaaatatcatcaatacactacactggtattgtgaatcttatgctctcttttctcagagatagagaatgcaacagagaatatttctttgttgggaattattttataggacaattttggtcgtatcagtcagaatcagttctcttcactcattttatcttgagtcaatttaagaattctgcccatggccacttgaa

SEQ ID NO: 428913 - DNA, 641 bp, Homo sapiens
atcattcaaaaaatatcatcaatacactacactggtattgtgaatcttatgctctcttttctcagagatagagaatgcaacagagaatatttctttgttgggaattattttataggacaattttggtcgtatcagtcagaatcagttctcttcactcattttatcttgagtcaatttaagaattctgcccatggcmacttgaagtgggtgtgtgtgtgttttcagggactgttgacattcagggatgtagccatagaattctgtctggaggagtgtcaatacctggatgctgctcagcagaatttgtgtatggatgtgatgttacagaactacagaaaccctgtcttcttggttgaggataacttcaatatagaattcctaatttaccctaaaggtttcattttcttcctttgtaggatgtgttttggtaatttctgctttgcatgagtaaatttcagatccctgttttcaagacaatcttgcggattttttggtgtggaaaatgaattcttcaggttgtttcattttgacctgaattttcccctttcctgagtttatctatgttattcactctagataagtggtaatttcagaaacttagtgacataaaataatgttgtccacaccttaaaattcaattg

SEQ ID NO: 428914 - DNA, 641 bp, Homo sapiens
atcattcaaaaaatatcatcaatacactacactggtattgtgaatcttatgctctcttttctcagagatagagaatgcaacagagaatatttctttgttgggaattattttataggacaattttggtcgtatcagtcagaatcagttctcttcactcattttatcttgagtcaatttaagaattctgcccatggccacttgaagtgggtgtgtgtgtgttttcagggactgttgacattcagggatgtagccatagaattctgtctggaggagtgtcaatacctggatgctgctcagcagaatttgtgtatggatgtgatgttacagaactacagaaaccctgtcttcttggttgaggataacttcaatatagaattcctaatttaccctaaaggtttcattttcttcctttgtaggatgtgttttggtaatttctgctttgcatgagtaaatttcagatccctgttttcaaracaatcttgcggattttttggtgtggaaaatgaattcttcaggttgtttcattttgacctgaattttcccctttcctgagtttatctatgttattcactctagataagtggtaatttcagaaacttagtgacataaaataatgttgtccacaccttaaaattcaattg

SEQ ID NO: 428915 - DNA, 528 bp, Homo sapiens
gaaatatgtaaaagtagtgatattgagatttggttcagaaatcccagaaatacaacacacatatgttgtatgttttctgctttatagtttcttattttatggaggtttcaaatgtgtttctacagaaattcatactcggtaatttaatcagaatattaagtatctctttaagaatatctaatgttatttgaattgaaatttttattcttttagyactaactgaggttggtaatttcaattctgtcttaatttctcaactgtaatataacgtagatatttcctacatttctacaattcactatgtcagggaacttagaacattactgagcatatgttaagctcccacttctttccttgttttttaaattactattttttaattttatcttgttcaggataaagtttaccagaactgtaatttatatgtgtgtatatatatgtaggtgtgtattgtggatttttttacaaataaaaattgtatatatatttattgtgtacaatgtaatgacttactgcatgtgtatattg

SEQ ID NO: 428916 - DNA, 528 bp, Homo sapiens
gaaatatgtaaaagtagtgatattgagatttggttcagaaatcccagaaatacaacacacatatgttgtatgttttctgctttatagtttcttattttatggaggtttcaaatgtgtttctacagaaattcatactcggtaatttaatcagaatattaagtatctctttaagaatatctaatgttatttgaattgaaatttttattcttttagtactaactgaggttggtaatttcaattctgtcttaatttctcaactgtaatataacgtagatatttcctacatttctacaattcactatgtcagggaacttagaacatwactgagcatatgttaagctcccacttctttccttgttttttaaattactattttttaattttatcttgttcaggataaagtttaccagaactgtaatttatatgtgtgtatatatatgtaggtgtgtattgtggatttttttacaaataaaaattgtatatatatttattgtgtacaatgtaatgacttactgcatgtgtatattg

SEQ ID NO: 428917 - DNA, 528 bp, Homo sapiens
gaaatatgtaaaagtagtgatattgagatttggttcagaaatcccagaaatacaacacacatatgttgtatgttttctgctttatagtttcttattttatggaggtttcaaatgtgtttctacagaaattcatactcggtaatttaatcagaatattaagtatctctttaagaatatctaatgttatttgaattgaaatttttattcttttagtactaactgaggttggtaatttcaattctgtcttaatttctcaactgtaatataacgtagatatttcctacatttctacaattcactatgtcagggaacttagaacattactgagcataygttaagctcccacttctttccttgttttttaaattactattttttaattttatcttgttcaggataaagtttaccagaactgtaatttatatgtgtgtatatatatgtaggtgtgtattgtggatttttttacaaataaaaattgtatatatatttattgtgtacaatgtaatgacttactgcatgtgtatattg

SEQ ID NO: 428918 - DNA, 525 bp, Homo sapiens
ttcctgtgttggcaggaattgttgtgaactgtggcaaagacagctgaaactgagtcactgaactccttcagcggccacagtagaggccaaggtctgcaggccacagtagaggcccagctggagtgcagtggcacaatctttgctcactgcaacctccgcctctgaggttcaagcaattctcctgcttcggcctcccgagtagctgggattataggtgcctgccaccatgcccagctaatttttttgtgtttttagtagagatgggrtttcaccatattggccaggctgatctctacctcctgacctcaggtgatccgcctgccttggcctcccaaagttctggcattacaggagtgagccaccatgcccagccttcttggctgattttcaacagttgtcttattatgtgaaggtgagtagtcatagaaacagtggtatattcactaggtgtttaatgataaatatatatattttctttgtgtgagagaaacactttagtgatttgaaggtgatttatgtttatat

SEQ ID NO: 428919 - DNA, 525 bp, Homo sapiens
ttcctgtgttggcaggaattgttgtgaactgtggcaaagacagctgaaactgagtcactgaactccttcagcggccacagtagaggccaaggtctgcaggccacagtagaggcccagctggagtgcagtggcacaatctttgctcactgcaacctccgcctctgaggttcaagcaattctcctgcttcggcctcccgagtagctgggattataggtgcctgccaccatgcccagctaatttttttgtgtttttagtagagatggggtttcaccatattggccaggctgatctctacctcctgacctcaggtgatccgcctgcctyggcctcccaaagttctggcattacaggagtgagccaccatgcccagccttcttggctgattttcaacagttgtcttattatgtgaaggtgagtagtcatagaaacagtggtatattcactaggtgtttaatgataaatatatatattttctttgtgtgagagaaacactttagtgatttgaaggtgatttatgtttatat

SEQ ID NO: 428920 - DNA, 525 bp, Homo sapiens
ttcctgtgttggcaggaattgttgtgaactgtggcaaagacagctgaaactgagtcactgaactccttcagcggccacagtagaggccaaggtctgcaggccacagtagaggcccagctggagtgcagtggcacaatctttgctcactgcaacctccgcctctgaggttcaagcaattctcctgcttcggcctcccgagtagctgggattataggtgcctgccaccatgcccagctaatttttttgtgtttttagtagagatggggtttcaccatattggccaggctgatctctacctcctgacctcaggtgatccgcctgccttggcctcccaaagttctggsattacaggagtgagccaccatgcccagccttcttggctgattttcaacagttgtcttattatgtgaaggtgagtagtcatagaaacagtggtatattcactaggtgtttaatgataaatatatatattttctttgtgtgagagaaacactttagtgatttgaaggtgatttatgtttatat

SEQ ID NO: 428921 - DNA, 525 bp, Homo sapiens
ttcctgtgttggcaggaattgttgtgaactgtggcaaagacagctgaaactgagtcactgaactccttcagcggccacagtagaggccaaggtctgcaggccacagtagaggcccagctggagtgcagtggcacaatctttgctcactgcaacctccgcctctgaggttcaagcaattctcctgcttcggcctcccgagtagctgggattataggtgcctgccaccatgcccagctaatttttttgtgtttttagtagagatggggtttcaccatattggccaggctgatctctacctcctgacctcaggtgatccgcctgccttggcctcccaaagttctggcattacaggagtgagccaccaygcccagccttcttggctgattttcaacagttgtcttattatgtgaaggtgagtagtcatagaaacagtggtatattcactaggtgtttaatgataaatatatatattttctttgtgtgagagaaacactttagtgatttgaaggtgatttatgtttatat

SEQ ID NO: 428922 - DNA, 620 bp, Homo sapiens
ttttaaggctgaataatattccactgtatgtatatgtcacwttttaaatttgtttatcagtcaagggatatctgggttacttctgccttctggcttttgtaaatattggtataatatatttatatatagtatatataaatatatgtgtatatatttatatataatatattggtataataaatatattataccaatatttatatttttaatacatatataaaatatatatttatttatataatatatatatttatttaatatatattatatttatatataaaatatataaaattggtataatatatttaatatatattatattaatatatattaaatatataaatattggtatatttattataccaatatttgaaatatatattcaaatatatcttccacgttctttgtttgaatatagatttatatttggagtatacatttatatttatgtttgaatatagatttataagtggaattcttggattccatttatatatatattaatatataaaaatgtattttatattccagtcaaataatatgatttatatttgaatctaggtttataagtggaattacataatttaaattttaagaaacattcataatatgatggttgc

SEQ ID NO: 428923 - DNA, 620 bp, Homo sapiens
ttttaaggctgaataatattccactgtatgtatatgtcactttttwaatttgtttatcagtcaagggatatctgggttacttctgccttctggcttttgtaaatattggtataatatatttatatatagtatatataaatatatgtgtatatatttatatataatatattggtataataaatatattataccaatatttatatttttaatacatatataaaatatatatttatttatataatatatatatttatttaatatatattatatttatatataaaatatataaaattggtataatatatttaatatatattatattaatatatattaaatatataaatattggtatatttattataccaatatttgaaatatatattcaaatatatcttccacgttctttgtttgaatatagatttatatttggagtatacatttatatttatgtttgaatatagatttataagtggaattcttggattccatttatatatatattaatatataaaaatgtattttatattccagtcaaataatatgatttatatttgaatctaggtttataagtggaattacataatttaaattttaagaaacattcataatatgatggttgc

SEQ ID NO: 428924 - DNA, 620 bp, Homo sapiens
ttttaaggctgaataatattccactgtatgtatatgtcactttttaaatttgtttatcagtcaagggatatctgggttacttctgccttctggcttttgtaaatattggtataatatatttatatatagtatatataaatatatgtgtatatatttatatataatatattggtataataaatatattataccaatattyatatttttaatacatatataaaatatatatttatttatataatatatatatttatttaatatatattatatttatatataaaatatataaaattggtataatatatttaatatatattatattaatatatattaaatatataaatattggtatatttattataccaatatttgaaatatatattcaaatatatcttccacgttctttgtttgaatatagatttatatttggagtatacatttatatttatgtttgaatatagatttataagtggaattcttggattccatttatatatatattaatatataaaaatgtattttatattccagtcaaataatatgatttatatttgaatctaggtttataagtggaattacataatttaaattttaagaaacattcataatatgatggttgc

SEQ ID NO: 428925 - DNA, 620 bp, Homo sapiens
ttttaaggctgaataatattccactgtatgtatatgtcactttttaaatttgtttatcagtcaagggatatctgggttacttctgccttctggcttttgtaaatattggtataatatatttatatatagtatatataaatatatgtgtatatatttatatataatatattggtataataaatatattataccaatatttatatttttaatacatatataaaatatatatttatttatataatatatatatttatttaatatatattatatttatatataaaatatataaaattggtataatatatttaatatatattatattaatatatattaaatatataaatattggtatatttattataccaatatttgaaatatatattcaaatatatcttccacgttctttgtttgaatatagatttatatttggagtatacatttatatttatgtttgaatatagatttataagtggaattcttggattccatttatatatatattaatatataaaaatgtattttatattccagtcaaataatatgatttatatttgaatctaggtttataagtggaattayataatttaaattttaagaaacattcataatatgatggttgc

SEQ ID NO: 428926 - DNA, 629 bp, Homo sapiens
tttgctttgcatgtcttgttatggatctgtgtgtttcctagttttagtatgttgagcttcttcatttttacaaccttattttcttacttttgagaatttctcaggtattcttaatttttcgagacagtgtcttgctctgtcacccaggtttgagtacagtggcatattgcagcttactgcagccttgggttcyctaggcttatgtgatcctcctacctcagcctcctgtttactgggaccacaggtgtgtgccaatacacctgactaattttaatttttatagaggagaagtattgccatgtttcccagtttaaacctgaactccctaggttcaagtgatgtgcctgcctcaaactccaaagtgctgggactacagacatgagccactacacctggcctcagttattatttctatttctattttctacttccataatttctattatatttttcatcttttccttgatattctatttttttctgattttatttagttacctgtgttcccatttaggttaaatttttaaaattaatgtgtacatctttattttcatggttgttttctgacagttttaagttttgttttttacttaggccatgtcactgtaatattttgtatgtattgtact

SEQ ID NO: 428927 - DNA, 629 bp, Homo sapiens
tttgctttgcatgtcttgttatggatctgtgtgtttcctagttttagtatgttgagcttcttcatttttacaaccttattttcttacttttgagaatttctcaggtattcttaatttttcgagacagtgtcttgctctgtcacccaggtttgagtacagtggcatattgcagcttactgcagccttgggttctctaggcttatgtgatcctcctacctcagcctcctgtttactgggaccacaggtgtgtgccaatacacctgactaattttaatttttatagaggagaagtattgccatgtttcccagtttaaacctgaactccctaggttcaagtgatstgcctgcctcaaactccaaagtgctgggactacagacatgagccactacacctggcctcagttattatttctatttctattttctacttccataatttctattatatttttcatcttttccttgatattctatttttttctgattttatttagttacctgtgttcccatttaggttaaatttttaaaattaatgtgtacatctttattttcatggttgttttctgacagttttaagttttgttttttacttaggccatgtcactgtaatattttgtatgtattgtact

SEQ ID NO: 428928 - DNA, 629 bp, Homo sapiens
tttgctttgcatgtcttgttatggatctgtgtgtttcctagttttagtatgttgagcttcttcatttttacaaccttattttcttacttttgagaatttctcaggtattcttaatttttcgagacagtgtcttgctctgtcacccaggtttgagtacagtggcatattgcagcttactgcagccttgggttctctaggcttatgtgatcctcctacctcagcctcctgtttactgggaccacaggtgtgtgccaatacacctgactaattttaatttttatagaggagaagtattgccatgtttcccagtttaaacctgaactccctaggttcaagtgatgtgcctgcctcaaactccaaagtgctgggactacagacatgagccactacacctggcctcagttattatttctatttctattttctacttccataatttctattatatttttcatcttttccttgatattctatttttttctgattttatttagttacctgtgttcccatttaggttaaatttttaaaattaatgtgtacatctttattttcatggttgttttctgacagttttaagttttkttttttacttaggccatgtcactgtaatattttgtatgtattgtact

SEQ ID NO: 428929 - DNA, 589 bp, Homo sapiens
tggagaaaatctctacaaacaaagaatgtgtcaaaacttctaacatgctyataccttatggcacataaaggcgtttatacttgaaaaattgtacagagtgtggaaaagccacttctatttgctcacatcatagtcaacatcaggaagttcatacttaataaaattattataaatgtaattacttttgaaagaccttggaaaatttaaacccttaaaaaagagtactctggagacaaacattacaaatataaagagggttgtaatacctttacttgccctatataatgtacagattttatgctagaagaaaactctaaaggaattactcaaacttgttcagcatcagagaatttatgttgaaggaaaccatacaaatgtaataaatgtggaaaaacatttgttcagaaactacagcttaaaaaacaccatgcagtttataataaaagatatttttgcagatggaatacatgtgtaaaaatatttattcaaaattaagtctttgtaaactttagaaaattcacagtagggaagaattaaggcactggcacttaagacgttacactaaatcagaatgttctgtatagaaagt

SEQ ID NO: 428930 - DNA, 589 bp, Homo sapiens
tggagaaaatctctacaaacaaagaatgtgtcaaaacttctaacatgctcataccttatggcacataaaggcgtttatacttgaaaaattgtacagagtgtggaaaagccacttctatttgctcacatcatagtcaayatcaggaagttcatacttaataaaattattataaatgtaattacttttgaaagaccttggaaaatttaaacccttaaaaaagagtactctggagacaaacattacaaatataaagagggttgtaatacctttacttgccctatataatgtacagattttatgctagaagaaaactctaaaggaattactcaaacttgttcagcatcagagaatttatgttgaaggaaaccatacaaatgtaataaatgtggaaaaacatttgttcagaaactacagcttaaaaaacaccatgcagtttataataaaagatatttttgcagatggaatacatgtgtaaaaatatttattcaaaattaagtctttgtaaactttagaaaattcacagtagggaagaattaaggcactggcacttaagacgttacactaaatcagaatgttctgtatagaaagt

SEQ ID NO: 428931 - DNA, 589 bp, Homo sapiens
tggagaaaatctctacaaacaaagaatgtgtcaaaacttctaacatgctcataccttatggcacataaaggcgtttatacttgaaaaattgtacagagtgtggaaaagccacttctatttgctcacatcatagtcaacatcaggaagttcatacttaataaaattattataaatgtaattacttttgaaagaccttggaaaatttaaacccttaaaaaagagtactctggagacaaacattacaaatataaagagggttgtaayacctttacttgccctatataatgtacagattttatgctagaagaaaactctaaaggaattactcaaacttgttcagcatcagagaatttatgttgaaggaaaccatacaaatgtaataaatgtggaaaaacatttgttcagaaactacagcttaaaaaacaccatgcagtttataataaaagatatttttgcagatggaatacatgtgtaaaaatatttattcaaaattaagtctttgtaaactttagaaaattcacagtagggaagaattaaggcactggcacttaagacgttacactaaatcagaatgttctgtatagaaagt

SEQ ID NO: 428932 - DNA, 589 bp, Homo sapiens
tggagaaaatctctacaaacaaagaatgtgtcaaaacttctaacatgctcataccttatggcacataaaggcgtttatacttgaaaaattgtacagagtgtggaaaagccacttctatttgctcacatcatagtcaacatcaggaagttcatacttaataaaattattataaatgtaattacttttgaaagaccttggaaaatttaaacccttaaaaaagagtactctggagacaaacattacaaatataaagagggttgtaatacctttacttgccctatataatgtacagattttatgctagaagaaaactctaaaggaattactcaaacttrttcagcatcagagaatttatgttgaaggaaaccatacaaatgtaataaatgtggaaaaacatttgttcagaaactacagcttaaaaaacaccatgcagtttataataaaagatatttttgcagatggaatacatgtgtaaaaatatttattcaaaattaagtctttgtaaactttagaaaattcacagtagggaagaattaaggcactggcacttaagacgttacactaaatcagaatgttctgtatagaaagt

SEQ ID NO: 428933 - DNA, 614 bp, Homo sapiens
taataaaattattataaatgtaattacttttgaaagaccttggaaaatttaaacccttaaaaaagagtactctggagacaaacattacaaatataaagagggttgtaatacctttacttgccctatataatgtacagattttatgctagaagaaaactctaaaggaattactcaaacttgttcagcatcagagaatttatgttgaaggaaaccatacaaatgtaataaatgtggaaaaacatttgttcagaaactacagcttaaaaaacaccatgcagtttataataaaagatatttttgcagatggaatacatgtgtaaaaatatttattcaaaattaagtctttgtaaactttagaaaattcacagtagggaagaattaaggcactggcacttaagacgttacactaaatcagaatgttctgtatagaaagtaatccaaagctaaaactggtggataatttatttgtatataagtttaagaggagtggaagattattttttggagagttataattacattcaaggtatatgtttttccttgaaaaaaatgtagattttttgaaaagcaaatagtgaggtaattcaastgtaaaactgcttcattctgttcct

SEQ ID NO: 428934 - DNA, 485 bp, Homo sapiens
tggattgcgtttccgaatctttccatgcaaattctttctttcatgtgcctggtactcatggtagactgatattttttttcatattttttgtgtttataatttattaagtattcattatgtgagttgctcaggtattctaagaatttttrtaaaatttactaatgcacgcaaaataatttttcaatgttatttcacaatgagtgtattaacttatatttcttttgttgctttcttttttcttttttttttttttttgagatggtgtctcactctgtcacccaggctagagtgcagtggtgggatctcagctcactacaacccccatctgctgggctcaagcaattctcttgcctcaccctcctaagtagctgggactacaggcatgtgccaccatgcccagctaaagtttttgtattttcagtacagactgtgtttcactataatggccagagtggccttgaactcctgacctggtggtccacccg

SEQ ID NO: 428935 - DNA, 485 bp, Homo sapiens
tggattgcgtttccgaatctttccatgcaaattctttctttcatgtgcctggtactcatggtagactgatattttttttcatattttttgtgtttataatttattaagtattcattatgtgagttgctcaggtattctaagaatttttataaaatttactaatgcaygcaaaataatttttcaatgttatttcacaatgagtgtattaacttatatttcttttgttgctttcttttttcttttttttttttttttgagatggtgtctcactctgtcacccaggctagagtgcagtggtgggatctcagctcactacaacccccatctgctgggctcaagcaattctcttgcctcaccctcctaagtagctgggactacaggcatgtgccaccatgcccagctaaagtttttgtattttcagtacagactgtgtttcactataatggccagagtggccttgaactcctgacctggtggtccacccg

SEQ ID NO: 428936 - DNA, 485 bp, Homo sapiens
tggattgcgtttccgaatctttccatgcaaattctttctttcatgtgcctggtactcatggtagactgatattttttttcatattttttgtgtttataatttattaagtattcattatgtgagttgctcaggtattctaagaatttttataaaatttactaatgcacgcaaaataatttttcaatgttatttcacaatgagtgtattaacttatatttcttttgttgctttcttttttcttttttttttttttttgagatggtgtctcactctgtcacccaggctagagtgcagtggtgggatctcagctcactacaacccccayctgctgggctcaagcaattctcttgcctcaccctcctaagtagctgggactacaggcatgtgccaccatgcccagctaaagtttttgtattttcagtacagactgtgtttcactataatggccagagtggccttgaactcctgacctggtggtccacccg

SEQ ID NO: 428937 - DNA, 554 bp, Homo sapiens
gttaaacttaattttttattacatacttacagctcaacttaagttttcattcagaatcttttattttggtgtgaatgttaaatattcaaaaataatagaatgacacctgtggatttcacatgtgaaataatctttttcatattaatgttaaaatcttgaggaatttctcacacttgtataatgtacttttttattgggtgcagtttacaatttagaggtttcagtctttgtcacctaactagtcaactccttggtcattttatctggaaaaattttaaagatcatggcatcttttgaattaaaaaatttcttcagtgatctgggatgcaaacttatttactctcttcagagtggtttaatcatatgaaacacagcaagagctgccctttttgtgccttccctatcattaccaccagcaccagaaactccagttgccccaagctcaaaataaaagccctaaggtacattggcttctcccatgctctgtgctgggtgccgaacayggtggtaaatattagagtttatatggtcatgactgactaggtgacaaaaca

SEQ ID NO: 428938 - DNA, 633 bp, Homo sapiens
tgcctaattttagctaattgtcaaatgctttgcctcacatagttattatttttgtggtgmaaagacaatatttactgtcagtattttttcagaaatacaatacatgcattataatctcttgaacttatttttcttatccaactgtaattatgtaatcaagatatgttttgtagaatccacatgtgagtgaaatcatgagatattaacttttctgtgccttatttcaacaactatagtgtcctttaggtttatctttgtgattaaaaataagattttctgttgaaaatacagtattcaattgtatatatataccatagtgtctgtatttcatcattggatgatggacacatatgttgattctatgttttggcttctgcaaagtgtgctgcaacaaacacaattgcagatgtctgttcatcaatctagtttcatttgttttgtgatagatatccagtagttcaattacatgttagagtttgttttgcaaaatttctatttttcataatggctgtttttatttacattgacacaaacagtgtgaaagctcccctctttctcttttttcaagtttaccaacaattttttaaacattttaacaggagtgagtttatatgttagagttgttttggtttg

SEQ ID NO: 428939 - DNA, 633 bp, Homo sapiens
tgcctaattttagctaattgtcaaatgctttgcctcacatagttattatttttgtggtgcaaagacaatatttactgtcagtattttttcagaaatacaatacatgcattataatctcttgaacttatttttcttatccaactgtaattatgtaatcaagatatgttttgtagaatccacatgtgagtgaaatcatgagatattaacttttctgtgccttatttcaacaactatagtgtcctttaggtttatctttgtgattaaaaataagattttctgttgaaaatacagtattcrattgtatatatataccatagtgtctgtatttcatcattggatgatggacacatatgttgattctatgttttggcttctgcaaagtgtgctgcaacaaacacaattgcagatgtctgttcatcaatctagtttcatttgttttgtgatagatatccagtagttcaattacatgttagagtttgttttgcaaaatttctatttttcataatggctgtttttatttacattgacacaaacagtgtgaaagctcccctctttctcttttttcaagtttaccaacaattttttaaacattttaacaggagtgagtttatatgttagagttgttttggtttg

SEQ ID NO: 428940 - DNA, 607 bp, Homo sapiens
aattccttcaccaagattcccaagaaaggaaaatgataggagtgaagttcgggagagaggacataataaaaacataaaattgaagaatttgttcttgatcattgtggaaataggagaataccatattttatacgtattaattatacttgtctctaacgacagaaagaaatgtgaagaaatactatgaacaccccaaagttagacagcctaggtgaaatggactgtacacctcaaaattatataacctagatgaaatggacaaatttttagccacrcataaattacctaatgtgattcaagaagaagaagaaattcttaacagacctataacaagtacggagaatagaccggcaatcaaaactcctcctcaacaacaacaaaagcccagtatcagatgtttcactggtgaattctgtcaaacatgtaaaaaagaataaacaccaattcatcttaaattcttccaaaaaatagaagaaggagcatttcttaagtcattacatgagacaagcattatccttataccaaagtcagatggagaaatccaaagaacagaaagttacagaccaatatttcctatgaatacaagtagaaaaaaagtaattaataa

SEQ ID NO: 428941 - DNA, 557 bp, Homo sapiens
tattgttacactttcattatgcatctatttraatgttacatttgtgacaaccaatcccacaaaaatacaaaagatacttgcagactactataaatatctctgtgcacaccaactagaaagtctagaggaaatgaataaactcttagaaatatacaacctcccaagattgaatcaggaataaacagaagtcttgaagaaaccaaaaatgtgcaagcaaattgaattggtgataaaaaaactaccaattataaaaagtgctaaaccagatgcattcacagcatgattttatcatgtatacaaaaatgagttggctgtaattctacagaaagtattccaaaaaatcaaagtgggactccttcctaattaattctatcatataatatcagtctcatcttgatatattaatcaggtaaagacacaaccaaaaaaaattacaggccaatatccctgacgaatacagacacaaacattattcatgaaatgcttgcaaactgagtcaggaaatcaaagttatttcactgcaactatgtggacattattctgtgaaagcaggaatg

SEQ ID NO: 428942 - DNA, 557 bp, Homo sapiens
tattgttacactttcattatgcatctatttgaatgttacatttgtgacaaccaatcccacaaaaatacaaargatacttgcagactactataaatatctctgtgcacaccaactagaaagtctagaggaaatgaataaactcttagaaatatacaacctcccaagattgaatcaggaataaacagaagtcttgaagaaaccaaaaatgtgcaagcaaattgaattggtgataaaaaaactaccaattataaaaagtgctaaaccagatgcattcacagcatgattttatcatgtatacaaaaatgagttggctgtaattctacagaaagtattccaaaaaatcaaagtgggactccttcctaattaattctatcatataatatcagtctcatcttgatatattaatcaggtaaagacacaaccaaaaaaaattacaggccaatatccctgacgaatacagacacaaacattattcatgaaatgcttgcaaactgagtcaggaaatcaaagttatttcactgcaactatgtggacattattctgtgaaagcaggaatg

SEQ ID NO: 428943 - DNA, 607 bp, Homo sapiens
aattccttcaccaagattcccaagaaaggaaaatgataggagtgaagttcgggagagaggacataataaaaacataaaattgaagaatttgttcttgatcattgtggaaataggagaataccatattttatacgtattaattatacttgtctctaacgacagaaagaaatgtgaagaaatactatgaacaccccaaagttagacagcctaggtgaaatggactgtacacctcaaaattatataacctagatgaaatggacaaatttttagccacacataaattacctaatgtgattcaagaagaagaagaaattcttaacagacctataacaagtayggagaatagaccggcaatcaaaactcctcctcaacaacaacaaaagcccagtatcagatgtttcactggtgaattctgtcaaacatgtaaaaaagaataaacaccaattcatcttaaattcttccaaaaaatagaagaaggagcatttcttaagtcattacatgagacaagcattatccttataccaaagtcagatggagaaatccaaagaacagaaagttacagaccaatatttcctatgaatacaagtagaaaaaaagtaattaataa

SEQ ID NO: 428944 - DNA, 523 bp, Homo sapiens
cacaccaactagaaagtctagaggaaatgaataaactcttagaaatatacaacctcccaagattgaatcaggaataaacagaagtcttgaagaaaccaaaaatgtgcaagcaaattgaattggtgataaaaaaactaccaattataaaaagtgctaaaccagatgcattcacagcatgattttatcatgtatacaaaaatgagttggctgtaattctacagaaagtattccaaaaaatcaaagtgggactccttcctaattaattctatcatataatatcagtctcatcttgatatattaatcaggtaaagacacaaccaaaaaaaattacaggccaatatccctgaygaatacagacacaaacattattcatgaaatgcttgcaaactgagtcaggaaatcaaagttatttcactgcaactatgtggacattattctgtgaaagcaggaatgttttaacatgtgcaatctataaatgtgattcagcatataaaaataattaacaaacaaaaccacattacct

SEQ ID NO: 428945 - DNA, 523 bp, Homo sapiens
cacaccaactagaaagtctagaggaaatgaataaactcttagaaatatacaacctcccaagattgaatcaggaataaacagaagtcttgaagaaaccaaaaatgtgcaagcaaattgaattggtgataaaaaaactaccaattataaaaagtgctaaaccagatgcattcacagcatgattttatcatgtatacaaaaatgagttggctgtaattctacagaaagtattccaaaaaatcaaagtgggactccttcctaattaattctatcatataatatcagtctcatcttgatatattaatcaggtaaagacacaaccaaaaaaaattacaggccaatatccctgacgaatacagacacaaamattattcatgaaatgcttgcaaactgagtcaggaaatcaaagttatttcactgcaactatgtggacattattctgtgaaagcaggaatgttttaacatgtgcaatctataaatgtgattcagcatataaaaataattaacaaacaaaaccacattacct

SEQ ID NO: 428946 - DNA, 523 bp, Homo sapiens
cacaccaactagaaagtctagaggaaatgaataaactcttagaaatatacaacctcccaagattgaatcaggaataaacagaagtcttgaagaaaccaaaaatgtgcaagcaaattgaattggtgataaaaaaactaccaattataaaaagtgctaaaccagatgcattcacagcatgattttatcatgtatacaaaaatgagttggctgtaattctacagaaagtattccaaaaaatcaaagtgggactccttcctaattaattctatcatataatatcagtctcatcttgatatattaatcaggtaaagacacaaccaaaaaaaattacaggccaatatccctgacgaatacagacacaaacattattcatgaaatgcttgcaaactgagtcaggaaatcaaagttatttcactgcaactatgtggacattattctgtgaaagcaggaatgttttaacatgtgcaatctataaatgtgattcarcatataaaaataattaacaaacaaaaccacattacct

SEQ ID NO: 428947 - DNA, 578 bp, Homo sapiens
aaatcagcttatttgtctttactgatgatataattttctacctacttcaaagactcctccaaaagactcctaagcctaataaaagacttcakcaaaatctcagcaacaacaacaaaaagcaaaacaacattcaaaaatgaggaacatttctatacaccagtaacacttaagcagagcaaaattaagaacacaatccagtttacaatagccagaaacaaaaaataaaatagtaatccattaaacaaaggaggttaaatatctctactagaagaactacaaaccactactgaaagaaatcagacacagtgcaaataaatggaatagtatttcatgataatggattagaattattaaaaacttcatactgcccaaagcaatcgacagtttatttctatttctatcaatctaccaatgccattttttataaaattagagaaaaaaactattctaaaatttatatgaaaacaaaaaagctcaaatgggcaaggctatactaaacaaaaagaataaacctggagacattatgttaccaaacttcaaactttaccacaagctatggtaaccaatataatatggat

SEQ ID NO: 428948 - DNA, 578 bp, Homo sapiens
aaatcagcttatttgtctttactgatgatataattttctacctacttcaaagactcctccaaaagactcctaagcctaataaaagacttcagcaaaatctcagcaacaacaacaaaaagcaaaacaacattcaaaaatgaggaacatttctatacaccagtaacacttaagcagagcaaaattaagaacacaatccagtttacaatagccagaaacaaaaaataaaatagtaatccattaaacaaaggaggttaaatatctctactagaagaactacaaaccactactgaaagaaatcagacacagtgcaaataaatggaatagtatttcatgataatggattagaattattaaaaacttcatactgcccaaagcaatcgacagtttatttctatttctatcaatctaccaatgccattttttataaaattagasaaaaaaactattctaaaatttatatgaaaacaaaaaagctcaaatgggcaaggctatactaaacaaaaagaataaacctggagacattatgttaccaaacttcaaactttaccacaagctatggtaaccaatataatatggat

SEQ ID NO: 428949 - DNA, 578 bp, Homo sapiens
aaatcagcttatttgtctttactgatgatataattttctacctacttcaaagactcctccaaaagactcctaagcctaataaaagacttcagcaaaatctcagcaacaacaacaaaaagcaaaacaacattcaaaaatgaggaacatttctatacaccagtaacacttaagcagagcaaaattaagaacacaatccagtttacaatagccagaaacaaaaaataaaatagtaatccattaaacaaaggaggttaaatatctctactagaagaactacaaaccactactgaaagaaatcagacacagtgcaaataaatggaatagtatttcatgataatggattagaattattaaaaacttcatactgcccaaagcaatcgacagtttatttctatttctatcaatctaccaatgccattttttataaaattagagaaaaaaactattctaaaatttatatgaaaacaaaaaagctcaaatgkgcaaggctatactaaacaaaaagaataaacctggagacattatgttaccaaacttcaaactttaccacaagctatggtaaccaatataatatggat

SEQ ID NO: 428950 - DNA, 578 bp, Homo sapiens
aaatcagcttatttgtctttactgatgatataattttctacctacttcaaagactcctccaaaagactcctaagcctaataaaagacttcagcaaaatctcagcaacaacaacaaaaagcaaaacaacattcaaaaatgaggaacatttctatacaccagtaacacttaagcagagcaaaattaagaacacaatccagtttacaatagccagaaacaaaaaataaaatagtaatccattaaacaaaggaggttaaatatctctactagaagaactacaaaccactactgaaagaaatcagacacagtgcaaataaatggaatagtatttcatgataatggattagaattattaaaaacttcatactgcccaaagcaatcgacagtttatttctatttctatcaatctaccaatgccattttttataaaattagagaaaaaaactattctaaaatttatatgaaaacaaaaaagctcaaatggscaaggctatactaaacaaaaagaataaacctggagacattatgttaccaaacttcaaactttaccacaagctatggtaaccaatataatatggat

SEQ ID NO: 428951 - DNA, 604 bp, Homo sapiens
atctccttttactctgtgtctcacattcaggtcacactggtgcaagaagtaggctcccatggycttgggcagttctgcccctgtgcctttgcagggtacagccccattccaagctgctttaatgggctggcattgaatgtctgcagcttctccagatgtacagtgcaagctgttggttaatctaccattctgggatctggagaacagtggctctcttctcacagctccactaggcagtgccccattgggtactgtgtgtgaaggctctgacctcacatttcttttctgcactgccctaacagaggttctccatgagggctccacccctgcagcaaacttctgcctgtatatccaggcttttccttacatcttctgaaatctaggtggaggttaccaaaccccaattcttgacttctgtgcactcacaggctcaatgccacatggaagccaacaaagcttggggcttgtacctacagaagaaatggtctgaactgtaccttgaccccttttagccacagatgtagtggctgggacacagggcaccaagtaccaaggctgcacaaagcagcaagggctggaccccgcacacaaagccatttttttt

SEQ ID NO: 428952 - DNA, 604 bp, Homo sapiens
atctccttttactctgtgtctcacattcaggtcacactggtgcaagaagtaggctcccatggccttgggcagttctgcccctgtgcctttgcagggtacagccccattccaagctgctttaatgggctggcattgaatgtctgcagcttctccagatgtacagtgcaagctgttggttaatctaccattctgggatctggagaacagtggctctcttctcacagctccactaggcagtgccccattgggtactgtgtgtgaargctctgacctcacatttcttttctgcactgccctaacagaggttctccatgagggctccacccctgcagcaaacttctgcctgtatatccaggcttttccttacatcttctgaaatctaggtggaggttaccaaaccccaattcttgacttctgtgcactcacaggctcaatgccacatggaagccaacaaagcttggggcttgtacctacagaagaaatggtctgaactgtaccttgaccccttttagccacagatgtagtggctgggacacagggcaccaagtaccaaggctgcacaaagcagcaagggctggaccccgcacacaaagccatttttttt

SEQ ID NO: 428953 - DNA, 604 bp, Homo sapiens
atctccttttactctgtgtctcacattcaggtcacactggtgcaagaagtaggctcccatggccttgggcagttctgcccctgtgcctttgcagggtacagccccattccaagctgctttaatgggctggcattgaatgtctgcagcttctccagatgtacagtgcaagctgttggttaatctaccattctgggatctggagaacagtggctctcttctcacagctccactaggcagtgccccattgggtactgtgtgtgaaggctctgacctcacatttcttttctgcactgccctaacagaggttctccatgagggctccacccctgcagcaaacttctgcctgtatatccaggcttttccttacatcttctgaaatctaggtggaggttaccaaaccccaattcttgacttctgtgcactcacaggctcaatgccacatggaagccaacaaagcttggggcttgtacctacagaagaaatggtctgaactgtaccttgrccccttttagccacagatgtagtggctgggacacagggcaccaagtaccaaggctgcacaaagcagcaagggctggaccccgcacacaaagccatttttttt

SEQ ID NO: 428954 - DNA, 447 bp, Homo sapiens
ttacaaacatctataaattaataaattgaaaacttagaagaaatgaataaattcctgaactcatgcaacctacaagtttgaaccatgaagaaayagaaaacctcaacaaaccaatagcgaataatattattatgagtacctttattatgattgaagtcataataaaaattttcccatcaaaggaagaccttatggctttattgttgaattctaccaaatatttaaaaaagagattataccaattcttctcaaactcttttaaaaaattgaagtagagtgagtacttcccaactccttctaccaggccaacattattttgatactcaaaccagacaaggacacacaaaaagagaatactatagagcagtatcactgataaacatagatgcaaaaatcttcaacgaaatactagcaaacaaatttcaacaacacattaaaaagatctta

SEQ ID NO: 428955 - DNA, 447 bp, Homo sapiens
ttacaaacatctataaattaataaattgaaaacttagaagaaatgaataaattcctgaactcatgcaacctacaagtttgaaccatgaagaaatagaaaacctcaacaaaccaatagcgaataatattattatgagtacctttattatgattgaagtcataataaaaattttcccatcaaaggaagaccttatggctttattrttgaattctaccaaatatttaaaaaagagattataccaattcttctcaaactcttttaaaaaattgaagtagagtgagtacttcccaactccttctaccaggccaacattattttgatactcaaaccagacaaggacacacaaaaagagaatactatagagcagtatcactgataaacatagatgcaaaaatcttcaacgaaatactagcaaacaaatttcaacaacacattaaaaagatctta

SEQ ID NO: 428956 - DNA, 531 bp, Homo sapiens
agactattacaaacatctataaattaataaattgaaaacttagaagaaatgaataaattcctgaactcatgcaacctacaagtttgaaccatgaagaaatagaaaacctcaacaaaccaatagcgaataatattattatgagtacctttattatgattgaagtcataataaaaattttcccatcaaaggaagaccttatggctttattgttgaattctaccaaatatttaaaaaagagattataccaattcttctmaaactcttttaaaaaattgaagtagagtgagtacttcccaactccttctaccaggccaacattattttgatactcaaaccagacaaggacacacaaaaagagaatactatagagcagtatcactgataaacatagatgcaaaaatcttcaacgaaatactagcaaacaaatttcaacaacacattaaaaagatcttacaccataatcaactgggattcattccagggatgcaaggatggctcaacatatacaaatcaataattacataagtaagc

SEQ ID NO: 428957 - DNA, 447 bp, Homo sapiens
ttacaaacatctataaattaataaattgaaaacttagaagaaatgaataaattcctgaactcatgcaacctacaagtttgaaccatgaagaaatagaaaacctcaacaaaccaatagcgaataatattattatgagtacctttattatgattgaagtcataataaaaattttcccatcaaaggaagaccttatggctttattgttgaattctaccaaatatttaaaaaagagattataccaattcttctcaaactcttttaaaaaattgaagtagagtgagtacttcccaactccttctaccaggccaacattattttgatactcaaaccagacaaggacacacaaaaagagaatactayagagcagtatcactgataaacatagatgcaaaaatcttcaacgaaatactagcaaacaaatttcaacaacacattaaaaagatctta

SEQ ID NO: 428958 - DNA, 583 bp, Homo sapiens
acaatgcactggagaaagaagtcttttcaacagaagacccttctaaaatttggggataaygtggtccttcttagaggcacttgatacctcaaccatatcccatgatggtgaacaaagtttccctggccttgtgaagggtggacagaaaaaagccgtgaagcaggcctagaatggtatacaagaatccttcggcataggcagtcttcctttctttgtcacttatatctaggttacagatatttttcttgtgtttctgtaaactatgagaacatgtatcacactatctagattcctacctatatactctatttatattgatgtatttctgaatttaccaccctcctatgggaatgtaatctctcgaaggaagggaccaagggcatcttgctcaacattttgtactattcacctaatatgcttagcatgtcacagttgatagcaaagtatttgcttattgactgatcaatgaattttaaaaatccatacatcaactcatatttctctaaaaatgaattactgatcagccattataagaaagaaaagaaagagaaagcaagcaagcaagcaagaaaggaagaaaaaa

SEQ ID NO: 428959 - DNA, 583 bp, Homo sapiens
acaatgcactggagaaagaagtcttttcaacagaagacccttctaaaatttggggataatgtggtccttcttagaggcacttgatacctcaaccatatcccatgatggtgaacaaagtttccctggccttgtgaagggtggacagaaaaaagccgtgaagcaggcytagaatggtatacaagaatccttcggcataggcagtcttcctttctttgtcacttatatctaggttacagatatttttcttgtgtttctgtaaactatgagaacatgtatcacactatctagattcctacctatatactctatttatattgatgtatttctgaatttaccaccctcctatgggaatgtaatctctcgaaggaagggaccaagggcatcttgctcaacattttgtactattcacctaatatgcttagcatgtcacagttgatagcaaagtatttgcttattgactgatcaatgaattttaaaaatccatacatcaactcatatttctctaaaaatgaattactgatcagccattataagaaagaaaagaaagagaaagcaagcaagcaagcaagaaaggaagaaaaaa

SEQ ID NO: 428960 - DNA, 572 bp, Homo sapiens
  misc_feature (1)...(572): n = A,T,C or G
acatgcacttataaattcttccagagaaactctatacatgtaacagaagctttttacacaaatgtttgcacttagcacacattgttctgaaatttgcttcacctcacctccccacacccccatgagttgaatgctatatattagaaaaccttatgnttttatataacactatagtataatgttatttcattattatttgaaatatacatatcattgaatggatattatagagctaattacacaattactttcaattttcttatttagtgttgtcatttatagcaaattctagtattattatttaatagtcttctgaaatgtactctcccaaacagatattaacataatgtcttgctattgcgttgaaaatctctctaaataacttgcattgttattgtctctaaataattgcagttattgtcgctaaataacttgaaattctgtatattgtgctttccttatcttgaaatgtttaaaaataaattggtttttatttacttgcataaatatattaatttttctaaatactatatttatrttttacctactttcactgaaatatgtaaacactc

SEQ ID NO: 428961 - DNA, 588 bp, Homo sapiens
gatctttgcctacctagagaatttgttcaaatgcttatgtatgcatctgtagaagatcctgcaatgttgctaaactgttcaaacccaaggtgaccagtacatttyccactaagtgaaaaatactgaactggatgatgactcagattttctctcaatcttaagtctctatcatttaaaataagtctgggtgtctagggttatgagatcaaattgtgtttctttgtcactggaaatccccacttcaaaccttaagaacaagccattcaaaagcttgcactgaggcaacacacttaataggaaagcatgacttcattttggcatgattcgtcttcaaatcaggtcagtgatttagatttgaatgagtggattgttcatgggcaccggatcaaattagactttcatttattttaagaaattcattagaccaattatgacaaccacagagggatgtcttatgactgagaagtgcaaattataagaacaataatatccattgttaagtgtgagatgaaaatttctgtgtagcttgctcattaaaatctgcttccttttacagaaatgatttttatgtaatgtagatggcaggta

SEQ ID NO: 428962 - DNA, 588 bp, Homo sapiens
gatctttgcctacctagagaatttgttcaaatgcttatgtatgcatctgtagaagatcctgcaatgttgctaaactgttcaaacccaaggtgaccagtacatttcccactaagtgaaaaatactgaactggatgatgactcagattttctctcaatcttaagtctctatcatttaaaataagtctgggygtctagggttatgagatcaaattgtgtttctttgtcactggaaatccccacttcaaaccttaagaacaagccattcaaaagcttgcactgaggcaacacacttaataggaaagcatgacttcattttggcatgattcgtcttcaaatcaggtcagtgatttagatttgaatgagtggattgttcatgggcaccggatcaaattagactttcatttattttaagaaattcattagaccaattatgacaaccacagagggatgtcttatgactgagaagtgcaaattataagaacaataatatccattgttaagtgtgagatgaaaatttctgtgtagcttgctcattaaaatctgcttccttttacagaaatgatttttatgtaatgtagatggcaggta

SEQ ID NO: 428963 - DNA, 588 bp, Homo sapiens
gatctttgcctacctagagaatttgttcaaatgcttatgtatgcatctgtagaagatcctgcaatgttgctaaactgttcaaacccaaggtgaccagtacatttcccactaagtgaaaaatactgaactggatgatgactcagattttctctcaatcttaagtctctatcatttaaaataagtctgggtgtctagggttatgagatcaaattgtgtttctttgtcactggaaatccccacttcaaaccttaagaacaagccattcaaaagcttgcactgaggcaacacacttaataggaaagcatgacttyattttggcatgattcgtcttcaaatcaggtcagtgatttagatttgaatgagtggattgttcatgggcaccggatcaaattagactttcatttattttaagaaattcattagaccaattatgacaaccacagagggatgtcttatgactgagaagtgcaaattataagaacaataatatccattgttaagtgtgagatgaaaatttctgtgtagcttgctcattaaaatctgcttccttttacagaaatgatttttatgtaatgtagatggcaggta

SEQ ID NO: 428964 - DNA, 588 bp, Homo sapiens
gatctttgcctacctagagaatttgttcaaatgcttatgtatgcatctgtagaagatcctgcaatgttgctaaactgttcaaacccaaggtgaccagtacatttcccactaagtgaaaaatactgaactggatgatgactcagattttctctcaatcttaagtctctatcatttaaaataagtctgggtgtctagggttatgagatcaaattgtgtttctttgtcactggaaatccccacttcaaaccttaagaacaagccattcaaaagcttgcactgaggcaacacacttaataggaaagcatgacttcattttggcatgattcrtcttcaaatcaggtcagtgatttagatttgaatgagtggattgttcatgggcaccggatcaaattagactttcatttattttaagaaattcattagaccaattatgacaaccacagagggatgtcttatgactgagaagtgcaaattataagaacaataatatccattgttaagtgtgagatgaaaatttctgtgtagcttgctcattaaaatctgcttccttttacagaaatgatttttatgtaatgtagatggcaggta

SEQ ID NO: 428965 - DNA, 602 bp, Homo sapiens
taacactgacctcgatttgggaaaaagtagtgtagatgaacacatggaatcaggyagaaagaagatgtattgttatcttacatcaatgcccatcagagaacacccactgaagagcagacactaaacaacaaagtggatgggatgtcttttatccagcaaatgccagctagtatctctccttagctgctcatagtggaggcactcatagtggatgtagccaaggtggctgctggcaagccaacagcataggctccctctcatccaggtttctattgtggctgcagaatatccatcctgtcatcatcagaaactatgacctcaacaggacactgttctatggggaggccaaccagccacttggttgcaagttgagcatttaggatcattccaaaaaggggagcagttggttttgagtaaggctcatgtaaaatttgcttttcttgctaacaatggctaggaccacactactagttaaggatagtattgttcacagatatattgacatgggaccctgtattatatactcacaggcaaagaaacctgttttatggtgaaagaggtgtgttaatggacacaagacgattgcatactaaaccccatat

SEQ ID NO: 428966 - DNA, 621 bp, Homo sapiens
tttgctttccttcctttgagagtggctggtctgtcagtaattctagcaaagaccacaccacatcctaacctcttaccagagagcattttcctgaaaatgaccatttctgcattcccccttatgttttcccctatactgaatcattccrgttatcatttgtttcaaatgaagaattataattcaagtatttcttttagtgcaatgagtgagagataaagattacatttaacattaagattggttcagaacataaaagttctttttgcaccgtgttggaaactattgaagtactatcttcacagcgtaaccctccgtacatgcacttcattgctcctcaatttttctgcctttctccaacacaatacctgatacttccctactttctattctcttgtatccttattttttcctaattgagagagaacagtgatgataattaaacaattgagtggaaaccaattcctgcgatagtgctagatgcttaataggtaacatcttctgctcgagttactgagacttcacctactttgaagctactgatctcaaagaagcttaaggaataattatggaggagataattttaggtaaatttgaatttataaggaaatgttgtccaggaaa

SEQ ID NO: 428967 - DNA, 621 bp, Homo sapiens
tttgctttccttcctttgagagtggctggtctgtcagtaattctagcaaagaccacaccacatcctaacctcttaccagagagcattttcctgaaaatgaccatttctgcattcccccttatgttttcccctatactgaatcattccggttatcatttgtttcaaatgaagaattataattcaagtatttcttttagtgcaatgagtgagagataaagattacatttaacattaagattggttcagaacataaaagttctttttgcaccgtgttggaaactattgaagtactatcttcacagcgtaaccctccgtacatgcacttcattgctcctcaatttttctgcctttctccaacacaatacctgatactkccctactttctattctcttgtatccttattttttcctaattgagagagaacagtgatgataattaaacaattgagtggaaaccaattcctgcgatagtgctagatgcttaataggtaacatcttctgctcgagttactgagacttcacctactttgaagctactgatctcaaagaagcttaaggaataattatggaggagataattttaggtaaatttgaatttataaggaaatgttgtccaggaaa

SEQ ID NO: 428968 - DNA, 594 bp, Homo sapiens
tcaatttctcctagtctaaatgtgattatcaataaaattatgttaataaagccttgctctgtttagagtcttaggtgagaaaatgtggtttgtaaatgattttgtgaattttataaaattatacagatatatttcrtattgctattattataattaaaaatacagagtcaggataatttcatcctgtgcacaagaggcagattatgtttgaattaatcaaatagaatttgagcacagaagtcattcatcccttcattcaacatgctatttagcactgagtatacatcagaaactgtgctcaaatcttggtatctgacactgaaaaaaacagataaaaaactgtctacgtggagcttacactctaacacttaccaaataaatgatgtccatttagtcggcttctattaacattataggaatcaaattatgccctgattattctcagtcatcatagtgctggtggtggcaaagtgacaaattttgtggagatagtggcagagaatttttactttgaaacagtaatagaataattaattattaattcttgtgagaatgactgaaaattctatcacactgtttggcgaagggagaagg

SEQ ID NO: 428969 - DNA, 594 bp, Homo sapiens
tcaatttctcctagtctaaatgtgattatcaataaaattatgttaataaagccttgctctgtttagagtcttaggtgagaaaatgtggtttgtaaatgattttgtgaattttataaaattatacagatatatttcgtattgctattattataattaaaaatacagagtcaggataatttcatcctgtgcacaagaggcagattatgtttgaattaatcaaatagaatttgagcacagaagtcattcatcccttcattcaacatgctatttagcactgagtatacatcagaaactgtgctcaaatcttggtatctgacactgaaaaaaacagataaaaaactgtctacgtggagcttacactctaacacttaccaaataaatgatgtccatttagtcggcttctattaacattataggaatcaaattwtgccctgattattctcagtcatcatagtgctggtggtggcaaagtgacaaattttgtggagatagtggcagagaatttttactttgaaacagtaatagaataattaattattaattcttgtgagaatgactgaaaattctatcacactgtttggcgaagggagaagg

SEQ ID NO: 428970 - DNA, 585 bp, Homo sapiens
gtaagaactgtaagctttgtgttattttaggctgcttattctcatcaccckctctcaagttatacagttaccttgaaaataaatatccctcaatcactgactacaagcaatctggcagccttcagcttagttccctgagaattattgtttgacctggaacgtggcttactgcaagataccacttataaaactgtctttatttgacctcatttgtaactggcccatgaaagtctttttgactagcatacttattgaaaacattgaaaggcaacttttttaaatcatggtagactaaagtggtagataacagttagggcaaataatatggtagctggaaaacttaaaaagctaggaaatataaataggagttttgaagacttctgacatattactggcactataaaaggtcacacacgtatgattgtgcacattctaagcacaatgcttattctcaaggaaaatatgagaaggccctaagctttcacctccagatgaccatgaagctatgggaaagcagaatgtgaagactaaggcagagttgtcaaccaaccggctgggtgttaaaagtgtgccctgaaatgcaca

SEQ ID NO: 428971 - DNA, 585 bp, Homo sapiens
gtaagaactgtaagctttgtgttattttaggctgcttattctcatcaccctctctcaagttatacagttaccttgaaaataaatatccctcaatcrctgactacaagcaatctggcagccttcagcttagttccctgagaattattgtttgacctggaacgtggcttactgcaagataccacttataaaactgtctttatttgacctcatttgtaactggcccatgaaagtctttttgactagcatacttattgaaaacattgaaaggcaacttttttaaatcatggtagactaaagtggtagataacagttagggcaaataatatggtagctggaaaacttaaaaagctaggaaatataaataggagttttgaagacttctgacatattactggcactataaaaggtcacacacgtatgattgtgcacattctaagcacaatgcttattctcaaggaaaatatgagaaggccctaagctttcacctccagatgaccatgaagctatgggaaagcagaatgtgaagactaaggcagagttgtcaaccaaccggctgggtgttaaaagtgtgccctgaaatgcaca

SEQ ID NO: 428972 - DNA, 585 bp, Homo sapiens
gtaagaactgtaagctttgtgttattttaggctgcttattctcatcaccctctctcaagttatacagttaccttgaaaataaatatccctcaatcactgactacaagcaatctggcagcyttcagcttagttccctgagaattattgtttgacctggaacgtggcttactgcaagataccacttataaaactgtctttatttgacctcatttgtaactggcccatgaaagtctttttgactagcatacttattgaaaacattgaaaggcaacttttttaaatcatggtagactaaagtggtagataacagttagggcaaataatatggtagctggaaaacttaaaaagctaggaaatataaataggagttttgaagacttctgacatattactggcactataaaaggtcacacacgtatgattgtgcacattctaagcacaatgcttattctcaaggaaaatatgagaaggccctaagctttcacctccagatgaccatgaagctatgggaaagcagaatgtgaagactaaggcagagttgtcaaccaaccggctgggtgttaaaagtgtgccctgaaatgcaca

SEQ ID NO: 428973 - DNA, 585 bp, Homo sapiens
gtaagaactgtaagctttgtgttattttaggctgcttattctcatcaccctctctcaagttatacagttaccttgaaaataaatatccctcaatcactgactacaagcaatctggcagccttcagcttagttccctgagaattattgtttgacctggaacgtggcttactgcaagataccacttataaaactgtctttatttgacctcatttgtaactggcccatgaaagtctttttractagcatacttattgaaaacattgaaaggcaacttttttaaatcatggtagactaaagtggtagataacagttagggcaaataatatggtagctggaaaacttaaaaagctaggaaatataaataggagttttgaagacttctgacatattactggcactataaaaggtcacacacgtatgattgtgcacattctaagcacaatgcttattctcaaggaaaatatgagaaggccctaagctttcacctccagatgaccatgaagctatgggaaagcagaatgtgaagactaaggcagagttgtcaaccaaccggctgggtgttaaaagtgtgccctgaaatgcaca

SEQ ID NO: 428974 - DNA, 605 bp, Homo sapiens
tgtcaaccaaccggctgggtgttaaaagtgtgccctgaaatgcacacagagccactcagcagagaccggaagagttacgggttccaggtcttyaatgaaatttctgtctattctttcactgactactaagttaagcaaacagagacttcagtgttcaaacacgataaaaaacaaaaactttaaacaattagttcagaaaattcactaaagaaacaaatgacaacaaaaacaaacagcaaaatcaacaaaatttgaagggagtaaaatataatttccagagttgtcacatttttattatttaaaatgttcagttttcaacaaaaacttataaggcatacaaaaagtaagacaatatggctcacacacaggaaaaacacacaatcaataaaactgtccatgagaaacctcaggtgtttggcttagtaaacaaaggtttttaaattcaccatgataaaaatttgtttaataactaaaataagctatttccaaaaagctaaaggaacatttgagaataaatgtctcaccaaataaataatactaataagcaattgtataaatataaatctgacttaacagcagattttagaaagcagggaaaagagtta

SEQ ID NO: 428975 - DNA, 574 bp, Homo sapiens
cagagccactcagcagagaccggaagagttacgggttccaggtctttaatgaaatttctgtctattctttcactgactactaagttaagcaaacagagacttcagtgttcaaacacgataaaaaacaaaaactttaaacaattagttcagaaaaktcactaaagaaacaaatgacaacaaaaacaaacagcaaaatcaacaaaatttgaagggagtaaaatataatttccagagttgtcacatttttattatttaaaatgttcagttttcaacaaaaacttataaggcatacaaaaagtaagacaatatggctcacacacaggaaaaacacacaatcaataaaactgtccatgagaaacctcaggtgtttggcttagtaaacaaaggtttttaaattcaccatgataaaaatttgtttaataactaaaataagctatttccaaaaagctaaaggaacatttgagaataaatgtctcaccaaataaataatactaataagcaattgtataaatataaatctgacttaacagcagattttagaaagcagggaaaagagttagctaacttaaatata

SEQ ID NO: 428976 - DNA, 605 bp, Homo sapiens
tgtcaaccaaccggctgggtgttaaaagtgtgccctgaaatgcacacagagccactcagcagagaccggaagagttacgggttccaggtctttaatgaaatttctgtctattctttcactgactactaagttaagcaaacagagacttcagtgttcaaacacgataaaaaacaaaaactttaaacaattagttcagaaaattcactaaagaaacaaatgacaacaaaaacaaacagcaaaatcaacaaaatttgaagggagtaaaatataatttccagagttgtcacatttttattatttaaaatgttcagttttcaacaaaaacttataaggcatacaaaaagtaagacaatatggctcacacacaggaaaaacacacaatcaataaaactgtccatgagaaasctcaggtgtttggcttagtaaacaaaggtttttaaattcaccatgataaaaatttgtttaataactaaaataagctatttccaaaaagctaaaggaacatttgagaataaatgtctcaccaaataaataatactaataagcaattgtataaatataaatctgacttaacagcagattttagaaagcagggaaaagagtta

SEQ ID NO: 428977 - DNA, 574 bp, Homo sapiens
cagagccactcagcagagaccggaagagttacgggttccaggtctttaatgaaatttctgtctattctttcactgactactaagttaagcaaacagagacttcagtgttcaaacacgataaaaaacaaaaactttaaacaattagttcagaaaattcactaaagaaacaaatgacaacaaaaacaaacagcaaaatcaacaaaatttgaagggagtaaaatataatttccagagttgtcacatttttattatttaaaatgttcagttttcaacaaaaacttataaggcatacaaaaagtaagacaatatggctcacacacaggaaaaacacacaatcaataaaactgtccatgagaaacctcaggtgtttggcttagtaracaaaggtttttaaattcaccatgataaaaatttgtttaataactaaaataagctatttccaaaaagctaaaggaacatttgagaataaatgtctcaccaaataaataatactaataagcaattgtataaatataaatctgacttaacagcagattttagaaagcagggaaaagagttagctaacttaaatata

SEQ ID NO: 428978 - DNA, 579 bp, Homo sapiens
taaagacaaacagactcagagataccatcaagcatagcaaaatatgtataatggaagtcccaaaaggagagggaacagaagagaaatggggcataaaaatawgtgaagaacaatacaaaacatacttaaaaacttccaaaacttgacaaagaatattaacttgcacatccaagaagatctatgactcccaagtagcataaactcaaagagattcacatttttaaaaaattataattaaacaatcaaaagaaaatgacaaagaaagaatcttgaaaacaacaagagaggaggaactcatcatgtgcaaaagagtctgaataatttttcactgaattttcattagaaaccatggaaaccagaggcagtgagatgacatttttaaagttttgaaagtaaatgattatcaacgaataatttcataaccaacaaaactatacttcaaaaatgaaaaagaagtgaaaatattctcacttattctctgaaaccaaaactgacagaatctcttactagcaaagtttccatgcaagaaatattaaaagaggtatttcaatatgaaataaaattacacttgacaatatc

SEQ ID NO: 428979 - DNA, 579 bp, Homo sapiens
taaagacaaacagactcagagataccatcaagcatagcaaaatatgtataatggaagtcccaaaaggagagggaacagaagagaaatggggcataaaaatatgtgaagaacaatacaaaacatacttaaaaacttccaaaacttgacaaagaatattaacttgcacatccaagaagatctatgactcccaagtagcataaactcaaagagattcacatttttaaaaaattataattaaacaatcaaaagaaaatgacaaagaaagaatcttgaaaacaacaagagaggagsaactcatcatgtgcaaaagagtctgaataatttttcactgaattttcattagaaaccatggaaaccagaggcagtgagatgacatttttaaagttttgaaagtaaatgattatcaacgaataatttcataaccaacaaaactatacttcaaaaatgaaaaagaagtgaaaatattctcacttattctctgaaaccaaaactgacagaatctcttactagcaaagtttccatgcaagaaatattaaaagaggtatttcaatatgaaataaaattacacttgacaatatc

SEQ ID NO: 428980 - DNA, 573 bp, Homo sapiens
gacagtccgtatgatggtatctgtctggtaaacatgactgaagctccaggaggatatgagagaagcagagagcctccctatgtgactcatttttccagtgggaactcaagggayccaggtcgagaaacagcactgtctttctcccaagccctagagccagcatggggagaggcttggagatgttgtgagggaaagacactgggaaaagctgcagacattttcccagacctgggacaaagaacagcataccatttttaatccaggcatacaaagtcaggcattctttggcaacttggcagcatgaccactcaggaattttattcttgaggcagagattgggggggcctgctctagagtgggataagggcctccacaacgagagctatggaaagcacatccagagcagacactgaaattgtgctttcccttgtcacaagcctggggcaggaggagtgctgctacagctgcagtttcttctgggtggtgagatttgcagccaaggccagcctagtgacctggaattggtctgtgtgtgccatttctagatgtctccatctgctctaccaagataat

SEQ ID NO: 428981 - DNA, 573 bp, Homo sapiens
gacagtccgtatgatggtatctgtctggtaaacatgactgaagctccaggaggatatgagagaagcagagagcctccctatgtgactcatttttccagtgggaactcaagggacccaggtcgagaaacagcactgtctttctcccaagccctagagccagcatggrgagaggcttggagatgttgtgagggaaagacactgggaaaagctgcagacattttcccagacctgggacaaagaacagcataccatttttaatccaggcatacaaagtcaggcattctttggcaacttggcagcatgaccactcaggaattttattcttgaggcagagattgggggggcctgctctagagtgggataagggcctccacaacgagagctatggaaagcacatccagagcagacactgaaattgtgctttcccttgtcacaagcctggggcaggaggagtgctgctacagctgcagtttcttctgggtggtgagatttgcagccaaggccagcctagtgacctggaattggtctgtgtgtgccatttctagatgtctccatctgctctaccaagataat

SEQ ID NO: 428982 - DNA, 542 bp, Homo sapiens
tgtgctttcccttgtcacaagcctggggcaggaggagtgctgctacagctgcagtttcttctgggtggtgagatttgcagccaaggccagcctagtgacctggaattggtctgtgtgtgccatttctagatgtctccatctgctctaccaagataatagtgcagtgaggtcttctgctcaaaccccaggcaaaaattcaggcatttggcgcagccgctttcctggactagcagccttagycactcaactcttcatgaacatagattgtggtgcagagcagccccctacactttatgccaaggcagatctccaggcattaggagcatctgttcactgggttcagagcctaacctgctccacccttcctgtacagagatcctggtgcagtagggctttctctgctccatacccaggcaggcctccagacatttactcacttgaatcagcagcctgactcaccactattctttctgttcagagctactggtgcagggaggccttctctacttcatgcctgggcagatctccaggcagttaaagca

SEQ ID NO: 428983 - DNA, 542 bp, Homo sapiens
tgtgctttcccttgtcacaagcctggggcaggaggagtgctgctacagctgcagtttcttctgggtggtgagatttgcagccaaggccagcctagtgacctggaattggtctgtgtgtgccatttctagatgtctccatctgctctaccaagataatagtgcagtgaggtcttctgctcaaaccccaggcaaaaattcaggcatttggcgcagccgctttcctggactagcagccttagccactcaactcttcatgaacatagattgtggtgcagagcagccccctacactttatgccaaggcagatctccaggcattaggagcatctgttcactgggttcagagcytaacctgctccacccttcctgtacagagatcctggtgcagtagggctttctctgctccatacccaggcaggcctccagacatttactcacttgaatcagcagcctgactcaccactattctttctgttcagagctactggtgcagggaggccttctctacttcatgcctgggcagatctccaggcagttaaagca

SEQ ID NO: 428984 - DNA, 553 bp, Homo sapiens
cctggtgcagtagggctttctctgctccatacccaggcaggcctccagacatttactcacttgaatcagcagcctgactcaccactattctttctgttcagagctactggtgcagggaggccttctctacttcatgcctgggcagatctccaggcagttaaagcacctgttcttctggttcagcagccggagccacccaaccttcctggacrtagatgatggtacagaatggccctctctactccacactcaggcagacctccagacattcagagcaccaacttgcctggatcagcagcttgatatgccccactcttcctgggtagaggtcttggtgcaggggcctttgctgctacatgctcaggtagatctccaggcattccaagcttctgcttgcctggttcagcagcctgaatcaccccacctcttctgtgcagagatcttggtgcagttggtttccctactcctaattcaggaaggtgggtgctctgaatgcctggagaaattcccacaatcctgttgtattagtctgttctcaggctgctaataaaga

SEQ ID NO: 428985 - DNA, 593 bp, Homo sapiens
tctgcagccagcttgaatttctcctcagaaaatgggtttttcttttctatcacatcatcaggctacaaatttaccaaacttgtatgatctgcttcccttttaaacataaatttcaactccaaaccatacctttctgaataaatraaactgaatgtttttaacagtacccaagtcacttcttgaatgctttgctccttagaaatttattgcaccagatgccctaaatcatctctctcaagttcaaagttccacaaatctttagggcaggggaaaaatgctgccagtctctttgctaaagtacaacaagagtcacctttgcttcagttcccaacaagttcctcatctccatctgagaccacttcagcctggactttattgtccatatcactatcagtattttggtcagagccattcaataagtctctaggaagttccaaactaccatgttgttttttttctataaaaccagaaaaaaactatttaataattcatatgaaactccaaacagccaaaatagccaaagtaatcttaatcacaaagaacaaagccagaggcatcatgtttgctgacttccaaatatactatcaggtgac

SEQ ID NO: 428986 - DNA, 593 bp, Homo sapiens
tctgcagccagcttgaatttctcctcagaaaatgggtttttcttttctatcacatcatcaggctacaaatttaccaaacttgtatgatctgcttcccttttaaacataaatttcaactccaaaccatacctttctgaataaataaaactgaatgtttttaacagtacccaagtcacttcttgaatgctttgctccttagaaatttattgcaccagatgccctaaatcatctctctcaagttcaaagttccacaaatctttagggcaggggaaaaatgctgccagtctctttgctaaagtayaacaagagtcacctttgcttcagttcccaacaagttcctcatctccatctgagaccacttcagcctggactttattgtccatatcactatcagtattttggtcagagccattcaataagtctctaggaagttccaaactaccatgttgttttttttctataaaaccagaaaaaaactatttaataattcatatgaaactccaaacagccaaaatagccaaagtaatcttaatcacaaagaacaaagccagaggcatcatgtttgctgacttccaaatatactatcaggtgac

SEQ ID NO: 428987 - DNA, 586 bp, Homo sapiens
cttaatcacaaagaacaaagccagaggcatcatgtttgctgacttccaaatatactatcaggtgacggtaaccaaaatagcatggtactggtgccagaacggcatggtactggtacaaaaacagacacatagaccaatggaacrgaacagagaacccagaaataaagctgcacacctacagatatctgatctttaacaaagttaagaaaaataaccaacagggaaaagactactccgtattcaataaacagtgtgggctagttgggtagccatatgtagaagaatgaaactcaaccccacctttcaccatataaaaaaattaactgaggttggattaaagatttaaacacaagacctcaaactacaagaatcctaggaaacgccattctggacattggccttgggaaataatttatgactaagtcctcaaaagcaattgcaaccaaaacaaaaattgacaagtgggatctaattaaattaaagagctctacacagcaaaagaaattatcaacagagaaaacaggcaacctacagaatgagataaaatactcacaaactacacttccaataaaggtcccaatacccc

SEQ ID NO: 428988 - DNA, 589 bp, Homo sapiens
tactagcaaactaaacccaataactttaaataggattacacaacatgaccaagtaggatttatcccagatacacaaatatgcttcaacaacggaaaatcaattaataaaatatgtatattaataaaataaaggatcaaaaaggattatcatgacaatagttgtaggaaaatctttggagaaaatccaacactcattcatattaaaaaacctatgacacttaacaaaaaatatgacacttaaaacacaagcaacacgagaaaaatattgttaaattggacttcattaaaattaaaggcttttgatctacaaaatacacmacttataaaggggaaaaccaatgtatagcaggaaccaaaatattttcatattgtatgtctgataaggacttatgcataatatataaagaactgttgcaactaaaaatcaaaagacaaataactcaattaaaaaatgagcaagtaatttgaaagactttacgccaaggaagatatacaaatggccaataggcacatgaaaatatgctgactgttattagccattagggaaatgcaaatcacaatcataatgagatgaaacttcacaaatacc

SEQ ID NO: 428989 - DNA, 451 bp, Homo sapiens
gaggatgtaaaagaattagaactctcatacattgcttctcagaatgtaaaacagtttctttgaaaaacagtttagaaattctgcataaaatsaaacatagagctgccatatgacccagaaattctacttgtaggaatatacccaagagaactgaccatgtctgttctatttgttcacacaaatacttatacattaatgttcatagtagcattattcataatagaccaaaagtgaaaataatttaagcatccattaactgatgagtgtgtaaataaaatgtatttttaaatctagaattaaaaccttgaatgtcaatactcaaaaatttctattttaaaaaatatatggttatccatttcattatattttctgcagttttattccatccatatgtggaaaagataaattgtatgagaaaagaggacagagttcataaagaaagactagtgtt

SEQ ID NO: 428990 - DNA, 451 bp, Homo sapiens
gaggatgtaaaagaattagaactctcatacattgcttctcagaatgtaaaacagtttctttgaaaaacagtttagaaattctgcataaaatgaaacataragctgccatatgacccagaaattctacttgtaggaatatacccaagagaactgaccatgtctgttctatttgttcacacaaatacttatacattaatgttcatagtagcattattcataatagaccaaaagtgaaaataatttaagcatccattaactgatgagtgtgtaaataaaatgtatttttaaatctagaattaaaaccttgaatgtcaatactcaaaaatttctattttaaaaaatatatggttatccatttcattatattttctgcagttttattccatccatatgtggaaaagataaattgtatgagaaaagaggacagagttcataaagaaagactagtgtt

SEQ ID NO: 428991 - DNA, 451 bp, Homo sapiens
gaggatgtaaaagaattagaactctcatacattgcttctcagaatgtaaaacagtttctttgaaaaacagtttagaaattctgcataaaatgaaacatagagctgccatatgacccagaaattctacttgtaggaatatacccaagagaactgaccatgtctgttctatttgttcacacaaatacttatacattaatgttcatagtagcattattcataatagaccaaaagtgaaaataattyaagcatccattaactgatgagtgtgtaaataaaatgtatttttaaatctagaattaaaaccttgaatgtcaatactcaaaaatttctattttaaaaaatatatggttatccatttcattatattttctgcagttttattccatccatatgtggaaaagataaattgtatgagaaaagaggacagagttcataaagaaagactagtgtt

SEQ ID NO: 428992 - DNA, 451 bp, Homo sapiens
gaggatgtaaaagaattagaactctcatacattgcttctcagaatgtaaaacagtttctttgaaaaacagtttagaaattctgcataaaatgaaacatagagctgccatatgacccagaaattctacttgtaggaatatacccaagagaactgaccatgtctgttctatttgttcacacaaatacttatacattaatgttcatagtagcattattcataatagaccaaaagtgaaaataatttaagcrtccattaactgatgagtgtgtaaataaaatgtatttttaaatctagaattaaaaccttgaatgtcaatactcaaaaatttctattttaaaaaatatatggttatccatttcattatattttctgcagttttattccatccatatgtggaaaagataaattgtatgagaaaagaggacagagttcataaagaaagactagtgtt

SEQ ID NO: 428993 - DNA, 575 bp, Homo sapiens
gggtggggtaacagccaaaccttatcaatacccaaaggaatataaattactctattataaagacacatgcattcatatcttcattgcagtactattcacaaagcaaagacatggaatcaatctaaatgcccatcagtgatagactggataaagaaaatatggtacatattcatcatggaatactatgcagccgtaaaaagaatgagatcatgtcctttttagggacattatggagctggaggccattatccttagccaacwaatgcagagacagaaaaccaaataccacatgttctcacttataagtgggagctaaatgatgagcacatatggacacagagggtaacaacatccatggggcttttcacaggctagagggtagagggagaggatcaggaaaaataactaatgggtattaggcttaataccagggtgatgaaataatctgtacaataaacccccaagacacaaatttaccaatgtatcaaacctgcacttgtactcgtgaacttaaaataaaagttaaaagtctaagagttcattaaacatggtaaagagcaaagaagattataagt

SEQ ID NO: 428994 - DNA, 594 bp, Homo sapiens
agggcaagccccatgacatttataaaattatctcaataaccctcttaccttggaggtgggcactctaataaataaatagatgaaaggcaaagaaaaatgaaaaaacaatgtgtttgaagaagtgactgtgtttctctgtgtgtgtgtgcatgtgtgtgtgcagaatctgtaggatgttatgagcttattgattagcttattgattattagaatgggaaagaaaatttagggtcagattaaaatgggccttgaattataattatcacattggatatgtttatcatttgtagaaaatttgaagtcattwcaggtgatttagccatgatgtttttattctcttcttctttaaacttacaatgtaatataaaaagtaaggggcctctcactcaaatcacagtgaaatttttaaatcttccttgcctaaaaattagttgatatcagacttttaaaacttgcttgtcatttaacccttcttcatcttctattctccttaaacagttaaccatgtctttagacacgagtctataccttgaattaaaacaaaaggaaaatgatcaattttcaccagatccagaattttctattctgaaagtg

SEQ ID NO: 428995 - DNA, 524 bp, Homo sapiens
tcaaatatgtgagaaaaatttccccaaatgtattctatatatgggttcaactactaccacatgttgtttcagcattatattgaattagtaaattctctgtgaaatgtcatctatttctacacatatgcccctcgggacatctgtcctatttgtcaataccacaatctgggcatctgtcaaaattacaggctataccgacgtttaggcccctacttgattggctctatcacagggtatgtaaaataaacaaagtttaaaacatcatcaaaatgggaccatatgtctaaacctatcttatgacccttagcagaaggaatgagtgttactacgaatwgtcccatctttccgggaacctgaactagacacagtaaagaagtctcttgctaaataaatgggtccttctggctctacaataggtcaatgtagatattagtctgctaccgtatgtgttctttttattttctggcagctgacaaataaaattacctcaaactctaagatgagaaaactaaagtttgaaaatc

SEQ ID NO: 428996 - DNA, 524 bp, Homo sapiens
tcaaatatgtgagaaaaatttccccaaatgtattctatatatgggttcaactactaccacatgttgtttcagcattatattgaattagtaaattctctgtgaaatgtcatctatttctacacatatgcccctcgggacatctgtcctatttgtcaataccacaatctgggcatctgtcaaaattacaggctataccgacgtttaggcccctacttgattggctctatcacagggtatgtaaaataaacaaagtttaaaacatcatcaaaatgggaccatatgtctaaacctatcttatgacccttagcagaaggaatgagtgttactacgaatagtcccatctttccgggaacctgaactagacacagtaaagaagtctcttgctaaataaatgggtccttctggctctacaataggtcaatgtagatattagtctgctaccktatgtgttctttttattttctggcagctgacaaataaaattacctcaaactctaagatgagaaaactaaagtttgaaaatc

SEQ ID NO: 428997 - DNA, 544 bp, Homo sapiens
gtttctgaaccaacttgcttatatgagcaaggaatgaaattataagacagacacggaggaattctgaaaattccttgtggacaaagaggagttgggcagagaaaagcttgtgcactcactctttcagactgtgtgaaaagaaatgaagtccttttttacttttattttattttcaagtcattatttttcaatygtactcctttggttgctagtgaagtaaatattgttcccaagtgactttaatttccccaaattacaggaactataaataaacattcacaaattttgcatttatattatcaagtaagatatttttatacaatcatctttaaattgggtttgtttatttgaatacatttcatgaacatcttagttcagcttagcattttaatgctactgaaatgttttatcagaaataatgggcctaattatgaactcataataggtcaccaatttctggattttctcccaaatcaccatcaagtctgtgaaaagagccgttgaatcatttgtttttaaacataaatcaagcaaacctttcttg

SEQ ID NO: 428998 - DNA, 544 bp, Homo sapiens
gtttctgaaccaacttgcttatatgagcaaggaatgaaattataagacagacacggaggaattctgaaaattccttgtggacaaagaggagttgggcagagaaaagcttgtgcactcactctttcagactgtgtgaaaagaaatgaagtccttttttacttttattttattttcaagtcattatttttcaattgtactcctttggttgctagtgaagtaaatattgttcccaagtgactttaatttccccaaattacaggaactataaataaacattcacaaattttgcatttatattatcaagtaagatatttttatacaatcatctttaaattgggtttgtttatttgaatacatttcatgaacatcttagttcagcttagcattttaatgctactgaaatgttttatcagaaataatgggcctaattatgaactcatrataggtcaccaatttctggattttctcccaaatcaccatcaagtctgtgaaaagagccgttgaatcatttgtttttaaacataaatcaagcaaacctttcttg

SEQ ID NO: 428999 - DNA, 437 bp, Homo sapiens
  misc_feature (1)...(437): n = A,T,C or G
ctttccaccattatgaccatgaatacacaatagttagctcctgcttataagtgagaacatgcagtatttggttctrtttccatgttatcttgcttaggataatggcctccatatgcatccattttgctgcaaataacctaatttggttcttttttatggctgtgtagaattccagtggtatacatgagccactttttccttatctaccagaagatatttntaataactactttagtggagaatgaaataacctttggtcagaaaggatggactctcagcaaaattttagaaagagatacagaaggagatttggagcatgtgaaaatgcataaaataagaacaccattgtcataatctaaattgcaggttaatcagattgccagcagatccaatttattttgatttacaagaagtaacataagttttccatcagatta

SEQ ID NO: 429000 - DNA, 556 bp, Homo sapiens
  misc_feature (1)...(556): n = A,T,C or G
accattatgaccatgaatacacaatagttagctcctgcttataagtgagaacatgcagtatttggttctgtttccatgttatcttgcttaggataatggcctccatatgcatccattttgctgcaaataacctaatttggttcttttttatggctgtgtagaattccagtggtatacatgagccactttttccttatctaccagaagatatttntaataactactttagtggagaatgaaataacctttggtcagaaaggatggactctcagcaaaattttagaaagagatacagaaggagatttggagcatgtgaaaatgcataaaataagaacaccattgtcataatctaaattgcaggttaaycagattgccagcagatccaatttattttgatttacaagaagtaacataagttttccatcagattattggcaaaaatgtatttattgccaaccttggccacattttgtctttgagttttcttgataaagttcaggtgttgaaaatggagtaggggtaagaggaacaatctcaaaatcagaaagcaaaatga

SEQ ID NO: 429001 - DNA, 556 bp, Homo sapiens
  misc_feature (1)...(556): n = A,T,C or G
accattatgaccatgaatacacaatagttagctcctgcttataagtgagaacatgcagtatttggttctgtttccatgttatcttgcttaggataatggcctccatatgcatccattttgctgcaaataacctaatttggttcttttttatggctgtgtagaattccagtggtatacatgagccactttttccttatctaccagaagatatttntaataactactttagtggagaatgaaataacctttggtcagaaaggatggactctcagcaaaattttagaaagagatacagaaggagatttggagcatgtgaaaatgcataaaataagaacaccattgtcataatctaaattgcaggttaatcagattgccagcagatccaatttattttgatttacaagaagtaacatamgttttccatcagattattggcaaaaatgtatttattgccaaccttggccacattttgtctttgagttttcttgataaagttcaggtgttgaaaatggagtaggggtaagaggaacaatctcaaaatcagaaagcaaaatga

SEQ ID NO: 429002 - DNA, 557 bp, Homo sapiens
cactttgattccaaatttctggtttctacaactgtgagagaataaatatctgttgttttaagtcaccagcttggatgtaaattattatggcagccttacaaaactagaagactagatacgtgctcttattgttaaaccyaaccaaccaaccaaccaacagacaaacagcatccaacatgatctaatgttttcttcatatccctcatgatgaaaggaaggtacatagaaagaactggaattgtcctgagttaatccactcactgacactctagcccaaacttgaggggagccatccaaatcatagtgagtaggtcacaggaggatgtcatgtgtcacaggaggatactaatcccaccattcacaatgtctttgcccagggaatggggtctgttatgaagcattataccacctgggcctacactaggcagggattggcctgaaagcacatccttcatatagcttctgctgcctgtagcatgtatgatgcactcaaaatcttaagagtccatggctttgcatacagatataaggttttttatataaaggatggataatga

SEQ ID NO: 429003 - DNA, 557 bp, Homo sapiens
cactttgattccaaatttctggtttctacaactgtgagagaataaatatctgttgttttaagtcaccagcttggatgtaaattattatggcagccttacaaaactagaagactagatacgtgctcttattgttaaacctaaccaaccaaccaaccaacagacaaacagcatccaacatgatctaatgttttcttcatatccctcatgatgaaaggaaggtacatagaaagaactggaattgtcctgagttaatccactcactgacactctagcccaaacttgaggggagccatccaaatcatagtgagtaggtcacaggaggatgtcaygtgtcacaggaggatactaatcccaccattcacaatgtctttgcccagggaatggggtctgttatgaagcattataccacctgggcctacactaggcagggattggcctgaaagcacatccttcatatagcttctgctgcctgtagcatgtatgatgcactcaaaatcttaagagtccatggctttgcatacagatataaggttttttatataaaggatggataatga

SEQ ID NO: 429004 - DNA, 557 bp, Homo sapiens
cactttgattccaaatttctggtttctacaactgtgagagaataaatatctgttgttttaagtcaccagcttggatgtaaattattatggcagccttacaaaactagaagactagatacgtgctcttattgttaaacctaaccaaccaaccaaccaacagacaaacagcatccaacatgatctaatgttttcttcatatccctcatgatgaaaggaaggtacatagaaagaactggaattgtcctgagttaatccactcactgacactctagcccaaacttgaggggagccatccaaatcatagtgagtaggtcacaggaggatgtcatgtgtcacaggaggatactaatcccaccattcacaatgtctttgcccagggaatggggtctgttatgargcattataccacctgggcctacactaggcagggattggcctgaaagcacatccttcatatagcttctgctgcctgtagcatgtatgatgcactcaaaatcttaagagtccatggctttgcatacagatataaggttttttatataaaggatggataatga

SEQ ID NO: 429005 - DNA, 577 bp, Homo sapiens
agaaaaaactgggaccaggagtggaggtgctgattgatgtaatgtagtcaccatgtacatgttgctatggaaattatgcaaaaatgaaagaaaaaagaaactaagtagttgtattgagaagayagaaatgacatggcatgtctctggtaacattattgaagagatttcttccatttcctgagacaagcatctagaatagttaaaaatgggaaattaaggggttcagtcagaagattaagttagcattacaaatctctcacataataagaatcagcatctctccccagtctcctgatgaaactttttggcactgtgtttacatctcaagtacagaaagctcacttgcaatcctcatgactaagctaatttcactgacttggttaaaaagatattttccattttttttaacagcacagtctttgctaaagaatggctaccagggtttaatctcttatcctaattcgaatcacacagtccataatttcctggtatccaaacaaattcagtgggcaggcatgaacaaaatttggccataaacactagtaatcaccattttgtttcaagctttaataagaga

SEQ ID NO: 429006 - DNA, 519 bp, Homo sapiens
ataatggtaaccagtaataataaytgagcctttttacatcccagggttagtattataattggtgccttatgtattaactcttctgatcctcaccagaggaagctcacaaaggtaactaactggctaagcctctcattggcagtaggtgatacagcctgaagaacccagatggttcagctcctgaatccttcttcttaccattatgttctgccacgtctcacataaccagtgggaatccacacagcagatgacccttaactttgttctgtaaaaattccatagtaggtaaaataagctatcacccaaggggtttctctactctccaatacagaaaatggacattagcctagtgataccaaaatgctactgttctttgtgggaaatcctagccagttgaaaccattaaaggggacaaatgtcactgagcatctactggatgccagacattatttcatgcatttcaatgtgatttatctcacttagtcaaaaaaatatatatatggtaaatttgaagaatgg

SEQ ID NO: 429007 - DNA, 519 bp, Homo sapiens
ataatggtaaccagtaataataattgagcctttttacatcccagggttagtattataattggtgccttatgtattaactcttctgatcctcaccagaggaagctcacaaaggtaactaactggctaagcctctcatwggcagtaggtgatacagcctgaagaacccagatggttcagctcctgaatccttcttcttaccattatgttctgccacgtctcacataaccagtgggaatccacacagcagatgacccttaactttgttctgtaaaaattccatagtaggtaaaataagctatcacccaaggggtttctctactctccaatacagaaaatggacattagcctagtgataccaaaatgctactgttctttgtgggaaatcctagccagttgaaaccattaaaggggacaaatgtcactgagcatctactggatgccagacattatttcatgcatttcaatgtgatttatctcacttagtcaaaaaaatatatatatggtaaatttgaagaatgg

SEQ ID NO: 429008 - DNA, 542 bp, Homo sapiens
gttactgtttggatttacatagaaagacttttgcctaagcctgtgctgaacacatatcaaaacaattatgcctagcacgtacacagtgataagaatgttttcttttggcatccactagaggagaaacttagagcagcaccactttctactgctacccttgggtccatgctgcggtagttatttacctgaattgtcctcggagtaactgcatttcccttgtataagaaatggacctaaagtaatggatttgcccattagtgaataatattagaaacagtttcaattgtaatgcagttcctgttcagttccatgcaatttctgcatagaaacacaactgaaaggaaaatgacaaccaatcaaccagtaaaactgcaataaatacttttcaggtgagaaaacgtcaaaagagtgtggatttggaagtctttccattgtgctaattatagatcttttttatctctctgaacacttgtcaatagtcaytaggtttatacaattttctctttttaatgcatcaaaaaatcaccaaataggaagaagta

SEQ ID NO: 429009 - DNA, 561 bp, Homo sapiens
tgagtgctttcacatgtataatcagtacrtgttcaggatggtcattttttccagatatcattgccgctactctgggagatgtaactcaaaaactatttttcttaaaattgttagattttatggaataatgtgaccatgatattaataaaagtaggaaagtcactatagagtaactcagtgttgtctaaccataaaatggaaagaatttgaagttgtaagagaattcaggctgatgtactctgttcatttcatatactctgagttccaaacagaatgaagctcacagaagtggaaaggagcaaaagagaaaagaattaaccagcatgtgataatatagagattagaaatgcagatttagaaacctaggaatctaaatctgagccacattacctttagaaaagtgaatgctgataggaggagaaacaattatccagtacttagggagtaagaaaattagtgtgaaggtattccattacaaaaacatggatttaaaaaaagatacaaactgcaatgccaccccactcctgccccagaggatcccttagctaatactggatatgt

SEQ ID NO: 429010 - DNA, 561 bp, Homo sapiens
tgagtgctttcacatgtataatcagtacatgttcaggatggtcattttttccagatatcattgccgctactctgggagatgtaactcaaaaactatttttcttaaaattgttagattttatggaataatgtgaccatgatattaataaaagtaggaaagtcactatagagtaactcagtgttgtctaaccataaaatggaaagaatttgaagttgtragagaattcaggctgatgtactctgttcatttcatatactctgagttccaaacagaatgaagctcacagaagtggaaaggagcaaaagagaaaagaattaaccagcatgtgataatatagagattagaaatgcagatttagaaacctaggaatctaaatctgagccacattacctttagaaaagtgaatgctgataggaggagaaacaattatccagtacttagggagtaagaaaattagtgtgaaggtattccattacaaaaacatggatttaaaaaaagatacaaactgcaatgccaccccactcctgccccagaggatcccttagctaatactggatatgt

SEQ ID NO: 429011 - DNA, 546 bp, Homo sapiens
agtgttgtctaaccataaaatggaaagaatttgaagttgtaagagaattcaggctgatgtactctgttcatttcatatactctgagttccaaacagaatgaagctcacagaagtggaaaggagcaaaagagaaaagaattaaccagcatgtgataatatagagattagaaatgyagatttagaaacctaggaatctaaatctgagccacattacctttagaaaagtgaatgctgataggaggagaaacaattatccagtacttagggagtaagaaaattagtgtgaaggtattccattacaaaaacatggatttaaaaaaagatacaaactgcaatgccaccccactcctgccccagaggatcccttagctaatactggatatgttctacgaggaatgcagagagaaaaaaatcagtaaaatatatatgcctggtgttctattttctaaatatgaaaatgaacaaaaagcataaacaagatgcagttactaaaactacatcacaagtagaattaccaaagtaatcagagaacaaattgaagttaac

SEQ ID NO: 429012 - DNA, 546 bp, Homo sapiens
agtgttgtctaaccataaaatggaaagaatttgaagttgtaagagaattcaggctgatgtactctgttcatttcatatactctgagttccaaacagaatgaagctcacagaagtggaaaggagcaaaagagaaaagaattaaccagcatgtgataatatagagattagaaatgcagatttagaaacctaggaatctaaatctgagccacattacctttagaaaagtgaatgctgataggaggagaaacaattatccagtacttagggagtaagaaaattagtgtgaaggtattccattacaaaaacatggatttaaaaaaagatacaaaytgcaatgccaccccactcctgccccagaggatcccttagctaatactggatatgttctacgaggaatgcagagagaaaaaaatcagtaaaatatatatgcctggtgttctattttctaaatatgaaaatgaacaaaaagcataaacaagatgcagttactaaaactacatcacaagtagaattaccaaagtaatcagagaacaaattgaagttaac

SEQ ID NO: 429013 - DNA, 550 bp, Homo sapiens
ggaggccaaggtgactagaatcattaaggcagactgacagagagaagagggctgcacagagagagaactgtggagatttacgtagaggttctctggagtccttgagtgagaaccgaactgtgcctacataaagtaaaactccatgagatagaaaaatgagtcttcattagcaatgggccagagaaattcctggaggtcatatgggccttagaagaaccagtatgtgctccagccagagtgagaaacttataacatcagatagagttctcagaataatcacaccttagtaggggggtgaatcagctctagagtcaaggctctgaagccattataatcacatttaaaagtaaacaatatcaccactgatctcagataactgcatttgaaaacaaagttcatctctctttaaataaaacgaaatccagatcctaacaatgtagaattcagaatttcccttagacattaaaaaaataacagaaatgcatataaacaamaaaattcatccaaaacaagaaaaaaaaattaacagaaacagaccaagaaaagacag

SEQ ID NO: 429014 - DNA, 513 bp, Homo sapiens
gtcccaattaatacactcctgtacctaaactgttttgttttggggcttgtgctatgtaactaaagcatgataactaaagcctttgcatatcaaaactaaggaaaacaagaactgtctattttatgagccctatatcaatcattaaaattaaaacaaaatggaatggttaaaagttaatagtggagataaaagcggatcttaaaaactaaattctcaattcaaaagaaggcagaaaaagggggaaaatgaacagaaatgatgagatatttagaaaacatatagcaagagagtagttacacacccaatcatattgataattacattaaatataaattgacaaaatattcttattaaaaggcagagatcataagacaggattaaaaacactgactcaactatatgctctttataagaaacttayttgaaccaaaaaaaaaaaaaaagaaaaacaaacaaaccaaaacccactaaaactgtgatgagcaaagtagacatcagaacaggaaatatcac

SEQ ID NO: 429015 - DNA, 594 bp, Homo sapiens
gcacacaatagcattacttcaaaatacatactataaaacctattaaaactgaaaggtaaaatagtaaaaccacagtcatccatggggatttccacagtctcctgccagaaatttttaaaatttgttaaacaaaaaattggtaagggtagagaggatcttaaaaatataattagccaacttgatctaattgaatcttttagaataatctaaggatgagggatgaggtagcagagaaagaaaaggcagacatcaacatgacattagtgtttcaaggctatgagaatacaccaataatggtgtgtgtgtgtgtgtgtgtgtagatggtaagctcaatcttaaaaatgttgagttttaactgacaattcattattacgaaagataagaggagatgatatctagggagaggctatatgactgaactctaagagaaaggtcacagcagaaattgtgtacttgacagctctataaggtcagtcaaaaataagtcagtgatgaattctctggtgtaaaagcagaggaatgaggattagatttaaaacacatggaagcacartgacttatgataaaaacatgagcttgaaaatcctgcagaca

SEQ ID NO: 429016 - DNA, 592 bp, Homo sapiens
gaaagacaggcatgatgtggggagctctcagttagctggaaacaggtgaatttcaggtgaacacattgagtccaggagatagaagacaagtcatcaacaatatctgctatggccagttttctgtttctttttaagaatgtatatactttttactgggkgtccccaagtccccctttggtttaatgattcacataactcaagaaagctgatttttttttgtggttatagtttctaacagtgaaagaaaccagattaaaataatcagaagcataaaagcacataaagttgagtccaggacaaaccagatgtgagcttacaggtgtcctttcatagtggggacttcacactgactaattttctttacaatggtgtgagacaacatgtgtgaacttgttgccaactagggaagctcagtcagtcttgagtccagggttttcattaggattccaccacatatgcatcgagcgtcctgtgactgaacttagctacttagttcccaacctccctatgccctaagagaggtcatattagtatggcattacacaaagtcataggcatacagaaacaggtgctcacaagaaatcacgttgtt

SEQ ID NO: 429017 - DNA, 529 bp, Homo sapiens
agaaagactgcagccctgcccaaaacttgatgttagccctgtgagtctcatttaaggcttctgagctccagtactgtaggattaccagtcactttattgtaagatatgaagtttgtggtaattggttacagcagcaagaggaagtttatatagtaattgtatcatgaaaatcagaaccataatttacaactgcttttaatactgcacttggatgtttgaaatcacgtacatggaaatgatcactatgtgtatgagggaggatagcaaattaataccaaaataacgcaaatgcaaatcttacactcatttctatgtaggtttcayttaatctttgaaattaaaaggaaattaaaggattatgatattttgatgaaattagactaaaatgaacaataacaaaataagaacttatattctttatgtagtcaataaagaagtgatagtagaaaaaacaaggtcaaatgaaggtgatgatttaggaagttggaaagatagcttaaactacaaaaaggtatataactagtgaaca

SEQ ID NO: 429018 - DNA, 529 bp, Homo sapiens
agaaagactgcagccctgcccaaaacttgatgttagccctgtgagtctcatttaaggcttctgagctccagtactgtaggattaccagtcactttattgtaagatatgaagtttgtggtaattggttacagcagcaagaggaagtttatatagtaattgtatcatgaaaatcagaaccataatttacaactgcttttaatactgcacttggatgtttgaaatcacgtacatggaaatgatcactatgtgtatgagggaggatagcaaattaataccaaaataacgcaaatgcaaatcttacactcatttctatgtaggtttcatttaatctttgaaattaaaaggaaattaaaggattatgatattttgatgaaattagactaaaatgaacaataacaaaataagaacttatattctttatgtrgtcaataaagaagtgatagtagaaaaaacaaggtcaaatgaaggtgatgatttaggaagttggaaagatagcttaaactacaaaaaggtatataactagtgaaca

SEQ ID NO: 429019 - DNA, 529 bp, Homo sapiens
agaaagactgcagccctgcccaaaacttgatgttagccctgtgagtctcatttaaggcttctgagctccagtactgtaggattaccagtcactttattgtaagatatgaagtttgtggtaattggttacagcagcaagaggaagtttatatagtaattgtatcatgaaaatcagaaccataatttacaactgcttttaatactgcacttggatgtttgaaatcacgtacatggaaatgatcactatgtgtatgagggaggatagcaaattaataccaaaataacgcaaatgcaaatcttacactcatttctatgtaggtttcatttaatctttgaaattaaaaggaaattaaaggattatgatattttgatgaaattagactaaaatgaacaataacaaaataagaacttatattctttatgtagtcaataaagaagtgatagtagaaaaaacaaggtcaaatraaggtgatgatttaggaagttggaaagatagcttaaactacaaaaaggtatataactagtgaaca

SEQ ID NO: 429020 - DNA, 529 bp, Homo sapiens
agaaagactgcagccctgcccaaaacttgatgttagccctgtgagtctcatttaaggcttctgagctccagtactgtaggattaccagtcactttattgtaagatatgaagtttgtggtaattggttacagcagcaagaggaagtttatatagtaattgtatcatgaaaatcagaaccataatttacaactgcttttaatactgcacttggatgtttgaaatcacgtacatggaaatgatcactatgtgtatgagggaggatagcaaattaataccaaaataacgcaaatgcaaatcttacactcatttctatgtaggtttcatttaatctttgaaattaaaaggaaattaaaggattatgatattttgatgaaattagactaaaatgaacaataacaaaataagaacttatattctttatgtagtcaataaagaagtgatagtagaaaaaacaaggtcaaatgaaggtgatgatttasgaagttggaaagatagcttaaactacaaaaaggtatataactagtgaaca

SEQ ID NO: 429021 - DNA, 348 bp, Homo sapiens
tggtggctcatgcttgtaataccagccrttgaagaggctgaaatgagaggattctttgagtccaggagttcaagagcaacctgggcaacatagcaagacccagcctctatcaaaagttaaaaaaaaaaaaaaaaaaggtgggcatggtgatgtgcacctcttgtcctagctatttgggaggccaaggtggaaggattgcttgagcttgggagtttgaggctgcagtgagcagtgattgcaccactgcactccagcctgggcaacaaagcaagaccctatctcaaaaaaatatatataataaaaataaaaatcagctgtcattgagttctacataaataggcacaggtg

SEQ ID NO: 429022 - DNA, 348 bp, Homo sapiens
tggtggctcatgcttgtaataccagccgttgaagaggctgaaatgagaggattctttgagyccaggagttcaagagcaacctgggcaacatagcaagacccagcctctatcaaaagttaaaaaaaaaaaaaaaaaaggtgggcatggtgatgtgcacctcttgtcctagctatttgggaggccaaggtggaaggattgcttgagcttgggagtttgaggctgcagtgagcagtgattgcaccactgcactccagcctgggcaacaaagcaagaccctatctcaaaaaaatatatataataaaaataaaaatcagctgtcattgagttctacataaataggcacaggtg

SEQ ID NO: 429023 - DNA, 348 bp, Homo sapiens
tggtggctcatgcttgtaataccagccgttgaagaggctgaaatgagaggattctttgagtccaggagttcaagagcaacctgggcaacatagcaagacccagcctctatcaaaagttaaaaaaaaaaaaaaaaaaggtgggcatggtgatgtgcacctsttgtcctagctatttgggaggccaaggtggaaggattgcttgagcttgggagtttgaggctgcagtgagcagtgattgcaccactgcactccagcctgggcaacaaagcaagaccctatctcaaaaaaatatatataataaaaataaaaatcagctgtcattgagttctacataaataggcacaggtg

SEQ ID NO: 429024 - DNA, 546 bp, Homo sapiens
tgactggtgggtgaggagaacatatgtgagttcaccaaacagaaaagctgaatgaggcaatgcctcttcctgatcatatctcttactcagataactatataatttattgtccagtaaagggtatatttaaaaatcatattaaaatcatgcaatgaagttgtccagggaaatcaagacttaacagtctcactctgacaataatgaataagggggttccctcaagatagactaggacatgaccccacactggcaggcagtagtaccagaaaagaaactatggaaaatctttaccttatgcttgaggtagggaccaggctaaagtgaaagccagacataaaattctacctaaaatatatccacaatcgaagaaaatatgtggtgtacaggcatagaatgtctttactggatcattgaaatagtaagataaattcaaatttttacattgttttattttcctccagttagggcttgaggtttgtctctggagagtaactgtcaattggagccctgcctttctygggttctgagcagggggttgtggatgct

SEQ ID NO: 429025 - DNA, 403 bp, Homo sapiens
cagaacatctgttgagactaggagatgcctggtggctgttgcctgacctgtgtcctgtgtatttctgacaagagccactcttagagaccctggccaggaggagagttaggttccagtgtaggtcagatcagacacatggaggccacaggacmaaacatgggaaatcacagaagtagttttattacagatccagagagaagagggtagctgagaagagggtttagctgtgtccccagccaaatctcatcttgaattcccacatgttgtgggagggaacaggtgggaggaaattgaatcatgggggcaggtctttcccatgctgttcttttgatagtgaataagtctcacaagatctgatggttttataaaggggagtttccctgcacaagctctcttgtcttgt

SEQ ID NO: 429026 - DNA, 403 bp, Homo sapiens
cagaacatctgttgagactaggagatgcctggtggctgttgcctgacctgtgtcctgtgtatttctgacaagagccactcttagagaccctggccaggaggagagttaggttccagtgtaggtcagatcagacacatggaggccacaggacaaaacatgggaaatcacagaagtagttttattacagatccagagagaagagrgtagctgagaagagggtttagctgtgtccccagccaaatctcatcttgaattcccacatgttgtgggagggaacaggtgggaggaaattgaatcatgggggcaggtctttcccatgctgttcttttgatagtgaataagtctcacaagatctgatggttttataaaggggagtttccctgcacaagctctcttgtcttgt

SEQ ID NO: 429027 - DNA, 403 bp, Homo sapiens
cagaacatctgttgagactaggagatgcctggtggctgttgcctgacctgtgtcctgtgtatttctgacaagagccactcttagagaccctggccaggaggagagttaggttccagtgtaggtcagatcagacacatggaggccacaggacaaaacatgggaaatcacagaagtagttttattacagatccagagagaagagggtagctgagaagagggtttagctgtgtccccagcmaaatctcatcttgaattcccacatgttgtgggagggaacaggtgggaggaaattgaatcatgggggcaggtctttcccatgctgttcttttgatagtgaataagtctcacaagatctgatggttttataaaggggagtttccctgcacaagctctcttgtcttgt

SEQ ID NO: 429028 - DNA, 464 bp, Homo sapiens
aagggctggaaatgcaaacttagctgcaaagctgtcttggggagattcgcatcggtagagaatctgccttgatgcagccaggctttctctgaggtctgcccccttatctggatctaggaaaggttaactgagtgtcggaggtctccaaaggtctgaaagaaacattttctgtctattctatctgaggactgctcccagtgaggtttcacytacgtaataagtccactgtttctaggcagggtacttttcccacataacctttttttcttttttttccctgtgatccaagaccccattctttctgtaaacttcatgtggtagataagcttctgcacccatcgtgtgtctgggtcttcattgtaagggctccagtgtacacacattgcagaaacctgtttgccttttctactatttatctgcctcctattagtgattatcagggaaacttcagaaggcaaaaggga

SEQ ID NO: 429029 - DNA, 464 bp, Homo sapiens
aagggctggaaatgcaaacttagctgcaaagctgtcttggggagattcgcatcggtagagaatctgccttgatgcagccaggctttctctgaggtctgcccccttatctggatctaggaaaggttaactgagtgtcggaggtctccaaaggtctgaaagaaacattttctgtctattctatctgaggactgctcccagtgaggtttcacctacgtaataagtccactgtttctaggcagggtacttttcycacataacctttttttcttttttttccctgtgatccaagaccccattctttctgtaaacttcatgtggtagataagcttctgcacccatcgtgtgtctgggtcttcattgtaagggctccagtgtacacacattgcagaaacctgtttgccttttctactatttatctgcctcctattagtgattatcagggaaacttcagaaggcaaaaggga

SEQ ID NO: 429030 - DNA, 464 bp, Homo sapiens
aagggctggaaatgcaaacttagctgcaaagctgtcttggggagattcgcatcggtagagaatctgccttgatgcagccaggctttctctgaggtctgcccccttatctggatctaggaaaggttaactgagtgtcggaggtctccaaaggtctgaaagaaacattttctgtctattctatctgaggactgctcccagtgaggtttcacctacgtaataagtccactgtttctaggcagggtacttttcccacataacctttttttyttttttttccctgtgatccaagaccccattctttctgtaaacttcatgtggtagataagcttctgcacccatcgtgtgtctgggtcttcattgtaagggctccagtgtacacacattgcagaaacctgtttgccttttctactatttatctgcctcctattagtgattatcagggaaacttcagaaggcaaaaggga

SEQ ID NO: 429031 - DNA, 590 bp, Homo sapiens
ttctactatttatctgcctcctattagtgattatcagggaaacttcagaaggcaaaagggacattctcctttagcccatactcagacaaaatcccccaacatttaactgattcctaatagcttaaaatcactttgaaaactccatatatttataactttttcttccctctatgatttctggtcagcttgtgttttgttttttattccatttacttcatcctcgaaaagacctattttatgtctatttattctcatttattgacattgagaaaagaaaataactttcatgtgagaaatgcaagtccttttaaataatcaggcccagagagatattcaaaggagacagcagttctgtcctgctcctctttgagctgtgtgttcatctaggctgcttgctgttgccacagtagctataaattaaccaataacgccacaccagacactataatccacacccaataatagtgtaacagtgtatagccagtcamtaataaatgttatttccataagccaatgagaatttgtgacaaacctctttgcatcatcccacttctggacccttttttgcctttaagaaactgcttgttgca

SEQ ID NO: 429032 - DNA, 550 bp, Homo sapiens
ataacaataatccaaattaaaatttgatttaattacataatttaaaatgacaccagaatactagcaaaaatgtagataagtttatataatcctttttagctgtagaactttattagcataaattcaaatacaggaaccaaaataarattgagacctatagtcaaaggttaaaatgtacacattatagtggcatgattaaactaatttaaagcataataacatggagaaatattgcaaaacatacattttactgaattaattgttaatatctaatcattacgtgagaacaaaggtaaagagtagctacacacacactcccacacacaagtgcaatattgtcaataaacgtgatgttcagctacactagaaatcacacctatgttttctccacagaaaagtaaagattaaaaatcacaataatatttattgtacatatggaggtaaagatactcaaaatattaccctaaaatactttttttgttgagatggagttttgcttttattgccctggctggagtgcaatggcacaatcttggctcactgcaacctc

SEQ ID NO: 429033 - DNA, 550 bp, Homo sapiens
ataacaataatccaaattaaaatttgatttaattacataatttaaaatgacaccagaatactagcaaaaatgtagataagtttatataatcctttttagctgtagaactttattagcataaattcaaatacaggaaccaaaataagattgagacctatagtcaaaggttaaaatgtacacattatagtggcatgattaaactaatttaaagcataataacatggagaaatattgcaaaacatayattttactgaattaattgttaatatctaatcattacgtgagaacaaaggtaaagagtagctacacacacactcccacacacaagtgcaatattgtcaataaacgtgatgttcagctacactagaaatcacacctatgttttctccacagaaaagtaaagattaaaaatcacaataatatttattgtacatatggaggtaaagatactcaaaatattaccctaaaatactttttttgttgagatggagttttgcttttattgccctggctggagtgcaatggcacaatcttggctcactgcaacctc

SEQ ID NO: 429034 - DNA, 550 bp, Homo sapiens
ataacaataatccaaattaaaatttgatttaattacataatttaaaatgacaccagaatactagcaaaaatgtagataagtttatataatcctttttagctgtagaactttattagcataaattcaaatacaggaaccaaaataagattgagacctatagtcaaaggttaaaatgtacacattatagtggcatgattaaactaatttaaagcataataacatggagaaatattgcaaaacatacattttactgaattaattgttaatatctaatcattacgtgagaacaaaggtaaagagtagctacacacacactcccacacacaagtgcaatattgtcaataaacgtgatgttcagctacactagaaatcacacctatgttttctccacagaaaagtaaagattaaaaatcacaataatatttattgtacatatggaggtaaagatactcaaaatattaccctaaaatactttttttgttgagatggagttttgcttttattgcccwggctggagtgcaatggcacaatcttggctcactgcaacctc

SEQ ID NO: 429035 - DNA, 544 bp, Homo sapiens
attatgtaaactccaagtgcatacttgtgcacataattatatccgtaaaccttttttcctgttaatttgtacattatcagtttgtttgatagactcaaataattaaagcttcaagggaaatataaagaactaattaagttagcacctacttttcaaatatcgcattttttcacagacctattaaataagacaaataacatttaaactttatttttaaatttgcagaatagtatttttcagcagatggtttattttagcaaattccatcttcacattgtgctatgcttttatgagttccagctgttaacggataatattttactgctgaatctatcatgtgtgatataattgctcattatgtgccttaaaacacaggcgatatagttattttcaacttggagcaaattaaaatcttatcagcaatttaaaaagtctagagtagtcttcttctggttaattattttaacttgtgtttttctctttawgtttttagtgagttgtcttatcaaggagaagaactcaagctgattattctttttttttc

SEQ ID NO: 429036 - DNA, 497 bp, Homo sapiens
tttttgggggggggtattttgatgttatgctattgaatatctagattttattggctacgtttgaacaatgttgtggcaggcagttcagtaacttcaggatgactatttttctgttgttgttttaaatcttctctttaaactttgttgagttagtctagagccatctgtaatttggagctaaatgagcactgtcactagggcatgaacctccagtggtctttactgaatatcctggaggtacagaggggattcccttctctcgctggtcagagctaacatgtcttcctgtcatgtgatgccagggaagtgttcttccaactccctggtagagtcctttgctgagctccttagaatttcatcctatgtacatttggcttagggacttgggagaaaccttaggctgattattggttcctttttctgtaaacgttctcttctactacatattccaactgcttaacattttcrtttttatctggttcctcagtgcaatgaca

SEQ ID NO: 429037 - DNA, 636 bp, Homo sapiens
gttacagcatcatgttctgtaactctactccttgttgcttcattctgccattatctggtatgagtgytcctttcccttctgtaatcaggccaagagcataacataatactagttataactgcacagcttgcctccgttgtgtaaaaaaatcactgagacttaactgtgtccaactttttaaatgtgaatataagtacaactaaagctatattttgtttaatatttgcattgcatgcttttccattatttaatttcaacatatgtgaaatataaatataaattattaaaactttaagagagtccatttaaaaaatctggtctgattatgttttaactggtttattacaacgtgcattcagggtctaatataattggtacatttgtctatttgcaaaaaaacttgacaatattttaaaattaatttatccaactcacaacttatatgcttctgctgttgtatggaagatgcattttaaactttatgagatagtattctgttatacagtcgatatccaattaaatttctctctatgtttatttctttcattaaaaaaagcgttcttctaactgcaaactttcatcagggatcatagctcttctacctgaagaataatctttagtatttcttttcctgtg

SEQ ID NO: 429038 - DNA, 636 bp, Homo sapiens
gttacagcatcatgttctgtaactctactccttgttgcttcattctgccattatctggtatgagtgctcctttcccttctgtaatcaggccaagagcataacataatactagttataactgcacagcttgcctccgttgtgtaaaaaaatcactgagacttaactgtgtccaactttttaaatgtgaatataagtacaactaaagctatattttgtttaatatttgcattgcatgcttttccattatttaatttcaacatatgtgaaatataaatataaattattaaaactttargagagtccatttaaaaaatctggtctgattatgttttaactggtttattacaacgtgcattcagggtctaatataattggtacatttgtctatttgcaaaaaaacttgacaatattttaaaattaatttatccaactcacaacttatatgcttctgctgttgtatggaagatgcattttaaactttatgagatagtattctgttatacagtcgatatccaattaaatttctctctatgtttatttctttcattaaaaaaagcgttcttctaactgcaaactttcatcagggatcatagctcttctacctgaagaataatctttagtatttcttttcctgtg

SEQ ID NO: 429039 - DNA, 568 bp, Homo sapiens
cctttttacttaaaggaagcacttaactgcttctctttggcatatgtgaattgccagcattattcctcttgcactttggggccattagtaggtaaaataagagttgcttgaacacaagcactgtgacaccatgacagtggatctgatgagggcagggagtgtctacagctcccttggatgactcatgwctcaggtaggatggagctggacaaggtgagactttatcatgttactgactgtcacacaacttaacatttgcaaattgttacatttatgaaatttttcatttaatattttcagaccatgattgactgcaggtaactgaaatcatgaaaagtgaaaccacagattagtgagggactactacgctgggttaaattaaatatatcattaaaattaattttagtttttttacttttaaaaatgtgatcaccagaaaatttaaaacaacatatgtggcttacattatatttctaatatacaatgctaccctaaagattagtttatatgttataatttttgtggaattgtttggtgtaccaacatttatattagtatgcaaaataac

SEQ ID NO: 429040 - DNA, 595 bp, Homo sapiens
gtgtgtacttgactgcatacaaattatacttatataaagttgatttaataataaaatattttatggacaccagttaccttgaagctaaagcacagaatcctagtcragatgctctacaaacgatgctgaaattactctcctgcttgttctcctgaactctagttaaacctctctccaatctgagaagtggtccattttcccctaacacacaatgcctagctcacttctgtgtattgaccatgcccagagagcctcctttaaaactatccaatgcatatctgttccttttccaggaggctttttctaaccactgagcactgaaagattattgtttcttctaatctcttattttttgtctatactagttacttggcatttcaaaatgtactgctttgagaaatctcttttatggttttgcattattttaatttctgcattgatatttcacttttaatacgtgcatatctcattgtcctgaaaaatattcattttctagagggctaggagtgtgtattatgcatatttacatctctcctagtgtctagcataatgctatacacatagatggcagtcaataaatatttgttgaatgaag

SEQ ID NO: 429041 - DNA, 609 bp, Homo sapiens
ataaatttttatcagccaatggttatgtagaagtggtgtctaattacattccaaatactcatagcatttttaacaaaatgatgtgctggaaaggtatcaggttacattccaaatacaatgsataagtcatcagaatctcatgaagattttctgaaaagcattcagagttccagcaaaaaggagatgctggccctaagcgagacaacacagctcacactccttgggaactggcctttgccactgtaatacttgtcctgaatgcattttcgaagtgcctttgtatttagcctctatttttgactagtgatgaatgagtcacatgtacacaggcacacacacacacacaattttaaaaagtattgaagaaaagtgtgaagaaagaagaaaacaaatgcaaataatgggattttaaacaaagctacattttacaaatttttttcccttaaatgttggtcacctcctttgacaatttttcatggcccttttgttcaggtgcattttcagcagtgacaaatgatggagagtttccattagtttctgagttggatggtttgtttgaaattactctttatcatcccactcatccacatgagcactttccacaaccag

SEQ ID NO: 429042 - DNA, 519 bp, Homo sapiens
ctacattggtcatggttcaggtgcagaaagcatagccttccctagctagtttaagccaaaaagattattgcaaggtattaattggcttacagaatcagtgggagagctgaagaagtggatttgaggctgaattactaggaacaaagtcacactcagaactgagttgccaggggagttgctgcttctgccacagttagggagtgtcagctgagctagcaaactcacaacctagggttgctgtgctccgcacaagcagaatagatgcttcctgccctgcccgccttgwgccccaacaactcattcaactctgaatttggagtcttatgtcagtgtgtctaattgtcacaacctaagtcacatccttagaaactctacctggggaatttggaaaatgtagtttttggcttcccaattctgcagtatgggaaggcatactcaaaggagattgaaatagacattgagtcactcagtcagttaggttttatttttttttcctgttgcaatataccaataacagat

SEQ ID NO: 429043 - DNA, 594 bp, Homo sapiens
ccacaactttcaaaaatatatgctatacctgtgtgaattggtcacagtcaacaacgcggaaagttttgccataaattgtgatgtttattcctcgatttaggtctttccaatggtaatggtcaccccggtcattcttggctagccgctggcgttttattaacttgccttgaaggattccagaattttctacaacaggctctatgacagacatgctgtcatcttctagataatagtaaatgttcacctgacggatcctatactgttcctcagttgacataggaacatcttcttggaaataggcatcaaatttcagtacctataacatacaaggaaaggagaaatggtgtactattagcttgtcatagtcatmtgaaaaatatcaagtaccttcctgaaaacagaaccacacagggagattttaacactcatcacttctatcctgtaaatcttgatactctaaaactacagatactgcaaactatagtccatgggacaaatctaacctgccacctgttttttttatgacctgcaagctaagagtgggttttacatatttaaatggtttaaaaaattttaaaaaatgtttcataacac

SEQ ID NO: 429044 - DNA, 588 bp, Homo sapiens
acagttacaagatgcatgaatttcgattaccaccatttagtaaaataacccattcccccaacaacatggttcaaatttcagttaacacagttaataactatgagtaattgcataaagtacaaacttatctgtcaggactttagtccactaaccacaatgtaattaaacagatgcatatcacaatcagtgacaattacatcacttctttcaaagtctgttggtgactagtcactgtatatttgttttatagttcacgcagacagtaaagtgtgtagctatcttgcctccttgtctctcagtgatacacaaactttattttacaaaaatggraaatcaaaagagagaattggccaataaggatgaaagtacagcaaagatgcaagaagtgaattcaagtcaaatataaatagagttatagaagagaaagctgactgtaggaatgtcgacacagctgcctttcaagagaatctggatgtgcagccagtggaaactggtgaaggcaaacctatcaacataaatgagaaaagtgtttgtaataaaaagaatgaagatatcccagatgcctataaaatgcttcacattaaaaga

SEQ ID NO: 429045 - DNA, 557 bp, Homo sapiens
tgacataaaggagaggatccagttcttgagatctgactaagctaggtgccctctstctagtaaacactatctatgtggccacatcaagatatactagaattttcactagaggggagtttattgctgttgcaactgtagggccgtttaagtatttattccactcacaaatatggctgagataggctagactctttggcagatttgagtctagagatctagaaaaaacaaatggaggcagcctatggatatatgaaaaaggatattctgagaataaggtgccgtttggcagaaaaggccaggcagggaatggaaaggagctgtgaagcagatctagattagaattctgctctttcaacttggtatttgtttgccttcagccaataacttgcttcctttattcctcagtttcctcattgatataaaaagattaataatgcctgaagagttgcctgaggcttggaaggaagaacatctggcacatagtaggtgctcaataattattgtggagaaaatggagcagccaataaaaggtgaaggaactgcagtgagggaaaggt

SEQ ID NO: 429046 - DNA, 557 bp, Homo sapiens
tgacataaaggagaggatccagttcttgagatctgactaagctaggtgccctctgtctagtaaacactatctatgtggccacatcaagatatactagaattttcactagaggggagtttattgctgttgcaactgtagggccgtttaagtatttattccactcacaaatatggctgagataggctagactctttggcagatttgagtctagagatctagaaaaaacaaatggaggcagcctatggatatatgaaaaaggatattctgagaataaggtgccgtttggcagaaaaggccaggcagggaatggaaaggagctgtgaagcagatctagattagaattctgctctttcaacttggtatttgtttgccttsagccaataacttgcttcctttattcctcagtttcctcattgatataaaaagattaataatgcctgaagagttgcctgaggcttggaaggaagaacatctggcacatagtaggtgctcaataattattgtggagaaaatggagcagccaataaaaggtgaaggaactgcagtgagggaaaggt

SEQ ID NO: 429047 - DNA, 543 bp, Homo sapiens
acttcttttgacattgtcttggccaggaaaataattaagaaaaataaaacagttttctccatttttcagaaaagtatttggcattttcagaaggttattgtgattagaagcatttgtgcccaatcttgtatcattactagaaatgaggcttgccctwtccttccctgcctctatttttccataaggctgcatgtgacactgcatacctgaaagaaaaaagatgtcctgtagatctaagccacatttcctcccttctgcaggttctcctggcaaagattcggctggcagtgatgaggtggtagtagccaaatcagggtggtgagagggctgtgggcagtttatctggggccttataaggacagtgggaaacacttggaccctgaggtccaactgcttttggttttcttaagactcagagttgagttcctgagagaaaacagtgatgcagggacagactgagtgttattaggctggactgcaagtaggtactattcattagagaactgggctaggaacaccctagcatggactctctaggtctag

SEQ ID NO: 429048 - DNA, 543 bp, Homo sapiens
acttcttttgacattgtcttggccaggaaaataattaagaaaaataaaacagttttctccatttttcagaaaagtatttggcattttcagaaggttattgtgattagaagcatttgtgcccaatcttgtatcattactagaaatgaggcttgccctttccttccctgcctctatttttccataaggctgcatgtgacactgcatacctgaaagaaaaaagatgtcctgtagatctaagccacatttcctcccttctgcaggttctcctggcaaagattcggctggcagtgatgaggtggtagtagccaaatcagggtggtgagagggctgtgggcagtttatctggggccttataaggacagtgggaaacacttggaccctgaggtccaactgcttttggttttcttaagactcagagttgagttcctgagagaaaacagtgatgcagggacagactgagtgttattaggctggactgcaagtargtactattcattagagaactgggctaggaacaccctagcatggactctctaggtctag

SEQ ID NO: 429049 - DNA, 537 bp, Homo sapiens
tacgatactgtaaaatcaaaacaagccatttacttccaagacccagtgggggtataggcattgggtaaacacttcctttccaaaagggaaaaattggcccaaaaaaaggaagccagaggctccatgcaagatcaaaacccagcagggcagcccttaaatcttatagctccaaaataatctcctttgactccatgtcccacatccagagcatgctggtgtaaggggtgggctcccaaggccttgggcagctctacctctttggctttgcagggttcagcccccatggctgctttcacaggttgttgtgtgcctggggcttttccaggtgcagggagcaagctaccagtggacgtagcattctggagtctggaggatggtggcccccttctcacagctccactaggcagtgcctcaytggggactgtgtggggattccaaccccacatttccccttggcactctcctagcagaggctctctgtgagggctctgcctctgtggcaggcttctgcttgggcacccaggctttcccatacat

SEQ ID NO: 429050 - DNA, 618 bp, Homo sapiens
taatgttatagcagtacttagaacattgtattaactgaatgtgtgtgtgtgtgtgtgtattttttcatgctcgtggcgtgtatcagtgattttcatcttcttttttggtatgtggtcatctcaagctgcccaacgaatgttttcacttgacttctgttgatacctccaacttaacctttaaacaaaatgtctactgactttcctaattccctttatttgctccctccctcactcccttatcctgcttaggcagccagtcattccattttgttaatccttcctttgttatttctctcacattcatttctcttttcatttttatggtaatcctttatttaggccttgattatcttgtgcttatatcacacatacacaaattggtcttccttttcagaatacaaattggtcttcaagggtaggtagtgcagagactggatagaggaatgattttcccacatrccaaatgaggccaagcaaggtaaggtcagaccaagataggtgagctatgtttgggcagagtggggcagaggagtttgggctctaatccccacctcttggaaattggagatgggggtggagatgcttagttccaggcaggatgaggtgggtcagaggagc

SEQ ID NO: 429051 - DNA, 661 bp, Homo sapiens
taaatctaaagttattttgaaataaaaagatttttaaaaatccaacaatgttggaacgtaaatatagatgtattttctctagcatacttggaactatttagcgagatccctaacttgagtttatagctctagaattackaggcaaaatggaaacttatactccatgatgtctaacagatagggaaacaaatccagaaaaataagcagttgagattgctcatatagaagactagttctgacagagtagtacttatcaaaatcaaagtatttaaatagtcaaaatataccttgtacaaattaaacctccctgggccttggtttacttatctgtataatgcaatagttggatcagatgatctctgtagttctttcttccatgaatcttttatgattccagaatttggggtcataaaagagatacaataaagctatgtaattcacaaagtaagtaatattctatgttaattggctttttactagtttacaatgtagcaatactgtaatacatacggtagattggctttgtctctttgataaccttatttgctgaaagagcagagagacatgggagagaatgcttgaggtaagagtggtgcatgaggtgggtacagtggtgtgtgcctataatactagctactagggaggctgaggtgggaagatc

SEQ ID NO: 429052 - DNA, 570 bp, Homo sapiens
acatatatttgaaccgtatatgtatacaaacgtgtattatgtatatacatacatatacatatatgtatgtatgtgtatacatatatagacacatgtatgtaatatatatgtatcacagactaaaaataatgaatgaaaaacacttattagagaagaggtaatatatattatatttacatggatgtatatataatacatacataatattatatacastatatattatatatacatatagtacatatgacctgtatacagtatatataatatatttacatatataatatatataccatatatactatatgtacacatataatatatatactatatttgcatatatattatatattacctcttctttaagaagtgcctttttattcattattcatttttagtttatgatgcatcagctagatgcatcatcacaatgaattgtctggaaaatgattttgttatgtattgtaggaaatccactgaggactttaagtaaaaacaattgttttcataaagttttccaaaagaattatttttttgagtatgtcccagaccccccacccctgtaaaagt

SEQ ID NO: 429053 - DNA, 570 bp, Homo sapiens
acatatatttgaaccgtatatgtatacaaacgtgtattatgtatatacatacatatacatatatgtatgtatgtgtatacatatatagacacatgtatgtaatatatatgtatcacagactaaaaataatgaatgaaaaacacttattagagaagaggtaatatatattatatttacatggatgtatatataatacatacataatattatatacactatatattatatatacatatagtacatatgacctgtatacagtatatatamtatatttacatatataatatatataccatatatactatatgtacacatataatatatatactatatttgcatatatattatatattacctcttctttaagaagtgcctttttattcattattcatttttagtttatgatgcatcagctagatgcatcatcacaatgaattgtctggaaaatgattttgttatgtattgtaggaaatccactgaggactttaagtaaaaacaattgttttcataaagttttccaaaagaattatttttttgagtatgtcccagaccccccacccctgtaaaagt

SEQ ID NO: 429054 - DNA, 520 bp, Homo sapiens
atgatctcaccactgcagtccagcctaggtaacagagtgagaccccatctctaaagaaaaaaataaagaaaatgaagctattgggtttatttattatttatttatttatttattgcctgtttgcttgtattttagggaaagaagggccacacaacggaaagatatttaaggatgtaaatcattrtattctcattaacttactgtgttctctctctattgggaataaagtaatatttaagactaaattaactaatatgagcaaattttgattaactacatatatcacttgattccaacatgccatatatttcctcttcctgactacatgtatcaatgtatactagactttggtatatatgtgtttatgtacattacattatagtttaaggcatattttaaattcaatcttgaatggaaactcagttttattggatgaaataataaccaaatttaggaaggcaatcccatcctaacatttaagacagttaatgaattaactgagattaattcattaaaacac

SEQ ID NO: 429055 - DNA, 529 bp, Homo sapiens
attgagaatttaacattttgacacaccacacaaaacttaagagcccttgcttctctttgctttctcaatccatgcacttatctttctctgtctctctccctgctaccccccagttttgagagcggctttgagagtcctgatcagtatcaatgatgccattattcatcgagcctgacaaataggtcggtttcaggaaatatgtgcttccccttctccacttcccctgttttccaccagataatgaatgcttctatcttaatgtttttattcccaattaagaaggaattgttattttttaatgaagagaaaaattagtatggaaaccatcaactaatctacacgtaacgtatttactaggcagattatttacaatagatgtaaacttgagagaatagtaagcatgaattttaccttttgctaaggagaaggagcatcatagtatttgtatgataatgggaatatctgaagaayaagaaaatatcctcccaaattttttaagtagacagtgctctatgagctggcagaagcc

SEQ ID NO: 429056 - DNA, 445 bp, Homo sapiens
tggggtgctaggattttagaaggaatactgcagcagagtgtctttctcctcacatcatatcaggggtaccgactacctctttaaagacaatatcttcaaatacagtcacattttgaggtgctaggggttaggactttaacatgtgaattttgggggaacaccatcaggtccataacactcctcaaaggagtctcggatagatacacatttttgcaaaacattaacaagaaagggcaatcattagttatgtttktttttttttttttttttttttgagacagggtcttgctttgtcactgaggctgggatgcagcctcaaacttctgggctcaagtgatccttcccctgctagcctcccaagtagctaggactacaggagtacatcaccatgcctggctaattttggtttttgtttttgtgtggagacggggtctcactatgttgc

SEQ ID NO: 429057 - DNA, 528 bp, Homo sapiens
catttaattcagaataatttttaagaaaaaacgtggggttccaagaaatggtgatttacattcaaatgaacatgtacatttgcaaacctggataagtagatattttcatgaagcacgctacaagaaaattcacacagaattatttgtttttcaaaggcctctttcaaagtacagactccaagtccaaagcaaatacccatggcatgaacaaataggatgcctaagattctaacatttgcttcggcatggctttcctcctcacttccctacctcacaacaagaaaaaatttcctagatgggacaatggcaagatattgtgctaatacrtttcataggatttctagatgctgggctataacatccaggttacaatttggtgacggatttttttatttctattgcaaatggactacactccaaacacaaaaagattcttgccatagcatccaaacatccctatgtagacccacacttcctctcaatacagaaagagaatcactcagaaaggacaaagctggcagaccaaga

SEQ ID NO: 429058 - DNA, 453 bp, Homo sapiens
acaacatagagatggagtttgttgggaagataagtttggacacgttgaacttgagagatggttgagacatccaagcagggctgttcaaaaggcagytcatcacaaagatctacactgaaaaaaaaaaaaacttggacctcagcagagaaactagctcagggtccaaattaagtgtagataatctatctaatggtctgttcattagacaaatggagaaaggggactcaactgggcatcggtgtacatggggtagaagaaaccatagaagagactgagattaactaggaagaggggtaaactgagaagcaaagaggctgctgaacacaggcatttaagactggatcgaggaagaggctaaaaagggaactgggatatgaccagaaaggtagaagagaaaccaacagaggtggtatcactgaaatggaagtggtcaagatgttaaatgcagcagag

SEQ ID NO: 429059 - DNA, 456 bp, Homo sapiens
tcactgtcctgattcacatcatatgagctatggaaattaaaagaccactatggtggggtgggaatggggagatgttggtcaagcttacaaagtttcatttagatgagatgaataagttctggggagctctcacgcagcttggtgactagagttagtaataatacactgtatacttgaaaatggccaagagtagattttaaatgatctcaccacacacacacaaagaaaaatgtgaagtgatgatgttcattagcttgatttaagcatttatatacatagagcaaaacatcacattgtatactgcaaatgtaatttgtcaattataccttaatgaaggtcaggggcgggaaatatcactatgarcaaacatatttaggagttgcatcactacaatcaattcaacagactcaaaaagtacttaaaatagaatgtcattcaaaaagttaaacaaagagg

SEQ ID NO: 429060 - DNA, 576 bp, Homo sapiens
agaggacatgaacaaatggaaacataggctgcccctctcgtagtcagggaactgcaattacttaaataaactgtatatctattaattactttttttttttttttttgagatggagtctcactctgtctccaggctggagtgcagtggcgcgatctcggctcgctgcaagctctgcctcctgggttmacaccattctcctgcctcaggctccctagtagctgggactacaggtgcccgccatcacgcccagctaattttttgtattttttagtagagacggggtttcaccatgttagccaggatggtcttgatctcctgacctcatgatctgccctttttaaaagaataatgctcaaactcaatgagtacatacatgatattacacataagttgtcattatttgaaaaaatgaaatagattagaaaatatcctctagcataaacaaacccaggaaatatttaggtcttagatgtaagaaagtaaatattcacctattcaggctctgtgaggtggcagtattgtatcactgtgcctcctgtggtagagaagaggacttctgttttctcgccactgttt

SEQ ID NO: 429061 - DNA, 562 bp, Homo sapiens
accactctagacccaagtcacttctgaccttatgagaatttcttccggacagagaccacatcttagccatctttatatcccagcatctaacctagcacctagcaaatcagtcactcagtagtagagtggataacttttctgattgtacttggaggagagaaaatattaaaggcctggttctcatctgtattcacttccagaaattcacaagctgaaaatattgaccatttgtttcaggtaaggagcttctataaattaaggtaggcacccctgaaagaaatgtttcagtacttaggagcaatggctacagatacctattccccaaagtccaagtgaaaagcatgacttgtctggcagcttggcccttttcccacatccaaaataatcagttgtacaaagtaggcttagtcccaaaactgctcagactttgttccttcastaacatctgggttcagcatgattcctgacctctatctcaaactggagatttcaaacactaaaaacttcactctccaagaaagtaatgtcataaagtcaaggccaggggaaacaaagaagccag

SEQ ID NO: 429062 - DNA, 560 bp, Homo sapiens
aaacagaaattggggataggctttagagaactgctacccatcagagtccggaaagcccaaacagaaggaaaaagcgcccagactttacttaggtttggtccttcaaatcatgcttctgctacagttgctttaaaaattaaacaggctgaacaaataataaaacatatcagaacatctggagatggaattgaccactagtaagtrgatcattacaacctgtcaaggtttgggcaatttgggggatgctatgacttgcaaaatccagggcaggggaaataacactcactgtgcggatcaatgtctaatcacattaacataggaactaaaaatgttttcacaacgcagagaacgagagctgctcttcctaacagaggagaaaaacagcacattcacccattcacctgagtgaaactaacaagctgaagtctctcacctgaatactagattaaaaatcctgattggaaaccatatgtgggcatcactgtctgagaggcagaaggcaagaaatggaattccagggccactgatcttcgcagtccactgtagagggcagctttcac

SEQ ID NO: 429063 - DNA, 601 bp, Homo sapiens
ttgtacttgaactgggcattaagtgcgtcactaaggaggctactcttcatagataaaatttaggaggcataatcacagctgagccaatttggaaaaatcaagaaggcaggtacatggagcacagccaactctgtaagctagacctgcacaaggaagcactcagaggaaagagcttacattcctgccatcctttgaagatgaagaaatgttagacttaaatgcatttggtaagacagagaagaatgaagaatcacgtgttgtaatataaatagcagcaagacaaagrgaaccaggcttaatcagaattatttttaacaagcaaagtatatttatgtgttacctgtgtaattaagcattttttaaaaggcagaaggaagtagtagtcattgagatagaacctagtcaagcatatgtgaatgaaccccattgtggtatactcagtaatatatagattataagccacatgttataactgtatgcaataaaatcttgatctaaagcaagttagaaatgaaggtggtacagtccaattcatgtgtgtggtatttactttcaaaggaggaggcctatgtaaactgatgcagctacccatatctccaat

SEQ ID NO: 429064 - DNA, 601 bp, Homo sapiens
ttgtacttgaactgggcattaagtgcgtcactaaggaggctactcttcatagataaaatttaggaggcataatcacagctgagccaatttggaaaaatcaagaaggcaggtacatggagcacagccaactctgtaagctagacctgcacaaggaagcactcagaggaaagagcttacattcctgccatcctttgaagatgaagaaatgttagacttaaatgcatttggtaagacagagaagaatgaagaatcacgtgttgtaatataaatagcagcaagacaaagagaaccaggcttaatcagaattatttttaacaagcaaagtatatttatgtgttacctgtgtaattaagcattttttaaaaggcagaaggaagtagtagtcattgagatagaacctagtcaagcatatgtgaatgaaccccattgtggtatactcartaatatatagattataagccacatgttataactgtatgcaataaaatcttgatctaaagcaagttagaaatgaaggtggtacagtccaattcatgtgtgtggtatttactttcaaaggaggaggcctatgtaaactgatgcagctacccatatctccaat

SEQ ID NO: 429065 - DNA, 601 bp, Homo sapiens
ttgtacttgaactgggcattaagtgcgtcactaaggaggctactcttcatagataaaatttaggaggcataatcacagctgagccaatttggaaaaatcaagaaggcaggtacatggagcacagccaactctgtaagctagacctgcacaaggaagcactcagaggaaagagcttacattcctgccatcctttgaagatgaagaaatgttagacttaaatgcatttggtaagacagagaagaatgaagaatcacgtgttgtaatataaatagcagcaagacaaagagaaccaggcttaatcagaattatttttaacaagcaaagtatatttatgtgttacctgtgtaattaagcattttttaaaaggcagaaggaagtagtagtcattgagatagaacctagtcaagcatatgtgaatgaaccccattgtggtatactcagtaatatatagattataagccacatgttataactgtatgcaataaaatcttgatckaaagcaagttagaaatgaaggtggtacagtccaattcatgtgtgtggtatttactttcaaaggaggaggcctatgtaaactgatgcagctacccatatctccaat

SEQ ID NO: 429066 - DNA, 591 bp, Homo sapiens
ggatctaaccaaaaatgtaaccaaacacctggtgaaccagacgactcatattgtctcttccaactctgagagtctatgaattgtatgcaatggaatctactcagaaacaggtgtctcctagacccctttcaagggtatcagattccgatgtaccaaagtcacaggcattcttcatataaggtgttctcacctattatgatggacatggcaaaaagggtcacagtgttaagacaaagctactatgtacctacccaagaacaaatcacaggagtgggcagggaatatatgtatatttttaaaaacgtactatatagttcctcattctctatcactaaattatgccctacctaaagtttttttttctaagaaaaaataaagcattataatcwatagccaatgaaactggattccagccatgtaggttgaagcacaagctctaaagtctcctctacatcttgagccagtcattaacctctctagctacagtgctctcatttataaaatgggacaatatcacctgtctaagctgctctcagggaaaatggagagtcccccattcactttgaaaagtgaaaagaggtatgcaaacgt

SEQ ID NO: 429067 - DNA, 469 bp, Homo sapiens
ctatacttaagtcgcttccagtctgggctatttccaytggtagttttacgtttttctggtcacataacatcatgacactatacactccaatgtttatcaactccatgcttcatgttaatataaaagaggtaagtatactatttgttcttttttttaacttcacgaaagactctgtgtacatttgtctgtctctaacgaccctagtcgcagctcttgccagctcctcacactatctggctactgctcttcacctggaaactaactgtttctgctctttctatgaacattgcccaaaacagaaggcattgatgtagacataagtgtctggcactccagcaacagcacacatgcatctatatttccgcacatttgccatctcccattgactatgtgactccctttgtatattacttaaggctcaacaccaccattccctgcagggactgggggcctcctatgaaagtcactt

SEQ ID NO: 429068 - DNA, 602 bp, Homo sapiens
acaaataaatattgtatatatttattgtgcacaacatgatgatttaaaatatggatactttgtggaatggctaaaatcgagcaaagtaacatatgcattacctcacacacttagcatttttgtgtgtgtgggaacacaaaatttactcttaggaattttcaagaatataatacattgttttatactrtagtcactgtgttatacaatagatctcttaagcttattcctcatatataaataaaatttggtatcttttggctaacatctcactcccagtgcctggtaatcactattctactctaattctaagtccaattttgtaagattccacatgtaagtgagatcatgcagtgtttgtctttctgtgtctgacttatttcacttaatgtcctccaggttcattcaagttgtcacaaatgacttgatttccttcatttttaggctcaatagtatcccattgtgtatatataccacatgtttgttatgccattcatctgctgatggacacttaggttgatcctatgtcttggctattgtgaataatgctgcaatgaacgtggtagtgcagatatctcttttgacattctcacttcatttccttt

SEQ ID NO: 429069 - DNA, 352 bp, Homo sapiens
ttttggtttaagattactttggttatttgggaccttttgtacttccatagaaattgtaagatgtttttctatttctgcgaaacatgtcatgggaattttgataaggattgcattgaatctttagattgctttggatcgtacagayattttaacaacattaattcttcctatccataagcacaggatatctttacatttgtttgtgtcttcttcaatatcttccaccaacattttagttttcattgtggtctttcacctattcagttaaatttattttaagaatttttttcttgtaactattatatatgggattgtttcattgattttgtgtgtgtgtttgtggatagttcac

SEQ ID NO: 429070 - DNA, 615 bp, Homo sapiens
tgtagtaatttacattcccatcagcagtgtattaagcaatctctttttaccacatccacatcaatgtctattgttttttaactttttaataatggccattcttccaggagtaaggtagtatctcactatggttttaatttgcatttcactgataattagtaatattgagcattttttcttatgtttattggccatttgtatattttcttttttgataaatgtctattcatgccaattgcccactttttgatgagattatgtttttcctgctgatttgtttgagttccttgtagattgtggatattagttctttgtcaatgcatagtttgcaattcttttcacccattctgtgggttatctgtttactctgataattatttcttttgctgtacaggatctttttagtttaattaggtcccattaatttatttttgtttcttttgcatttgtttttggggtcttaatcatgaattctttgcctaggccaatgtcyagaagagtttttcctaggttttgacttcctgttttccagtttgaatgctctttatttccttattttgcctaattgctctggctaggaattccagtaaaatgttaaccagaagtggtgaaagt

SEQ ID NO: 429071 - DNA, 525 bp, Homo sapiens
taatggcagaatgacaaataactacaaatatctgtctgtggccatttttagaacaacaaatgtggcatttttagaacaacaatttccaatcttggccagtaatcattttgacaaaaaccttcccaagcttccctaacagagattgaactgtgtatgctgggaaaaggcccacacacaggtgatttggaaaagtttccatggtgttgttcatattagctaccayatatatatatatatatatatatatatacagtcacaataagccagctcctgtgccaagacttgccatatatcaacacatctaatcctcacagttatattaggtaggccctattgttatccccattttataagggagaaggctgaggcacaaggaggttaaatggtgtgactatggtcacataaaggcagagccaggatttggactgggggagtctggctttggagtctgtgtcctgcccgttgcacaaactggcttctccactgagcagccggggtaaagaaacgtggttcccagagagactg

SEQ ID NO: 429072 - DNA, 551 bp, Homo sapiens
aacagggacccacaaattaataaacaaaacaggcacctcctcccatactcaacatgtaaaggcagagtaggaatgrgaaagactagggaaataagaagatcagaaaaaaagaaacaagaaactctgaactctgcctctcataaaagggaggacttgaacacactgaactttaatgatgaaatctacagggcaggaaaaacggactcccagccctggagtgaactcatttcttgattagacactgattctgctctccaaacagcaccaccttgctcttcatggctgatgggtttgacccctttatctatcgttcgctgcagcttcactgcgtttgtagctaattttctgctggaattggtttgagcttccaggattggccaattatagttgcttgtaaactaggcttctgatttccttgcctgagtattggaagcaattttggaggtcagtagctctggacctatgggagtaaaccaggtgaacaaagcccttcaattttttattaaccccaaaccagttcccattaccaaaacatatcaccttctgaattt

SEQ ID NO: 429073 - DNA, 525 bp, Homo sapiens
taatggcagaatgacaaataactacaaatatctgtctgtggccatttttagaacaacaaatgtggcatttttagaacaacaatttccaatcttggccagtaatcattttgacaaaaaccttcccaagcttccctaacagagattgaactgtgtatgctgggaaaaggcccacacacaggtgatttggaaaagtttccatggtgttgttcatattagctaccatatatatatatatatatatatatatatacagtcacaataagccagctcctgtgccaagacttgccatatatcaacacatctaatcctcacagttatattaggtaggccctattgttatccccattttataagggagaaggctgaggcacaaggaggttaaatggtgtgactatggtcacataaaggcagagccaggatttggactgggggagtctggctttggagtctgtgtcctgcccgttgcacaaactggcttctmcactgagcagccggggtaaagaaacgtggttcccagagagactg

SEQ ID NO: 429074 - DNA, 525 bp, Homo sapiens
taatggcagaatgacaaataactacaaatatctgtctgtggccatttttagaacaacaaatgtggcatttttagaacaacaatttccaatcttggccagtaatcattttgacaaaaaccttcccaagcttccctaacagagattgaactgtgtatgctgggaaaaggcccacacacaggtgatttggaaaagtttccatggtgttgttcatattagctaccatatatatatatatatatatatatatatacagtcacaataagccagctcctgtgccaagacttgccatatatcaacacatctaatcctcacagttatattaggtaggccctattgttatccccattttataagggagaaggctgaggcacaaggaggttaaatggtgtgactatggtcacataaaggcagagccaggatttggactgggggagtctggctttggagtctgtgtcctgcccgttgcacaaactggcttctccactgagcagccrgggtaaagaaacgtggttcccagagagactg

SEQ ID NO: 429075 - DNA, 561 bp, Homo sapiens
gtgcaatgacttacacctgtaatcccagcgctttgggaagcagaggtgggaggatacttgaggccaggaatttgagatcagcctggrcaacatagtgagaccctgcctctgtagaaataaacaaaaattagctggatatggtggtgcatgcttgtactcctagctacttgggaggttgaggcaggaggatcctttgagtccaggagtttgaggctgcagtgagctataatcacccactgcactatagcatgggcaataaggtgagaacttgtctcaaaaaaaaaaaaagggggggggaaacaaataaataaatataaacaaaacttttgtttcaaaatatgtaatatttagcactaaagaattctgaattgtagagctaaaaagtacttaaaagttaataattattgtctcctttaaaagaattgttatcaaagtataatttttatccagaaaatcatccatatcagcaagctaaactttctcaaaatgacatatccatgtaattagctcccaggtaattagcaggcagcctctactcaggttgagtattcctaatctaaa

SEQ ID NO: 429076 - DNA, 561 bp, Homo sapiens
gtgcaatgacttacacctgtaatcccagcgctttgggaagcagaggtgggaggatacttgaggccaggaatttgagatcagcctgggcaacatagtgagaccctgcctctgtagaaataaacaaaaattagctggatatggtggtgcatgcttgtactcctagctacttgggaggttgaggcaggaggatcctttgagtccaggagtttgaggctgcagtgagctataatcacccactgcactatagcatgggcaataaggtgagaacttgtctcaaaaaaaaaaaargggggggggaaacaaataaataaatataaacaaaacttttgtttcaaaatatgtaatatttagcactaaagaattctgaattgtagagctaaaaagtacttaaaagttaataattattgtctcctttaaaagaattgttatcaaagtataatttttatccagaaaatcatccatatcagcaagctaaactttctcaaaatgacatatccatgtaattagctcccaggtaattagcaggcagcctctactcaggttgagtattcctaatctaaa

SEQ ID NO: 429077 - DNA, 561 bp, Homo sapiens
gtgcaatgacttacacctgtaatcccagcgctttgggaagcagaggtgggaggatacttgaggccaggaatttgagatcagcctgggcaacatagtgagaccctgcctctgtagaaataaacaaaaattagctggatatggtggtgcatgcttgtactcctagctacttgggaggttgaggcaggaggatcctttgagtccaggagtttgaggctgcagtgagctataatcacccactgcactatagcatgggcaataaggtgagaacttgtctcaaaaaaaaaaaaagggggggggaaacaaataaataaatataaacaaaacttttgtttcaaaatatgtaatatttagcactaaagaattctgaattgtagagctaaaaagtacttaaaagttaataaytattgtctcctttaaaagaattgttatcaaagtataatttttatccagaaaatcatccatatcagcaagctaaactttctcaaaatgacatatccatgtaattagctcccaggtaattagcaggcagcctctactcaggttgagtattcctaatctaaa

SEQ ID NO: 429078 - DNA, 614 bp, Homo sapiens
atgtatttagagaagaggtttaattactgaaacaaacagagtaaaataatcatatgatttgtggaggacagtggctcttctatggcaccctggcaactttgcagatctgcacataggccacacaggcaagactcagttgcactctgatccattatggtagaatgccctgtgatcctcccagaatcccctgtatggcagaattccctgtaatatatcatattataattataattatattatatttatatgtgaagaggcagttttgtgaggaattgtcacaaggccacttatcatcagcctccccaactagatggaagttacttctattgtgggaagctgctgtgaggtagtttctcatctatcacttctctggttccagtgaggcataggactttctacatstgccctttgggtagacgcaggctataaaattgcatggctgtagtgtggagttggctcctcaatgacagaacagcccacctcttgtgtcatttgtcatttggcccttccagtttcatgtcttcttttggaactagtcaaacagggatgtaacatcatgttgattttgtttttgctatttgcaaaaaaactgtttttgctattatgcaaaacag

SEQ ID NO: 429079 - DNA, 614 bp, Homo sapiens
atgtatttagagaagaggtttaattactgaaacaaacagagtaaaataatcatatgatttgtggaggacagtggctcttctatggcaccctggcaactttgcagatctgcacataggccacacaggcaagactcagttgcactctgatccattatggtagaatgccctgtgatcctcccagaatcccctgtatggcagaattccctgtaatatatcatattataattataattatattatatttatatgtgaagaggcagttttgtgaggaattgtcacaaggccacttatcatcagcctccccaactagatggaagttacttctattgtgggaagctgctgtgaggtagtttctcatctatcacttctctggttccagtgaggcataggactttctacatgtgccctttgggtagacgcaggctataaaattgcatggctgtagtgtggagttggctcctcaatgacagaacagcccacctcttgtgtcatttgtcatttggcccttccagtttcatgtcttcttttggaactagkcaaacagggatgtaacatcatgttgattttgtttttgctatttgcaaaaaaactgtttttgctattatgcaaaacag

SEQ ID NO: 429080 - DNA, 642 bp, Homo sapiens
tgtctgtcatctatattaatctaaaaattcaatgcaattctgatagaactgtcttcagaagttgaaaaacaaaacatttgtacagttcaattggaatcaaagatgattccaatactttcaaagggcagttcccctactgtggccgaaaatatgttaaaacgaagacacaagatgatggcaattgaaaccagaaaaaaaaataaatgcaacaattatacaacatgtgtctaacctcaataattagataaattaattcaggctattcacattaaaagcaatggggctgataaggtttggctgtgtccccacccaaatctcaccttgaattgtaataatccccatgtgtcaaaggtggggccaggtggagattattgaatcatgggggcagtttcccccatactgttttcatggcagtgaagaagtcccatgagatttgatgtttttgtaagtgggaattcccctgcacaagctctcttttgcctgctgccatgtaagacatgcctttgcttctcgtttgcctcctgccatgactgtgaggcycccccagccatgctgactccatgaattagtaacaccaccaacaaattattagctaaaacacattaactagaactaactagaactctaattttaaaaaccaag

SEQ ID NO: 429081 - DNA, 608 bp, Homo sapiens
tcttttgcctgctgccatgtaagacatgcctttgcttctcgtttgcctcctgccatgactgtgaggcccccccagccatgctgactccatgaattaktaacaccaccaacaaattattagctaaaacacattaactagaactaactagaactctaattttaaaaaccaaggtagttctgaaactctctttgtgaaacactgtgagtccgttaaacattcttcctttataaattacccagtctcaggtatgtctttattaacagcatgagaacagactaatacaggggccttcactaaatcatgtggtgaactgagaccatttttggccacatagtatgttttttgaaacacaaacatacaagcatgtgctatccctcattaggaaaaatcataaacaaaatagacctactttttaatatttaaggtagaaaggagaaaagttttactaagtcaattatataggatcctgaacaattcacaaagaggtaatacaaagggctatccatcagaaatatgaatacattaagaggtagctattaacagaaaatgttgatggctgtgaacagagcctttgtcttatgttctttgaatcctcaacagcagcttat

SEQ ID NO: 429082 - DNA, 598 bp, Homo sapiens
agtgagatgatgtagtgtttgcatttctgtgcctgtttttttttgttgttgttgttgttttgttttgttttttgcttaccctaatgttccttgggttcacccatgttttcacaaacagcatgacttccttattgttaaaggctgaatagtagtgtgtttcttgaacagagaacacatggtgacagaatgggtgtccccagtaggtggctgaatcaaggccttgaaaatactgggtgcttgtataaccttcagtgtaccctggatatctagtgttagctgtatatttagtatatcataagtatcttgtgcccaggtgtcttgtttatttcaggcctcatgaatatagttatctctttgtcctcccatttcttracctatgtatgatatacttattaatttccatgaatacataacacatgactttcatacatccacttcccattcattttcttgctctctatagaggaaataaatattctcaaattatacaaaaaatgcatattacatatggctttcttggagccctttctagagattgtagaacacttcaaaactttaggcatatcaaaatctgtttctagcttccttgaaaagagaa

SEQ ID NO: 429083 - DNA, 608 bp, Homo sapiens
catagtactatggtacccaataggatggagatagtaactttaaacaattgtggttaaaatggcttacttctagaaattttcaaaaatatgggactatatgaacatgtcactagtgccctcttccccaccaggactttggaaatggtccatgcaaatgaaagatctttaacyttgtcaatgagctgaaacttgtgatgttccaaggctgagccatgcttctttgagccctcagtgtcagtacttaatgaatatctggtgaacgaaattgaaacattggcatcttccaaatatctcactccaattcactgcctgagtttccaagcagaactgctttgtctgcaacgtcttggagaggtttttggtaaagccaatcctttagttctgacccaccagccactctcttccatgagattctagagtctgaacctacactcacttttactcttccattaattgcgtctcttttctatttacctaaccattgttaccagatcgctaatactgacatcgtgtgcctgcctccattattcctttgggtaagtttcttagggatttttctcattcccagggactctctagtcactaatgaagaagttcctagtgactcc

SEQ ID NO: 429084 - DNA, 608 bp, Homo sapiens
catagtactatggtacccaataggatggagatagtaactttaaacaattgtggttaaaatggcttacttctagaaattttcaaaaatatgggactatatgaacatgtcactagtgccctcttccccaccaggactttggaaatggtccatgcaaatgaaagatctttaaccttgtcaatgagctgaaacttgtgatgttccaaggctgagccatgcttctttgagccctcagtgtcagtacttaatgaatatctggtgaacgaaattgaaacattggcatcttccaaatatctcactccaattcactgcctgagtttccaagcagaactgctttgtctgcaacgtcttggagaggtttttggtaaagccaatcctttagttctgacccaccagccactctcttccatgagattctagagtctgaacctacactcacttttactcttccattaattgygtctcttttctatttacctaaccattgttaccagatcgctaatactgacatcgtgtgcctgcctccattattcctttgggtaagtttcttagggatttttctcattcccagggactctctagtcactaatgaagaagttcctagtgactcc

SEQ ID NO: 429085 - DNA, 607 bp, Homo sapiens
aattttcaactaaaattaaatttaaactaatttttttaatttaacagaatttaatttgagaaggaatgattcatgaattgggcagtctccygagccagagtaggctcagagccatatggtggaagaagatttatggatagaaacaaggaaaggaaaggaaagaaaatggaagtgacgtacagaaacaagtgaccaaaacttagggccttagtgccactctcagttaatatcatttggggtttctggtcacagcacatcatttataaattgtggtgtcctaatggccacacatttcttcgagctcttatcattccagctggagaccatagaacaatctagaaatggttccatgcaaacgcttaaaacttttgagataatacagcacaacagggagactactattatgactatcaggaggataataccaagagtttagaatatgctccttagccagggtccccataaaccaaagcaattaaaatcaaatagatgaaagaatgagcttgataaagagtctacttgctttaaccaagcagtccctttgctaatcctctacaactgagcctctataatatccagtgtattcctccatgaacagttagaagta

SEQ ID NO: 429086 - DNA, 480 bp, Homo sapiens
caggattgataagatataagatggtgtccctaatgtacttggcactagtaattgttgctaagtattcttggcaaataattaagaaaatggatctgatcattttcctaaatatttgaaatgagtctactcagcatatgctttctgaagtgactttgtcttttacattcaaaatctactccttctgtaaatgtgtacatgtgcatttcagcagaaataygagtatgtgtagatacacagaagagaaagattttgaatatgtgaaatcatttaatatgtttgagtaacacttctgtttattatggagataaaacattaacaacttttttgtgtgtgcaagatcccacttaaaaatgacttaaactgaataaaatattttcaaaatattcccaactatcaatctgtcagcaagagcagacctaggggaatatttgcaaaagcatttgtgccttttgttcccaaacacctagcatggctgcaacc

SEQ ID NO: 429087 - DNA, 497 bp, Homo sapiens
cctggatcagcaggcgaaagaaaattaatatagttgaaagtctagtctatccttacatatgtaaagagccattgtaactggaggcagagaggactatccagtgacttgactgatgcatctgctggtgttttcatgccaggtrataatggtgagtgggtggttatggcatctatgatgtgataaaggaaaagcaagccttgagaaaaaggtctgggttactctgccaggcaagaaaccttaaatcagatgagatgatggccaagggcaagagaaatctagcattggtaatggaagacagagatgatgcctttcaataaagtctggggaccagctgtagcaggggttgtagctagttccagaaaccctcctgcagagattgtggctggccagctccttaaaggggactctgagatagattgaacttaaggaagtgaaaagatagattttggagtagtgcaaaggatctactgcatcaagataacactgtgagcatccac

SEQ ID NO: 429088 - DNA, 544 bp, Homo sapiens
gatctgtatatcaccagagcctaagatgtcctggtatgcatgtctcttgagtgatttacttgctaagtgaatattgatataaggtccctatttttcattaaakgattttccattttcatttctgccattaaatacgaaagtttgtctctgtttcatgactatactgtctacaatgaatgatgttaattttagtactgcttcccaaaacttccactactgttactttactgtggaatttccaaagagagactaagttggtcagtaaaaaagccaacacaagcaagaaatttctttgaagtcttaggaattaatctttaaaatttatgtaaattgtgagtgaaaaaatctataacatacctgaatttgtcttaataaaactaacattttcttctacatatttgagtagaattcatgccccaggaaaatggaccacatttgtccatacaaagacccaatagttctcaatattggttgcacaaaagtcacatttaaaaatctatattaagagttttagttcaagactagcctaggcaacatagtgaga

SEQ ID NO: 429089 - DNA, 544 bp, Homo sapiens
gatctgtatatcaccagagcctaagatgtcctggtatgcatgtctcttgagtgatttacttgctaagtgaatattgatataaggtccctatttttcattaaatgattttccattttcatttctgccattaaatacgaaagtttgtctytgtttcatgactatactgtctacaatgaatgatgttaattttagtactgcttcccaaaacttccactactgttactttactgtggaatttccaaagagagactaagttggtcagtaaaaaagccaacacaagcaagaaatttctttgaagtcttaggaattaatctttaaaatttatgtaaattgtgagtgaaaaaatctataacatacctgaatttgtcttaataaaactaacattttcttctacatatttgagtagaattcatgccccaggaaaatggaccacatttgtccatacaaagacccaatagttctcaatattggttgcacaaaagtcacatttaaaaatctatattaagagttttagttcaagactagcctaggcaacatagtgaga

SEQ ID NO: 429090 - DNA, 544 bp, Homo sapiens
gatctgtatatcaccagagcctaagatgtcctggtatgcatgtctcttgagtgatttacttgctaagtgaatattgatataaggtccctatttttcattaaatgattttccattttcatttctgccattaaatacgaaagtttgtctctgtttcatgactatactgtctacaatgaatgatgttaattttagtactgcttcccaaaacttccactactgttactttactgtggaatttccaaagagagactaagttggtcagtaaaaaagccaacacaagcaagaaatttctttgaagtcttaggaattaatctttaaaatttatgtaaattgtgagtgaaaaaatctataacatacctgaatttgtcttaataaaactaacattttcttctacatatttgagtagaattcatgccccaggaaaatggaccacatttgtccatacaaagayccaatagttctcaatattggttgcacaaaagtcacatttaaaaatctatattaagagttttagttcaagactagcctaggcaacatagtgaga

SEQ ID NO: 429091 - DNA, 617 bp, Homo sapiens
acagataatcatgggaaataaatctgaacaacttggggtgtgggagaaattaccaattctttcatgaagcaataaaattcctcatgaaagaggtgggatttaaggtacttttgtaatgaattaagaaagaaatgttttggcaagagcctctttttctctaatgcattgcaaatctactagaaaaatctagattcttttttctgttcctcattttcttcccttcttctgtctaagtggaatgcagtgacagttatgcaagggcaatcaaatcatgtaggtagttatgaaaatatagtagtgtgtgtgtagtcacaaaattcctatatataattggtatagacaagtcttcctcatatgaatcttgcagaaaaacattgatagttacttagaattgcctggaaatktgacggtccgggaatagtttgaaatttggtggatgccccaccttcacatagtggaaaacgcatgtccaatttatcttctgtctaacttcattcaaaacttctgcatttgttgatcagctggcgtgctgatgcagttgccagaagaacaccactcccctccaagagcacttatttaaccacccacatcctggctggtggcccactggcacactc

SEQ ID NO: 429092 - DNA, 566 bp, Homo sapiens
ctttgttttggccaatttctcccatttagaatggctgtatttacccaatgcctgtactgccattggtatctargaagtaactaacttgcttttgattttacaggctcataggtggaagggacttgccttgtctcagatgagactttggtctgtggggttttgagttaatgctgaaatgaattgagactttgcgggaactgtttgttgcgaaggcatgattggttttgaaatgtgaagatatgagatttgggaggggccaggggcagaataatatggtttggctatgtgtccccacccaaatctcaccctgtagctcccataattctcatgtgttgtgagagggacctggtgggagatgatcaaatcatgggggtgggtctttcctgtgttgttctcatgatagttaatggatctcatgagatctgatggtttcaaaaatgggagtttttctgcacaagctctctctttgcctactgccatccatgtaagatgtgacttgcttctccttgtcttccaccatgattgtgaggccttcccagccatgtggaagtgtaagtccaataaac

SEQ ID NO: 429093 - DNA, 556 bp, Homo sapiens
gcctatgaagagtagaaagctcaacaaggatttcttcccatctgcttcatcaataaaaaaaagaaagaattactatgatgggctggtgaagtctgcgaaatactacatttgtgggttgaatgccaagaagagcaggagaaacagttgaagacagaagagaaaaaaaaagaaagagaaagaaagaaaagaaaaagaaaaggaaagaaaagaaaagaaagcaaagctgagaagctatgtgatggaggtaacaagcagaggttagtttccagcagaagcmagcaatggtgatgaataaagcaacggtgatgaatatgcaacacctgtcaacagagaggagtggcagtgaccaaaaagggaaaaaaagcagcttctctctggctaggaatatgtttatcagccctcaattgaatgcttctaaaaatactggcatatggaaaccccattcttgcacattaaaacaggcagagaccagatatgcattgtctcttgcctgcactcttagcactttgggaggccaagacacatggatcgtttgagtccaggagttcaagagcag

SEQ ID NO: 429094 - DNA, 556 bp, Homo sapiens
gcctatgaagagtagaaagctcaacaaggatttcttcccatctgcttcatcaataaaaaaaagaaagaattactatgatgggctggtgaagtctgcgaaatactacatttgtgggttgaatgccaagaagagcaggagaaacagttgaagacagaagagaaaaaaaaagaaagagaaagaaagaaaagaaaaagaaaaggaaagaaaagaaaagaaagcaaagctgagaagctatgtgatggaggtaacaagcagaggttagtttccagcagaagcaagcaatggtgatgaataaagcaacggtgatgaatatgcaacacctgtcaacagagaggagtggcagtgaccaaaaagggaaaaaaagcagcttctctctggctaggaatatgtttatcagccctcaaytgaatgcttctaaaaatactggcatatggaaaccccattcttgcacattaaaacaggcagagaccagatatgcattgtctcttgcctgcactcttagcactttgggaggccaagacacatggatcgtttgagtccaggagttcaagagcag

SEQ ID NO: 429095 - DNA, 648 bp, Homo sapiens
tttattatcagtggaaattactgactgttctccctaaatttgtactcaaacattctttggacctagagggaggtttaaaggagagtaacaagaggtgaggatgggatggaatctagatataaataattttatttattttttatatcattgatgactaattttatcgctatctttaatattaatctttatcataggtctctgtgctcatataaattattctgaaaattattaaatatacaaaactaatttaggtatattctattaaaaatgtatgccattttcaaaagccagtagttactctaaattttaaaatgtgttttaaaaatcttttttctacagtagtcccttaaatcattttcttgtcatttctaagtaggctctaaaggcgtgtagtgtttttacaaaacaaaaaatttttaaaaagaagaaaaatatttcttagtaggtaaatattggtgttcaaaagtgtagttctagcagttaacaaattcatgaaattgaccgattgttttttgaaaaatgttcatgcttattgaccctgaaccagatacgcgtgyacatttctgattcagcagagcttatcatgaccttgtttataatatttgtttaataacgcttattgtgaacagtttcataaaaaaaatggta

SEQ ID NO: 429096 - DNA, 452 bp, Homo sapiens
acagccatgagtcatcatgcctagccatgagtacataattaaattaaacattctatgtgttgatgaatgttttataataaatctcatttgtttagagaatctaaagctattccaaattgtgagtactctaaaaacagtcatactatgaacagacaaaagaagaaataaaaaggtaagatgcccaaattcataagataagaagtagataaaattataagatagaagtagataaaattayacagagatacaattttttacctatcagacttacaaagatcaactaaattgaggacatagttggctaggctgtttgatatatcagttgccaaaatctataaaaactgcaaatatacatatcccttgtcctaataattcaacttctagtttatcctacagatatacttggacatttgtctggaaaataataacatttacatggaaacatttcctat

SEQ ID NO: 429097 - DNA, 567 bp, Homo sapiens
cagctgaaaattaatttatacacatgtgttttgatgttctacttactctgattctttccaggtttagaatctgacctatctaccttaatagtgtggctcagtaaaaacagatcaatacaacaccctggcgttaggcaaaaattttaataatatgaaatccaagtaagagttttgaatttttttatatgacaatgatgaaaataaccagcctcctgaaagcttttgatttgattccactgtccacatctctaaaatctctttagaaatctgacacctgtattggacaacttagtacagatgattcaagatgaagaatcagtgagtattatgttaaacattttttactaaaatcttctgtttgttgccattcttactgattatttctactggattaatgctgaaatactttcagatagttttatcaacgtgtacattttccattactttttaaaaatggaataaatacactttagtagagttgtagaatgtatttaaaaacttttttttactttattcaactcactgtcaattaaaggaagattgtcrctaatagataaaaagaagtat

SEQ ID NO: 429098 - DNA, 589 bp, Homo sapiens
cagtgccacacaaggaatattcatttcaataaacctttatggaaatcctactgtgtaccaggcagggtcttctgagataccatcttactcactgaaggccagtggagcaggagacacagacagctgaataatcactacccagtgaggcaataattatcaatggggcaagaacaaaagcttggcagtagaggaggaggaaatttgattaattgtgttagataagagaaacgtatggtggcttataaaaaaaggttattttctggaggttatcttctataactgtttaaacgaccaacttcctttagtttgtcccgatattagtattaatgtattttttaatggaataactaagtccaaaacatagggccaataccagattctcatcaagaaaatcatttgtaaaatcatttccttagtgaggtataacaaaactcaataaataaattcccaaaatagaaggctaaattagtcctgacagcaaaatgctcctkgacaagtgcgggcgcttggcagttgtccaacatctgaatagactcgagagagcatcatgttatcagctcagcttcatgctactgaaacagcatgaagg

SEQ ID NO: 429099 - DNA, 576 bp, Homo sapiens
gaggggagagagtgaatgtacttatatagtgctaactagctcttttacttttgctaaacaccggtaggtgtttagcatacataaacaggacactattattaatgtatattctttactatttgtcattctaatacctctattgtctagattaaatatagaaaatacaagttaaataaagctcattacaggtactgtttgttgtttatgataagagactttaaaaatgtccactccttattttcccagaagacagtcaatgctttcagaatcaaagatggagtataatagctatcaaatgattagattacctttcccattagatggccaagccttattaatctacatcaaaccatagctatctatcttctcaatcacmaatgtcacatattctggttctttcttttatacacagcccttttctataaaatagccaaaaagttacagtagaacattcatactttggtaataaacaacttacccctcaacctaaactttcagccactgaaatccctaatgagatgattccacacaaataaatctttctgtcctcttctcttaaaattgtattccactaat

SEQ ID NO: 429100 - DNA, 475 bp, Homo sapiens
aatagctatcaaatgattagattacctttcccattagatggccaagccttattaatctacatcaaaccatagctatctatcttctcaatcacaaatgtcacatattctggttctttcttttatacacagcccttttctataaartagccaaaaagttacagtagaacattcatactttggtaataaacaacttacccctcaacctaaactttcagccactgaaatccctaatgagatgattccacacaaataaatctttctgtcctcttctcttaaaattgtattccactaatcatgaaactctgtggggactttgttgacagaaagattttttaaatcataaaaagaaagaaatgattaaaggaagaatagctttgagtctaaagcatcaatttttttttcaaaagtaaaattatcctccaattatcaccatttgtttgacacattataatttattgtaatgtagcaaggctgt

SEQ ID NO: 429101 - DNA, 485 bp, Homo sapiens
atattaatggaaaggaaaaaaattaataacgcaggttttctttcctggtacttttaggcatgcattcctcttgccctagcattgctgaactcttaaacacaagattacatgccctttccttatcaccttctctgatctctgatgaagtcatgtatggatccatccaagattagtaactatacgtctgttcttttaacagtgaatcaggttttcaatcaacggacctacgctgyatttgaaatgatcagtaaggctgaatgaagctaactatgcaactacaaaaagtaagagttttctcttctttttttaaaaaaagttctctgtattgctgttgactaccataataaagtattgagatggtttaaaaatgaatgaaatgagaaaataaaatctgattttccacatgatctcctttaacctttgaactatcgagatggaagattcagtcttgtcaacataactgccttttaaatggaacattctaa

SEQ ID NO: 429102 - DNA, 485 bp, Homo sapiens
atattaatggaaaggaaaaaaattaataacgcaggttttctttcctggtacttttaggcatgcattcctcttgccctagcattgctgaactcttaaacacaagattacatgccctttccttatcaccttctctgatctctgatgaagtcatgtatggatccatccaagattagtaactatacgtctgttcttttaacagtgaatcaggttttcaatcaacggacctacgctgtatttgaaatgatcagtaaggctgaatgaagctaactatgcaactacaaaaagtaagagttttctcttctttttttaaaaaaagttctctgtattgctgttgactaccataataaagtattgagatggkttaaaaatgaatgaaatgagaaaataaaatctgattttccacatgatctcctttaacctttgaactatcgagatggaagattcagtcttgtcaacataactgccttttaaatggaacattctaa

SEQ ID NO: 429103 - DNA, 573 bp, Homo sapiens
attttccacatgatctcctttaacctttgaactatcgagatggaagattcagtcttgtcaacataactgccttttaaatggaacattctaataagagactatgtttttagaaatagtctaaatttccttcagcctccagatattaacttcagatatttataagttaaaaattgcaaaatatcataagagacttacaatgaaaaacatcaatggggttgtttgaagaaatttgggtccagtagattttaaaacaaaaatcgctctcaatcagattcccacccccgctctaaattaaattcccagcaaaagacagggaggtttttttttttaattagttttttgttgttttgtttrttttatttggtacttattttaacatgagcttagatgaattcgtctataaaggattctttcactgagcatagtttcattgaataaacatgttaactgacttcaaccaaatatttaactttatttggctatggattctacttttactaaaatctttttgcaaacaggcaatacaaaataatttttaattaattcatagataatggataaaaattgtatgtg

SEQ ID NO: 429104 - DNA, 520 bp, Homo sapiens
tgtctgtttactctgctgattgtttcttttgctatgcagaagctttttagtttaattaagtcccatctatttatctttgtttttgttgcacttgcttttgggttcttggtcatgaagtctttgcctaagccaacgtctagaagggttttccaatgttattttctagaatctttatgatttcaggtcttagattaagtctttgatctattttgagttgatttttgtatagggtgagagatgaggatccagtttcattcttctacatgtggcttaccagttatcccagcaccatttgtttactagggtgtcctttcccactttatgtttttgtttgctttgttgaaaatcagttggctgtaagtgtttggctttatctrtgggttctcttttctgttccataggtgtatgtgcctatttttacaccagtaccatgctgttttggtgaccatggccttatagtatagcttgaaatcaggtaatgtgatgcctccagatttgttctttttgctaagtcttgctt

SEQ ID NO: 429105 - DNA, 578 bp, Homo sapiens
tcgtgtcatctatgatttctttcagcagtgttttgtagttttccttgtagaggtctttcacatccttagttaggtatattcctaagtatcttatttttttgcagctattttgaaaggagttgagtcttgatttgattcttggtttggttgctgttggtgtgtagcagggctcctgatttatgtacattaattttgtatcttgaaactgcagaattcatttaccagttccaggagcttttaggatgagtmtttagggttttctaggtatacagtcatatcatgaacaaacagggacactttgacttcctctttgctgatttggatgccttttatttatttctctaatctgattgctctggctaggacttccagtactatgttgaatagaagtgatgaaagtgggcatcctcatcttgttccagttctcaggggaaatgctttcaactttttcctgttcagtacaatgttgcctgtgggtttgtcatagatggcttttattaccttaaggtatgtctcctctatgccaactttgctgagggctttaatcataaagagatgctggattttgttgaatgctt

SEQ ID NO: 429106 - DNA, 578 bp, Homo sapiens
tcgtgtcatctatgatttctttcagcagtgttttgtagttttccttgtagaggtctttcacatccttagttaggtatattcctaagtatcttatttttttgcagctattttgaaaggagttgagtcttgatttgattcttggtttggttgctgttggtgtgtagcagggctcctgatttatgtacattaattttgtatcttgaaactgcagaattcatttaccagttccaggagcttttaggatgagtctttagggttttctaggtatacagtcatatcatgaacaaacagggacactttgacttcctctttgctgatttggatgccttttatttatttctctaatctgattgctctggctaggacttccagtactatgttgaatagaagtgatgaaagtgggcakcctcatcttgttccagttctcaggggaaatgctttcaactttttcctgttcagtacaatgttgcctgtgggtttgtcatagatggcttttattaccttaaggtatgtctcctctatgccaactttgctgagggctttaatcataaagagatgctggattttgttgaatgctt

SEQ ID NO: 429107 - DNA, 347 bp, Homo sapiens
ccttttcaaagaaccgactttttgtttcctttgcttttttatttttttgtttgtttgtttcaatttcatttagttctgatctgatcatcattatttcttttcttctgctaggtttgggcttggattgtttttgtttctccagtaccatgaggtgtgaccttagactgtttatttgtgctctttcagactttttgatgtagrcatttaatgctatgaactttcctgttagcactgcttttgatgtatcgcaagggttttgataggttgtgtctctattatcattcagttcaaagaatttttaaatttccatcttgatttcattattcacccaatgatcattcgggaac

SEQ ID NO: 429108 - DNA, 347 bp, Homo sapiens
ccttttcaaagaaccgactttttgtttcctttgcttttttatttttttgtttgtttgtttcaatttcatttagttctgatctgatcatcattatttcttttcttctgctaggtttgggcttggattgtttttgtttctccagtaccatgaggtgtgaccttagactgtttatttgtgctctttcagactttttgatgtaggcatttaatgctatgaactttcctgttagcactgcttttgatgtatygcaagggttttgataggttgtgtctctattatcattcagttcaaagaatttttaaatttccatcttgatttcattattcacccaatgatcattcgggaac

SEQ ID NO: 429109 - DNA, 516 bp, Homo sapiens
ttttgatgtatcgcaagggttttgataggttgtgtctctattatcattcagttcaaagaatttttaaatttccatcttgatttcattattcacccaatgatcattcgggaacaggttatttaattttcatatatttgcatgctttgaggattctttttggagctgatttccaattttattccactgtggtctgagaaaatacttgatataatttcaatttccttatatttactgagacttatattttgtggcctatcatttggtctatcttraagaatgttctatgtagtgatgcgtagaatgtatattctgaagctgttgggtagaattttctgtaaatatctgagaagtccatttgttcattgtttctttgttgactttctgtctcgatgacctgcctagtgctgtcagtggagtattgaagtccccccactgtttttgtgttgccatgtatctcatttcttaggtctagtagtaattgttttataaatttgggagcatcagtgttgggtgcta

SEQ ID NO: 429110 - DNA, 541 bp, Homo sapiens
cagctctttttttcttagcaaaatttataaaggaacaagaacaaagtgctctggcacctctgaaagaataaaacatccacaatttacaaaataagtgcttcaagtgacctatgacccaactgacagcctctttaaaagatgatatarcttgctaagatagacagaaacgttacgacctgttccgaatgatacaggtctctctagcaggaggagatgacatttttgacacagcaacaacaaaggcattgccctgagaaaggacgagttagtttctctggaacatatctaaattcaagtgaaataattgattcacatcagaacttttattttacattcagaaatgctgatatttcatgagacaaaaatgaaaaaaggtaaaggcaggaatatatggtggaggtattgctggggacactgaacttgagggcggtttctctaaagattttcttgagaatatttaaaaatgttttcactgatgctgattcagttaatatgagtaacaggtaaatccattctacatattccaatttggtagaatgtt

SEQ ID NO: 429111 - DNA, 630 bp, Homo sapiens
atatctaaattcaagtgaaataattgattcacatcagaacttttattttacattcagaaatgctgatatttcatgagacaaaaatgaaaaaaggtaaaggcaggaatatatggtggaggtattgctggggacactgaacttgagggcggtttctctaaagattttcttgagaatatttaaaaatgttttcactgatgctgattcagttaatatgagtaacaggtaaatccattctacatattccaatttggtagaatgttcatattcaatgaataaaagaattgccatttgaagaagtattagcaggaggaagtggagaggaaggaagagaaggggaagaaagaaagaaaaacgaagaggaataggaggtgacaaaggagaataccakgattacaatcaagattagggcctgaattccctttgtaaatattaaaagtagaagatgagctcttactctattttgaggatcaatctaggcaaattaattgaaatgataatataaaataaaattaatgaatcttccacttttatattgttggtttagatcttttcttgtgaaacaatagtagaaaagaaattacgataattatatttgctcatattgtttaaagaagactaattgcaaatggc

SEQ ID NO: 429112 - DNA, 630 bp, Homo sapiens
atatctaaattcaagtgaaataattgattcacatcagaacttttattttacattcagaaatgctgatatttcatgagacaaaaatgaaaaaaggtaaaggcaggaatatatggtggaggtattgctggggacactgaacttgagggcggtttctctaaagattttcttgagaatatttaaaaatgttttcactgatgctgattcagttaatatgagtaacaggtaaatccattctacatattccaatttggtagaatgttcatattcaatgaataaaagaattgccatttgaagaagtattagcaggaggaagtggagaggaaggaagagaaggggaagaaagaaagaaaaacgaagaggaataggaggtgacaaaggagaataccaggattacaatcaagattagggcctgaattccctttgtaaatattaaaagtagaagatgagctcttactctattttgaggatcaatctaggcaaattaattgaaatgataatataaaataaaattaatgratcttccacttttatattgttggtttagatcttttcttgtgaaacaatagtagaaaagaaattacgataattatatttgctcatattgtttaaagaagactaattgcaaatggc

SEQ ID NO: 429113 - DNA, 426 bp, Homo sapiens
ttccatagttttcttgagatcactccatatcaatattwataggttcacattcttactgtttattgttttctataattcattgtatagatgtactaaaatttacataaccactctcctaaagtcacaatttttttctggcttcaatgatgcaaagagcatttttttatacatatctttgggagcatattatttaggtgttaacattcacagaaaagataaagcaaacatgtagatttttttgaaaacatgactaagtatattttctgttttcaccttatgagaaaatgtaggtattttaaagtgaattatttatatattttgaactctcattatgtcaaaaatattattattaaaagtcaataagttatctgtgttttaaaattagtatacatactacatttaaaatttaaataatttcatgtaata

SEQ ID NO: 429114 - DNA, 426 bp, Homo sapiens
ttccatagttttcttgagatcactccatatcaatattaataggttcacattcttactgtttattgttttctataattcattgtatagatgtactaaaatttacataaccactctcctaaagtcacaatttttttctggcttcaatgatgcaaagagcatttttttatacatatctttgggagcatattatttaggtgttaacattcacagaaaagataaascaaacatgtagatttttttgaaaacatgactaagtatattttctgttttcaccttatgagaaaatgtaggtattttaaagtgaattatttatatattttgaactctcattatgtcaaaaatattattattaaaagtcaataagttatctgtgttttaaaattagtatacatactacatttaaaatttaaataatttcatgtaata

SEQ ID NO: 429115 - DNA, 563 bp, Homo sapiens
catctccagtcatctggcagtttcccattccctatgatacttcaaagagtaaagataatacttttacaatyacaaataaaagtactttgagggcaggatctttatctgttttactccctgctgtatgagcaaacatttacaacagtgctggcacttggtaggcactcaataaatatttactgaatcaatatgtgaattgttacactaaactgggatttaatttgtttctgcctaaagatatgaatttaaaatatttaagtgctgtcttatcttcatgcataacatttttttctctcctagcctgaatttaaattcatgcttaacctgttttactattttagtttgaagattctcttttatagaaaagacatgacacagatgttattacaacatgaaatcatgtgaggaagcttttaggaagacaactcttcctaaaagagtttgccttctcaggtattcttctaagcaaagctttctcagccccatatctacacatgactggttactctgagcagacttttatctctgcttagttcagtagtagggatcaagccagggccatt

SEQ ID NO: 429116 - DNA, 493 bp, Homo sapiens
ctttaaatatttgttcttttaattttgctgtatccaaaaacaagtttgtagtgtgtccttctagatgcttttttatyctttcccacattttgagcatttgattgtttccacaaatccttgtttagctcctagaacaggccatatcattcgaggttgaggggccactataccgccatggttccagttaataggaacttttgccgtacttcttatcatttctaccatctgactgttttgttcagatcatctgaacatagtgtggccatggcacgcagagaggtgcaatttaagctaaacatccccttaggggaccaattaataatgttcccataggaatagttgtgcagcacctctgcctgttctgcaatgcaatcttcctaaaaaagtacgttcattttttctaactgggtccaatcctgtttacaaataggtttttgagggcggtatgcctcaattataggagcagatttattatggtaaatactgagatcag

SEQ ID NO: 429117 - DNA, 571 bp, Homo sapiens
tcgacaagctgattcaaaaattcatatggaaatgcaaatgaccttgaatatccaaaacacattttaaagaacgaacaaagtaggagtactaacactatctaagacagttatcaagacaatgtattgtctcarcatagagatagacaaatagatcaatacaactgaatgaatattcaagatactgactcatgtagatggacaattgagctttgacaaaggttcaaagaaactgagtggagaagatggtcttttcaaaaaatggtattgaagtaactatatatctatattaaacaattgagacataacttctaccatataaaaagttaactcacaatgtattaccaacctaaatgtaaagcccaaactataaaacatctagaagaacacataagataaaatctttgtgaccttgaattaagcaacaatttcttagctataacatcagaaataataatacataaaagaaaagcttataaattgaacttcatcaaaatttaaaactgctcttcaaaagacactgttaagagaatgataagactggggaaaatatttgcaaaatatacagctgata

SEQ ID NO: 429118 - DNA, 564 bp, Homo sapiens
taaattttttcttaaaaataaggttctcagtataataaagtgtctctttttattagaagctaattttatgttaattggaataagatatcatcaaccttttggtaaggcattgaatagctttgatgggtggtagaattcagttatgaggtactgtggagtgacggttttggccagaacatcaaagagagagtggcagactgtacttttcaaagatgctcatgactctatctcctaagttaactacccttstgcaatgacaccttagcattctcacataaaaaaaaaaaggtgtctatttctccagttcactgtctaccagaatgatggactctatgacttatttgactgatagaatgcagcagataatgctgagccagttctgaacatggacctcggagcttctgcttctttccttttggaagctatgtgccatgtaataagtggtactacctgagaacaccacgctgtaaacagcccaagacatgcggcaaggccttggaggatgagaaaccacaagggaaaggatgaggaaaattgagacaccagacatatgagtgaagagct

SEQ ID NO: 429119 - DNA, 555 bp, Homo sapiens
aaatttttatggagtgacttcctttttcttttgtttgtttggctctctacttttgtttccttgtaaatttaataatcaacattccacttaaaatttccctgcatattttccactccttaataacacttgttggacttgttttcatatcattgtttagaaaaaaattatggcagatttagtattaaaagatatttgtatgctgcattttyataattcatccctaacttatcaccaaactaatttttcaaaagataaatattttgaaaactgatttaatccaatacttatggaattttcactccgtaccaggcactgtatactgtgatacgtgcagttagcatgataactgaagcttcctgaatttgtggtgcttatattctgagggagccagacagggaacaaacaaaccaactgcctgcccgggatactccttgtcaaactttcacaagtctttgtccctcactttgctctggtctttgctccaatgtcacctttcagaggtcttccgtggatactccatctcaaatagctctttctctttatattgctggatgt

SEQ ID NO: 429120 - DNA, 555 bp, Homo sapiens
aaatttttatggagtgacttcctttttcttttgtttgtttggctctctacttttgtttccttgtaaatttaataatcaacattccacttaaaatttccctgcatattttccactccttaataacacttgttggacttgttttcatatcattgtttagaaaaaaattatggcagatttagtattaaaagatatttgtatgctgcattttcataattcatccctaacttatcaccaaactaatttttcaaaagataaatattttgaaaactgatttaatccaatacttatggaattttcactccgtaccaggcactgtatactgtgatacstgcagttagcatgataactgaagcttcctgaatttgtggtgcttatattctgagggagccagacagggaacaaacaaaccaactgcctgcccgggatactccttgtcaaactttcacaagtctttgtccctcactttgctctggtctttgctccaatgtcacctttcagaggtcttccgtggatactccatctcaaatagctctttctctttatattgctggatgt

SEQ ID NO: 429121 - DNA, 555 bp, Homo sapiens
aaatttttatggagtgacttcctttttcttttgtttgtttggctctctacttttgtttccttgtaaatttaataatcaacattccacttaaaatttccctgcatattttccactccttaataacacttgttggacttgttttcatatcattgtttagaaaaaaattatggcagatttagtattaaaagatatttgtatgctgcattttcataattcatccctaacttatcaccaaactaatttttcaaaagataaatattttgaaaactgatttaatccaatacttatggaattttcactccgtaccaggcactgtatactgtgatacgtgcagttagcatgataactgaagcttcctgaatttgtggtgcttatattctgagggagccagacaggsaacaaacaaaccaactgcctgcccgggatactccttgtcaaactttcacaagtctttgtccctcactttgctctggtctttgctccaatgtcacctttcagaggtcttccgtggatactccatctcaaatagctctttctctttatattgctggatgt

SEQ ID NO: 429122 - DNA, 425 bp, Homo sapiens
aagtaagcactaataccaaagaaaaataaaccagccaaggaatgttcttcttacccaccaatattcttaggacccagtccaacgtattggctgacattttggctcacagataagaaggttatttaatggtgtgaatcgaagagtagattcycattcaaaaggataacattattaataattttattgcatgccatacatctcaatcattgcaggggacaaaaagacacagatatttcattagatgttaggaaggaatttattaaattaattgccatgtacattttacatttagtaaaatgtcgaatagcaagtaaatcttttcaaaagagtaaaatataactctcaaggacaaaacctaacatcagtactcactatctccaatttgtctcttcccattcttttttgaacctactccaataaatatt

SEQ ID NO: 429123 - DNA, 425 bp, Homo sapiens
aagtaagcactaataccaaagaaaaataaaccagccaaggaatgttcttcttacccaccaatattcttaggacccagtccaacgtattggctgacattttggctcacagataagaaggttatttaatggtgtgaatcgaagagtagattcccattcaaaaggataacattattaataattttattgcatgccatacatctcaatcattgcaggggacaaaaagacacagatrtttcattagatgttaggaaggaatttattaaattaattgccatgtacattttacatttagtaaaatgtcgaatagcaagtaaatcttttcaaaagagtaaaatataactctcaaggacaaaacctaacatcagtactcactatctccaatttgtctcttcccattcttttttgaacctactccaataaatatt

SEQ ID NO: 429124 - DNA, 463 bp, Homo sapiens
ttttcattatttgtgataccattgtttataataaggaatttcactaactgcctagaattagacaatttaatgtcaaaggccagatgcaaaaaactgtgatactgaaccataagaatcagagcccaaaccggtactcaggagcaagactagagtactggaatgcctaatcaagcagaagaacataaagactatggtcacatraacaaggctttcttaactgtctgacttcctaggagggtagcatagtttaccaccccaccctgctggcttggccaacacagcttgttaagaccagatcagcggaagtgtcacacctgcctcatgagattaggaaaacaaaaacaaaaaaacactcttgccttgatgagaaagtgtttttgttccccatataaggaagacatggcctgaattcacgcattgatagttggtacagattaatataaaagtggggaaaagggacgca

SEQ ID NO: 429125 - DNA, 668 bp, Homo sapiens
gtgtgattttcagataataagagggtaaagaagggatatgaagtatatactgcaaatgggcaataaatattctccttctatttaatgcatacgctcagattatttttaagaaagaaagcttcactaattcatatccagatagttaactccaatagagtattcagtctgaaaaatgtttatgggtctattctaaaaatattttggattttgttagttgtcatcccaaatcatataaaaagtaagactgcatgtggtgacacctagtatttggttaacaataaaataaaatcaatatgcattcatgttcctaaatatctggataacagatctcattggccaataaagagtggccagtacaagttttaaaacttttcttcaagatatttaaaagttacatacccagccatggtctggtgttagtttcattacaatatattaaatatggattctggaaatgatctaccttggtttgaatcctggatgccagtttattctttgtgtaatctgggcaaatcatttaccttctctaattctattaccacatttagaaattgagttcacartaatcttcaccttatttagttttagagtacataattgaaataattcacataccagatttagcatattcctggcaaaatgttgtgattctgtttatgtttatcaat

SEQ ID NO: 429126 - DNA, 492 bp, Homo sapiens
tttcagccctcaagaccctcccactctcccacgttttgtagtctccaatgtctattattccattctgtacgtccatgtgtacccattgtttagctcccctgtatacgtgagaacactcagcattgaactttcagtttctgagttatttcacttaaaataatggcctccagtttmatccatgttgctgcaaaagacatgattttattcttttctatggctgagtagtatttcatggtatatatacaccatattttctttatccagccctctgttgatggacacagattaattctataactttgctattgtgactagtgctgtgatgaacaggtaagtgtagttacctgttctttgtggaatctccataccgtttcctataaaggttgtactaatttacattcctaccaacagtgtgcagcgttccctttactcgatattctggccaatatgggatatttttagactttttaataatagccattctgacttgtt

SEQ ID NO: 429127 - DNA, 492 bp, Homo sapiens
tttcagccctcaagaccctcccactctcccacgttttgtagtctccaatgtctattattccattctgtacgtccatgtgtacccattgtttagctcccctgtatacgtgagaacactcagcattgaactttcagtttctgagttatttcacttaaaataatggcctccagtttcatccatgttgctgcaaaagacatgattttattcttttctatggctgagtagtatttcatggtatatatacaccatattttctttatccagccctctgttgatggacacagattaattctataactttgctattstgactagtgctgtgatgaacaggtaagtgtagttacctgttctttgtggaatctccataccgtttcctataaaggttgtactaatttacattcctaccaacagtgtgcagcgttccctttactcgatattctggccaatatgggatatttttagactttttaataatagccattctgacttgtt

SEQ ID NO: 429128 - DNA, 573 bp, Homo sapiens
aaatgaatgaatgagtgaaaaatggctgaggaagaagtgttgaagattgttgacatcataagaggttagtccacagaaaagtgaattcagttcacaatagaccacatggtctaggtctcaaagtacatcaggcagtgatggaaccaatacacttacagtatacaatgattggcatatacacatatggctatgagcatcttgccctttctacttattctctattattggagttcctcagtgatatttgatagaggcatcttcctgctrtgatctgttttagtttgtatgtatatactgcagtaaatagtcactcttctcacctttattactggtgataaaggagaagtagaggaagatgggaacaaacataaacagaagaagtaactggcacaattttgtagtttataaattatttaggtgatgatattgtttataacgctgatctattcagtttattgcctttatataaataggaagtagggttgtatcattacaatagcagctctactcttacaactctcaaaagaatttttcaacattatctattagtaacttaagctaaaattatgaaca

SEQ ID NO: 429129 - DNA, 304 bp, Homo sapiens
aagtaaaatgcaaaggatcttaagaaaaatcctaagagacagagccttttaaaatcattaatgcttccyaaatacatgctgcctattggcaatgatgtggatgtagggtagatattgttatagaagtctcaagacttgaatagggatagttccaatggccatacagttgttgtgaagtggttcctatccgaagtaagcttacaaaatgtgtactctatttttaaaccatggaaagagagtaattttaagctaagaaactggggaagaggggattttaaaatatctgactaaatatataagcaga

SEQ ID NO: 429130 - DNA, 583 bp, Homo sapiens
aataggtttttatcaaagggattttaacaaaggcacagtattttctcttggagggaaaattgaagaaaaaaaagacattggaaacaaaacaaaggaatcaaaaatctattatwgtgagtgttctgtgaaacactatagtacttcatcacaagttaacttttagttagagctgccatttgctaagcattaaatcattgctgaagagttttacaagcaatgtgaatgttgaatatttggatttttttgcccaaggcaaacactttacatccctggctaacctatcccagattaaaacagttaaaaaagaaaacataaggcccatccctctttttcaaaaaggaaaaccacattctttcattactgtagagtgatcctctcagaattagggaaagagggccaagaaaatgcaaaaacaggtaacttcagatgacactttcagaatttttctttcttcaggtccctgcaattatagttaccattccaaatactaaaagagcatcaatcatacccataaatagcagtacccttcagtctaaatctggagtcatcatttatgttaaaacattccatatatttaaaaaaa

SEQ ID NO: 429131 - DNA, 583 bp, Homo sapiens
aataggtttttatcaaagggattttaacaaaggcacagtattttctcttggagggaaaattgaagaaaaaaaagacattggaaacaaaacaaaggaatcaaaaatctattattgtgagtgttctgtgaaacactatagtacttcatcacaagttaacttttagttagagctgccatttgctaagcattaaatcattgctgaagagttttacaagcaatgtgaatgttgaatatttggatttttttgcccaaggcaaacactttacatccctggctaacctatcccagattaaaacagttaaaaaagaaaacataaggcccatccctctttttcaaaaaggaaaaccacattctttcattactgtagagtgatcctctcagaattagrgaaagagggccaagaaaatgcaaaaacaggtaacttcagatgacactttcagaatttttctttcttcaggtccctgcaattatagttaccattccaaatactaaaagagcatcaatcatacccataaatagcagtacccttcagtctaaatctggagtcatcatttatgttaaaacattccatatatttaaaaaaa

SEQ ID NO: 429132 - DNA, 547 bp, Homo sapiens
atggtattttgttacagtagcccaaacaaactatacaaatgttgagttcaatgtgcgatacacaacacagatgaggttctagaattaaattgttagtgtcaggcataagtaagcagtgcacagtgggaatgtaagtcaagagcttctcaatatgagtgggggaaaaaagtgtacctaaaataagtmgtgtcatcattacaaatttgtaaatattgcaagatatcattaatatctcaaatactccaagaggaaacatgcttaggtagaatattctttatagagggtcacaataatagcacaaaaatctgctcaggataattctttcagtaaaataaattgataggcaattagcacagacgactggcatccttgtgaggctataacaaggaagagttatagctgtcctacttcattcaaacacttctgagcctttgcttcatctttaggaacatatgtgctgttttctagaaataggattgcattgtggaaaattactgtcaagaccgggaatggcttgctttgaagccagggctatcatcattttgca

SEQ ID NO: 429133 - DNA, 609 bp, Homo sapiens
cacatttaagtggtgaatcttattctgtatttcctatggcaaggaagagtttaaaagtgaaactaatttaaaagtaagtattctgtaatttttcacaattaattatctagattcagtcatgtgtggtggctcatgcctgttatcccagctgctcaggagactgagatgggaggatcccctgagcycaggagttcaactctgcagccagctatggtggcatcactgtcctccagtctgggcaacagactgagaccctgactcttaaaaaacttacttagattcataatgtgacttgttggaagatacacaccatttctatgccagaaaagaaatccataagacccaatgttgattattcatagaacttcatggttttgaagacatgatgtggaataatcaaatggcttcccgctatggatatattgagttaagataaataaattatctttctctgaagttacacattttggatcatgtaaatctgcagttgccagtcaccatcactctgattgcatttcatactaccacagaggactatgagggcaactcacagccggaaggaatgctgagaggtggaaggcagagtttgatgtcctgtgccagccttaa

SEQ ID NO: 429134 - DNA, 614 bp, Homo sapiens
atatgttcagcaatatgactgatgaagtacatttggataggtccttaaaatggaataataagcagattaagtgacaaaaatagcaaggcattaagcagtgctcatgctgcatttcatgtgtctgtatgtagcatgctaccacctgcatataagaatgtttctatctgtgcatgcatttgcttgatatgcacasaatatctctggaaatatgtagtagtttgttcatggaaagggtctggatggatggcagacaagcatatgctttttctaccttttcaatttcatcaactttttaatttaagatgtacattaagtcaaattacaaaactgaaaattttcagtagcataatcatatttttgtaaatattttacctaataaaggtttacctaataaaggttttcatatttgtagctcatttaacataagaattcttaatatagagataacatataaagtaattttttaattaatttcagttaagttctagtaaggggtctctgggaccattacttcctccggaacttaggaccttccaggcaaatgacattttctaatgaaatttttatatgtggttttcaagtcattcccctaataattaaaacctgtgtgcctc

SEQ ID NO: 429135 - DNA, 614 bp, Homo sapiens
atatgttcagcaatatgactgatgaagtacatttggataggtccttaaaatggaataataagcagattaagtgacaaaaatagcaaggcattaagcagtgctcatgctgcatttcatgtgtctgtatgtagcatgctaccacctgcatataagaatgtttctatctgtgcatgcatttgcttgatatgcacacaatatctctggaaatatgtagtagtttgttcatggaaagggtctggatggatggcagacaagcatatgctttttctaccttttcaatttcatcaactttttaatttaagatgtacattaagtcaaattacaaaactgaaaattttcagtagcataatcatatttttgtaaatattttacctaataaaggtttacctaataaaggttttcrtatttgtagctcatttaacataagaattcttaatatagagataacatataaagtaattttttaattaatttcagttaagttctagtaaggggtctctgggaccattacttcctccggaacttaggaccttccaggcaaatgacattttctaatgaaatttttatatgtggttttcaagtcattcccctaataattaaaacctgtgtgcctc

SEQ ID NO: 429136 - DNA, 576 bp, Homo sapiens
acagcagcctttcattcaatgtgtgggcatttgtgtattttagcaattaggaacttgtaatatttaataatatgaaaaataatttaaagtgatattaacttggattataagctatatatgaggttttttttttgttgttgttgttgttttttttwaagaccatcttttttgtgtgagtataagcaagagaaagcagttatcttcaacgaggagaaggcacactgctccatggctcatttctgtccacaccagcagtcctagtagttagcctaccacaggccacataagccttctcagtcttcttttatagccaagtcagccacaaatagggcaggagcaagagtcaaaaatacaccttgggaagtgaatacatatggcatatttcatcatttggaatatattcatttataactttgaaaattcctttatgtagctgtgtaactaatcagtgagaattattttacatactttaactaggttccaagtattacaatgccgaccattggtacgaattttcagatgacatatatcaatgtctgaaaatttgtaattaataggaaaactccaaaggaagtc

SEQ ID NO: 429137 - DNA, 593 bp, Homo sapiens
caagttgtaatctttttgcctgtggaaaatcttgcctcaagattgatggctgctaactcattaaggtggtgttgctaaaggttgaagtggctgtggcaatttcttaaagtaagactacaatgcagtttgccatatcaatggactcttccgcttatgagagatttctctgtagtaagtgatgctgttgaatarcattttacctgcagtagaacttccttcaaaattgaagtcaatcctctcaaatcctgccactgctttatcaactaagtttatgtaagcaatattctaaatattttgttttcatttcagcaatgtgcacagtatcttcttcactagaagtagattcatctcaacaaaccacttgctttgttcagtcacatacagcaacatctcgcccattcatgttttatcatgagattgtagcaattcagtcaaatcgttgggctccacttctaattctaccttacctgctatttccactgctattacctgcagttatttcctccagtaacatcttgaactactcaaagtcaatcatgagagatgaaatcaactttgttcaaattcctgttaatgttgaaaatttgacctcc

SEQ ID NO: 429138 - DNA, 442 bp, Homo sapiens
tatttttcttggaactattggaggcaaatttatatgctgaaaggtgctagagttgttatataataaactgattatataatagaacattaattatataaaacataattagcaagagtcaaggaagtcacaaccccatggcataagtaatttatcaaatgaaagagcaacctctggtaatatgtaccttccaactgaagaaggattagagggagacctcttgaactcagaagtatttcaaatttcccactatctgacaattagttttaattttgtagtgcagggagtttgagataaygaagacagaaattgaaaactacttttggtcaataaagtattgaaaaacggtatataaatgatgtgagttactttctcttttgggggatacttcacatttgaattctcagtaattaaatatatatatatatatagggaggggggaggg

SEQ ID NO: 429139 - DNA, 511 bp, Homo sapiens
aaatggatgggtcaatagataacagatgataagatgatataaacccaaatatagaagtaattaaattaaatacaaaaagattaaataaacctagtaaaagtctaagatcctcagacttcatgaaaaacaactaccaccaccatgtgtagcttaaaaaaggcatactttaaatataaggacatcaaaatgttgaaaatgaaaggatggaaaaagaaagctggtgtagatacactaatttcaaataaagcattaaggcaaaaaggactactagaagtgaaaaggagcatttcatwatgccaaagggaccagtccaccttaaatatatcataatcctaagtctatttcatccttaataacatagtttgaaaataaataaagccataaactaaacaaagaaaacacagaactcagaagaggtatgaacatattcacagttacagcaggagactttaagacatccctcttaaatcttgcttaatcaagcagacaaaatctcgtgaagtgtatagaa

SEQ ID NO: 429140 - DNA, 585 bp, Homo sapiens
tcataaacacaaagaagccagactcaagtaagtacatactgaatgatttattttatatagaggtaaaaaatagacaaaactaattgatgatgttagaagtcaggctagtgattatcatgagagtggttaataattggaagagtgtgtaagggctatgagttgctggtaacagtttcttgttctgagtgctgattattcaggttaaatttttgaaaactgagccgaacactcatttggtgcaccttttttgtatatatgttaaacttgaacaaaatttttaaaaaagaaataaaaagaagcactatcttctgtttaattcatttcctttacttcacattgtagtgagcccttttatggactcagggagagagagccttggtgtccttagccaggaagaktttccttttatcatgcagctctgtccacacccttcgttcagtttctccctgcaactcagctcagctgtcatgctgatgtgaaacaggagctcataagtagggctgttctctctcaagccttcccaggagtaagaacagtggttagggttatgggctttaatggactttcctgctgacatgcagacca

SEQ ID NO: 429141 - DNA, 548 bp, Homo sapiens
gtccaaaatctgaccactgcttgatcctgctgcagactactagcatttctctcctgggttttggccatagccacctaacaactgtcttgcgcttctgacctttccttgccataggcagagttgatacttttaatctgagtcatatcatgttccttctagtttcaaaaagcctcagtgatttcccattgagagagaagtcaaattccttaccatggcctacaagaatttacctgatttcatcgctttccacctcctaccacccatccaccctttagaaaatgttctttctccagcaagccccttcattcactctgttattctatcaggggaacctgcccccaayatttcaacatagattctttctattttccataagtgttggctggctgagaaataaagagaaagagtacaaagagaggacttttacagctgggccaccgggggtgacatcacatatcagtaggactgtgatgcccacctgagcctcaaatcagcaagttttttatttattaagggcttcaaaaggggagggggtgtaaaacagggag

SEQ ID NO: 429142 - DNA, 562 bp, Homo sapiens
gatgtctttcatatcttagaggggaccagtaatgttattaggatgctgaaagagaagtcctataacctaagctctaatcgttctaattgtaatagaggactgccctgggccaactctctccacctattttttcctattccagacttgttttagaataacgagttcgcagtacaatacatgcttctgtgtacctttttaaacatgcatgatggtaacaaatacacaaacactgagttagtactgaacacaagcttcccgttcctactgaaaaaaggtcacaatggcggcaaaggtattgtactggactagaggacatttattagagatgtagttaaacatgggtaaatagtaaataaatgctttcaaaagttttttgscccatttccctgtcagcttaaacatcaaacaaagcataaccacctgtaggtagcaacataattatttctgccaaaacaatatttcaaagattgaagtagctgcttgtcaggttgtttttgtatcttcactcttttccatcagtttttaaaaacattttcataaacttattcctaatctccatctc

SEQ ID NO: 429143 - DNA, 519 bp, Homo sapiens
gttaaatttaagtaaatgaatatttacattatgaacaacagagccaaacagtggactttcattttacagtacaaattagytcaacattgactgatcacctaaaagtctattacctgttaaatacaaaattgtataaaacagccctgccttcaaacagtccttggttaagctgggaatatgcatgtaatcaaataaccataatatatgtaatgcattcattatatggataaagtactttgggaacacagcaacacaaagttaaagagaagaggcaataattcacagtctgatattttattaaagaataacagcataccaaaatggctaaagaacaattgtttttaatagaattctgaataaacttgagattgaaaaattaattttacattttacaaccaaacttaaaaggctgcaaaagcagcctttccacatggagcacaggttaagttgcctggttgaccagcattgcctgatcttactggcaattagtcattaatatctgagtttcaaagctaatga

SEQ ID NO: 429144 - DNA, 519 bp, Homo sapiens
gttaaatttaagtaaatgaatatttacattatgaacaacagagccaaacagtggactttcattttacagtacaaattagttcaacattgactgatyacctaaaagtctattacctgttaaatacaaaattgtataaaacagccctgccttcaaacagtccttggttaagctgggaatatgcatgtaatcaaataaccataatatatgtaatgcattcattatatggataaagtactttgggaacacagcaacacaaagttaaagagaagaggcaataattcacagtctgatattttattaaagaataacagcataccaaaatggctaaagaacaattgtttttaatagaattctgaataaacttgagattgaaaaattaattttacattttacaaccaaacttaaaaggctgcaaaagcagcctttccacatggagcacaggttaagttgcctggttgaccagcattgcctgatcttactggcaattagtcattaatatctgagtttcaaagctaatga

SEQ ID NO: 429145 - DNA, 534 bp, Homo sapiens
gaacagaaattaatctcttcacaatgatagatataatttggaayatcaattataatactatgctatcaaggtagatgtttaccttgtttctatattaaatgaatatgaatggctgtgatttttaaaactatattcttttgtacttttaacagatttttcttttcccatcagttatcttattttcaggctatcaatatatcatctttagatcttgccaacatccctaccttcatcaacataacttttccccatcttctaatgtgttgcttccaatctaatgtgggctaagaaactaagtaaaaagtttgttagaattctatgtaaagtaacagttgatgggatatgattaagggcctagtagccactcttatagactaaatgtatgtgcttttatacatgggtttatggtagcacctcaagctgcttagaagtcttctacctacttcacgattcttagccacatcctaaaaaactgagattccaagaaacccaatctcttagagagaaatagataaggatattaaaaattacaac

SEQ ID NO: 429146 - DNA, 558 bp, Homo sapiens
aaactctgtgagctatggagcacatgggctgtccctagctgtctggtrcccagccctggggtggtaagggcaggtgggtggtggcctagagtatgagggctccataaaggaggtggttaggtttgggctctggagtttttggtttacatttgagaaatatgcttaccactgagttgtttagtatctctaggaattgacccttccagggtcagcaaggccccagatgtcaaagcatcagattacagaaaagaagacatggttaatagataaattcactaaaagtttaggccaggggcagtggtgtgtgcctgtagtcccagctacttgggaggctgaggcagcagaatcccttgagcctaggagctcgaggccagcctgggcaacatagcaagaaccccatctctagatacatacatacgtacataaaagttcaataacgctcctaggagatcatgtttttactattaatattgcaaaaggaacaggaaaacaatgctgatttttcatgatgtcatcacagattttctaaccaaaatgtatacactgactatgcatcaa

SEQ ID NO: 429147 - DNA, 558 bp, Homo sapiens
aaactctgtgagctatggagcacatgggctgtccctagctgtctggtacccagccctggggtggtaagggcaggtgggtggtggcctagagtatgagggctccataaaggaggtggttaggtttgggctctggagtttttggtttacatttgagaaatatgcttaccactgagttgtttagtatctctaggaattgacccttccagggtcagcaaggccccagatgtcaaagcatcagattacagaaaagaagacatggttaatagataaattcactaaaagtttaggccaggggcagtggtgtgtgcctgtagtcccagctacttgggaggctgaggcagcagaatccctygagcctaggagctcgaggccagcctgggcaacatagcaagaaccccatctctagatacatacatacgtacataaaagttcaataacgctcctaggagatcatgtttttactattaatattgcaaaaggaacaggaaaacaatgctgatttttcatgatgtcatcacagattttctaaccaaaatgtatacactgactatgcatcaa

SEQ ID NO: 429148 - DNA, 592 bp, Homo sapiens
agaaaaacatgaagaaaggcttgaaggattgaggactcctcaacttaccccagtcaggaaaacagaagacacccatcaggatgaaggcgtccagctactgccatcaaagaaacagcctccttcagtaagcccctttggagaaaacatcaagcaaatttttcagtggattttttcaaagaaaaaaagcaagccagcaccagtcactgctgagagccaaaaaacagtaaaaaacagatcatgtgtgtacagcagcagtgctgaagctcagggtctcatgacggcagttggacaaatgctggacgagaaaatgtcactttgccatgcgcgccatgcctcgaaggtaaatcagcrcaaacagaagtttcaagccccagtctgtgggtttccctgcaaccacaggcacctcttctactcagaacacggcagaatactgagctatgcagccagcagtcaacaagccactctcaagagccagggttgtcccaacagagacaggcaaatcagaaatcaacagcccttgaaaagtgtgcggtgcaacaatgagcaatggggcctgcgacatccccaaatcttgcaccccaagaaagctgta

SEQ ID NO: 429149 - DNA, 592 bp, Homo sapiens
agaaaaacatgaagaaaggcttgaaggattgaggactcctcaacttaccccagtcaggaaaacagaagacacccatcaggatgaaggcgtccagctactgccatcaaagaaacagcctccttcagtaagcccctttggagaaaacatcaagcaaatttttcagtggattttttcaaagaaaaaaagcaagccagcaccagtcactgctgagagccaaaaaacagtaaaaaacagatcatgtgtgtacagcagcagtgctgaagctcagggtctcatgacggcagttggacaaatgctggacgagaaaatgtcactttgccatgcgcgccatgcctcgaaggtaaatcagcgcaaacagaagtttcaagccccagtctgtgggtttccctgcaaccacaggcacctcttctactcagaacacggcagaatactgagctatgcagccagcagtcaacaagccactctcaagagccagggttgtcccaacagagacagrcaaatcagaaatcaacagcccttgaaaagtgtgcggtgcaacaatgagcaatggggcctgcgacatccccaaatcttgcaccccaagaaagctgta

SEQ ID NO: 429150 - DNA, 599 bp, Homo sapiens
tgttgacagtggtgctgtaagcccaccttcatcctgagttccttcactgaaccttatgtttccrtaataccgtctttacacaaacaacaaaaaattctaaaaacaagatgagaaaaacctatgaaggtcccactctgaaataaggttcaacccatctttccactacttactctacctcaaacttcatgcagctgtagggagaaggtttgcagagatgtcacgggactgaacatctccatgcaggctccaggaagtgccacagccgagtaccttcatgtgtcacaaaatagtggaagtttgggtgggagagtgctgggccctgagtttagaagtgggagaagtcttgaccctgggtatcctggtggagaatagataacgtctgcccctgggaagccccttctctccctgacaaaggctgggatggagatgggctctcttagctcagccaacatgcaaagcagagagtcctcatcccactgcctctccctttctcgcactctggagtggcagtggggacagaccttccagctctgtgcatgtgtaggtgggggctagggggtcaggggggcagcctttatggaggttgctgagggccgtga

SEQ ID NO: 429151 - DNA, 599 bp, Homo sapiens
tgttgacagtggtgctgtaagcccaccttcatcctgagttccttcactgaaccttatgtttccataataccgtctttacacaaacaacaaaaaattctaaaaacaagatgagaaaaacctatgaaggtcccactctgaaataaggttcaacccatctttccactacttactctacctcaaacttcatgcagctgtagggagaaggtttgcagagatgtcacgggactgaacatctccatgcaggctccaggaagtgccacagccgagtaccttcatgtgtcacaaaatagtggaagtttgggtgggagagtgctgggccctgagtttagaagtgggagaagtcttgaccctgggtatcctggtggagaatagataacgtctgcccctgggaagccccttctctccctgacaaaggctgggatggagatgggctctcttagctcagccaacatgcaaagcagagagtccycatcccactgcctctccctttctcgcactctggagtggcagtggggacagaccttccagctctgtgcatgtgtaggtgggggctagggggtcaggggggcagcctttatggaggttgctgagggccgtga

SEQ ID NO: 429152 - DNA, 416 bp, Homo sapiens
gttgcaataagccaagattgtgccattgcactccagcctgggagacaaagcgagactccatctcaaaaaaaaaaaaaaaaaaagaatgactaaaattaagaagattgatgattccaaatattrgtaaagatgtagaacaactagaactcccacatattgctgatgaaaatgaagaataatacattactttggaaaatactttggtactgatttaccatatgaccccaaaatctcacttgtagaaatttatacaggaaaaatgaaaacatatgctcacagaaagcttgtatacacatgcttatggcaataaatttatttatagttgcctaccaacaagtgatgaacaaatatattttagtatcttgatactactttctagctagaaaaggaatactactaagcaaaaatagaggatg

SEQ ID NO: 429153 - DNA, 561 bp, Homo sapiens
tgaactatgtcttcgtccatttgggatgctacaacaaaataccatagaccgggtgacttataaaccacagaaatgtgtttcttatcrttctggaggctgggaagtccaagatcacggcattggcagattcagtgtctggtgaaggcctgctttgtggttcatagatgggtgctttcttgctgtgtcctcatgtggtgataggggcaagccagtgctcctagtctctttgataagagcactaatcccatttccgagggcccatcatgactgaatcacttctcagcaatcctcccttctaatctcatcactttgggggctaggatttcaacgtatgaatttgtgtggggggcacaaacattgaatccattgcaatgaacatcaaaggatggtacagtggttagtgtttgtgtatcatggcctacctaataattttatgtctttgttgctgaaaataaaacaaataaaagctttcatttacatgcttttttagcacaccttttctggaaaaaattctctactttagtgctggtttgtgtggctcataatacatctatggccatt

SEQ ID NO: 429154 - DNA, 561 bp, Homo sapiens
tgaactatgtcttcgtccatttgggatgctacaacaaaataccatagaccgggtgacttataaaccacagaaatgtgtttcttatcattctggaggctgggaagtccaagatcacggcattggcagattcagtgtctggtgaaggcctgctttgtggttcatagatgggtgctttcttgctgtgtcctcatgtggtgataggggcaagccagtgctcctagtctctttgataagagcactaatcccatttccgagggcccatcatgactgaatcacttctcagcaatcctcccttctaatctcatcactttgggggctaggatttcaacrtatgaatttgtgtggggggcacaaacattgaatccattgcaatgaacatcaaaggatggtacagtggttagtgtttgtgtatcatggcctacctaataattttatgtctttgttgctgaaaataaaacaaataaaagctttcatttacatgcttttttagcacaccttttctggaaaaaattctctactttagtgctggtttgtgtggctcataatacatctatggccatt

SEQ ID NO: 429155 - DNA, 573 bp, Homo sapiens
ggaagatctgctggaagatgtcatttggggtaatrcaaaatatttctggaagacacaagtaaaatgggccctcattgaccaagtagtttgtatagatgtagtgattaaactattaagtagaggggaggttgcaaaaatatttgacaaaatgaaatgtgtgcctgcagtgcaaaaccactgatcctgctcacaaacaggcatagtgagaaagatttctatatgcctggtagaacaacctctgtgggccatcttaagcactggtgattaacacttttatgcattctattacatctgaatttcaccacttaacatgatacttaagctgaattaaaatgccttaatactcttgccttaatattcttccaaggtttagcacctggtccttttaataaaaaaaaaaaataggttatggttacctttttttgaaaaggtactcaaatatgtcaactttattgtttctagatatacacccctttgtactgaaaattgtaaaaatagcatgaagtttcctcttattgcaatccaaatttttgaaagccagaaaatctaattattatgctctagacaacttac

SEQ ID NO: 429156 - DNA, 603 bp, Homo sapiens
agtaaatagaaaaaggtaaataatctcaacatttttgatcaaaaattaaagggttttaggatgccaagctgggaagctgcactgaagccaccacagtctcgggatacttactgttccaataatctagaatcttgaatgttaggagcaaagccagagaagaaagataagacatcgtggtccaaacagacagtttattcaataccacctgaataaagttggagcattgaaaggccttcaagctcagtgtgaaratggactaaggaaaatccatcctccaggaaggagatgtcacaggaaacttatctgtcttagaaaggactcttggtggaaaaatataataaaatagaaaaaatctgctctaaaaatgtgtaactcaggcctgcctttacactgatagggatttgaatttatagctcttgcaattaattaaatctcaagttaaacaattaagttggtcctgtgttggtaggctccaaagtcctctctataaggattcataaccactgagactacatgcagcacaaaaagacaaaccccaaccagacatgaactcacaatacagaaagaactatgccaatgagaggtgtagtgagcagaaagaac

SEQ ID NO: 429157 - DNA, 541 bp, Homo sapiens
acttttggaataggcaataacaacaccataatttgctctaattttgcatatttgtactaactctttataagaagaatcccatgggagattctagtaggtaaacatagaaaattttttcacatgtctgataaaaccaataaaatgtaaaacaaagaaagtaaccaaagataatttattgaaaaaaactatctcacaaatcaaagattttctgatctgccaaaattctctgagagggacaaatagacttgctggastctgatgtttttttgtttttgtttttaaatattcactgatgacatcacagtctcttgtcaaaagttcgctgataataatgtcaaaaacagactaccagacagagaaaaacctatgagactcttataaactttttaagtgttctgttttctccctttatgtgctgctaaatacatgcacagaaagaatttcttattgaattattttccaaatatgcaatgctcactactttcagcattttcatgttgtatgtatacctctaaactattatttatctagctggttttag

SEQ ID NO: 429158 - DNA, 541 bp, Homo sapiens
acttttggaataggcaataacaacaccataatttgctctaattttgcatatttgtactaactctttataagaagaatcccatgggagattctagtaggtaaacatagaaaattttttcacatgtctgataaaaccaataaaatgtaaaacaaagaaagtaaccaaagataatttattgaaaaaaactatctcacaaatcaaagattttctgatctgccaaaattctctgagagggacaaatagacttgctggactctgatgtttttttgtttttgtttttaaatattcactgatgacatcacagtctcttgtcaaaagttcgctgataataatgtcaaaaacagactaccagacmgagaaaaacctatgagactcttataaactttttaagtgttctgttttctccctttatgtgctgctaaatacatgcacagaaagaatttcttattgaattattttccaaatatgcaatgctcactactttcagcattttcatgttgtatgtatacctctaaactattatttatctagctggttttag

SEQ ID NO: 429159 - DNA, 541 bp, Homo sapiens
acttttggaataggcaataacaacaccataatttgctctaattttgcatatttgtactaactctttataagaagaatcccatgggagattctagtaggtaaacatagaaaattttttcacatgtctgataaaaccaataaaatgtaaaacaaagaaagtaaccaaagataatttattgaaaaaaactatctcacaaatcaaagattttctgatctgccaaaattctctgagagggacaaatagacttgctggactctgatgtttttttgtttttgtttttaaatattcactgatgacatcacagtctcttgtcaaaagttcgctgataataatgtcaaaaacagactaccagacagagaaaaacctatgagactcttataaactttttaagtgttctgttttctccctttatgtgctgctaaatayatgcacagaaagaatttcttattgaattattttccaaatatgcaatgctcactactttcagcattttcatgttgtatgtatacctctaaactattatttatctagctggttttag

SEQ ID NO: 429160 - DNA, 569 bp, Homo sapiens
aaaacaatctggttctcatttttttgtttgccttatcaccacataaacctccacttaatagactaaatttataaataaatcttttaaaagagtgctttattctgtgattttggataggaaaaaagcagagtcatgtgtaagtgacagaatacagtatccccgctttcctcagtttccagttacttgtggccaactgggattcaaaattgggtgagtayagtacaataagatactttgagagtgagcaagagagagagagatcacactcacaaacttttattacagtatattgttataatcattctattttgttattagtaactgttgacaatcttttacttttcctaatttataaattaaacttcatcataggtatgtatgtatagaaaacaacatagtgtgtatagggttcaatactagctgcaggttcaggtatccactgggagtcttggaacatatcctctgaggataaggggggactactgtagtataagtttaatggatgtcagaagacaatggcagcttggcacaaactctcaattctgcatatacttcatatttgggtgatc

SEQ ID NO: 429161 - DNA, 583 bp, Homo sapiens
ggggtcatttgaggttgcataaaaattttagaactgcttttttccatttctttgaaaaatgccattgaaattttgatggggttgctttatatctatagatcgctctgagtaatagggatatgtatcttcttcaaattctttcatcagtgttttatagtttttggtatatacaaattttactgtcttatttaaatttcttcctaagtagttaattttttgatgctattgtaaatgagattgtgttctttcagacggactctcactctgtygcccaggctggagtgcagtggtgtgatcttggctcactgcaagctctgactcccgggttcacaccaatctcctgcctcagcctcctgccaccacgcccagctaattttttgtatttttagtagagacagggtttctccatgttagccaagatggtctcgatctcttgaccttgtgatctgcccacctcagactcccaaagtgctgggattacaggcgtgagccactgtgcccggcccgagattgttttgttaatttctttctgggatactcaactattagtatataaaaacgtaacaggtttttttttaatgtt

SEQ ID NO: 429162 - DNA, 572 bp, Homo sapiens
tttggtatttctattggaacttcattgaatcattaaagagaattgaaatattttcaatattgaatcttctatcccatgaacatatcttcccatttgttttggttcttaaaatttctctcaataatattttattattctcttcagaggatagacacaccatgtatttatttgaaattttttattcatggcattaaaaataacatttaaaacattattgttgtttgttatagtagagtgtaacaaatttgtatatgttgaatatatatgcattaaacaacctcctgtaaccaatttattcattcttttatgtatagatttgtttggattttctacatatacaaataccatcaggagataattaatgttttaatacttatyttccaattcatatgtacattttcttcttgtttaattacactaggtagaacagtggttcttaactagcgatattgccctttcttccacgggatattgtcaaggtctaaaaacagtcttgttgggacaattgagggagggcagagtgatattggcatccagaggccagagatgctgctaaacatcctacaacatac

SEQ ID NO: 429163 - DNA, 572 bp, Homo sapiens
tttggtatttctattggaacttcattgaatcattaaagagaattgaaatattttcaatattgaatcttctatcccatgaacatatcttcccatttgttttggttcttaaaatttctctcaataatattttattattctcttcagaggatagacacaccatgtatttatttgaaattttttattcatggcattaaaaataacatttaaaacattattgttgtttgttatagtagagtgtaacaaatttgtatatgttgaatatatatgcattaaacaacctcctgtaaccaatttattcattcttttatgtatagatttgtttggattttctacatatacaaataccatcaggagataattaatgttttaatacttattttccaattcatatgtacattttcttcttgtttaattacactaggtagaacagtggttcttaactagcgatattgccctttcttccacgggatattgtcaaggtctaraaacagtcttgttgggacaattgagggagggcagagtgatattggcatccagaggccagagatgctgctaaacatcctacaacatac

SEQ ID NO: 429164 - DNA, 496 bp, Homo sapiens
tatatagttgtagctatgcagaaaatgacctgcaggacactaatcttaaccactaagacattagaaggccttttaaacctggccaattaaaatgtgcttctcacaccagcagcctcagccccacctgagagcttctaaaaaaaaaaaatcccagccccatccagacctgctgaatcagaattacytgcacgtgttaacaagtttcccaggtgactcgaaggtgcagaaaagtttgacaaacatgtttcaaaacattgctttcctttatgtctgtaaggcaaaatcctacatctactttctcttttgttgaaaagtatgatgaaatttgtgaagataatgcttaaattcttcaaattgtggtcgggggtaaccatcctctcaaatgagtcattctgaagttgaaacacaaacattgcacttagaagataaaggtttttgcctttagaagtcctgtcagttgttgcctcctaaaaaccatggacatctgtgaaaataa

SEQ ID NO: 429165 - DNA, 486 bp, Homo sapiens
cttgcaatccatgctttgagttatttatctgtcatttctgaatttccatkttgattatggaccattggtggagagataatgagaggctttggtagtgtcactacattcagttttttcaagaaaatcttgtgtgggttccttctcatctggagacactggcatttctactttctattatttttgtatgagtaggactattttattttcctattatattattgggttttttttttttcccctttcccacctcccttgtgaatgtgactgtagagaatgcttctgtagacatacacacttttttcagcaggtttcataatgggctgtgtcattcaacctacaagccagtagatggcacttatgggtaagagtcagctatggccaacatgcctgttactgggtgtgtattaatacttaatccttgtttaccaggagatattctctgttgcctcagacattgggctgatctatggagtacacagtggcctg

SEQ ID NO: 429166 - DNA, 486 bp, Homo sapiens
cttgcaatccatgctttgagttatttatctgtcatttctgaatttccattttgattatggaccattggtggagagataatgagaggctttggtagtgtcactacattcagttttttcaagaaaatcttgtgtgggttccttctcatctggagacactggcatttctactttctattatttttgtatgagtaggactattttattttcctattatattattgggttttttttttttcccctttcccacctcccttgtgaatgtgactgtagagaatgcttctrtagacatacacacttttttcagcaggtttcataatgggctgtgtcattcaacctacaagccagtagatggcacttatgggtaagagtcagctatggccaacatgcctgttactgggtgtgtattaatacttaatccttgtttaccaggagatattctctgttgcctcagacattgggctgatctatggagtacacagtggcctg

SEQ ID NO: 429167 - DNA, 591 bp, Homo sapiens
ttgcccaagtttccttcatgttcccatggagccacttaaaacaatatctgacaaggctaagaatcactggaaagaagttggtgctacaagtgtgaaaagcaaactgaactgcctggccaggctgcaacagcttcccatttcacgttgcagtttaactttgagcagttaagaaatccctctctcatgctgtaagacactagctaagggatagtttctcaaagaccaaggatggtttgatagcttttctctgtagtgcttccattttttcagtctttctactccatttatcaggaaaactattctgtggacgtgacatcatgaaatttttttcccaatccttagttatttctttaaaaagcctgcataaaggccagatwaaaaaagacttatggggccacctgtttattatgtggcagcacattcagatgaagaataaacatgttatctataatgatattaatatttctctaggttagctttacaggtcagatgtaacctaccatagctgctgcacctgtcaggtaaagaagttgggataacaaatacagctgatttttggtaagtaccttcatagccttgtgtgaaactact

SEQ ID NO: 429168 - DNA, 522 bp, Homo sapiens
gactttgtgaactgaactagcagtttgatgaactagcagaaagatgaaaactgcwtgaatcagaaagagacagtacagagagggaaaacactgaacttaaagaagttttataggagtttttgtcctgagaaagtagtgtccaagttcagagctcagttccagaagaggtaacagtagcatggcttcttaatctgagatgtgtggtttctcagcagcatctcaggcaaagagatttgaatgtactggtttcaacatttctggaaatatacaagtagacaaggcctcagtgaaagaagggtgagggaacggggcagatccagcagaagtattgcaactaatacagtaattcttggcagaagagtttgattttttccaagtttgatgaagttattcttggctatcaaccataaaagagaacttcctggagagccttcgtgggaattcaagaatccctaggactatagagaccatagaggtactggaaagacgtgaaggggccagctgtgagataataaagagtgg

SEQ ID NO: 429169 - DNA, 603 bp, Homo sapiens
cctggtttttcagccttcttttccaaccatacccttaaaaatgttgcatttgcttaaatttactagttccccagagtttatttcagttacttacaacaaaagagcccaagccactatactcccagtgtaatcaacagaacaacaaagaaaagaagggcgctacaccaggaattctattgatccatcggtaggcatgtttttctctataacgatggtctgtagcaccttcccaaaggatgctgctgtgaaatttctgccttgtattttctgcagggatgwtctcctaaacatagtcaaactagtctcagggtggacactgtggctttataatcccagcactttgggaaaccaaggcaggatgattgcttgaggacaggagatagagccccgccttggtaacatagcaagacactgtctctacaaaaaataaaaataaaaaataaattttggagaaaactcgcctctactgaagcacttcacatagaacagcctccctagccagggcttgtaaaattaagcaattaaagaaaagcagggggatcaggatggtaacatgcggcaggaagatgtctcatatcctgcccatttctgcatttccctccg

SEQ ID NO: 429170 - DNA, 426 bp, Homo sapiens
taaatatttatatatggtagttatgtttacagtttgtaaaagtggacaaagagtgaataaagtaaaaagagaaaaagaaggaaaggaaggaagtgaggaaggaaggaaggagaaatgaagaaaaagaagaaataagagaaggggagaaattaacaaatggagggagaaaaaagaaggaaggaaagaagaaggaaggaaggaaaagagggatgggaagggaaatagagaaasgaagaaaacagaaaaaataggaagaggatagagagaagagaaaaaaagaaagaaaggatagaatgaagagcagagaaaaaaacaaagagaatgcagaaagagaaaaaacaagaagaaagtagttaatgaaaaaagggacatagctgggaaattttagttttgaaaaaaccatggcagagtgcttcaaaaatgtgg

SEQ ID NO: 429171 - DNA, 577 bp, Homo sapiens
gagaatctcacattcttttgctatatcagcactaaagtttcaaggagacagcttctttgctggctcaaaaatattggtaaaaatagacaacattttagtttaaatrcattttatacatttttctaatttgcatttatatgcagtttaattccatatattatagaaatataaaatgggaggataaaaacatatttcatatgtagaagatgtgtaataggaaaatataatccaagatagtggctgctctgtcagttgggtcccagcatgatgacaagaccaacaaggagcagagctccggtcaacccacaaggacatgtagcaggaatgtaaatagaaagcagaacaaaaacctttgtcattgaaatctacttcagtaaaacctaacttggcctacatgatgcacttctccaggaaaaaaaaaaagaaccgggaaattcacattaaagtgtaagcaaaatctaggtgaaatatgtacagatgaaagagctttaatgacacgtataataaaaaaaaatcaatgattgtgtatgtgtgatatatatatatatatctttaaaacaggaatcaacccagtgct

SEQ ID NO: 429172 - DNA, 553 bp, Homo sapiens
catatatatatatatatatatatatatatacacacacacacayatatatgtttgtcaaacatatatatattgtcaaatgtatatttatgtatatatacaaaaacatatatgtgtgtatgtatacaaacatatatgtttgtcaaatgtgtatatgtgtgtatatatatacacacacaaattttatatatatatgcacccagttgtatattataaggaaatatgcaatatacattatatatatgcattatatatgtagatgaatatatgtatacatctgaaataaaaataaaatgacattttggcatcattgctaacaagaattattataataacctagatttatgaagctttgtgagcatttgcctagttatcaaaaaccgaggaaaaagtttactaaaagcatttaaacctatgaatcaaaaattaaaacataattgttgttattgcacatttgtgccctttcagaattgtgtgtgctataatcaatgctattgctttagaagttaagggaagtatatttgagtaggggttcaattcactgttaaagcatata

SEQ ID NO: 429173 - DNA, 400 bp, Homo sapiens
gccacagccaactcttacccataagaaccacctatggacctggaggttcaatggtacaacacaataggaagtttgtggacacaagtacataggactgggaaatgagataagcttcctgagacagctgcaaacccagaacaacgggagggattgagccttctcccacacccattacrttactactacaaccggcattcgtgaaagccaccttaaaaaggatatctataaccaaagaacttatacagactctttgtcactgaaaacacccagaaccagagatctaactctcagtctgtccctaagggaggggagagcgcagcccaccaaatgtccccttaagtcaaaggaaacatgaacatagcaccagctattggaggcagcatcactaaatcgagagggt

SEQ ID NO: 429174 - DNA, 521 bp, Homo sapiens
tatgcccatccaagtgggccacagccaactcttacccataagaaccacctatggacctggaggttcaatggtacaacacaataggaagtttgtggacacaagtacataggactgggaaatgagataagcttcctgagacagctgcaaacccagaacaacgggagggattgagccttctcccacacccattacattactactacaaccggcattcgtgaaagccaccttaaaaaggatatctataaccaaagaacttatacagactctttgtcactgaaaacacccagaaccagagatctaactctcagtctgtccctaagggaggggagagcgcagcccaccaaatgtccccttaagtcaaaggaaacatgaacatagcacyagctattggaggcagcatcactaaatcgagagggttatctcttgccaccctcccccacctcagtgcactgtggctgactcatcagtggctcttctcaagaaggctcggggatcctggtctgaaagagatcacttctcaa

SEQ ID NO: 429175 - DNA, 529 bp, Homo sapiens
caagctttctcctcatttatcataagtttcatggtttatggattttaattcaagctatttggataataccttgtagcaaactgatttaaatgcaaacaaaaatagcaacatcagcccctttcattccttagaatatctgctccagaatattgtggtccagaagaggctatgctatctggagaatgttttatcatgttatattaaaaaatataacaagaaaggatataaggaggaacaatgaggaatttcaagaaaggcagtagagctggaagaggtctggctaggacataatgtcttcgaatcttttcagaaatgtgttccagcttctttatgatagcagttagcatccctgcacatatgtgagtatatagggctcwagaaaaatggcaggatagggaagacctatcattatactacagaaaaggacttataaagagacttcttgtaactattccttggggtttgattaattacttgcttattgctgaagacagaatagagcgaccggtactgtgattttagtagtgaa

SEQ ID NO: 429176 - DNA, 591 bp, Homo sapiens
ggctatgctatctggagaatgttttatcatgttatattaaaaaatataacaagaaaggatataaggaggaacaatgaggaatttcaagaaaggcagtagagctggaagaggtctggctaggacataatgtcttcgaatcttttcagaaatgtgttccagcttctttatgatagcagttagcatccctgcacatatgtgagtatatagggctcaagaaaaatggcaggatagggaagacctatcattatactacagaaaaggacttataaagagacttcttgtaactattccttggggtttgattaattacttgcttattgctgaagacagaatagagcgaccggtactgtgattttagtagtgaaaatgagatggcagttggagagttcttagtagggagaamtgatacactaaaaaattgtgtttcagatttagtctacctcccttaatttccagtaggagggggaccttgagcttcctttggctgctgaagattactgagatatttagctctcaaatgagaatgctaatctcattcattaagtttcattttagagatatttgggcagctagattatcagacaaaaacat

SEQ ID NO: 429177 - DNA, 591 bp, Homo sapiens
ggctatgctatctggagaatgttttatcatgttatattaaaaaatataacaagaaaggatataaggaggaacaatgaggaatttcaagaaaggcagtagagctggaagaggtctggctaggacataatgtcttcgaatcttttcagaaatgtgttccagcttctttatgatagcagttagcatccctgcacatatgtgagtatatagggctcaagaaaaatggcaggatagggaagacctatcattatactacagaaaaggacttataaagagacttcttgtaactattccttggggtttgattaattacttgcttattgctgaagacagaatagagcgaccggtactgtgattttagtagtgaaaatgagatggcagttggagagttcttagtagggagaactgatacactaaaaaattgtgtttcagatttagtctacctcccttaatttccagtaggagggggaccttgagcttcctttggctgctgaagattactgagatatttagctctcaaatgagaatgctaatctcattcaytaagtttcattttagagatatttgggcagctagattatcagacaaaaacat

SEQ ID NO: 429178 - DNA, 579 bp, Homo sapiens
tctgtttccagttccaaatttgcttccacattttctcactctctgcagtttctcactctctgcaggacccattttctgtattagtcgattttcacactgctataaagagctacctaagactgggtaatttataaagaaaataggttttattgacacgtacttgaacgtggctggggaggcctcaggaaacttacaatcatggcagaaggcaaagaggaagcaaggcatatcttacatggtggcaggagagagagagagcgagggagaagtgacacatttttaaatcatcagatattgtgagaactcaytcactgtcactagaacagcatggaagaaatctgctctcatgatccaatcacctcccaccagatccttcttctgaccccacatgaggattacaatttgagatgagatttgggtaggcccacagagccacccaacattggcaacaactatagatattttgtgtacacaggttgtgagggattttctgatgatgtaaaatctttttaacattaaactattgaaattatttaagtataaataaatttcaataaatactgtagatcaatatacatt

SEQ ID NO: 429179 - DNA, 513 bp, Homo sapiens
cagtcacctcccaccaattccctccctacacacatggggattgtggtgattacagtttgagatgagacttgggtgaggacacagagccaaacgatattggtcattagacatcattatacaatgtatatttgtgaatgaaaagtatggaaggaaaacaaagactatctttaaaaatagatactgtgttttgacaaaaagcatttatttttaccctctgaaattctgaataggagttcaaagaaccatatattcaggaattaaatacagtcataattgcctctggcaggggtatgaaaagagtcatactgttacttgkgtagtagaaatcaacctcctagcttaagcttgagcttccaggtttgtgtaagaagttggtgaggaaaacatttaccgtggcctccacaaggtttaggtaggttaagtacttaatagtccagacataaatgttacatagcttatgagagaaattgcagtaaaatatttatatgattttcatttctcctatattgggtt

SEQ ID NO: 429180 - DNA, 513 bp, Homo sapiens
cagtcacctcccaccaattccctccctacacacatggggattgtggtgattacagtttgagatgagacttgggtgaggacacagagccaaacgatattggtcattagacatcattatacaatgtatatttgtgaatgaaaagtatggaaggaaaacaaagactatctttaaaaatagatactgtgttttgacaaaaagcatttatttttaccctctgaaattctgaataggagttcaaagaaccatatattcaggaattaaatacagtcataattgcctctggcaggggtatgaaaagagtcatactgttacttgtgtagtagaaatcaacctcctagcttaagcttgagcttccaggtttgtgtaagaagttggtgaggaaaacatttaccgtggcctccacaaggtttaggtaggttaagtacttaatagtccagacataaatgttacatagcttatgagagaaattgcagtaaaatatttatatgawtttcatttctcctatattgggtt

SEQ ID NO: 429181 - DNA, 553 bp, Homo sapiens
gggcaacaggagcaacccatatcctaggcttgtacctcgataaattatcccctttttgactctgttgtacctcaaacaatcagtatattaacacgtgacctcctcaagaacaaaaactagatggtactatttaatacttcttttggggtcccacccagtcctaacagcaatgatgctgacattggctacctctctgaccttgtccctacatctcccaaacccccatgcagccacattggcctttatgcagtccctcacatgtgccaaatatgcttctaccacagggcgctttcacttgctgttccctctgcttggagcattccactcacttccatctgtaacagtcatttcttctctgcttttcctgacgctccagcctaaaatcacaccacyctccagtactttccatccttttccaacctttattttctgcccagccctttttaccacctcacatgatatatattcacttatgtgtttattctgttgacccttaaacaataaggcacttgaaggcaggggttttattttgatcttcctgtctccccagcac

SEQ ID NO: 429182 - DNA, 595 bp, Homo sapiens
agaattcaaagcatggattgcaaggaagctcaatgagatacaggacaagattgaaaagtggtacaaagaaacttctaaagcaatccagaaaataaaggaagtgatgaacatcttaaaagaaatcaatcagagcttctgaaattgaaaaactcaaagaatttcaaatacaactgaaagctttatcaataaactgaacaaagcagaagaaagaatttcagactttaaaggttggtctttcaaatcaacccagtcagactaaaataaagaaaaaataaattttaaaaatgaacaaagtatttgagaaatatgggattatgtaaaatggcaaaacctatgagttactggtattcctgagagaaaaagggaaacagcaaaaaacctggaaaacatatgtaagggaataattcaagaaattttctctratcttgctagataggtaaatatccagatacaagaaatccagagaacacctgcatgatactatacaaaatgatcaccaaggcatttggtcaccagattgtccaagtcaatatttaaaaaacaaacaaacaaaaaaaaacttaaaggcagctagagaaaaatgtcagatcatgta

SEQ ID NO: 429183 - DNA, 585 bp, Homo sapiens
taagtttaaaactcagaacaaaccggctctcatgcttttgtaaatcatttaccaaaatatgttctaccaacaatttcctttccttgggccagcttttatctgaatgtacaacacttaatggcataaattctacaaggctgaacacaatggcatgttttataaaaatacccagctgaggacataaaaacacccttacctccagaattatctataaatgtaggtattccccagcctacccagtgttttagatacttgagaatggacgactgtaatttattttttggaactatgctaaatttctcctttgaycacttaaatgtaaatacttgcattcatcttaataaaaaagaaggaccttgggtctccatcctccagatgacagcatgtcctacattttaaatgtaaagagtttaagtcatgttttgctttttgtcaggtgatatggttatgccttgtgtccccacccaaatctcatcttgaattgtaaggcctaggtatcgagggagagatctggtgggaggtgattggatcatgggaggctttcccccatgctgtttctgtgatagtgagttctcacgagatttg

SEQ ID NO: 429184 - DNA, 556 bp, Homo sapiens
tatatatttaatttttctactttaaaactacaccatataaataaatatttttacagtttgtccctatacttctcaaataagtctctaaatttgtcacaggtggtgaggtatatgtctaacatgattaggaccctagtacttgaacttggatgttgaaccgagtccccaagtcccagctgacagttatccttaggcattcttcctkccccatgaccttttattaacaaataatgattcaggtcaatagacaatcaggcactggaataaaataatgaaaagagagatacacagctcttgctctgatggagcatagtcttctaagaattattatagggaatgctgccaactcatcagcatttcctcaaataaatgtgtcttcctttttgaaaaataggtatatctacttagaatatctatgagcattaccatgtggcctgtcttctgtactgtttgtcacttataaaaatagcattaaaataggacttttatctacaatctactttcaaatggtatatccaagaaaaagaaaaaggtggcaaatcagccaccttttggg

SEQ ID NO: 429185 - DNA, 556 bp, Homo sapiens
tatatatttaatttttctactttaaaactacaccatataaataaatatttttacagtttgtccctatacttctcaaataagtctctaaatttgtcacaggtggtgaggtatatgtctaacatgattaggaccctagtacttgaacttggatgttgaaccgagtccccaagtcccagctgacagttatccttaggcattcttcctgccccatgaccttttattaacaaataatgattcaggtcaatagacaatsaggcactggaataaaataatgaaaagagagatacacagctcttgctctgatggagcatagtcttctaagaattattatagggaatgctgccaactcatcagcatttcctcaaataaatgtgtcttcctttttgaaaaataggtatatctacttagaatatctatgagcattaccatgtggcctgtcttctgtactgtttgtcacttataaaaatagcattaaaataggacttttatctacaatctactttcaaatggtatatccaagaaaaagaaaaaggtggcaaatcagccaccttttggg

SEQ ID NO: 429186 - DNA, 604 bp, Homo sapiens
ccattgattagggctatggacacatacagagagaagcagggatgctgagagagagaatgacaatgacagagacgttgagagagacatcatgtagccccagagagagatgaagagcattaactgcctcgattcctgcttgctgatgtccttataatacccacctgttcttatttaaggttcttatttaagtagtcagcgagttaccagagtgcctgaggagctatttatattgtttgagtgtaagagcaagtgaaagcaagtaacaagatgatagagacacagagccaatgagagaagcaagggcaataaaagaaagaaaaagagacagactgtccctatggatacaaagcttgaagggtattctgtaagagaaggggtcacggccacaaccccttctccctggggtttaacctgaggtgcaattaaaaataaagaatgttaataaacaaatgaatgcatgaatatacaaakgagtaaataataaacagacaagtacaatttaaatgaatacagaaagttaatgacatttgtcaggatggacagagatgactatggccaaggtccagtggcagaaagagcaacaaagcttctgagatcaaaccac

SEQ ID NO: 429187 - DNA, 601 bp, Homo sapiens
tgctcaagaggtaagagagttggggcattcatacaccaactcccatcagtttttttattcagagccacttccagatgcgttaatccctagctcttccagcctaccatgtggagggtagagaagccttctaagtctctgaaaaagccttcagaaagagatagtggcaggcaaaaatcagttggagcacacagaaataataaggctgagggataggtgacaggatagtataagctatgtgtatttcaaccacagaaaaatattactccttgtctattaggcaggatggcttaggaagatgaaggaaacatgagatggaatactcagagaagtytgaaatttggtaacaacttgaggatttcaggaattggtaagaacacctggagagaaagacgtggtggccttgaagctgacctgggactcttagctgcactggctactgcaccatagagggggaacaatagaccacagaggggacctttgccaataattaggaaataacagcattttattttgatgacagtagatagattcaccagttaggtagaggcttttcaaaccaaacagccagcaactaagatagctgcaaatattttagttcaaa

SEQ ID NO: 429188 - DNA, 523 bp, Homo sapiens
agaatattaacaataatgttactagtggttaacatcggctatccctaagagtaggactactgataacttttatttttctcttgatactagcctgaattctccaaattttctgcaatgaacatttaagtgttgggcaatctgtaacttttaagaatggaaaattgtttaaaattcagtttyatctttccaaataaaatccaaaaaaaatggcatacaacataggaaatgtaagatacaaaataagatcaactatccaggcaaatgaattttaggctctaaatgaaacccaaaaggaggcaggcaaaccagagtctagccagaaaaaaattgctcattaatgaattattgtttacctattaaaaatactctaatgtaacactggcatgttcaagtttcttgtgtatcttcaatcacccagggttaaataatttagaaacaataactctgaaattttccttacttaccaaaacaatagtgatatctttagtatgcagaccaaatattctccatagcttcattcaat

SEQ ID NO: 429189 - DNA, 646 bp, Homo sapiens
catgattaaaaacaacttctcttcagtagctaaacccaatgttaaaattacaggcataccagcaattccattcctaagtatttacccaaagaaaggaaaatgtatctatacaaagactttgacaagattgttcacagcagctttactcatcatagccaaaagccagaaaacagcccagatgaccatcaagagaatgaataagcaaactgtggcctatccatacaatggaataggtgttccacaatcaaaaggaaggagccacatagatacatgggacaacatggctgaatctctaaaacattatgctaagtgaaacaagccttatacatattgtatgattccatttatgtgaaattctagaacaaaaatttaaaaacctaatctatggagggaaagatcagaacagtggttgcctctgaggagtgcatatggtcactgggaaaaggcactttctggggtgacagaaatggtctatatctttataggaggagttcgagttacataagtgtatgcayttgtgaaaaaacattgaatggtacacttaaggtttatatatttcactctatgtaaatgttactttaaaaaatcataaacaaaatatgactctggataatgacatgcatgttgaagtgtttctgggtaaaat

SEQ ID NO: 429190 - DNA, 474 bp, Homo sapiens
aaactttgttcaatgtccattctaaaatttcttagagaagactctcccattttttgcaggcgttcattcatctctgcagtctaaaggtgaaaacattgaaatgagaaaattatcactgaattacttgtaaaagtctgtggattctctacctttttaatagtcaggttttgacatgaaatatccagtctgctaatttacaaggtatgaatgcaatgctaacatcaaacctgaagtgcaaattttacttgcccaagtatttcaaatatttaaatggtgcttcccaagtactctcacttargctttctttaaaatcttttgtcagtgaagttgtacccacattataattgctcttgcataatttaaatgggacaaatagctaaagctaagagaaaggcaaagatggactaaaaatacacattttgcatactggtatgaaacatattaacacaagatcatttaaaatgcaggttatta

SEQ ID NO: 429191 - DNA, 545 bp, Homo sapiens
accacaagggcaggttttaagcacaattattttgtccaaccctctgatttggagcatcatagaatttgagaagtgcatgaaaacttctcctctaggcaccccgatgatctttcagcccgactgaaatactgtgagtgaagggagcatactacttattatagcagtttactccaaggtcaaatatttcactgcttggaacacttttattttcttgcagttgaagcatgcctctctttgctttctacctacaagtcctggttctgtcctctggggcacattgattacctttcttcagggaggtgaaaacagagacctttactccgtatgtcttttcctcttcaagctaaatgtcccttgtgattttgaaggctttttcacagtctgttcatcttccttaggcacaatgaatttattcatatccctgttaaaacgtggtgaccaggcgtcttttccccaattcrgtgccccttcctcttacctccgcccaccctccctctcagggcactgcctctcttcttcttgagaccgtattgcacagaagggct

SEQ ID NO: 429192 - DNA, 673 bp, Homo sapiens
tggttgcataacatcgtgggtgtcctaaatgctactgaattgtttactttaaaatggttacttccatgttattcacttcaataaaaaaattgagctgggtgtggtggctcacacctgtaatcccaacactttgggaggatgaggcaggaggatcacttgaggccgggagttcaagaccagccctgtcaatatagcgagactctgtctctacaaaaaaaaaaattagccaggtatggtggcatgtgcatgtggtcccagcaacacaggagactgaggcgggaggatcacctgagtccagggaggtcgaggctgaagtaagctatggttgtgccactgcactccagcctggaagacagagcaagaccctgtctcaaaaaatatatatatatatacacacacatataatatataatacatatacgtacattatatataatacatatatattatataaaatacaaaataaatgtatataatctatacacaaagagagagagaagttacattgtgttcagctctgtgttagggccaaggtagaatcctcktattcagatttgggatttggggagctaaacatttacttgtgggaataagactaaaacacatgaaacaatctgttaacaagccagaagtgtgggggtagacaaggctgattgatgcccagtgcccaaca

SEQ ID NO: 429193 - DNA, 533 bp, Homo sapiens
tggaggctgtcgaggtgaatctgtttctgtgccttttctagctcctagaggctgcttgctttccttggcttgtggcttcctcctcaatcttcaaagccagcagcagagcatcttcaactctctatttgaatataacatcagcttccatcatcacatctcctactctgatactcctgcctccctctttcacttacaaggacgtttttaactacagtgggctcacttaggtaatccagaataatctcagcatctcaagatgcccaatttaataacatctgcaaagtyctttttgccatattcacaggttcaaaggaatagaatgtgggcattttagggtaaaagttattattattgttcctacaatacccaaatgaagctactgaattagtacctagatatagagttcagaacaaaagtccagattggagaaataaatttgtgaattttcacttacagatgttatttaaactcatgtaactgaatgagatcaacagggaaatgaacgtatatagtgaaaaggtcccaggactgag

SEQ ID NO: 429194 - DNA, 590 bp, Homo sapiens
tctgtccttcagtaatttttttcccttcagttcctgaagcttttctggttccaagttacctggatttcagacttccaatttttctctacctttgggtgccttcatcctgctggttctatttttatttttttccacttctttcattttagattcatggggtacatgtgcaggtttgttagaaaggtatattgggtgatgctaaggtttggagtacaattgaactcatgatgcaggtagtgagcatggtaccaaacaactcagttttcaaacgtctgccccccaccgtacctcccgcccctagtagtacccaatatatattgctcccacctttatgtccatgtgtagctaatgtttagcttccacttgtaagaaagaacatgcagcatttgcttttctggttctgcactagttcacttaggataatggcctcccatcctgcttgttcttatctctatacctggcttctgccccatgattaattctaacctttattctttgcrtgatctgactgtagtttttctactcacatgtggcccacaaatgtattattgcctttattatctgaattcaccactactcttaattgacta

SEQ ID NO: 429195 - DNA, 619 bp, Homo sapiens
ttcatatagaaatcaaagatatttttaaaagaacctctgtctctggcccagtgcttactgaagtgagtggatgcagatgactgatttctattgagattcaaaatgatggtgctaagaaacttaatggaagcagccataaaaattaatttgtggcattgggtcaggaagaaaagggggtgccaccaggtcaggcctggtgctaaaggacccccaaggtcctctccttgatkcttcccaggtgtctgcctctacagatcagtgactccagcttaggagtcagaatttatgaagagcactctcttcccaacctggctcttaccatgggtattcttaggccatttatctttgtcttggtatacttgactctatctaatcttacttctagtctggcaccctaagctcttggattctaattccaaatttgtccttcaatctgattctctaatgctattattgcttacacattttgtgtatattctgctgttttctcaacgctgagctataccatatctctgatttaccttattaccacaaatcaacaaaaaatagctggattccttccttttgtggtagcaaaattcagactaccccttatactgtctctatcttacattaaaat

SEQ ID NO: 429196 - DNA, 436 bp, Homo sapiens
ctgctttggcctcccaaagtgctggaattataggcatgagccatcactcccagcctgagtctctgttttcaattctttgggggtatatacctaggagtggaattgctaggtcatttggtaattgcatatttaaatttcagtaatcaccaaactgccttccacagtggctgtaccattttacattcacaccaacaatgtatgaaggttccaatttctctacatactcctcaagactttttattttttcttttcttttctttttttttgtawgccatcttagtaggtgggaggtgcatagtagctctttgttgcatactttcttactattctctgtgtgtaggagagcaggaggtggttccataaaatatcctcgcattcaaaatgtattctcaaattccaaagtttgataacctctaatttagatacatttttaaaa

SEQ ID NO: 429197 - DNA, 541 bp, Homo sapiens
tctccctaactatatgtttgtactcattatccaacctcttcattgcccttccaactcacacacccttcccagcctctggtatctatcattctactctttacctccatgtgatccattttttagctcctacatatgagtgagaacatgtgatacttgtctttctgtgcctgactcatttcacttaacatattgaccttcagttccatctatatcactgcaagtaacaggatttcattcttttttacggccaaatagtattccattgcatatgtatttaccacattttctttatccatttatccattgatggacacttaaatttattctgtatcttggctattgtgaatagggctgtgataaacataggagtgcaagtatccctttgatacaatgatttcctttcctttgagtaaacatccagtagtgggattgctggatcatatggtagttctagttttagttttctatgaaatctccatattgttttccatagtggctgtactaatttacattctyaccaaaaatgcataacaatttcctt

SEQ ID NO: 429198 - DNA, 457 bp, Homo sapiens
cagggagatataatttgtataccacaaattgtgtgaaccaagagtaacaacaagagtatacayagacttccagtttctagtgcagcatttaagtagcttggaagtcactattctatccgaacaacaaagtaaaaaaactgaaatatcaacaactcttcttagatgcataaaagaagtgaggtggccaggcatggtggttcacacctgtaacccagtgctctgggaggccaaggcaggaaggctgcttgaggccaggagtttgaggctagtctgggcaacatagcgagacccagtctctatttaaaaaaaaaaaaaaaaatttaattagccaggcatggtggtgcacacttgtagacctagctactcaggagactgagacagaaggatcgcttgagcccagagttcaaggttatagtgagttaccactgcactccagactcggcaacagagtgaaacc

SEQ ID NO: 429199 - DNA, 588 bp, Homo sapiens
tattaacttttggttgcattaatgatatacctaaaattatatctggtaaatacttttaacagtagaatataaggtctctaagaaacaaatgtcttatgatgaatgatgattatttggggttcttcagtgttattatgggcactgtcctattgataagcctggtctagatcaagtttggcaaacacattttcctctcagaaatagcaaggagtagatagattctaagcactaaatatgattttggtgtcatgttggggtttatttacctcccgtgagattaaggaatttgtggtcagggactacatttaaaaacagaaaaatcaaagaatcatttttcaatcactgaggatactatctgggtttaaacagtttasataaatagcaactgtgtttattcacctattgatcatattctccacaacaattttcacagactgcattaatccctgttagtattacaactgattcaagataatcttgtataaatagttgcagaacctctttatatttccttttttattttacagcaaaatatacattgttttagggtaaaatgaggcaatgactagatatttataagctccagtt

SEQ ID NO: 429200 - DNA, 514 bp, Homo sapiens
catagtagggcttacaagaatgaggccacagtttgggaaattgacaatttggggaaagagtttacataaaaagaaagtattacagaacatacctttgttgattatcgctactaggcagaaaaccgtaggtcaaggccacgtaagctaactactgcaaaatcctgtggggtgcagaagcatcattcccaaaatcatcttaacatgatataagtaatttttctattagataattaatgtcactagatgtttctgggcatcacgaaggactcaaattagcatgctcttgaatcttcactctgcatcttctaatcagtagtgcaaagaattgatgaatttatgctgaaatgaagagagggcagagaacatatatcctccattcttctgactcattgacaagatgcactgttatgtggataattataattagaaaattttcctctaatttttgagccatgtagtcatygtccttatgctagataggttttggagacagcaacgaatggcaaatatagtt

SEQ ID NO: 429201 - DNA, 512 bp, Homo sapiens
tagtgctctccttgtggattgttgtgctgctagtggttacaaattttccccttgagtgtcttccttatgctatttgtgccattcttttattacagcaaaattacctttctatggtcgtataaccataataggttcattgccctatgtgcagrgcaagtcaatacgccgagacactgggtggcagcagagaaagaggtttaatcgtagggctgctgaatgaggacatgggaggaaacctcatatccatctccccaaggagtctgagggtagggattttaagggttttggagtggaccaaagtgtggagattgttgaatggttgaaaagtgcacggtgaagtcttgggaaagggagatgaagaaactatattttcaaactgattcggttcttctgtgagggtcttcaaactggttaagtgtcagctctttctctgaaattcagaatctgcttaagcaattcttaaacaccttatgattctataatcagaaatcctatttataagaacaattagg

SEQ ID NO: 429202 - DNA, 590 bp, Homo sapiens
aaaaagaagatatatcaaataataatttaaacttgactgaataattattatgtattttcccagcaaagttaagtttctgaagtgagaatttattcatttattacaagtttcctatattttctgtgtacacagtggttgagagtcaggaaaaagatatcaggagaaaactaagttgttgggaaagatctgactacagaaaaaatgtttgccccaggcatttagaagcaataatatatggaagatattcttataattcccttaaaataggagtttgagactgaattagagaagtaatgacaaaataaatctttgacgtcacgttatccatcatctccataatttttcttaagaaactgctgattgcaattgtctctgttgactcaaggatkaaaagttctaacatttttcttgtgaagttatgttcgctatataaaattattaacttaattgtaaagctatcttcacactctttacgttaatcagtagagtcctatttatctcacaatcacctaatgcaaaaagaacaagttcttgtggggaaatattatttttcaactctaaataggatggaattaacttcaggagttatt

SEQ ID NO: 429203 - DNA, 610 bp, Homo sapiens
ggtaactatgtgagaggatagatatgttcatttgttccactatggtaactttttacaatctacatatatttcataacatcacattgtataccttaaatatacgtaataaaatttattttaaaacaaaggttttttttaaaaaattaaattttctcagaaaaagaaaaaaaacttgatragtatcacctacatgtaactgcctgatcaaagtacaaggatctttaaaagaaggcaagaagtctatcattggaaaataagaaattaacaatgtccagaattcagtcaaaaattactaggcaatcaaagaagcagaaaaaaacaaacttggattaggagaaatataattcaactgaaacaaatgcagaaataagataaaggaattaacatacaaaggcctaaaaaactatgatctagtttccagtccaatgtgtagagagattggattgtcaatttatacattcaaaaagagaaaagatgaacaagctaaaaatcaacaacgtttatagattcatcagagaattgagatcacaggataaaccacaatgtaacttgaaaactggagagagagtcatatcctatgaatcacagtttactaggagcagacactcta

SEQ ID NO: 429204 - DNA, 560 bp, Homo sapiens
gtacataatatatccaccaagatagatcatgttctgggccataaaataagtcaataatgtttttaaattgaaacaataccaacaagcatatcacatactaaacttgttttaaattaagacagcattgtttttgtgggctatgttctgtaccaacaataaaattaagttagaaatcaataacaatcaaatatctaggaaaactccaaacatttggaaattaaacaaaccatttcaaataattcatgggtcaaagaaggtattatagaaagaataaataaawgtattttgatattggcttcttttttctttcttcaactccaactcactgggcatgctctcatcatggggcctttgacatagctgttccttctgcctagaaaacccttccagcagacatccctatagctttgctcccttgcttccttaagggatttgctcagctctcacaccaatgaaacattctctggcaactctatttaaaacagcatctccagcatttcctatctcccttgccagccttattttactcctcagcacttatcactctctaacatattgta

SEQ ID NO: 429205 - DNA, 560 bp, Homo sapiens
gtacataatatatccaccaagatagatcatgttctgggccataaaataagtcaataatgtttttaaattgaaacaataccaacaagcatatcacatactaaacttgttttaaattaagacagcattgtttttgtgggctatgttctgtaccaacaataaaattaagttagaaatcaataacaatcaaatatctaggaaaactccaaacatttggaaattaaacaaaccatttcaaataattcatgggtcaaagaaggtattatagaaagaataaataaaagtattttgatattggcttcttttttctttcttcaactccaactcactgggcatgctctcatcatggggcctttgacatagctgttccttctgcctagaaaacccttccagcagacatccctatagctttgctcccttgcttccttaagggatttgctcarctctcacaccaatgaaacattctctggcaactctatttaaaacagcatctccagcatttcctatctcccttgccagccttattttactcctcagcacttatcactctctaacatattgta

SEQ ID NO: 429206 - DNA, 559 bp, Homo sapiens
caccaccaaaaattgacataatggggcaggcaatctgtattggtaactaggctcaacacttctacaattttcttgtaatctgatttctttcttctcttacctatgcgattgacatgaacatgcccctctttcatcctcttccaaccamttctccctcttttgctctttgagaagtagcattccttgttggagattttcataggaatgttctgtcaccagtctaaaatctggcattatttctgacagtaatttaaactggattcaacacaaacatgttagaggactcaagtaaattaatcatgttgtctatttcaataaaagagccaacatagccaagccagcataaacaggctataacagtaatggccaatttaaaggttcattaacaaataccagtggtagcactgtaattctcaagctctcatcactgaagtgttaaacaacaggcattgaagataccagaaagacaccacacaatactaaacagattgaagtggatccgattatttccttatcattataaacatccaaatccaaattcagttccagctcccctgca

SEQ ID NO: 429207 - DNA, 559 bp, Homo sapiens
caccaccaaaaattgacataatggggcaggcaatctgtattggtaactaggctcaacacttctacaattttcttgtaatctgatttctttcttctcttacctatgcgattgacatgaacatgcccctctttcatcctcttccaaccaattctccctcttttgctctttgagaagtagcattccttgttggagattttcataggaatgttctgtcaccagtctaaaatctggcattatttctgacagtaatttaaactggattcaacacaaacatgttagaggactcaagtaaattaatcatgttgtctatttcaataaaagagccaacatagccaagccagcataaacaggctataacagtaatggccaatttaaaggttcattaacaaataccagtggtagcactgtaattctcaagctctcatcactgaartgttaaacaacaggcattgaagataccagaaagacaccacacaatactaaacagattgaagtggatccgattatttccttatcattataaacatccaaatccaaattcagttccagctcccctgca

SEQ ID NO: 429208 - DNA, 664 bp, Homo sapiens
attagctaaattgtttattaatctatggagttttaaccatttgggtggtaaaactaatatccttaagaaaaatgtgagtaaagattattaaaaatacatggatgaagaaatacaaataacctataagcatggaaacaaatgttcacctttatccatccacaccttcatttgcaatttataaaaaatattatttcactccttttagaaatgaattttgagtgacagcactttgtgtcattgagggtgaaatgaaacwggtggaaagtcaggatggatggcatccaagaccagcggaatctttttgtttgcaaacactattcctacaatgagataatcatgtttattaacaattgtttgaggtgtggatatgtacaatattttggaaatcagttggcaatgtgctgtgacagtcaatacaataaaaagttctaaagaaatactgccaacagaaatcagacaacacaaacaaacgtgagtatggatactcatggattggaagaatcaatagtcttacaacggtcatactgcccaaagcaatttatagattcaatgttactcttaccaaactaccaatgacacttttcacagaattagaaaaaaacctttaaaattcgtatgaaaccaaaaaagaacctgaacagccaaagcaattctaagcaaaaag

SEQ ID NO: 429209 - DNA, 560 bp, Homo sapiens
accagcggaatctttttgtttgcaaacactattcctacaatgagataatcatgtttattaacaattgtttgaggtgtggatatgtacaatattttggaaatcagttggcaatgtgctgtgacagtcaatacaataaaaagttctaaagaaatactgccaacagaaatcagacaacacaaacaaacgtgagtatggatactcatggattggaagaatcaatagtcttacaacggtcatactgcccaaagcaatttatagattcaatgttactcttaccaaactaccaatgacacttttcacagaattagaaaaaaacctttaaaattcgtatgaaaccaaaaaagaacctgaacagccaaagcaattytaagcaaaaagaagcaagctggaggcattacactacccaactttaaaatatattacaaggctatagtagcccaaacagcatggcactggtacaaaagcagacacatggaccaatagaacaggttagagaatccagaaatataaccacacacctacaactatctgaccttcaacaaagttgacaataacaagaa

SEQ ID NO: 429210 - DNA, 498 bp, Homo sapiens
gcaacttgattctttctggatgctggacaaagacctgggtaccaagagggcactgagctggttaacacttaagctgtctgtggatggcaagctaaaagacacactgtaacacacaccaacttgtgctgtgggagtcacaggcattcccacccctagacactaccatggccacttgccctggcttttgcacctgcctgtctgcatgccctcccacctggaaaggggtttgacaccacacgtgatagccaaatagacaagccacacccctgctgcacatcctgcaaagggagtcagggaactctccagtttcctcagaatgtaaaytagttcagccactgtggaaagcagtttggagatttctcaaataacttaaaacagaacttccattcaacccagcaatcccattactgggtatatacccaaaggaatataaatcattctgtcatagacatatgcacacatatgttcattatagcactattcacaatagcaaagaca

SEQ ID NO: 429211 - DNA, 498 bp, Homo sapiens
gcaacttgattctttctggatgctggacaaagacctgggtaccaagagggcactgagctggttaacacttaagctgtctgtggatggcaagctaaaagacacactgtaacacacaccaacttgtgctgtgggagtcacaggcattcccacccctagacactaccatggccacttgccctggcttttgcacctgcctgtctgcatgccctcccacctggaaaggggtttgacaccacacgtgatagccaaatagacaagccacacccctgctgcacatcctgcaaagggagtcagggaactctccagtttcctcagaatgtaaattagttcagccactgtggaaagcagtttggagatttctcaaataacttaaaacagaayttccattcaacccagcaatcccattactgggtatatacccaaaggaatataaatcattctgtcatagacatatgcacacatatgttcattatagcactattcacaatagcaaagaca

SEQ ID NO: 429212 - DNA, 487 bp, Homo sapiens
catactttctattcctcaaatctaaatcctgagaagaggggtcaggctttagagaaagttatggcacaaattatgaataatatcwgtaaagtagatttgggaaaaagaacacataagcttgacccagtagatctgtttattctattgacttagaaaatggaaatctcatgagacaggatggatgggacctagatttagattgttccagaaactttaccatgcccacatgattggtagccaaactcaataggaaccataacaatagcaacccacctttccagggtgggtgggaaaactagataaataggtgagcatatgagtaactagctggcaaggggcaagaacattcattatttaacatatgccactctaaagattggcaagatgtggtggtagaatggctaatctccaaaaactaactagcaagatgccaaatgcaccctgacagatatattctgacaaataagatatctcaatatgaagtatt

SEQ ID NO: 429213 - DNA, 607 bp, Homo sapiens
attgtgggtagaccttatcatcatatccatgtattgactaggagaggctgtaaaatatatcttaacttcaaagattcattgtaagtcataamatagaccccaaggttatttgagttctcaaagccaactgttacagtcaaaatataaggtgatatatctgtttatactgaatcagtaagtcacggatacccaaggataattctccagatacagtataagaaatattacattatattaaccaatgaaatgattgggaaaaatttagaggggagcaatatgttatactaatatgcaatggtaccaaaatatgttatgatcacgaaagagcagtttgttggaataaaagctaaatttaaagatcaaacatttaaagtctagaaagacccactagttaaaatttttaaaccttatttctgtgtatcaaattataatactcactgaacagatggaggcaggaaactttagatctgtgctcacatctatggaaaaccaatataaagcaggagactcgagtcaagtgatcgcttaaaggatattggcatataagtagcacaaaaacatacattatgcttccaatttagtgacatttttacatttacagaataaa

SEQ ID NO: 429214 - DNA, 559 bp, Homo sapiens
acagtataagaaatattacattatattaaccaatgaaatgattgggaaaaatttagaggggagcaatatgttatactaatatgcaatggtaccaaaatatgttatgatcacgaaagagcagtttgttggaataaaagctaaatttaaagatcaaacatttaaagtctagaaagacccactagttaaaatttttaaaccttatttctgtgtatcaaatkataatactcactgaacagatggaggcaggaaactttagatctgtgctcacatctatggaaaaccaatataaagcaggagactcgagtcaagtgatcgcttaaaggatattggcatataagtagcacaaaaacatacattatgcttccaatttagtgacatttttacatttacagaataaattactgaaaagcaccttatattactttgataatcaaattattatagaatacatatttagacaacgttttttatcattttaaaactcccttttttaatattatcaaaatgctaaaaagcttgcaaaatcccacaattaactaaatatagaaaggagacagaa

SEQ ID NO: 429215 - DNA, 588 bp, Homo sapiens
tgacagtatacctgaagtactattggcaatagttgactaaattaaaatgcatatgcaattaaaaaatatattccatatatttacttctatatgtatacacattgcatgcataaaaaatttcacaagagtattacatttaaattgagatcaaaataaagttttatcctcagagaagtgattacaaagtatgatttttcattaaaagtataatatatagatatttacgtgattagggttcaattatttgtgctctgacacagaaaattctcagtaagcacatcactgaatttaaaaaaataagctatatgaaggttgcacgtctgtaagggacatgagatccatggacctgctccccagggaaataagcataactgttaaaaattcttaaaagaaaacacagaaattaaagtcactagaaatagtcctagaaygtgcagaaagtaaagaagcatgtattcaattaaatttgctaaaacttgataagagcagcaagtctatggcatttgagtcacactcttcttccttctcaagttcagcatgatggaaactccgctggaggtgagagcagccaagaccacatggctcctt

SEQ ID NO: 429216 - DNA, 503 bp, Homo sapiens
gacctaggctgataacggtttctcagatatgacactgaaagcacatgtaacaaaggaaaaaacatacctaagttggactttgccaaaataaactcttttgtacttcaaagaataccatcaagaaagtaaaatgtcattatttgttcctgtttatggctgagtagtattccatggtgtgtgtgtgtgtgtgtatatatatatatatatatatatatatatatatatatatatatatrtatatgtatatacatacggtgtgtgtgtgtatatatatatacacatatatacatatacacgtatatgtatatatatatttttttaattcactctttagttgatgggcatttgggctggttccctatttttgcaattgcaattgtactgctataaacatacgtgtgcagcatgtgcaactatcttttttgtacaatgacttcttttcagcaacctggatagaatcatatactattattccatgtgaagtaactcaggaatggaaaacc

SEQ ID NO: 429217 - DNA, 503 bp, Homo sapiens
gacctaggctgataacggtttctcagatatgacactgaaagcacatgtaacaaaggaaaaaacatacctaagttggactttgccaaaataaactcttttgtacttcaaagaataccatcaagaaagtaaaatgtcattatttgttcctgtttatggctgagtagtattccatggtgtgtgtgtgtgtgtgtatatatatatatatatatatatatatatatatatatatatatatgtatatgtatatacatacggtgtgtgtgtgtatatatatatacacatatatacatatacacgtatatgtatatatatatttttttaattcactctttagttgatgggcatttgggctggttccmtatttttgcaattgcaattgtactgctataaacatacgtgtgcagcatgtgcaactatcttttttgtacaatgacttcttttcagcaacctggatagaatcatatactattattccatgtgaagtaactcaggaatggaaaacc

SEQ ID NO: 429218 - DNA, 546 bp, Homo sapiens
gcatacatacccatacttatattcctgaaggtaacaccaagatggatttcccggtcatgggaccatcctcatttcagtccatttaatttttaaaattcatcaactcagtgcaatatcttatccaacaaccaataaatacggaaaacaatttatctaagtgtaagcaatggcatttaaagccataaataatttacattaaagcaagcacaaatattgaatagaatgcaaaatttgaaagaatcattaagataaaatacgggagctattatctttgaagtgtcaaccaaaacacccaggacatatttccctcttattttagggctactaggaagaaaagcctgtgaagtttggcattatttaaccaactgtgatgcttgtgttttccrtgtatttctagtaagctagccacagaagtggccaacatattctcagtcactttccgctgtgaaaagtggttttcaaatgagatgttgatgtttagaaaaatcaatataaatgaaagatttgatcattttaatcaacaaggttttctccacaagatgagac

SEQ ID NO: 429219 - DNA, 674 bp, Homo sapiens
gtaggtgtgaatgggatggaaagaatgggataacagaaaccttataccacaaaagagggaagaatgacactttgctgagcattttttgagctctaattcttagagctataataatatttcacatgccttcaaacaaataaataattaaaatttaccaggatgtgggggaatggaatacaaatggtaacaaatgaactcaactcttttacaaatgataattacaaccacacaaatagaattggggcagaaaagagctaarcaaagtaacctaaaacaaaaaaagcaagtttttgactgtatccttaaggctaaagacaaaaagaactatgcacaaatattttactatagtttacaaatgtgttttcacaagggtatgagtttgcaaatatgaaattattttatgtgtatgctaggattgaacaaaatgtaaatatactgtggataatgggagccaggttttccaccatcagagcatggagttacaaataagggaaagagaaaggctataatgcatcctgtagtgttggactggaatcaaaagtattatatgaaatcattgtttttagtatatgtgcagatggaaaattgtagaaataaatatagatgtgtataaatgtgtgagtatacatacatacattttctagctcttctaacaaaagggcctagagacacta

SEQ ID NO: 429220 - DNA, 550 bp, Homo sapiens
ttaatagaaatcaggtttaccaaatcttttcctcaatgtgttattaaaaaggaagatgcacagctttttagttatttagtcacctctatatgcaaagcatttgaaaagtaactctgaatgttatttgatcaatggaaagcagtgaatcatcacatttcaataatgccgtagtatgggaatgataaatgagcaagtgattggtgttggggtaatgaaaggaaatgcaagcaatgcagatgttgctcagctccaatggtaaggcacattagtcaggaaattcccactcagagctttatttatttccctttcctccactcaccatctatcttatctttttgcttaattayagcccaaagtatttttaggaggttaagctcaagtgttgcagaaatataactggtaactttttctcttgttttctgtgttttcttttacgttttatataagtgtgttcctattttcaatgctgttttatgcttagttcttatatgaaatttttattttatttgaatgtaaaacttctttacatttagcattgagtattgtacag

SEQ ID NO: 429221 - DNA, 533 bp, Homo sapiens
aacatgtaaaatatatgatatgctagatgacgtgttaagatgaaaaataaagagagaggaaaatttgagggttataaatttattttattttattcagacagtgtctcactctgtcacccaagctggagagcagtggcacaatcatggctcatggcagccttgacctcctgggcttaggtgaacctcacatctcagcctcccaagctgggagtacaggcgtgtaccaccacgtctggctagtttttttgcattttttgtagagattgggttttatcatgttgcccatgctggtctcaaactcctggactcaagcaatctacccgcctctgcctcccaaagtgctaggattataggcatgagccactgcactcgactagggggttacaattttaaattaggcagccagagaaagtctcactgagtcacatcaagatctggatgtcagggagcaatctgggaattcagaggaaggtagttaaaaacagagggacagcaagaayaaagcacagattaagggagggaaagagtagcag

SEQ ID NO: 429222 - DNA, 578 bp, Homo sapiens
ccccacttcttattactattgcattcaagattgtttcaacatgaattttggagcaaacaagtactttccaaactgttttcttaccaaaatgcttatttgtcttgcagcatcacatttcaacatagaaagtagatagaaatgtgacatatatatgaagaaatggtcctaccccaaaccctgtaagggtttgtccccagtgtccaatgtcttctatgatgtaagagaataaacagggccagctgttggtcggaatgaactcataaacatgtctcaatatccaccagtagcattttttattgaactgctacaaatytccagtatgattgacttttcttacctgttgttattttttgtattttatgtgccattattaattattcaaaattggtatcttggttatgccactgtttgacagaacatgcacacctccccttaaaaacatataaaagatgagaaactgcacccttgtgaaatttagaatctctttgagactttgaggtttagtgtctaataatcacttggtgattgaatttttatgtttttgacatttttctaaatgaattcttctctgatgctaa

SEQ ID NO: 429223 - DNA, 597 bp, Homo sapiens
tagtggcaggacacaaaatatcaaaattccatattaagttctgctattttttgctcacggttttatgttttgcacataaaaacagtccctctgttgcctcagaagcctgaagaagcaagagacaactttcccctctaggttttgtcattaccctagctaaagcaaatgtctccacttgagaatgctactattctttgacatttaatatagaagaaaactttaatagaatagacatgtataaatatgtttaggaaatataagcatttcaaatattgaattggttacttaaagccataagggtaaaatcattgctaatagaggaggaaaaaaatgatttatatattaatacatctttgctcagaatgttggcatccttgttttccaggatgttcattmatatcctccatttattttagttttaccagcccttcacattttctgtgaggccttggtgttttgtgaaatgccagttaccggtgacctcaactgcaatagcacttatttcatgtgcttcttttgccgtattctatccctttggtgatgttatgacctacattattttagttacattattatttctttttcataatagttaat

SEQ ID NO: 429224 - DNA, 597 bp, Homo sapiens
tagtggcaggacacaaaatatcaaaattccatattaagttctgctattttttgctcacggttttatgttttgcacataaaaacagtccctctgttgcctcagaagcctgaagaagcaagagacaactttcccctctaggttttgtcattaccctagctaaagcaaatgtctccacttgagaatgctactattctttgacatttaatatagaagaaaactttaatagaatagacatgtataaatatgtttaggaaatataagcatttcaaatattgaattggttacttaaagccataagggtaaaatcattgctaatagaggaggaaaaaaatgatttatatattaatacatctttgctcagaatgttggcatccttgttttccaggatgttcattamtatcctccatttattttagttttaccagcccttcacattttctgtgaggccttggtgttttgtgaaatgccagttaccggtgacctcaactgcaatagcacttatttcatgtgcttcttttgccgtattctatccctttggtgatgttatgacctacattattttagttacattattatttctttttcataatagttaat

SEQ ID NO: 429225 - DNA, 520 bp, Homo sapiens
ttcctttaatcttttgaaattgctgtcttttggatgggtctttttgcttttatattctttgatgcccttgaggttttggatgtggcataaattaggtttaatcgattggcttcgtttctggatactttcaggggtccaaggctcagctcagcattcctgggctatgtgatctaatcctcaggggctgggacctgcggctttgctctctggctcctcaaggttaagcacctgctgtgctggaggggccgaggtgttcccagttcactggcagcaacatccccaacaaaggctgtcagcaaaagtgttccagtggggcagtggtgggaccccacgtacawgtacaccagcacatgagatccccagggaaggcagaggtcctcatgcacatggacactggtggggcagtggtgggtcctcctgcatgtgcttactggcaaggtggcagagtgaggttcgagtaggtgcattgttggtgggggtccagctgcaaaagcactccaatggttagacgggctctgct

SEQ ID NO: 429226 - DNA, 478 bp, Homo sapiens
agaggcagaaaattaattaacaaagatattcaggacctgaagtcaacactgtgccaaatgaatgtaatagatatctacgtaactctccacctgaaaacaacagagtgtacattcttctcatctgtacatggcacatacactaaaatcaaccacacaatcagagattaagaaatcctcagaaaatggaaaataactgaaatcataccaaccgctctcttggaccacagcacaataaaaatagaactcaagactaagaaaatcactcaaaaccatacaattaaatagaaattagagagcctgctcctgaatgacttttgggtaaataatgaaattaaggcagaagtcaagaaattctttgaaactaatgaaaacaaagataaaacataccaggatctctacacagctaaggtagtgttaggaggaaaatttatagcagtaaatgyccatattaaaaagttagaaagatctcaaattaaca

SEQ ID NO: 429227 - DNA, 495 bp, Homo sapiens
tctggttacttgttcaacacagctggaaccttccctaccaaggcaactgttacttgggttcagggttaggggaaggtcatgatagcctttaaaggatgtgagaacaaacagccatggtactgacaagtcattggctctgaattttaccccgcagaatcacaggaatgttccctttgccaggtcgagccctgggtagttgatatctcccagtgggtggcagttctgctgctgcagcaattctcccactccccatttcctgcatagcctctgtattgctgctgcagcatctgcatgggtcatcgcctctctcacggccgccagcactgacctggcaagacacagggctgcccacactgatcttgttgctctrattgagctgccagtcatgctttgagtgaaatgcggaaagccgtggtccccacagaagttataaattttaattctacttggacttgagaaagagtagccttgattgtcattatcccattttatgga

SEQ ID NO: 429228 - DNA, 630 bp, Homo sapiens
acattcatgctatatattatacatttatatccacactttagaaattatgagttcacatcagcatgtccaattccaattcaccaccacagagtacttcattgcctttgctcctccacatttttatttctcttctcagtggcaaggctgaatcccaacaacatcaacacatgtatttattggctcattcatttgttcatatatttctatccaaaattgtttycaaattgatttacttatcataaaattgctttaattagaaaaaatgagatacttcttctcaagtacagcttcactcctttcttacacaatagtcttatttccatagtcataggagacacaaaaaggcttaaattcaattgagttccaaaacttatactcttcttcttaacaatattgttgtataatcttagctctggaatatttattttattaccagggagggaattgggaatgaagatcactctgtctcctatgctaggtatgaacgttaattttgaaggtgagtttggagttggtttgaaaataatgggttgtagagaaggcttcctgtacccttcaagagcccagcagtgaggtcttgagattgcacacaccggtttataattttataagcacttaaaatttttaatt

SEQ ID NO: 429229 - DNA, 525 bp, Homo sapiens
ctctaacctccgccccctgggttcaagcgattctcctgcctcagcctcccaagtagctgatatcacaggcacccatsaccatgtccagctaatttctttttatttttttgtagagacggggttttgccatgatggccaggctggtctcgaactcttgacctcaggtgatccacccgccttggcctcccaacgaaacttctttcaaaattggagtcagtcctctcaaatgctgccactgcattatcaactaagtttatgtaatatattgtcatttcaacaatgtttatagcatcttcaccaggggtagattctatctcaagaaaccactttctttgctcatttgtaagaagcacctcctcacctgttcaagctttatcattagagagcagcaactcagtcacatctttgggctccacttctaattgtagttctcatgctgtttccaccacatcagcagttaattccaccactgaagtattgaaccccctcaaagttatccaggaggtttggaattaacttcttcca

SEQ ID NO: 429230 - DNA, 462 bp, Homo sapiens
tacctgttgtctttgttttagcttgttcaggctgctataacaaaatatcacactagycatttccacaactggctggcttataaacaacagaaaattattgcttacagctctagaggctggggaaatccaagatcaagacatcgcaggttcagtgtctggtgagggcccacttcctggttgatagatggctttctgttttctgtgtcgtcacatggcagaagggatggggcagtttttggggcctcttttataaggacactaatcccattcacgagtgctccaccctcatgacttaatcacttcccaaaggtcccacctccaaacaccatcacattaggaattaggtttcaacatatgaatttgggggtggggacatacattcagtccacagcaccttgcatcgttcttgacacacatggatgttcaatatgtatttgttgaatacatgagaataatatgtat

SEQ ID NO: 429231 - DNA, 560 bp, Homo sapiens
aaaaggcttcttcagttaagcagatatatatttaagtccataaagaacatatatacaaagtgccaggccctgtaccagagactagagcaccagggacaaacaggacagacagcttttgatctctacctgagggctgcacaaagtgctctgggtcagcactgggacttagccatctccttctgtattagtccattttcacactgrtgataaagacatacccaagactgggcaatttacaaaagaaaaaggtttaattggagttacagttccatgtggctggggaagcctcacaatcatggcagaaggcaaggaggagcaagtcacatcttacatggatggcagcaaccaaaaagagcttgtgcaggaaaacgcccccttataataaccatcagatcttgtgatacttactgtcatgagaacagcatgaaaaagaactgctcccatgattcaattacctcccatcaggtccctcccacaacacgtgtgaattcaagatgagatttgagtgggaatacagccaaaccatatctcctttttttggaacaagtcctttccttcag

SEQ ID NO: 429232 - DNA, 550 bp, Homo sapiens
cagttagttgcctctcctgagccatggtttaaatttaggctgtggtttgaaacaacaacaaaaaacagctaaagaaaccaaggaggaagttttggatctttctcaaagcaacatggaaaagaagggagagatggaaaacaaaatattttggaagggagtggaaaagatgacctactcatggcactaaaggcatacagggcaaaggaatgtgtatgtctagaaccaaagagcaggrctgcttctctggcgtctccaggggaaaggaaagatgttatgcaaacctgtatgaaaggggaatcacttcctcacatggctcaggctgttgtttaccagagtaacattcgggctccaactgtcctttcttatagagaaaggctgtctcctgctgtttgtggatccaaggcctgctgaaagctgtttagaagtgcataccactccatgtgcagctccttcattcctttgctgtgtttgcatgcctcaccgagcatattcactgtcctatgccttgcacaaaaccctcacgttcctttttggaatgcctctgtgtctc

SEQ ID NO: 429233 - DNA, 581 bp, Homo sapiens
tacaatcatgtcatctgcaaacagagacaatttgacttcctcttttcctaattggataccctttatttctttctcttgcctgattgctgtggctggaactttcaacactatgttgaataggagtggtgagagaaggcatccttgtcttgagctggttttcaaagggaatgcttccagtttttgcccattcattatgatattgccgtgggcatttctaggtgtcttaaaccayttgcagctttaaaaaattgacttatcagttatacatgcaaactggttgttgtttatgtatatgaaagcaatcattttttgattgtttatttcgtacttccctacctttctagattttcttattgtttgtaatagttttctcattgggtctcttggattttcaggtatgttatcatattacctgaaaattgtggtaatccattcccgccttttcacttttcaggtctctagtttctttttcttatctaattgcaatggttagtttaataagctcctttagaagattctgcaaagactagccaatggaatgaaggttacagcaacagggtctagataaaataacccattta

SEQ ID NO: 429234 - DNA, 555 bp, Homo sapiens
aacctcccctactgttactctcctcacagcaccatcataatacatttgttatgattgatgagcctacattgactcatcatcacccaaagtccatggtttatattagaattcactgttggtattgctcattctgtgggtttttgacaactgtagaatgacatgtatctaccattttagtagcatatcggatagtttcattgtcctaaaaatctgctgtgctctgcctatttatctcttccttcctcctaacctgtgacaactgctgatcttgttactgtttccaaagttttgctctttccaaaatttcatatagttggaatcatacagtatatggtctttccagattagtttctttcacttagtaataawcatttaagttttctccatgtcttttcaaggcttgaaaactcaatctttttggtgcataatatgtcattgtctagatgtaccatcatttattgatctactcacatactaaaggacatcttggttgcttccagcttttgacaattatgaataaatctgttataatcatcttgtgcaggtttttgtatg

SEQ ID NO: 429235 - DNA, 555 bp, Homo sapiens
aacctcccctactgttactctcctcacagcaccatcataatacatttgttatgattgatgagcctacattgactcatcatcacccaaagtccatggtttatattagaattcactgttggtattgctcattctgtgggtttttgacaactgtagaatgacatgtatctaccattttagtagcatatcggatagtttcattgtcctaaaaatctgctgtgctctgcctatttatctcttccttcctcctaacctgtgacaactgctgatcttgttactgtttccaaagttttgctctttccaaaatttcatatagttggaatcatacagtatatggtctttccagattagtttctttcacttagtaataatcatttamgttttctccatgtcttttcaaggcttgaaaactcaatctttttggtgcataatatgtcattgtctagatgtaccatcatttattgatctactcacatactaaaggacatcttggttgcttccagcttttgacaattatgaataaatctgttataatcatcttgtgcaggtttttgtatg

SEQ ID NO: 429236 - DNA, 560 bp, Homo sapiens
gtgcaggtacatgtgcaagtttgtttgacttgtgwcatgggttttttttttgtacagattattttgtcatggaggtattaagcctagtacccattagttatttttcctgaacttttcccttctcccgtcctcctccctccaataggccccagtatgtgttgttcccctctaagtgtccacgtgttctcatcatttagcccccacttatatgtaagaacaccatggtatttggttttctgttgctgcatcagtttcataaggataatagcctccaacttcatcagtgtttctgtaaaaaacataatgttctttttatggctgcatagtattccatggtgtatatgtaccatatgttctttatccagtctgccattgataggcatttaggttgattccatgtctttggtattgtgaatagtgctgcaatgaacatacacattcatgggtctttataatataataatttcttttggggtgggtatgtgaccagtaataggattaccaagtcaaatggtatttctgaggaattgccacagtgctttccacaatagttgaagtaa

SEQ ID NO: 429237 - DNA, 560 bp, Homo sapiens
gtgcaggtacatgtgcaagtttgtttgacttgtgacatgggttttttttttgtacagattattttgtcatggaggtattaagcctagtacccattagttatttttcctgaacttttcccttctcccgtcctcctccctccaataggccccagtatgtgttgttcccctctaagtgtccacgtgttctcatcatttagcccccacttatatgtaagaacaccatggtatttggttttctgttgctgcatcagtttcataaggataatagcctccaacttcatcagtgtttctgtaaaaaacataatgttctttttatggctgcatagtattccatggtgtatatgtaccatatgttctttatccagtctgccattgataggcatttaggttgattccatgtctttggtattgtgaatagtgctgcaatgaacatacacattcatgggtctttataatataataatttsttttggggtgggtatgtgaccagtaataggattaccaagtcaaatggtatttctgaggaattgccacagtgctttccacaatagttgaagtaa

SEQ ID NO: 429238 - DNA, 594 bp, Homo sapiens
cgatgactataggatccatctttgttggcatgtgcctgcggcagttgcagcaaggtgctagtgggtgccaggctgccttccttcctatgggcattcaccacagtggtggaggcaacacagctcgggggagggcasggagacttgctggcaactgtgtgtgcagtggtgctggtggtagtgtttgccaaggggtggagcactggtgtgcagagatttggttgccttctctgtgctgtgcaagcaggagtggttgctcaggtttggggaggatctgctactctctgtgcctagattcactcccatggcagtgtgagcacaagggcaggatgctggtggggatggggctgcctggctgtatcccagccaaggctccgtctgcaatggtggtgtgcaggggaggggaacagatgaactgcactcctgcacgctggaagggcaaggaaagcaaaacctgtccatgtgaccatgtgctagcaaaatgatgtggggagatgccatgcgcctgggggaagctgcagtgcagggaagaattacgcaggctggtgtgtagccacaggggccaccttgctggagctctgtgctggtcaggcatag

SEQ ID NO: 429239 - DNA, 594 bp, Homo sapiens
cgatgactataggatccatctttgttggcatgtgcctgcggcagttgcagcaaggtgctagtgggtgccaggctgccttccttcctatgggcattcaccacagtggtggaggcaacacagctcgggggagggcacggagacttgctggcaactgtgtgtgcagtggtgctggtggtagtgtttgccaaggggtggagcactggtgkgcagagatttggttgccttctctgtgctgtgcaagcaggagtggttgctcaggtttggggaggatctgctactctctgtgcctagattcactcccatggcagtgtgagcacaagggcaggatgctggtggggatggggctgcctggctgtatcccagccaaggctccgtctgcaatggtggtgtgcaggggaggggaacagatgaactgcactcctgcacgctggaagggcaaggaaagcaaaacctgtccatgtgaccatgtgctagcaaaatgatgtggggagatgccatgcgcctgggggaagctgcagtgcagggaagaattacgcaggctggtgtgtagccacaggggccaccttgctggagctctgtgctggtcaggcatag

SEQ ID NO: 429240 - DNA, 558 bp, Homo sapiens
aggtggcaaagatgggattttaagtcaggtttgtttggctcagtgatgtgctaataaaggtttaacaaccagctttccaggaatcaaaagcccttctttgtagcatgtgccaataactatggtgtaaattttaagctaccaaggtaacatcggtgggtttgcaacattcctgaaatttaacatttggctacaaactgacttcataataccactggttagactgcaaatgtgggctatttccagcttagccaacgctggtagtcaggttcctgtcttagtgacttaggatcctagcaattgctgcagcacagtcatccactataacctttgactgctgataatctgtgtattccagactgtkttgcagctggtcacatgactgacaagtccattcatcaggaatgttcttccttcacccgaggccagccatccacttcagcttttagacatgaattcagcagaacagaggtttttaaagtaaatgctttaagatatgctagtcttctgatttcccccaaccctaaaaaataattggacaaaagcaataccctgttgggt

SEQ ID NO: 429241 - DNA, 558 bp, Homo sapiens
aggtggcaaagatgggattttaagtcaggtttgtttggctcagtgatgtgctaataaaggtttaacaaccagctttccaggaatcaaaagcccttctttgtagcatgtgccaataactatggtgtaaattttaagctaccaaggtaacatcggtgggtttgcaacattcctgaaatttaacatttggctacaaactgacttcataataccactggttagactgcaaatgtgggctatttccagcttagccaacgctggtagtcaggttcctgtcttagtgacttaggatcctagcaattgctgcagcacagtcatccactataacctttgactgctgataatctgtgtattccagactgttttgcagctggtcacatgactgacaagtccattcatcaggaatgttcttccttcacccgaggccagccatccacttcagcttttagacatgaattmagcagaacagaggtttttaaagtaaatgctttaagatatgctagtcttctgatttcccccaaccctaaaaaataattggacaaaagcaataccctgttgggt

SEQ ID NO: 429242 - DNA, 648 bp, Homo sapiens
aaactgaaatcccaggcctcaggcatgggtgggtattgattctgaatttgcattatccttattgtgggggaaactccaagacttaaatttgttcctgactggagaaattaaccactcattaaggacactcctataactctagaggaatgaaattacagtaaaataaaacaaaaataataacaagaaattmttaatgaagaggcactgacgaagattccaaaccgtctaagataatgattcactataggaggagttagcacaccaaaacacaagataatttaaattccaagaacctgagattaaacaaactaaaagatgctataaaagtaaacaagaagaattagaaaccatcaggaaggaagaacataaattgtctaaaaaaaacaaaaaacaaaaaaacatttttttcccaggaaaaaacccaaaaacttttgtagaaataaaatatatagtaattgaaattggaaaaaaagaccaataaacaaaaacccacactcaaaggaaggagtgacacatcagtttagacccatccaaagagagaaattgactcctggaagagctgaggagtcacccagattaacttgaaggtagaaggatttaaaattatgaaagaaatgttaaatggttaaaagacagcaatagaatgat

SEQ ID NO: 429243 - DNA, 648 bp, Homo sapiens
aaactgaaatcccaggcctcaggcatgggtgggtattgattctgaatttgcattatccttattgtgggggaaactccaagacttaaatttgttcctgactggagaaattaaccactcattaaggacactcctataactctagaggaatgaaattacagtaaaataaaacaaaaataataacaagaaattcttaatgaagaggcactgaygaagattccaaaccgtctaagataatgattcactataggaggagttagcacaccaaaacacaagataatttaaattccaagaacctgagattaaacaaactaaaagatgctataaaagtaaacaagaagaattagaaaccatcaggaaggaagaacataaattgtctaaaaaaaacaaaaaacaaaaaaacatttttttcccaggaaaaaacccaaaaacttttgtagaaataaaatatatagtaattgaaattggaaaaaaagaccaataaacaaaaacccacactcaaaggaaggagtgacacatcagtttagacccatccaaagagagaaattgactcctggaagagctgaggagtcacccagattaacttgaaggtagaaggatttaaaattatgaaagaaatgttaaatggttaaaagacagcaatagaatgat

SEQ ID NO: 429244 - DNA, 648 bp, Homo sapiens
aaactgaaatcccaggcctcaggcatgggtgggtattgattctgaatttgcattatccttattgtgggggaaactccaagacttaaatttgttcctgactggagaaattaaccactcattaaggacactcctataactctagaggaatgaaattacagtaaaataaaacaaaaataataacaagaaattcttaatgaagaggcactgacgaagattccaaaccgtctaagataatgattcactataggaggagttagcacaccaaaacacaagataatttaaattccaagaacctgagattaaacaaactaaaagawgctataaaagtaaacaagaagaattagaaaccatcaggaaggaagaacataaattgtctaaaaaaaacaaaaaacaaaaaaacatttttttcccaggaaaaaacccaaaaacttttgtagaaataaaatatatagtaattgaaattggaaaaaaagaccaataaacaaaaacccacactcaaaggaaggagtgacacatcagtttagacccatccaaagagagaaattgactcctggaagagctgaggagtcacccagattaacttgaaggtagaaggatttaaaattatgaaagaaatgttaaatggttaaaagacagcaatagaatgat

SEQ ID NO: 429245 - DNA, 648 bp, Homo sapiens
aaactgaaatcccaggcctcaggcatgggtgggtattgattctgaatttgcattatccttattgtgggggaaactccaagacttaaatttgttcctgactggagaaattaaccactcattaaggacactcctataactctagaggaatgaaattacagtaaaataaaacaaaaataataacaagaaattcttaatgaagaggcactgacgaagattccaaaccgtctaagataatgattcactataggaggagttagcacaccaaaacacaagataatttaaattccaagaacctgagattaaacaaactaaaagatgctataaaagtaaacaagaagaattagaaaccatcaggaaggaagaacataaattgtytaaaaaaaacaaaaaacaaaaaaacatttttttcccaggaaaaaacccaaaaacttttgtagaaataaaatatatagtaattgaaattggaaaaaaagaccaataaacaaaaacccacactcaaaggaaggagtgacacatcagtttagacccatccaaagagagaaattgactcctggaagagctgaggagtcacccagattaacttgaaggtagaaggatttaaaattatgaaagaaatgttaaatggttaaaagacagcaatagaatgat

SEQ ID NO: 429246 - DNA, 591 bp, Homo sapiens
acacaccccttaaaagataaagattgtaagaatgtagtaaagaagaaaaaacaagtcctgcttcaaagaagtgctctataaatataaggaaaatgatacatcatataaacatttacagtgaagtttactmtatataatcttttatattaaaattagataaagttggttctttttactttattgtcatgtaaaatagatacagtaaaatttatccttttacaaaactgtcctatgttctgtgagttttgacaaatagctacagacctctaaccaccgtcacaatcgagatacagaacaagtccatcactcttcccctctgccaaatgtgtcatggtgcagtctctatttattcagcttgttttcactagccatggcaatcactgatctgttttatgtccatataattttggctttttcacaatgtcatacaaatggaatcatacaggatggagtctttgagtctgacttctttcacttgcataaagcacttgagattcacctatgccgttttgtgtattcgttcttcatttctttctttcttggcagtattctgttgcatagatataccagaatttgtttaaccagtaccta

SEQ ID NO: 429247 - DNA, 591 bp, Homo sapiens
acacaccccttaaaagataaagattgtaagaatgtagtaaagaagaaaaaacaagtcctgcttcaaagaagtgctctataaatataaggaaaatgatacatcatataaacatttacagtgaagtttactctatrtaatcttttatattaaaattagataaagttggttctttttactttattgtcatgtaaaatagatacagtaaaatttatccttttacaaaactgtcctatgttctgtgagttttgacaaatagctacagacctctaaccaccgtcacaatcgagatacagaacaagtccatcactcttcccctctgccaaatgtgtcatggtgcagtctctatttattcagcttgttttcactagccatggcaatcactgatctgttttatgtccatataattttggctttttcacaatgtcatacaaatggaatcatacaggatggagtctttgagtctgacttctttcacttgcataaagcacttgagattcacctatgccgttttgtgtattcgttcttcatttctttctttcttggcagtattctgttgcatagatataccagaatttgtttaaccagtaccta

SEQ ID NO: 429248 - DNA, 586 bp, Homo sapiens
ctaactttcctaatcttttcatgtacttatttgccatacgtatcttttttggttaaatgtctgttcatatgttttgcctgccaatttcttttcttgttagtgagttttgagagttccttatatattctacatacaagtcttttattagatatatgatctgcaaatgttttcgcccactttgtggcttctctattctrttctcttacaagtatttttcaaacagcagaaattcttaattaaatttatttactttttcttttataactgtgcttggttgtcacgtctaagagattgttgcgagcccccaataagcaaagattattttcccaatttttgctagatgctttatggtttttgattagtgaagatatgattggaggagaaaattcaggggctttgaaaatactatcacggttctatgttttttaacctgtgtggtatttacatgggtgcttgctttatttttttttaaaatgctatatatctgtacatccctgggtatgtttacaataaaaaattagaagaagagtatgacaaaaatttgacatccattcatgtcgtgggaaaaataagctgtaaatatcat

SEQ ID NO: 429249 - DNA, 586 bp, Homo sapiens
ctaactttcctaatcttttcatgtacttatttgccatacgtatcttttttggttaaatgtctgttcatatgttttgcctgccaatttcttttcttgttagtgagttttgagagttccttatatattctacatacaagtcttttattagatatatgatctgcaaatgttttcgcccactttgtggcttctctattctattctcttacaagtatttttcaaacagcagaaattcttaattaaatttatttactttttcttttataactgtgcttggttgtcacgtctaagagattgttgcsagcccccaataagcaaagattattttcccaatttttgctagatgctttatggtttttgattagtgaagatatgattggaggagaaaattcaggggctttgaaaatactatcacggttctatgttttttaacctgtgtggtatttacatgggtgcttgctttatttttttttaaaatgctatatatctgtacatccctgggtatgtttacaataaaaaattagaagaagagtatgacaaaaatttgacatccattcatgtcgtgggaaaaataagctgtaaatatcat

SEQ ID NO: 429250 - DNA, 586 bp, Homo sapiens
ctaactttcctaatcttttcatgtacttatttgccatacgtatcttttttggttaaatgtctgttcatatgttttgcctgccaatttcttttcttgttagtgagttttgagagttccttatatattctacatacaagtcttttattagatatatgatctgcaaatgttttcgcccactttgtggcttctctattctattctcttacaagtatttttcaaacagcagaaattcttaattaaatttatttactttttcttttataactgtgcttggttgtcacgtctaagagattgttgcgagcccccaataagcaaagattattttcccaatttttgctagatgctttatggtttttgattagtgaagatatgattggaggagaaaattcaggggctttgaaaatactatcacggttctatgttttttaacctgtgtggtatttacatgggtgcttgctttatttttttttwaaatgctatatatctgtacatccctgggtatgtttacaataaaaaattagaagaagagtatgacaaaaatttgacatccattcatgtcgtgggaaaaataagctgtaaatatcat

SEQ ID NO: 429251 - DNA, 586 bp, Homo sapiens
ctaactttcctaatcttttcatgtacttatttgccatacgtatcttttttggttaaatgtctgttcatatgttttgcctgccaatttcttttcttgttagtgagttttgagagttccttatatattctacatacaagtcttttattagatatatgatctgcaaatgttttcgcccactttgtggcttctctattctattctcttacaagtatttttcaaacagcagaaattcttaattaaatttatttactttttcttttataactgtgcttggttgtcacgtctaagagattgttgcgagcccccaataagcaaagattattttcccaatttttgctagatgctttatggtttttgattagtgaagatatgattggaggagaaaattcaggggctttgaaaatactatcacggttctatgttttttaacctgtgtggtatttacatgggtgcttgctttatttttttttaaaatgctatatatctgtacatcyctgggtatgtttacaataaaaaattagaagaagagtatgacaaaaatttgacatccattcatgtcgtgggaaaaataagctgtaaatatcat

SEQ ID NO: 429252 - DNA, 600 bp, Homo sapiens
gacctattactgtttttcctcatccattcaatttacagcaaatgtatgaataacgtacttttattattaatagtaaatttgacgtttctttcaggagttaatcttattcatgttttagacttcttaagggtttatgcttatgggttttaaatcatactccaaatcccatgaaatacacataatttcagatctatttcatgttgtgaataaagggacatattctttcctaccagcttgtctccaaaggcatggcattcttctgctttacttagtgtattgatccacagccagcaggaagagaayatagcttagccctaggcagctgaaggttgtgctctcttgtttattggtttgtttttcaccctattcctccaacttccttcaaggccccttagaactttttataattttcttacatattaaatagcatatgccagtctgaggaagtcactgtgcaattgtttttaaaacttactctgtcctgttcagattggcttttagaagcgcttttgactttttttttttttttttttttaacgttgaccgagttcaaattgtaaaaaggagagtctggtttagatttttgaacaatcatttcag

SEQ ID NO: 429253 - DNA, 600 bp, Homo sapiens
gacctattactgtttttcctcatccattcaatttacagcaaatgtatgaataacgtacttttattattaatagtaaatttgacgtttctttcaggagttaatcttattcatgttttagacttcttaagggtttatgcttatgggttttaaatcatactccaaatcccatgaaatacacataatttcagatctatttcatgttgtgaataaagggacatattctttcctaccagcttgtctccaaaggcatggcattcttctgctttacttagtgtattgatccacagccagcaggaagagaacatagcttagccctaggcagctgaaggttgtgctctcttgtttattggtttgtttttcaccctattcctccmacttccttcaaggccccttagaactttttataattttcttacatattaaatagcatatgccagtctgaggaagtcactgtgcaattgtttttaaaacttactctgtcctgttcagattggcttttagaagcgcttttgactttttttttttttttttttttaacgttgaccgagttcaaattgtaaaaaggagagtctggtttagatttttgaacaatcatttcag

SEQ ID NO: 429254 - DNA, 600 bp, Homo sapiens
gacctattactgtttttcctcatccattcaatttacagcaaatgtatgaataacgtacttttattattaatagtaaatttgacgtttctttcaggagttaatcttattcatgttttagacttcttaagggtttatgcttatgggttttaaatcatactccaaatcccatgaaatacacataatttcagatctatttcatgttgtgaataaagggacatattctttcctaccagcttgtctccaaaggcatggcattcttctgctttacttagtgtattgatccacagccagcaggaagagaacatagcttagccctaggcagctgaaggttgtgctctcttgtttattggtttgtttttcaccctattcctccaacttccttcaaggccccttagaactttttmtaattttcttacatattaaatagcatatgccagtctgaggaagtcactgtgcaattgtttttaaaacttactctgtcctgttcagattggcttttagaagcgcttttgactttttttttttttttttttttaacgttgaccgagttcaaattgtaaaaaggagagtctggtttagatttttgaacaatcatttcag

SEQ ID NO: 429255 - DNA, 600 bp, Homo sapiens
gacctattactgtttttcctcatccattcaatttacagcaaatgtatgaataacgtacttttattattaatagtaaatttgacgtttctttcaggagttaatcttattcatgttttagacttcttaagggtttatgcttatgggttttaaatcatactccaaatcccatgaaatacacataatttcagatctatttcatgttgtgaataaagggacatattctttcctaccagcttgtctccaaaggcatggcattcttctgctttacttagtgtattgatccacagccagcaggaagagaacatagcttagccctaggcagctgaaggttgtgctctcttgtttattggtttgtttttcaccctattcctccaacttccttcaaggccccttagaactttttataattttcttacatattaaatagcatatgccagtctgaggaagtcactgtgcaattgtttttaaaacttactctgtcctgttcagattggcttttagaagcgcttttgactttttttttttttttttttttaacgttgaccgarttcaaattgtaaaaaggagagtctggtttagatttttgaacaatcatttcag

SEQ ID NO: 429256 - DNA, 435 bp, Homo sapiens
agactttacttgctttatgaactaagttcatttctgtccactyacgcttttggcatctgatcctgtttgtgtttctggtttgagtttttaaactttcttctgggttttaaaagttcattataaccaaacttactacggacaaaacagtaatactttgtggtagaagatatgaagattcactataaactattcccaagtgtaaggccataggaaaaaaaaaacctaattctcactaccattcccaacagtcaccatacatatccatgctaaattataattacaatttttgaccccaaagttgtggcatcctagttttagtagattgagctctttctggtttgtgccgagcatctggcttgtagatgaactttgtcatttctgtattttctaaaagcctgtaaaaacaaacatgctatttccctcattgcagtaatg

SEQ ID NO: 429257 - DNA, 534 bp, Homo sapiens
tatcaaacacaaattcaccaggtgcctgcccccaaagttgacctggcagaacacagagaaagaaatattgtaatacgatgtcttctctttgttctatccatttcaataaattataatgtgtagatactatccatcccccttattactacttaaaattttcctgatatctgactttaccaataacaccaacattttctgccaaaagactttctgattatcagtttatctggaaataacatatcagaatgtatcctcttttgtttgtgaaaattcctcattatagtaagatgatgttataggcattatctaggtctggtttgagcgtctgctaatgttaattccaaattattttattttgtattgattacaaacaaaaaagagtgtaatgttttttctggttttatacataatattttggtaamtttcgtttaaccatatacttaatattgattgaatagaagaataagacagttcttttctatctctccacttctatacatgctgtcagtagacagggaggaagcttctattcta

SEQ ID NO: 429258 - DNA, 564 bp, Homo sapiens
attttcatcttattgctttcttagtgaccacacccatctcattttcttacctggctcagtaccaggcccagagggagaggttttaaatttttattttttttaattgaaaacggatgctgcaccttgtttttcaagcctgcatttttcatcagaaagaaaaaraaaagaacacctcgccaagtattagtttgttacctatgcaaccacataaaacctaggaatcaaaacttggcattcagctttatagacagtcacactggaaaaatcaagaaagtcccaaataagtttgttgtcttcccaggacatctcatttcaaattgtgtgtctgattctctcatccatcttctctacagagtttcttttggcgttatatttcctgtattgtcagaaacgaagctacatttaaaaggttaaatcaaataaacccagctacaaaagggtttataaaataatcatagttgtgaacagcaaggaaagaggacaaccactaaaaccataaagggaatccttcatggatggccgtgctttaaagttcacatgagctatgtaacattagatgctttt

SEQ ID NO: 429259 - DNA, 564 bp, Homo sapiens
attttcatcttattgctttcttagtgaccacacccatctcattttcttacctggctcagtaccaggcccagagggagaggttttaaatttttattttttttaattgaaaacggatgctgcaccttgtttttcaagcctgcatttttcatcagaaagaaaaaaaaaagaacacctcgccaagtattagtttgttacctatgcaaccacataaaacctaggaatcaaaacttggcattcagctttatagayagtcacactggaaaaatcaagaaagtcccaaataagtttgttgtcttcccaggacatctcatttcaaattgtgtgtctgattctctcatccatcttctctacagagtttcttttggcgttatatttcctgtattgtcagaaacgaagctacatttaaaaggttaaatcaaataaacccagctacaaaagggtttataaaataatcatagttgtgaacagcaaggaaagaggacaaccactaaaaccataaagggaatccttcatggatggccgtgctttaaagttcacatgagctatgtaacattagatgctttt

SEQ ID NO: 429260 - DNA, 564 bp, Homo sapiens
attttcatcttattgctttcttagtgaccacacccatctcattttcttacctggctcagtaccaggcccagagggagaggttttaaatttttattttttttaattgaaaacggatgctgcaccttgtttttcaagcctgcatttttcatcagaaagaaaaaaaaaagaacacctcgccaagtattagtttgttacctatgcaaccacataaaacctaggaatcaaaacttggcattcagctttatagacagtcacactggaaaaatcaagaaagtcccaaataagtttgttgtcttcccaggacatctcatttcaaattgtgtgtctgattctctcatccatcttctctacagagtttcttttggcgttatatttcctgtattgtcagaaacgaagctacatttaaaaggttaaatcaaataaacccagctacaaaagggyttataaaataatcatagttgtgaacagcaaggaaagaggacaaccactaaaaccataaagggaatccttcatggatggccgtgctttaaagttcacatgagctatgtaacattagatgctttt

SEQ ID NO: 429261 - DNA, 499 bp, Homo sapiens
gggtttaaacatgagtttgtgggggagggggcgcattcagaccatagcatattgggtaaacaaagtcacttttctatagtacagtacgtcttagaaactttaacattttaatattcattatggatctttaagaagaggatatactatgkaagcattactaaaatgtattttaccaaagaaatatttgtttcaaagagcgtctcctataaatggtggaacacactgtggggaactctggtttggacataagagttttaaaatctaaattcttagcctggatggcttgtacttccacagcgtatagtcattgatccttttgttaatccctgtaacgcttggacacaaatagtggcagctatagaaaggcagagctaagaaaggggctgagcaaaggaaacgtttttagatgaccaagatggggaagttaggtctttgtgcaggaagtcatagatattttggaagcccgagccagagacacacatgggaaactgcaatcata

SEQ ID NO: 429262 - DNA, 618 bp, Homo sapiens
gcgtatagtcattgatccttttgttaatccctgtaacgcttggrcacaaatagtggcagctatagaaaggcagagctaagaaaggggctgagcaaaggaaacgtttttagatgaccaagatggggaagttaggtctttgtgcaggaagtcatagatattttggaagcccgagccagagacacacatgggaaactgcaatcatatctgatagataaagtcaagcacaatccctggtcccagacatcagctacacaaatgtacacaggataatatcttttggagaggacttgaagacttaaaagaaatagccaatttcccaccatcaaagggaaactgcccaaggacagccaaatgttgaggctttaaaataaattttttttatgtagaaataatgtgttgtcactggagaagatttggggaaggagagtagattaaagaaaatagaaattatttgtccctctactattcagctatttgctgtatatcctttcagtcttttctctatatgtataaacatatatatcttttgtatattatatatatataaattttaatgactttcccattttatcttagctcattagaatgcctcctcattaaaaatctttgaaatcacac

SEQ ID NO: 429263 - DNA, 629 bp, Homo sapiens
ttaattgagccaagacataaaaattcggaagttttatataaatacccaaatttcaattttcacttgaaaaaataaggagtagtagtgacactgggtaaacatttctacagatggtaattggctagcggagggtggtgctgccccctttaaaatagcataggttttccggtgtgccatagtccccatcgctcccattgtgctgcatctcctgagagagactatcagtttttctttatcctcaagcttacactgattttctccctaatagtagagaaatatttttctgcttctattctatttcaggtatttatatgagtgatctgggtactgtaaatacttgagtggacaactcctgctttaaatcttgcacaaatgacttggtgtcaaatttttttccattctgatttctctcttctgagtgaggattgtagcctttgtttgccttaaatgtacccataaatgaacacagttttcctgaggttgtccagccaaaatatattacaacatgttgttatggactgggttgtgtccagattcatatgttgaaaccctaaccmcaaatgtgactgtttttagagatgggcctttgggaggtaattaggtttagatgaagtaatgagggtgaggac

SEQ ID NO: 429264 - DNA, 572 bp, Homo sapiens
ttcaggatcccacatttccatggagaaggcactcgtctacttgggaggcagcatgatgtagtggaaagaacatgactttgaggctcatagacccggattcacatcctagctcatatgcttaatagctccataaacttaggcaagttactttctctcagttacagttttctcattttaaaaacaccttctttgcagtgtcttgtgaggactagacgtggtgatggagaatacgttgcagtttgcatactatatgctgggaaatcaagaatgacaccaatacagatgttttctcttcattaaaactggctgaattattctatctcattgattgaattgagttcatttagcaatggcagcaaaatattaatacttctaaataacatgtcttacagtacatcacctggtatgtaaaacacaatcgtctctcaattactamcccctgtttctttaacagtatttaaatttttattttgaactttaaagaatgtaagcataatcaatacatttaccttctgtatcagttaagtgtcaagatggaaggaacagcagtctcaagataatgcaaagagttt

SEQ ID NO: 429265 - DNA, 595 bp, Homo sapiens
catctatgcctggaccttgtatatagaaggaattcaatgaatacagtcccttaatagcatcatgacacacagttttcttatgtagttgtcacaatttcaggccctttcatccttacatttattgagcagttattgtctgtgttcaggaatcttgctgtgtggcaggagataagaggagagaatcagtagctagaagaatacaacagctaaagtggccttggtgaatagtccagaatgataaaaaacttagatcactaaaaaaaattgcatgagatgacactgcagagataaggtagagtcagatgatgacaggccttgacttctattgggacaggcagtttgctgtggccttgagcatctctgcatgtgcttgcgaagtatgccaaacacaaggcctaactttcccctaatactgaaccatttctagctagtcacatcggcatttaactaggttaagatgaccacagcataactaccatacaacagctcactccctcagggaaggaggctggttkgtttgccacttgctacaaaagatgctaggcccttagccctggatccctcagtcatggtgcaaaccactgcatgtgcaacc

SEQ ID NO: 429266 - DNA, 530 bp, Homo sapiens
tctctgctcacctgagacaagtacacatctgattgcttcctctgatgtaaaaaagcagagtcactgagctagacaaggcataagtgactattcctctaccccctcccacatgtgaattgtgtatttsgtgaaaggctgatcaaagactcaaaagaatgcaaccgcttgtctcttatctgcccatacctttgcaaaatttcttcctctttccccaatattctccctttaaatattgaagccttcaaaatcatcattggagaaaggcacaaacttgcctcccaggtgcacgtccttaaccttggcaaaataaactttctaaatgattgagatctgtctcagacacttttgggttcacaccaatttcctgggtctttcaggaaccctgtttgagaacaggtgagcacttcaggacaacagcacagattggcaccacaactttcccagagatattcagactcaagtaaagtggcaaaaaatgtgtattctatgcctctgtgaccccagccccctccatcttcagcggactaggt

SEQ ID NO: 429267 - DNA, 533 bp, Homo sapiens
tttttttgttttttgttttttttttttgttttttttttgagatggagtctcactctgtcatccaggctgaagtgcagtggtgcgatcacagctcactgcaacatccgcctcccaggttcaagcctgggagtagctgggattacaggcatgcgccaccacgcctagctatctttttttgtatttttagtagagacagggtttcaccatgttgcccagggtggtctcgaactcctgagctcaggcaatatacccgccttggccccccaaagtgctaggattacaggcgtgaaccacctcacctggcctagaagatagtattgatcccattttatagaagaggaaactgaagtgcacagatcaaagccacacagtgaatgaacaggaaagtgggactctaaggcccctccctaatgtgcactgtgtactacmtccaatcaagagccttctgtatgacagacacacctgacagcaataacataacttaggcacactctgagaatgaccctatggtctaagaagaatgtgtgtttgta

SEQ ID NO: 429268 - DNA, 395 bp, Homo sapiens
gaaatgtttaagtctgttcaagrcacattctgaagatttctctattcctttgtttgatgactgaaattgatgtgcaggcagaagggtatgatcaggaaacaggcttaaggaatttaaaggtggcttgacactgcattggttgaggggtacatctttgtctttttctttcttcttcatgggtctgaaggcatcaggccagagatacagacaggaaaaaagtcctacataaggtgacagtaattgaggtgtaattaaaatgaaagtgccctcaccttggttattttaataaattcagttcatttatatactcttagaattgttgactgtggagaaggggagtaaaaagagaattgcaattgggctgataaaaaggattaaaaagcaattagaggcag

SEQ ID NO: 429269 - DNA, 395 bp, Homo sapiens
gaaatgtttaagtctgttcaaggcacattctgaagatttctctattcctttgtttgatgactgaaattgatgtgcaggcagaagggtatgatcaggaaacaggcttaaggaatttaaaggtggcttgacactgcattggttgaggggtacatctttgtctttttctttcttcttcatgggtctgaaggcatcaggccagagatacagacaggaaaaaagtcctacataaggtgacagtaattgaggtstaattaaaatgaaagtgccctcaccttggttattttaataaattcagttcatttatatactcttagaattgttgactgtggagaaggggagtaaaaagagaattgcaattgggctgataaaaaggattaaaaagcaattagaggcag

SEQ ID NO: 429270 - DNA, 395 bp, Homo sapiens
gaaatgtttaagtctgttcaaggcacattctgaagatttctctattcctttgtttgatgactgaaattgatgtgcaggcagaagggtatgatcaggaaacaggcttaaggaatttaaaggtggcttgacactgcattggttgaggggtacatctttgtctttttctttcttcttcatgggtctgaaggcatcaggccagagatacagacaggaaaaaagtcctacataaggtgacagtaattgaggtgtaaytaaaatgaaagtgccctcaccttggttattttaataaattcagttcatttatatactcttagaattgttgactgtggagaaggggagtaaaaagagaattgcaattgggctgataaaaaggattaaaaagcaattagaggcag

SEQ ID NO: 429271 - DNA, 395 bp, Homo sapiens
gaaatgtttaagtctgttcaaggcacattctgaagatttctctattcctttgtttgatgactgaaattgatgtgcaggcagaagggtatgatcaggaaacaggcttaaggaatttaaaggtggcttgacactgcattggttgaggggtacatctttgtctttttctttcttcttcatgggtctgaaggcatcaggccagagatacagacaggaaaaaagtcctacataaggtgacagtaattgaggtgtaattaaaatgaaagtgccctcaccttggttattttaataaattcagttcatttatatactcttagaattgttgactgtggagaaggggagtaaaaagagaattgcarttgggctgataaaaaggattaaaaagcaattagaggcag

SEQ ID NO: 429272 - DNA, 620 bp, Homo sapiens
taggagcaaaggtttcatacccagttaagaaaggacctgggaagaaggtaataggaagtgaatattttatcagcataagaaagagctttcatcttatttcttaacccctgagagccctgtaatgtcaatatttgtataaaacatgaaaacaatgtttgtaacatatatgcatatgagggctaataatttaacatacaatttctgaagtgttccatctcctagaatgatggttgccctggggccttccastcatgaagcaatggatttaagatcttcagggaaagggtggaggccaactctagcaatggagttatttctcatctttgactagcaaataggatttttgagtcactagcaagataatagtcttcaaagtcaggctttggtgaagaaaaataaatttctaaattccttgagctcccattaacatgtcaggaatcattgctggtggactggctcatagagtttctataaaccttgatagagaaaacttagcatataatgtaagggaagccttggctacaccggaaaggcagggagaaatcttgcatctttagggttgaggaattgtgggaagaagaagataggaaccagggaacagccaaagagttaaacacatg

SEQ ID NO: 429273 - DNA, 582 bp, Homo sapiens
ctagcaagataatagtcttcaaagtcaggctttggtgaagaaaaataaatttctaaattccttgagctcccattaacatgtcaggaatcattgctggtggactggctcatagagtttctataaaccttgatagagaaaacttagcatataatgtaagggaagccttggctacaccggaaaggcagggagaaatcttgcatctttagggttgaggaattgtgggaagaagaagataggaaccagggaacagccaaagagttaaacacatgtgttcacagtttcgcttcttgggagaatcttgagtgaatccaacamtgaggttggtggcctgctaccctcactggaacctctgtgctttgcaactgcaggggcaccagttacattgtattctttgtgaacggccattcctggagttttgtaatgctgtggcccttttttcaagcaaggccttatgaggacttcaggtctctaggaaaaatctggtagaaggatatggggcagcaccagtagaggaaagtggcttgaggggcgagcctctggaagctctcttggctctgctgaactttggtgtgttgggtaaaa

SEQ ID NO: 429274 - DNA, 522 bp, Homo sapiens
tgcattaatatctgatgagttagaaaaaggtggtttacttccaaactagaaaaagattccctgaatctggggagaaggggatggtggtggtggtgatggtggggaggaataaaggggaagccartaatgaatgtatgaggtggatttggggaagaggatatgggagtttattccattctattctatctgttactaacctgggaggtgaaagcacctccaattcgattagggatatctgagaacaaagatcccttgagcctccctgtcctaagtagctccctaggaaagagactacaccccacactacgctcctgcatgttgttttggtacatggggttctacacagccttgtggatcttaccatggctcagcgtggtgtgggagcccacagaattgtgccccgtccctcagtggagcatggcagtaggcatgaaggacaacccagtgattgttttcatgtgcaattgatgtactgttggaaatacgaatgtctcaaaggatgttgatctggagagacgatga

SEQ ID NO: 429275 - DNA, 522 bp, Homo sapiens
tgcattaatatctgatgagttagaaaaaggtggtttacttccaaactagaaaaagattccctgaatctggggagaaggggatggtggtggtggtgatggtggggaggaataaaggggaagccagtaatgaatgtatgwggtggatttggggaagaggatatgggagtttattccattctattctatctgttactaacctgggaggtgaaagcacctccaattcgattagggatatctgagaacaaagatcccttgagcctccctgtcctaagtagctccctaggaaagagactacaccccacactacgctcctgcatgttgttttggtacatggggttctacacagccttgtggatcttaccatggctcagcgtggtgtgggagcccacagaattgtgccccgtccctcagtggagcatggcagtaggcatgaaggacaacccagtgattgttttcatgtgcaattgatgtactgttggaaatacgaatgtctcaaaggatgttgatctggagagacgatga

SEQ ID NO: 429276 - DNA, 522 bp, Homo sapiens
tgcattaatatctgatgagttagaaaaaggtggtttacttccaaactagaaaaagattccctgaatctggggagaaggggatggtggtggtggtgatggtggggaggaataaaggggaagccagtaatgaatgtatgargtggatttggggaagaggatatgggagtttattccattctattctatctgttactaacctgggaggtgaaagcacctccaattcgattagggatatctgagaacaaagatcccttgagcctccctgtcctaagtagctccctaggaaagagactacaccccacactacgctcctgcatgttgttttggtacatggggttctacacagccttgtggatcttaccatggctcagcgtggtgtgggagcccacagaattgtgccccgtccctcagtggagcatggcagtaggcatgaaggacaacccagtgattgttttcatgtgcaattgatgtactgttggaaatacgaatgtctcaaaggatgttgatctggagagacgatga

SEQ ID NO: 429277 - DNA, 528 bp, Homo sapiens
gttggcagtgtctttgtagagaaatgaacatcttttctgggtaccgggggagggaacatgctggttgccatacctatatttgtcaaatagaagtcatgctaagaaacccaaaaataaaaataattttagggtaaagtcttaggaacttaaaatctgtttatttagcattaaataaacaccttccagatacccatccctcagctaagtgctatgaaggacattaaataagtataacagatagtccctacttagccttcagcatctaattaaattagatatttggctaaaggtggtgaaagacatgaaaggaagataatacatggacctggctttccaagacctcatggttttgtgggaaatgaaagacatgctcttgaaatatttaaaatgtttaaatattcccaggcaggaaatgtaagtgtctgaatggtttgcagagtstaaacagtcatttgtcagacgggaaaacaagggtgggctgcaatgggattcattgatgaggaaggacatgatagtacctgtgggtct

SEQ ID NO: 429278 - DNA, 580 bp, Homo sapiens
gtgggcaaagccaggagatagatatacatatatatgtatcacattaatacatacacatatatacacatttcagaaattatgagtccacagcaatacctccaattgcagtccattcttcttacatccatgtcttctctctttctgtatttgtaactttcttctccacagtgagaacyctggatctcaacaacaatgtgtttactgatttgctcaataccacgaaatatctaaaatcatttcagaatccttctgtgtccatgctgtacaaaaacaaacccagtaaaaagagtttagtgtttaagtccttcctgactcccacgctacctaagtctaatggaatatggtctaatgggtattcataaactactcagatttctttttccccctttcagtgtggttattcatttgaaatacagttgagtttatttttttcagtttggtttttagttttttctcccttcccatactttttggtttaatcttttaaataaatagaacattaataaacttccaaaaatcaaaaataatacaaagagctataccatagaagtgtttctccctctcatattccttccaccct

SEQ ID NO: 429279 - DNA, 580 bp, Homo sapiens
gtgggcaaagccaggagatagatatacatatatatgtatcacattaatacatacacatatatacacatttcagaaattatgagtccacagcaatacctccaattgcagtccattcttcttacatccatgtcttctctctttctgtatttgtaactttcttctccacagtgagaactctggatctcaacaacaatgtgtttactgatttgctcaataccaygaaatatctaaaatcatttcagaatccttctgtgtccatgctgtacaaaaacaaacccagtaaaaagagtttagtgtttaagtccttcctgactcccacgctacctaagtctaatggaatatggtctaatgggtattcataaactactcagatttctttttccccctttcagtgtggttattcatttgaaatacagttgagtttatttttttcagtttggtttttagttttttctcccttcccatactttttggtttaatcttttaaataaatagaacattaataaacttccaaaaatcaaaaataatacaaagagctataccatagaagtgtttctccctctcatattccttccaccct

SEQ ID NO: 429280 - DNA, 508 bp, Homo sapiens
aaaaggtgcccaccgcaccagctgaggcacctcccttgaaagccccaccaaatgacttccagatacttttccctgcaccctaccccagccttcccaaacctggagatgttggcttcagttggtcacattgtcaccgacaatgtagagattctgttagtaaagagaagcagcaatagacacttggtaagcaactagcagaagaatcatagcaataaartgcagggctaggcacattttcattctcgaggaaaagagtcaaactctgtaaaatattcgaatagatttattctgagccaaatatgagtgaccgtggcctgggacacagccctcaggcggtactgagaacatgtgcccacccaaggtggtcaggatgcagcctggttttatacattttagggaggcatgagacatcaatcaaatatgtttgagaaatacattggtttggtccaaaatcaatagaaaggaaatgttcagattaagataaaagattgtggagaccaaggttttt

SEQ ID NO: 429281 - DNA, 566 bp, Homo sapiens
ggcaaacctgtattgggtttggtctgatattgaagaattttgcccttcctaaattgtggaggtcatctcaccctccagctaagccaagcagagggtgacaatgaatccatacatgacaaagaaagtactcatgcttcagscctctatctaagtcatttagctaaatgcttttccactggaataagattttggactttattttaatcagcaggtttttcctttgagaggagtttcaaatctccctcttaggaaggtcatgcttcctttgccttgctaggcctcgggatagaaaataggattctctggaaaaagctatcacttagtaaataattgattggcgattgctttggatttgattcgctaagctgagaaccttcgacacaaactgtggagggttcaagaatgaatgcaaagtatgtgtggtttttacaatttggtggtctaagcaaggtagaggatgtctagcagggcaacagtgttccttaaccttgttttctttggtttaatgttcacaagtcatagaatatacaaatagaacagtcactaaatgcttttttcctttgaac

SEQ ID NO: 429282 - DNA, 440 bp, Homo sapiens
gaaatttaatttcctgaaggacgtgtatattttaaattttattgcaagaccaggtcagatgtgacatacagcaggcaaaatttccaactctctccccaggcaggaagagccttttctctctgaattcccataagacattcttcacctatcacataatacttgcctcttcccatcttatattacatttacttgggtccatgtcttatcacctctagtagacaatgagctccttaagaggaaaatttctttcatatcttcccgattccctaagtgcttagtacactgactatgttagkgtggacatagaatctcaatttctttcccttatttcatctcccctgcccctctaaactttttccaagggtctctaaaataatattgactcttctattctgaggaaagaattttctgttaattttaaactggtaagatgatggtgc

SEQ ID NO: 429283 - DNA, 440 bp, Homo sapiens
gaaatttaatttcctgaaggacgtgtatattttaaattttattgcaagaccaggtcagatgtgacatacagcaggcaaaatttccaactctctccccaggcaggaagagccttttctctctgaattcccataagacattcttcacctatcacataatacttgcctcttcccatcttatattacatttacttgggtccatgtcttatcacctctagtagacaatgagctccttaagaggaaaatttctttcatatcttcccgattccctaagtgcttagtacactgactatgttagtgtggacatagaatctcaatttctttccyttatttcatctcccctgcccctctaaactttttccaagggtctctaaaataatattgactcttctattctgaggaaagaattttctgttaattttaaactggtaagatgatggtgc

SEQ ID NO: 429284 - DNA, 599 bp, Homo sapiens
tgtttctaagttttgcactctatctggatccagaaagatgccagtgaacgtggtcacaaaggggacatgttctgcctgctccccaaggtggaatcagtgcatagagtcccgtggctgcctattttctggttcgggtcatgagaaagtcacttcctccctttgcaaaagggtactgtttttgtgaaatgaagccagggtacgctgcgtgcatatctgaagtcagatccttctgaggttctgccrttagcttgtccatcttcattgtcaatggtatcgggaaattcccctcctttccccagctttgttgggtcttcaagggtgactgaaggagaggttcttatgagtcattgcattgaaggccaccagccagacaccactgtgagccataaactgtcatataaaagcttttccaaccaccaccacaacaacaaaatattctcagaacatagatatacacagaatacggtccctgtgtcaacagtcacttgtgtgggctcagtgctgacaacggtgctgtggctactccaggtatgctgcaatccctctttgaagattgccatcagggctggaaacacatatttttggtattctgagtccac

SEQ ID NO: 429285 - DNA, 549 bp, Homo sapiens
tgcaaatatctttggaaaaatttatttgaatgaacatcatactgtggaacccttcactgaattgtaacaaatggattttctctccaagactcttcaaaattcctgtctcaaaattcttgccttgctgtgtctaccagtcctaaactactatatctcaagctcctgcaatgaaaagcttgctttcatccacaccctcaaatatcatcaatattccaacttatttttccctactcaatggcgaagatggtcaaggtagtgatctccctgagtgcagtaagcaattaacttcagtgctgtgtgctagaattttcagagtccaccatagtgaagggctatcccagaggaagttatcatgttgtttctgttgcttttgctatcatgattgcttggcctccaaattaaaggatatactaattcactcattcattaacaaatatatatgttgagagcttattayacacatgtcctcatgccagttagtcttgatagacatgtataagtaaaaaccaggcaactttgctctgtggaaatatgatagaaaaagataac

SEQ ID NO: 429286 - DNA, 563 bp, Homo sapiens
catttttgtattagtcaccagcaaagtcatcatttacttggttttaacagcttcagaattatgaaatagtagtatttcaagactctgaacattctgcttcaagatgagccagcctctcttagagatagaaagatgaaaaaaatggggcaactgacaggcaggcagctcatgctggtttttgagttatttgtctcattcttgtctatttgcaagagcttgttgcatgttacagacactgacccttggctttggcatgacacatttttttgaactttttttgtcagttgattttgtacctggcacatttttcagataagggatttgtatctgtttatgttcaaatatttctgttttttttttctcttaagtttgtgggattccagtctctgttaagaaggtatgcctcatctctagtttgtacatactctaggttttcttacatgatttttttgttttagtttgcatttgagacttcattcttttcttttcttttttaaaatasagataggatctagctctgttgcccaggctacagtgcagtggcccaaacatagctcactgca

SEQ ID NO: 429287 - DNA, 528 bp, Homo sapiens
gaacactcttcttgcttgtgtggtttctgaagagaagttggttgtaaattttatgtttctcctctataggtaaagtgttttttcctgtggcttctttcaagatatttctttgtytttgatttttggcagtttgcatatgatatgcctagggttttttttgttttgttttgtttttttttttttgttttttttttttttttggcatttatcctgctggatgtactctgagcttccagcatatgtagtttgatgtctgacattaatttgtggaaagtctcagtctttattgcttaaaatattttttctatacttttctgtctttcttctccttctggaattcccataacatgtatgctacaccttttgtacttgtctcacagttcttggatattctgggtttttttgtccagtcttttttgtttctctttgcttttcagttttggaaggttctattgacacattctcaagatcagtgattttttcctcagccatgtgcaatctactaataagcccatcaaaggcattctt

SEQ ID NO: 429288 - DNA, 528 bp, Homo sapiens
gaacactcttcttgcttgtgtggtttctgaagagaagttggttgtaaattttatgtttctcctctataggtaaagtgttttttcctgtggcttctttcaagatatttctttgtctttgatttttggcagtttgcatatgatatgcctagggttttttttgttttgttttgttttkttttttttgttttttttttttttttggcatttatcctgctggatgtactctgagcttccagcatatgtagtttgatgtctgacattaatttgtggaaagtctcagtctttattgcttaaaatattttttctatacttttctgtctttcttctccttctggaattcccataacatgtatgctacaccttttgtacttgtctcacagttcttggatattctgggtttttttgtccagtcttttttgtttctctttgcttttcagttttggaaggttctattgacacattctcaagatcagtgattttttcctcagccatgtgcaatctactaataagcccatcaaaggcattctt

SEQ ID NO: 429289 - DNA, 670 bp, Homo sapiens
ggaggatgtttattaaataatttttatatctagaacattcttgttcatttagcataggcattttggtgctcagcttwaaaaaaactctgtgagccccctggctcatccgtcttctttagcatgtcagtccacaatccctgtgtccagtacgccctgaccctgtcatcttcctttgctgtgctggattcctgaaactgaaaatgcctcacaacttctatgcactcttaccctcaaaagagtgcatttagtggcatggctgtgccagccgtctttgtccagatggcttccagataggaatcactgagtccaggaatactttgagaagcctggagagcctctactctgaaagtttatcatcactgcaaactcagcgagtccagattttgctcaacacatgctgtctgctttctgtttacccctctagtctttactaacagacactttatatatatatatacacacagccaggcgcggtggctcgcgcctgtaatccaagcactctgggagcccgaggcaggcggattacttaagcccaggagtttgagaccagcctgggcaacatggtgaaaccctatctctacaaaaaatacaaaaattagccaggtgtggtggcacgtacctgtagtcccaggtacttgggaggctgaggtgggaggatggcttgagccca

SEQ ID NO: 429290 - DNA, 517 bp, Homo sapiens
aacttttttatttcagcactgtttatactttaaaaaaatcactgaggatcacaaagagcttttgtttatgtgggttatatctattggtatatattctatcagaaagtaaaactgaggctggacatggtggctcacgcctgtaatcctagcactttgggaggccaaggcaggaggcttgcttgaggccaggaattcaagatcaagtttaagtccagcttgggcatcatagtgagaccctatctctacaaaaataagcagccaggtgcacctgtggttgcagctacttgagaggctaaggtggwaggatccccaggagtttgagcctgcagtgagccaagataatgacattgtactacagactgggtgatggattgagaccctgtcttaaaaaaaaaaaaaagagagagaaagcaaaaaacttaagtattacttctgtgaaaataacaatgataagccctttattttaacataagtaatttcttgtgaaaatcttttcagaaaaattggaagaataaca

SEQ ID NO: 429291 - DNA, 521 bp, Homo sapiens
caccaccattgccatcacccttgccattaggcatcatgttttcctccttggaggttgccgtggtttaaatgtgtcccccaaagttcatgtgttggaaacttaatccctaatgatgcaatgctgttgggaagtggggcctaattggaggtgttttggtcatgagaattccaacstcatgaatgaattaatgccaattataaaaaggctgacactgtgagctcattctcctgctctcttgcaccctccctttgcctttcccccatgggatgatgcagcaaaaaggcccttgcaagatgctggccccatgaccttgaacttcctagtcttcaaaactgtaagccaataaatttctgtttattataaattatccagtctcatggattctgttataacagcacaaaacagactaaaacagaggtcagtcatcacagttaccagttttggcaagcttttaatgaacaaaagaatcacttaatttgtactgcaaaatggcatgtttcctgcagatctgcaatgagaaa

SEQ ID NO: 429292 - DNA, 521 bp, Homo sapiens
caccaccattgccatcacccttgccattaggcatcatgttttcctccttggaggttgccgtggtttaaatgtgtcccccaaagttcatgtgttggaaacttaatccctaatgatgcaatgctgttgggaagtggggcctaattggaggtgttttggtcatgagaattccaacgtcatgaatgaattaatgccaattataaaaaggctgacactgtgagctcattctcctgctctcttgcaccctccctttgcctttcccccatgggatgatgcagcaaraaggcccttgcaagatgctggccccatgaccttgaacttcctagtcttcaaaactgtaagccaataaatttctgtttattataaattatccagtctcatggattctgttataacagcacaaaacagactaaaacagaggtcagtcatcacagttaccagttttggcaagcttttaatgaacaaaagaatcacttaatttgtactgcaaaatggcatgtttcctgcagatctgcaatgagaaa

SEQ ID NO: 429293 - DNA, 580 bp, Homo sapiens
cacaggcttgcagcttcctgcaagagtctgaaggcccacagcacttccrgttagggactgttcctcgcacaatgggcctgagctcccaacatatgcacatgcatgtacacacacgtgtccgccatatacacacatgcatgcatgtgggtatatttgatatactcaatcccttcccttgatgggttagactctacagcctctgtggcaacagcccacagtgggtactcacgaatgtctactgtgtcctgctgcagctggtccagaagccacccccagaattagaatttaagcatgaaaaaatgcccagggaaatctgtgacttgttgctaaatcctaaacacagtttgtgtatccagtgctcagcagagggcttagcacatgacaggtgctcaagaaaacacctgctaatacaagggcacaatcaacacagaaacatttctaaatgtccaaaatcttttttgtaccaaagcaaaatcaaaaccaaaacaaacaaataacaacaaaaaacctcgggcagtttgttttcctgaatatttaaccaaggaagtatatcccagccctgagggtggagctactcctc

SEQ ID NO: 429294 - DNA, 591 bp, Homo sapiens
aactcatcattaactcaacttgacctgaggttctcagtatggatggcaaagctcatgttaatgtgctaatcatctgccacactagtctccttcctgggctattcctgcttccactatattttgtatacacaattaggatgatccctataaagctgaagttagataccatcacttctctgctcaaaacttttccgtggctttacatcccagtcattaccatggcttacaaggctccacacagtctgatccctgcctacagcgttggtctcacttcctacaattctctscctcgcttgctccacttactcatctcagccacatgggattgttgctgctctttgactgtgccaagcacactcctgccccattcgcttctccccttgtgctagagctctttccccaacatcttcccatggtttaccttgaacttcctgcacaatgtcattcctcagagaggccttcctggagtactctatataaaatagccctcaaagagggcttctcttaaggccccttctcatgaccctatagtttcatcctcttcttacccactttattgcttttcatagcacttgtttgttagctagttta

SEQ ID NO: 429295 - DNA, 571 bp, Homo sapiens
accttgtcaagaggggcaacttcataaagagtcattttttaactatatatttcatagtttgaatagatccaagcaagagattctcctctccccctgcagagtatggagattagagaaaactgtagctaaggaaagaaagcaaaagaaattggcttatggcagaatttctgacccattatattcaggttatattccacctttttgttacctccgagtccctgattttgcaagttgtttttcccaaaaycatacccactctacatgaggttaatattaacctaatagtgtgacttgcctggctagtgctataacgtgagatgaatctagtgtgaagagtaaatcataaatgagagagataatagctatattcaaaatggaaattaggctgaaggagtgaaaatttgaaatgattaggcatttctagagtcaatttagaagatgactatagaaataactgcaaaaaagagctgcaaaataactttaaatttctgtactatgtcttcagagaaaatggaaggatgtggttcagaaatggacacgacggaaactcagagaatgaataatgaatgta

SEQ ID NO: 429296 - DNA, 543 bp, Homo sapiens
tggtgcaagaaccatgttttgttaacttctctatttctcatacctagcaacacagagtagaaactaaatggacataatagtccttgttctccaaatgaaattttcttcatgccacctgcttaaaaatagagacaaaaccaaaaccaaattttaatactgacagtgttccctaaattgctgaagaactagatttcattatcttcaacaaattcaatagaagttgtccatacctttgaagttagcaacttaagcctttgcctctccaagtcccaatggtacctctatgttcargctaacttggtctcagtgtcagccttcatggacagcttggatgatacaggcaaggtggtatatcacagtggataaggctcgggcttcaggccagggctagatttgagttccgactctgccactcacaaccttgtaactttggcaaggtgctaatctctctaagtccagtttccaagtctatgaaatgaggatgatactattacctaccttatagagtcattgtgaagaataatttttaaaatgcattaaact

SEQ ID NO: 429297 - DNA, 644 bp, Homo sapiens
atggcatccctagtaaacataatcaagcatttatgattttgggtggcataacgatttccagatttctctatcagggattttgtacactgttgtctaacatgttataaacttctcagggtgttcttgttggggtcatttgagctgtcagctaaattattccttttgtttgcaaagatttcaggaaaacacatgttcttttatggcaagattgcwgtggtgattaccagctggcatgggttttgtgtattttatttagtgatttcttacagtcacctgatgatagagggaaactggaatagctcagatgcaaggatgatggaacacagattacaaaaagacatttttttctgagtgttactaatgttttcaatttattcattaataaaaagtgcacagtataagccttttatcccaatccaagtactcagtgaaagattaacaataaacactggatggcacagacatgatttgtttggcatgatttaaacatatgaaaacagcaattaacatttaatataccacatgactacttttgcttttaacaaagtaatcatcatatgtggtaacaaatacatatgatttttcatttagaaatattataagaaaaccacacttaatattgcaacaacaaaaatttaacccat

SEQ ID NO: 429298 - DNA, 485 bp, Homo sapiens
ctctgtacctgttacatgagagaatctgaactgtgcagtgtacactgttttatccttttatggtttacaattacccagaaaagtgagtaaaatgcccgttttacagatgtggaggctgaggttcagagatactgaccagtctctcggtttataaggaaaaccatggctaacagcctccagagcacaagccctttacaaaggagggttggagattgcargcagcttttacttatctatgctgcccacgcttaacatggaaaactgaaagctgaccttgtgttcctttaaaaaatctccaaggaagtcggctgcagagacttcatggtaactcatgagaaacaaaatgcttttgtggattaacaactgtctttattccaatggagttttttgggggttttttcttcttcttaaagacaaaaaaataatctaccgctgacactcaacaagaaccgtcgtagaatggacaagtcttcggatcgcgctgt

SEQ ID NO: 429299 - DNA, 542 bp, Homo sapiens
tcgcccaggccacgtctggctaatttttatatttttagtagagacggggtttcaccatcttgcccaggcttatcttaaactcctgacctcgtgatccaccctcctcagcctcccaaagtgctgggattacaggtgtgagccaccatgcctggccscgaagggacttctgagatcactctgtgaaaccccttcctgcctcaatacagaatcagggtcagagacctgaagtgacttggccaaagtcccacagccagtgagtggcagagccaggatgggaatccaaggtgacagacccttgcaccactgccctttatggcgccctgcccagcatcttcctgtgtcctgctcatgtcagcaagctctgcctccttcctcacaagccagtccctgcagccagcacaggtaacagaccttcctttccctccctgctgtctaacatcaggcctattttctctaaagcaaaatcggtctgtttccccaaggctgacacactggctctgccagagggcccagataaggggaaaaccttgcacggcggcctt

SEQ ID NO: 429300 - DNA, 542 bp, Homo sapiens
tcgcccaggccacgtctggctaatttttatatttttagtagagacggggtttcaccatcttgcccaggcttatcttaaactcctgacctcgtgatccaccctcctcagcctcccaaagtgctgggattacaggtgtgagccaccatgcctggccgcgaagggacttctgagatcactctgtgaaaccccttcctgcctcaatacagaatcagggtcagagacctgaagtgacttggccaaagtcccacagccagtgagtggcagagccaggatgggaatccaaggtgacagacccttgcaccactgccctttatggcgccctgcccagcatcttcctgtgtcctgctcatgtcagcaagctctgcctccttcctcacaagccagtccctgcagccagcacaggtaacagaccttcctttccctccctgctgtctaacatcaggcctattttctctaaagcaaaatcggtctgtttccccaaggcygacacactggctctgccagagggcccagataaggggaaaaccttgcacggcggcctt

SEQ ID NO: 429301 - DNA, 540 bp, Homo sapiens
gaaagagagatcagattgttactgtgtctgtgtagaaagaagtagacataggagactccattttgctctgtactaagaaaaattcttctgccttgggatgctgttaatctataaccttacccccaaccccgtgctytgaaacatgtgctgtgtcaactcagggttaaatggattaagggcagtgcaagatgtgctttgttaaacagatgcttgaaggcagcatgctagttaagggtcatcaccactccctaatctcaagtacccagggacacaaacactgcggaaggccacagggacctctccctaggaaaactagagatctttgttcacgtgtttatctgctggccttctctccactattatcctatgaccctgccatatccccctctccaagaaacacccaagaatgatcaataaatactaaaaaaaaaaaaaaaaaaaaaaaaattaaactcccttaaaatatcattttcgtaaaaatgatattataaatgtccaaagcactggttctttgatcattgataaaactcatcatcaccg

SEQ ID NO: 429302 - DNA, 540 bp, Homo sapiens
gaaagagagatcagattgttactgtgtctgtgtagaaagaagtagacataggagactccattttgctctgtactaagaaaaattcttctgccttgggatgctgttaatctataaccttacccccaaccccgtgctctgaaacatgtgctgtgtcaactcagggttaaatggattaagggcagtgcaagatgtgctttgttaaacagatgcttgaaggcagcatgctagttaagggtcatcaccactccctaatctcaagtacccagggacacaaacactgcggaaggccacagggacctctccctaggaaaactagagatctttgttcacgtgtttatctgctggccttctctccactattatcctatgaccctgccatatccccctctccaagaaacacccaagaatgatcaataaatactaaaaaaaaaaaaaaaaaaaaaaaaattaaactcccttaaaatatcattttcgyaaaaatgatattataaatgtccaaagcactggttctttgatcattgataaaactcatcatcaccg

SEQ ID NO: 429303 - DNA, 605 bp, Homo sapiens
actgttttatcctccaaggggataattttccattggtactcagctttcttctcgaagctcaggtgccagcaacaattatacaaaaacacttacggcaaaggagcagtggcagacagcagcagcccgggcagcattaacagccttgacattttccatttacaaggccttcaactcaagatgtgggtggagaattcttccttgatggagtctttgtttagggtttcaatttcttcctggttcaaacttgggaggttttatgtttccaggaatttatccatttcttctaggttttctagtttgtatgcatagagatcttcataatcatctctgagggtttttaccttgaccgtgtctttggaagctttttctctgcatcttcttccctggctcagcaaggctggggagctggacccatggccgcttctagcacttcctgtgcccatctcttgagcagcaggsagcacgatgccataggcagagagccctgctgcacctggatcactctgcaaatgcgcagaacaccaccagcagggctgtatgagctggtgatggggccgcctttggtgaaggagctcctgggtccacagtcttcatccagcactcct

SEQ ID NO: 429304 - DNA, 577 bp, Homo sapiens
gggcgaggcccagccctgggcctgtggagccctcatcaagcaggtccctcagactcctgcctgccgccgccaatcaggcaacaccagccttccttttggatgatggaaacagttctatcttatttaagttggtgcttacgtttgttagaacttgccgaactgaggatcgcttgagcctgggaatttgaggctgcaatgaggtatgaacacgcaggtgaattgccattgcactccagcctggtaggtatagtgagaccctgtctcaacaaacaaaaaacgtaccgactgtatacagcaaatgggtgcctttattttatgtaaaatttaccattaaagggttaatttgaaaaacatttgatgcaggagatgcagcctatcatttcaaaatcattggtttatgggtagatttgttacacagatgaaactgacaaaaatmcagcaaacaagggtaaagcctgttgataactgttctgggtttataagacattttagaagattcagtcagaaaagattaatgcccatgtagtggcatggcaggcaatgggaagagaggatagctaggcaagacaaggaaaac

SEQ ID NO: 429305 - DNA, 597 bp, Homo sapiens
ttttaagtggaagtctgcagcacagaggttaaatggttttttcagggacacattactattattgatcagattcataatttaaactcagagctatctaattccaaagcctgtgatttcttcaccagatactaagatctatgtacaactaaaagacaaggatatgtctaggaccttgctactcaaagtatggtctgaggaatgttggcatcatctggaaggtcactaaaaatgaaagcaactaagtcataattaacatttttaaaagcattcacacccagatttttatgcacattaaagctgaaagagcatctatcaatgataygtgccagatttgtagatcaggtcaccaaatagatgactgggtgtagtttgggtgaccatccactaaggtaaggcaaagaggtacatgaacacattgaggaaggggaaagagtggcccaattttgaacatttggaacttatgtaggagacattcaagcggaagattacagaggagaattggatatagtatgttggagatcagaaagagagcccggttggagatgtggattggtaatcataatctagtacggaatgtaggaccataagtgtgcataa

SEQ ID NO: 429306 - DNA, 637 bp, Homo sapiens
gtagtttgggtgaccatccactaaggtaaggcaaagaggtacatgaacacattgaggaaggggaaagagtggcccaattttgaacatttggaacttatgtaggagacattcaagcrgaagattacagaggagaattggatatagtatgttggagatcagaaagagagcccggttggagatgtggattggtaatcataatctagtacggaatgtaggaccataagtgtgcataagccttgagggaaaaaacatgtggaaagagaagagagccaaggacaatggtaccccagatgctattatgtgagaatttgcaattcctctgaactgtttgtctccaagatgtagaactagaaactatatgtttaaagatgctggttcaatgtgagacagcgactttcaacaattggagttctgtgaataaatggactttctggggaaataaggaggaacacttcttgtatctcatccagcacaatacacttgttagggatgctacagaaagaatttaaattctgaagcactgggactattcctaccctgaaattccaccataaccaaggctaaatgattcttttaagggtaaatgtcccagcatgttcaaactctagcatgcttaactgcaattgcaacaaaacag

SEQ ID NO: 429307 - DNA, 563 bp, Homo sapiens
agtcccagctactcgggaggctgaggcaggagaatggcgtgaacccttgaggcggagcttgcagtgagctgagatgatgccactgcactccagcctgggcgacagagaaagactctgtctcaaagaatwaaaaaaataaggcatcttcactggatatagaattctatgttcatttttttaaggatgttttgaaagacgatgtttaaaaagtgatgtttttaaaacatgatgctaaaaaggataataaagataatttaaaaataacgttacccagtcttcttgcttgcactttttttctgacaagaaatctgcagtaatccttatatctgttcctctgtgtacaaatgtcttttttttctatcttatcttaagattttatctttatcactggttttaagcactttaattattatgtttctgggtataggttagttcatattccctacgtctggggtttgttcatcttttctaataggtggttgtaaaatttttatcaaatcttcaacattcagaggtcaaaagttcaaaaagttaaaatttggctttggcaacattgtaataca

SEQ ID NO: 429308 - DNA, 563 bp, Homo sapiens
agtcccagctactcgggaggctgaggcaggagaatggcgtgaacccttgaggcggagcttgcagtgagctgagatgatgccactgcactccagcctgggcgacagagaaagactctgtctcaaagaataaaaaaaataaggcatcttcactggatatagaattctatgttcatttttttaaggatgttttgaaagacgatgtttaaaaagtgatgtttttaaaasatgatgctaaaaaggataataaagataatttaaaaataacgttacccagtcttcttgcttgcactttttttctgacaagaaatctgcagtaatccttatatctgttcctctgtgtacaaatgtcttttttttctatcttatcttaagattttatctttatcactggttttaagcactttaattattatgtttctgggtataggttagttcatattccctacgtctggggtttgttcatcttttctaataggtggttgtaaaatttttatcaaatcttcaacattcagaggtcaaaagttcaaaaagttaaaatttggctttggcaacattgtaataca

SEQ ID NO: 429309 - DNA, 555 bp, Homo sapiens
cagaaacaccaggggtctcaaccagtgggcaataagaattcatcaggcaacacagtggcatgagcagtagcagatggttccttcactctatgaagaaaggcagctgcctaaccttgagaattttcctaataaaagctttttttgtagttttcccctattcctagtacactaagatggcactgtattatgatgtgtcacttcagacacactgcttatgctctcagctctgccccttcragttgctgcacaactcaaggggacatcattcatattgcagaatattagaaaatagttgttcttgttactaggcactttttggagctgcactttttagggttttaatatgcataagtggaaggattagtatgaaggtattaaatgaacaaactataacttcaacaaataggagcaactttttgcctggcttcaattctagatgggatctagaataaaatcaaggaaccatgggatggtataaaataagcaatcggaataagcacagttaaagttaacatattgtaaaggttatagttagaatctggtgtcaacaaatgg

SEQ ID NO: 429310 - DNA, 621 bp, Homo sapiens
gctggtcagccatcttggtgcttctttctattgttagttattattgttaatctcttactgtgcctaatctataaataaaactttatcataggtgtgtacgtataggacaaaacatgttgtacataggagtgagtactattcaaatttcaggcttccacaggagtcttggtatattcctcatggataaagggggactrttgcatatagcaaatcacttaaaaacaaataaataaatccaatgaaggaaaaagtatgcttattgaacaataatcagacagcattgttttatattcattatctcattttatctttccagcaaccttacgagataaggcttttttgatgaaattggggctgaagaaagtcaaatgtcttgaccaagtactcagtgaactaatgacgattagtgcttctgatatcaaagcccctgtactttgcatccataaaacatagctaattaaccaatagactcttgtgccaaggctggaatgctttgagaactccctctccacattgagtatgcaacacaaacatagagctgtctcagtagtcaccagtcaattgataggaagtggcacacactttgaaatccatttctaactttacctccaagatattgct

SEQ ID NO: 429311 - DNA, 626 bp, Homo sapiens
  misc_feature (1)...(626): n = A,T,C or G
gatgttttaggatgtggtctatcttagtccatgttatatgggatattgagaataatgcgtatcctgctattgttggtgtngtgatctacaaatgatatttagatggtggtggttggtggaattgagctatttctcctgttagcaatttcctactagttgttctattgatttttgagaaaggtaataatagtcttcatttctaattataattttttaaattttttcttttaattttatccatttttacttataaaattttcatttgtttcytctttatagcttctatttctttgctgagactctctcttttaaaattatttcaattatgtatttgtaattgctcattgaagcagttttgtattatctcagtgttagaatttactgattgtgttttcttttaagtccagtttgagagcttgctggttattggtatgatatgatgagtgttgttgttgttgtttttgttttttgaaatctgaaaattgggatctcatgttagaagactctgggttttatttaaacctgttttaggcaactacctgtaaaactgctccattgaaaaatgaagggtcgcaccttgttactaccaggtgggaagagaagtctaggttccccattttcttctg

SEQ ID NO: 429312 - DNA, 615 bp, Homo sapiens
gcatgatttcttcaaaaatcgtcaccagattattcttacagttctgtcatctcattgttgacatctctgtatttctttttttcattaagtctaagatcttcctgatatttaatatgacgaatgatacttgattgaaacctggacattttgttttatgttatatgagactgtgaatcatatgtaagatttctactttagctgcatttccttgatgtcagcccaacaggaaaagaaagtaggtcacttcattaatgccaggtggaagctgaagtccaggcaccctactcagcctccataaacaggaaatcaggggacttttccttacttcttgatagggatgggagttctagctccccacatggtctccactgacactawaaggggtgggagcttcttactgctagcaatgatgaacgtcctgactctccaacaggactcttctgaaagctcaataacagaaataggaaggagtatatttctggttggggtgaaaggacggattcctcatgtagtttctgctacaccattaagggaacagggtgtatgcttgttactggctagtgaagaagaagtaggcatctcttctagcctttatagattggatttggcaaggaa

SEQ ID NO: 429313 - DNA, 534 bp, Homo sapiens
tgcttttgtgtaaaaatcagattatactataaggtaaatgtaacaatgctcaaaatatagtatagacttgatgactcagttatgattctgtgtcaatgcacagcagtctctacgtcttttaatcctgttactctgataacttacatattgttatggttccatyacacactgcctagcacaaaatagactcttcccaaaaaatgtgttgaatagataacagaattatcaatatttaagtaaggaaataaaactgaatgtgggcagacaattcaagatgtgtcacatagtatagaccagagttttgatggctgtctgttttactattgataactaggatttcatcagcacatggaaacatctctctggccagctgtatcaccacgaataaggaagagtgttctgctataagcatctacatttctcttcaccactttttactctactgttttttttaaatattcctcttctctgtgatgcaaaagacattcattatctttcattatcttccttctttctctggacttctaaaaatgc

SEQ ID NO: 429314 - DNA, 592 bp, Homo sapiens
agttcatgccaatgtggaccatagatgcatcaaacaggagtaattaaagggctagagaccataaaatgtccaaactgtgccaggagaggagatgaacacaaatcaacctctctgactgtgagtaaagctgcaatggttggctcataattttatcttgtctaatagcgccacagttgtccattaagagatatggctattggagccagttgcagcagctcacacctgtaatcccagtaattcttctcctttactaaggagttcaaggtcagcctgggcaacatagcaagaccctgtctctaaaaaattaaaaaaataattagttgggcatggtgtgcctgcctatagtcccagctacttgggaggctgaggcaggaaggtgkcttgaatccaggagtttgaggctgcagtgaactatgatcaccactgcactctagcctgggtgacagagtaagaccctatctctaaaaattaattaattacaaaataactttaaaaacaaatatgattattatggtcatagaaagatgctaaactgtcccctttctggatacattctattctgtatccaaggacatcataaagttttgagata

SEQ ID NO: 429315 - DNA, 642 bp, Homo sapiens
gtcccagctacttgggaggctgaggcaggaaggtggcttgaatccaggagtttgaggctgcagtgaactatgatcaccactgcactctagcctgggtgacagagtaagaccctatctctaaaaattaattaattacaaaataactttaaaaacaaatatgattattatggtcatagaaagatgctaaactgtcccctttctggatacattctattctgtatccaaggacatcataaagttttgagataataatttttgagaaacggagtggtttatcttcctaacattatatcagaaattcaagcaggcatttcaacaaaggagagccttgcagtacttaaacttcagttgcatcttgttgcaagaaagttgatgtctttatgaaaggcctcacaaggtcactaagaccagaaatattctgcctctgctggataactgatggatcagttgatcacaaagaaagctgaggatgcagagaggcctattcaaagctttggattcactatgaaagagtcttgcaaataaagaaattgtctatgcacrctctccactgccaactagctggtcatgatgaattatcaggacaataaattgtgaatatatatgggaagggagtgaggataataattagagacattttct

SEQ ID NO: 429316 - DNA, 642 bp, Homo sapiens
gtcccagctacttgggaggctgaggcaggaaggtggcttgaatccaggagtttgaggctgcagtgaactatgatcaccactgcactctagcctgggtgacagagtaagaccctatctctaaaaattaattaattacaaaataactttaaaaacaaatatgattattatggtcatagaaagatgctaaactgtcccctttctggatacattctattctgtatccaaggacatcataaagttttgagataataatttttgagaaacggagtggtttatcttcctaacattatatcagaaattcaagcaggcatttcaacaaaggagagccttgcagtacttaaacttcagttgcatcttgttgcaagaaagttgatgtctttatgaaaggcctcacaaggtcactaagaccagaaatattctgcctctgctggataactgatggatcagttgatcacaaagaaagctgaggatgcagagaggcctattcaaagctttggattcactatgaaagagtcttgcaaataaagaaattgtctatgcacactctccactgccaactagctggtcatgatgaattatcaggacaataaattgtgaatatatatgggaagggagkgaggataataattagagacattttct

SEQ ID NO: 429317 - DNA, 550 bp, Homo sapiens
aagcagttgaatgcagaatgcaatggacatttagcacaatattctgatatgttaaaagacaagcaccttactttaaaggtttaatcaaggaaacagacagttgtctctggaactgtctgtggagcttggagaggtgtgatgtggtgggagttgagaatagccctgattgttacaatcaccagctagctatcttactgcctgctcagtgtcccagccttctcatccctcagctcctgccttcaatgacttctcctggaaatctcagtcatgttgcttggtagctagatatatgaaaagcataaagagaggatcagcagtgtctgctcwttcatctacaaaaaggctttcaaattctttttcttgtctcccttttcgctatcatcatccgaaggctgtgtctcatcatttcttagtgtgaaaatatttcaacattccctgcccacatgtccatgactcatggtttttctacaacaccaacaacgtatttatttcatggatctgatccttctacaaaaaccattgatggccaccttaccaactgcctatgctc

SEQ ID NO: 429318 - DNA, 593 bp, Homo sapiens
taggtagaataatgaccctcaaagacgtccacaacctaattttcagaacctatgaatatgttgttatatggtgagggagaattaaggttgcagaaggaattaaagttgctcaggaatacagttgcccttgatattatcctggattatccggagggccttatgtaatcacaaacgtcctttaacatggaagagggaggcagaaggtcagtgatacaatgtgaaaacacacaatcggccattgtggctttgaagatgaaagaggtcataagcccaagaatatgaacagcctccagaagctaaaaaggcraaaaaatggagtctttcctagggactccagaaagaatataaccctgccaatgtcttgatttttaaccctgtgtgatccattttggacttctgacttccagaactgtaagataaaaagcttgtgttgtattaagttactgtgtgataattattaacagctaagaaaggaaactaatacacttgtgttcattcattattttattcatattgagagtcatttaagttcctcaattggctaagcgctgtggtagaaacagaagtagaagataatgtgctggcccacaggc

SEQ ID NO: 429319 - DNA, 593 bp, Homo sapiens
taggtagaataatgaccctcaaagacgtccacaacctaattttcagaacctatgaatatgttgttatatggtgagggagaattaaggttgcagaaggaattaaagttgctcaggaatacagttgcccttgatattatcctggattatccggagggccttatgtaatcacaaacgtcctttaacatggaagagggaggcagaaggtcagtgatacaatgtgaaaacacacaatcggccattgtggctttgaagatgaaagaggtcataagcccaagaatatgaacagcctccagaagctaaaaaggcgaaaaaatggagtctttcctagggactccagaaagaatataaccctgccaatgtcttgatttttaaccctgtgtgatccattttggacttctgacttccagaactgtaagataaaaagcttgtgttgtattaagtyactgtgtgataattattaacagctaagaaaggaaactaatacacttgtgttcattcattattttattcatattgagagtcatttaagttcctcaattggctaagcgctgtggtagaaacagaagtagaagataatgtgctggcccacaggc

SEQ ID NO: 429320 - DNA, 598 bp, Homo sapiens
ttggaatttactttgaactacccttccatctggcagaataagcagagcctgtttaacattatgtacataaattttctcatactgtctttaaatgaaagcctgtatgagctttgctactctatagtagcaggacctattcctgaagatagcttcatggtataggtcacacttgcatctctttcccactattaccatatttcaagacactggagttttctgctagaagggtagtgaggaagatggtcttattttaagtcaaaagtcctgacttatgtacaaaaaaatcatgtgttatatgtgaatcaagtgctattgttggaattaaaaattctcccttggcatggccatattatacttttaaattgtagaaaaggataaccgagttatacaggaattggcttttagaaaaatgtcaagtacagttctgctttggctgggctaaataatcacaattatttagccacaattatttatatctccaagccaggagacagggaagtgagtgcatccctcaggtgsggggagttgggagaaaatgcctctctgaaggctgacctgcgtcctgtgtctgagctcatggcaaattgtcagtcagtag

SEQ ID NO: 429321 - DNA, 471 bp, Homo sapiens
cagctcgagggtggcctgcatcccctttatgagaaagaggccctgtgaaggtagatgtgaactgtcttyagcttagcctgtggcaggaggcaagctctcgttaggagtacctgaaaaaacacatttccacaataagacaactggttgttcaagacactgccaccacacagctttactctgtctggcttttactttataggtctatcattagggcatctatattttatttctgtaaaaactgataacgaagtcagaaagagccttttgtggcatcactatttgtaaattatacgggcataaaagagcatcacaaagactagaactcatattttgcattctccaataagcatactatcaattaaaagctcaaggtcaagaagcttagccaagtttccatccagatggaatttataataaatgttataaagcactgaaaacaggggattccagccaaagcaaagacatgtcata

SEQ ID NO: 429322 - DNA, 542 bp, Homo sapiens
agaatctgaaataaaatccaagcagctggattgagatttggaagtatatatatggacaaacaggtggtgctcagctcgagggtggcctgcatcccctttatgagaaagaggccctgtgaaggtagatgtgaactgtctttagcttagcctgtggcaggaggcaagctctcgttaggagtacctgaaaaaacacatttccacaataagacaactggttgttcaagacactgccaccacacagctttactctrtctggcttttactttataggtctatcattagggcatctatattttatttctgtaaaaactgataacgaagtcagaaagagccttttgtggcatcactatttgtaaattatacgggcataaaagagcatcacaaagactagaactcatattttgcattctccaataagcatactatcaattaaaagctcaaggtcaagaagcttagccaagtttccatccagatggaatttataataaatgttataaagcactgaaaacaggggattccagccaaagcaaagacatgtcata

SEQ ID NO: 429323 - DNA, 492 bp, Homo sapiens
ttatttattgactttgcaactgtcttcactgtttttatgtatacctagaaagtctctttcctgcaaggtccaaataaatatagaaaatatttttctctttttgaagaatagttttattttttaatacttcttttaattaatatagttagaaatcattttactgaataattaactatgtcaagaaattatttctgatatcaaaacatttatagattatgttsagataaaaaatgtcataaatgaccgtatataagagatttcatcaactagtttttcttgtagtgaaattctatgttgtcttaataatcttgttcttggataatatgtaaatcagaaaaatgcttataaactagtattaattgtaaacagcaactaaaacaatttttataatttaatctctataaatgtaactgcatttaaagttctcactgtataagctgctataatataaaaataaatatagatagattctaaaatgttaaaattggttgt

SEQ ID NO: 429324 - DNA, 492 bp, Homo sapiens
ttatttattgactttgcaactgtcttcactgtttttatgtatacctagaaagtctctttcctgcaaggtccaaataaatatagaaaatatttttctctttttgaagaatagttttattttttaatacttcttttaattaatatagttagaaatcattttactgaataattaactatgtcaagaaattatttctgatatcaaaacatttatagattatgttgagataaaaaatgtcataaatgaccgtatataagagatttcatcaactagtttttcttgtagtgaaattctatgttgtcttaataatcttgttcttggataatatgtaaatcagaaaaatgcttataaactagtattaattgtaaacagcaactaaaacaatttttataatttaatctctataaatgtaactgcatttaaagttctcmctgtataagctgctataatataaaaataaatatagatagattctaaaatgttaaaattggttgt

SEQ ID NO: 429325 - DNA, 534 bp, Homo sapiens
taaaaaccttccattttacttgactggacttaatgttctcattttttttcctgatttgatgggacactaaatgatttgatctattactagagaataaggaaaagagagcataaattgctatttaatgttcataattacatacctatatcagaatcagcttttgaaaacattgtaaaataaatagtatattgtttccagagtttatctccactgtattaagaagcattgtaagaacagcaccgggctccagagattcggggtgacttggaagatgacagtgcaagcgaagtgtgtattttcagcctttaactggcctgataccctaagcctaaagagaattcctcatattaagatatcataaatattgtttcctacatgttatttactttaatcttcctaacctctaatggttctggtatcactgytattgcccttttataataatactgagaaagttgaagctcaggatagttaaaacgttatccaaattctcttctaacactgaacttgcttgtgctagtttattgccaagtc

SEQ ID NO: 429326 - DNA, 544 bp, Homo sapiens
tatgctaatgaaccacttactattgtataatgattttttttcacaatattgcatagtcttgcctttttttgcccattgtgaaaccaccaaaacctagcacattggaagttaataaatgttgaatgagtgaaatatttcttrgaacaattaattttagagtctaagtaattttaatatatatgtagtttaatattttataattaaaaatttaacacttttgaaaatatcatttgtttcttaaattttagtataataatgcttcagtccacactatctctctgtcttgccctctaatcaaatcttacttatttgtttgctgctcacaattgcctctgcaggatgtaaacagtggcagttcttacggctggcttgggatggaggcagctttagccactggattgtacttatcagtggccccatcaaaaaaagcactcccaaaacaggcaatgtaaataaaaattagtcctgcttcacatccttcttgagctgtgtaatggaagaagtgttacctgagttgtcgttatcggcccttggtgctttatgg

SEQ ID NO: 429327 - DNA, 587 bp, Homo sapiens
tgtctgtctgtgtgtgtatgcatgtgtttatttgtatacattcatacacaaagtacatttcataagaattcttataatagctttattggcttaaacatagaagatcagataccaaacataaatggaacagcaatatataaaagcccccattacatatatcttattaaagrgaagggaacaaatatgtattaaaaacctcccattttccaggatctctgtggtaccatggaatgcattattttatttctcttcaaatagtcttatgaaggaggtattgttatccctgttttactaataatgaaactcatttggacaagtcaaataattttctcaaggtcccatgattattccttgattagtaataagcagagcttgaattcaaacttagttctatctaccaaattctaaagtctgtctatgtctttaaggattagctgaagtggatcttaaataaaatcacttcagctaaagtatctttctcactttgcctgttagttatacggaggaaggaagtgagacactgagagttccttagaatcagagcatgatataactggcattaaggcttaattccttctgcacataac

SEQ ID NO: 429328 - DNA, 587 bp, Homo sapiens
tgtctgtctgtgtgtgtatgcatgtgtttatttgtatacattcatacacaaagtacatttcataagaattcttataatagctttattggcttaaacatagaagatcagataccaaacataaatggaacagcaatatataaaagcccccattacatatatcttattaaagagaagggaacaaatatgtattaaaaacctcccattttccaggatctctgtggtaccatggaatgcattattttattyctcttcaaatagtcttatgaaggaggtattgttatccctgttttactaataatgaaactcatttggacaagtcaaataattttctcaaggtcccatgattattccttgattagtaataagcagagcttgaattcaaacttagttctatctaccaaattctaaagtctgtctatgtctttaaggattagctgaagtggatcttaaataaaatcacttcagctaaagtatctttctcactttgcctgttagttatacggaggaaggaagtgagacactgagagttccttagaatcagagcatgatataactggcattaaggcttaattccttctgcacataac

SEQ ID NO: 429329 - DNA, 509 bp, Homo sapiens
tgcacaatttaaaacttataaattctctatttccagaattcttttatttacatcataatacctacatcattcacctcccttcatctcatcacataggcattatatcatctcacatcattacaagaagaaggataagtactgtrtaatcagataatttcagagagacacagaccacatgctcattttattacagcatattgttatagttgttccgttttattaacagatactgttaatctcttaatgtgcctaattaataaattaaacttcatcataagtatgtatgtataaaacaaaagtataacatatatatggcttggtgctatctgtgatttcaggcatcaactgggactttggaacacatcccctaggatcagaagacttccgtatctgtgtgtattcttgttgagtgacagaaaaaaagagttgtttcatatgcattaacttggaagcatagaagacaccctaaaagataatgttgttttgagctggcatagtctgcaggaatc

SEQ ID NO: 429330 - DNA, 620 bp, Homo sapiens
gccagtttgtgaatatgtatcaacattttaaatgtgcacaccttgaaactcaggaactttaattctacagattcacctttcttaaaaaaaaaaagacagtccttttttaaagagaaaacatacaaagatatgtccattgcagcatttttataaaacaaacaaaaaaatcataaataycctaaagaacaccactacttctctattcttcttagccacatgagatcttctaaagattcttgaatataccagctatgttcctgacttagggcctttgtcctggccattccctcagtctagaaaattatttcccccaaatctacatctcattctctctcctctttgttgcatttccttacatatcacattatcagtgaggccttctctgggaaaatactggtgatcatcttggcattgtgtgtttctttataattttcttgaaggaaaaaggaagtcagctagcttctatgctgccattttggaactagaagtctcttattgttgagttttaagagttctttgtgtattttggataacagttctttatcagatgtgtcttttgcaaatattttctctgttgatgacttgtcttctaattctcttgactttgtccttcacagagg

SEQ ID NO: 429331 - DNA, 487 bp, Homo sapiens
gtccaagctccccagctattaggtatcttagctagaattccaagttcccttcttaccatgatgtattctggaaatttaatgcaaactaggaagctgaaaactcttccacgtatctaggaccaaagcagaaagaagctcgttccttgtcagcggtgtctgcaacagtgtatggctgatacctcctgggtatcttggagatgactctacttgcaacgttctatacwaacaaagatggcagagacatgacacagttagccgtattttaaatggctattttaaagatgattttctcttttagagcagctgttttcaattttgactgcacatcaccatagatggaggagtgcttttgttattgttttatttaaattacagatgctcagaatttttcttttggaagaaaataaatattctcagaatcttatgaagatgtcaacattttattcaggcaaaaaatgcaaacatgctcatatgcataattttttgc

SEQ ID NO: 429332 - DNA, 569 bp, Homo sapiens
tatggtttcctctggttgccttttatgtgaaaagttattcatactcagaggagatgagatgatatgatctggggtccaatttgttgaataccataatgtattctgttaatcactatcaccccggagcctgactatcacagggatttttttctttttttttttaacccaaacttggccaatttctgtggcatattttttgaggacaccacaaagattgcctataaattgatatctctctccaaatttaaaacttgctcagctaaaatccgtttgacttttcaggctcaattttcctttaggcctctccttgctttcctcctgtgcccaaagtcaatgattttctaagagtcctctttactgattgccttgggctcyactagttatgggatgaaaacttgaattgaccagcagccaggacattggggtgacacagcatcttctacaaataaatctgtcagaggtaagaatgggcttctgcttgttaacaaatgtattgatcatgataaatgttggaccaattgtcctcagaaatggacgatagtctcaacacacactacttgggggttgta

SEQ ID NO: 429333 - DNA, 573 bp, Homo sapiens
ataaaattacaattggaatcatgcatatagacatacattcttctttctcacttgatattgcgttgtattttctaaattattaaatattcattttttcagtagttttgttcctacactaatatatatataaatattatttttattatttttgagattggatattatttgtttataytgatttctccctacctctctttctctcatatattttgtcttatccaatattaaatttatttaagtttatttattttttctgaggatttttttgactagaacccaacattttgttgctttcacattgtaaagtgtctgtaataccagttttaatttcctctttgccccaacacttatttatcaaggcatattttaatgtatttcatgtttttagttttgcttgtattttttgtttattgctttgaggcaaaaaagattgcatatttttcatgttttgaaattttttgattatttatgtaaatgtattacagacatttaaaagaatatgtataatgggcatctaggcacaaatcctattcatacctcttcagtctggcttattaattaagagagcattgc

SEQ ID NO: 429334 - DNA, 573 bp, Homo sapiens
ataaaattacaattggaatcatgcatatagacatacattcttctttctcacttgatattgcgttgtattttctaaattattaaatattcattttttcagtagttttgttcctacactaatatatatataaatattatttttattatttttgagattggatattatttgtttatattgatttctccctacctctctttctctcatatattttgtcttatccaatattaaatttatttaagtttatttattttttctgaggatttttttgactagaacccaacattttgttgctttcacattgtaaagtgtctgtaataccagttttaatttcctctttgccccaacacttatttatcaaggcatattttaatgtatttcatgtttttagttttgcttgtattttttgtttattgytttgaggcaaaaaagattgcatatttttcatgttttgaaattttttgattatttatgtaaatgtattacagacatttaaaagaatatgtataatgggcatctaggcacaaatcctattcatacctcttcagtctggcttattaattaagagagcattgc

SEQ ID NO: 429335 - DNA, 573 bp, Homo sapiens
ataaaattacaattggaatcatgcatatagacatacattcttctttctcacttgatattgcgttgtattttctaaattattaaatattcattttttcagtagttttgttcctacactaatatatatataaatattatttttattatttttgagattggatattatttgtttatattgatttctccctacctctctttctctcatatattttgtcttatccaatattaaatttatttaagtttatttattttttctgaggatttttttgactagaacccaacattttgttgctttcacattgtaaagtgtctgtaataccagttttaatttcctctttgccccaacacttatttatcaaggcatattttaatgtatttcatgtttttagttttgcttgtattttttgtttattgctttgaggcaaaaaagattgcatatttttcatgttttgaaattttttgattatttrtgtaaatgtattacagacatttaaaagaatatgtataatgggcatctaggcacaaatcctattcatacctcttcagtctggcttattaattaagagagcattgc

SEQ ID NO: 429336 - DNA, 610 bp, Homo sapiens
tgatatgcaaagggtgatccaaggagcttgttaaaaatgcagacttggtctgaataagaatctgcttgttaacaatattctcagataattcttgtgtacctaatgtttgagaagcactggcttagaatgcttatgccagactgtagatagtacccccaagcattaagtgtttgcaaagcagacaatatggagaacttgtgtatctttccctctcaagaggacttgaccctgaacagaactgagccatggttgagttggtgtttgaacctcctgcctggaaaaccatacctagaaacacctatggtctctacccttccctaggatataaataagacttgggcttggaacactgaaatggcctgaagactcctgagcaataatgtcttttcaaccttagaaggaagcttccttctcattgctggacttgctatagcctcatggtaacaagtgaggcttcttagcagaaattctcaatgatgtgttagaaattggctgagggactagcaagtcagtccttcatttatccatcctgtgagcctttcttacagcygttttatcagtaaaattagccccttttgtcctgaggaaagggtaaagaaaactttcattt

SEQ ID NO: 429337 - DNA, 502 bp, Homo sapiens
aaaatataagcaagtacatatagaactaaataataataaatgactgttttaaaacttttactctgtgctaagcaccttacacggattatgttatttaaccagtgccaagaaattttcaaaaataatattaacatacaataaaagaaaaactttgctttttagatgaaaaatttargctaagacaaataactaacttatcaagttaaggactggtcaataggtaaaccaggattttaatctaacagtcaaacttcagagttgactatattaagaatggtactgctatactggcacatttgtaagtctcgctgagggttatattttgatcctaaggtaaatagaaaccatggaaaggctctatgtgcatccattgttcattaaatttccatttccttaaagatcaccctgactacaacttggagtacagactggtggaggtgggttgacaggtggaatagagtgggacatgggctagctagctgttatgggctgaactgtgtcc

SEQ ID NO: 429338 - DNA, 614 bp, Homo sapiens
atggtactgctatactggcacatttgtaagtctcgctgagggttatattttgatcctaaggtaaatagaaaccatggaaaggctcyatgtgcatccattgttcattaaatttccatttccttaaagatcaccctgactacaacttggagtacagactggtggaggtgggttgacaggtggaatagagtgggacatgggctagctagctgttatgggctgaactgtgtcccctcaaaattgatatgttgaagccctaacccccagtacctcagaatgtgactgtatttggagacaggacttctaaagcagtaagttaaaatgagcttgttaggatagggtctaattcaatttgacttggatatttataagaatggcaaatttggaaacaagacaagacattaggaatgcatgtgagacactagggatgaccatgtgaggttacagagagaagagcgccacctccaagccaaggagagaagcttcagaggaaactaagcctaccaacaccttgatgttggacttctagccttcagaactgtgagaaaataaatctctcttgtttaggccatctagtctgtagtattttgctatagcagccctagcaaactaacaca

SEQ ID NO: 429339 - DNA, 444 bp, Homo sapiens
gggtctgtagatcaaaggaaaggtctgatctggaaataaaaagttgtgattcatcagcacataggtaacaactaaagccataggtttgtaacaactcaatagactcttcttgtctactgcccagraaagccaatgcactgagagcagaaggttttgtagcaaagaaagagttaaataatggcagggtcagccaagcagagggacaggaaatatttgtcaaatctgcctcctggagaattctgaggtgagggtttttcaagtatagtttggcaggcagggcactaggggatggagaaggctaattggctaggtcagggataaaataataaggggtcaaagctctcatattctgctgagtcagttcctgggttgggggcatcacaagatcaggtgagtcagtttctcggtatggtttactgctccaagtggcaccagcttgtgcat

SEQ ID NO: 429340 - DNA, 582 bp, Homo sapiens
taagctgtagattgctaagacctaacctataatacagtgcttcaaactgtgcatttcagagtcctggcatttctacctacctcgtggactggttatcattttagaatgaaccttttgcagtgctaattcctgggctaaataacaatagtaatgatgacaataataaaaatattcagtggtggtggtgrtgatgatgacaataatgatgttatcactacaggttccattccaagtggccttgtttgtcagagaattgagcagaaagcaaattggaaatctgaaatgaaaagggttaactggtaaattgccatgtgtgaatctgctttggtttttgcattttctgtaagacaatttgaattctaaatggcactccaacccagagagtgtgaaatctgaaacttgcactgtgaaagtcatacaactgagctctgataagtaaccttaaataatttgagacttaatgcaccattaagatcatttctgttaccatcttgtaacaattgtgtggccaatgttaatagatagatttccttttagaaaggctggggccttcctccagccctgaatggcacgcctggactg

SEQ ID NO: 429341 - DNA, 582 bp, Homo sapiens
taagctgtagattgctaagacctaacctataatacagtgcttcaaactgtgcatttcagagtcctggcatttctacctacctcgtggactggttatcattttagaatgaaccttttgcagtgctaattcctgggctaaataacaatagtaatgatgacaataataaaaatattcagtggtggtggtgatgatgatgacaataatgatgttatcactacaggttccattccaagtggccttgtttgtcagagaattgagcagaaagcaaattggaaatctgaaatgaaaagggttaactggtaaattgccatgtgtgaatctgctttgrtttttgcattttctgtaagacaatttgaattctaaatggcactccaacccagagagtgtgaaatctgaaacttgcactgtgaaagtcatacaactgagctctgataagtaaccttaaataatttgagacttaatgcaccattaagatcatttctgttaccatcttgtaacaattgtgtggccaatgttaatagatagatttccttttagaaaggctggggccttcctccagccctgaatggcacgcctggactg

SEQ ID NO: 429342 - DNA, 498 bp, Homo sapiens
aagtcataggagagtgttacctatttttagacaagtgcttttgtaaatttcatacacaatggtagaagaatattttaaaccctaattgaactaaaccatctcattatctggctctactgaccaaagcgtgttgccatggtgataagggaatcaagtcagcaggtcctactgtgagaattttccactccagatgcttcatcagttccatcttgctcatctccagacacattgtgatcaatttaatggcagagaaacaggmtctacaaagggggagaaaaggagtgtttttagcaaaccttatgccaaaatatgttgacatataatttacaaaataagcactttctaaatacaataacactttaggtttttcaagaacaaatgaaaacctttaaagatatatgtattaatttaacagtttatgaatttttatacatatccaggtaaaaatcaaagctcaagcaataaaatgtttcgttgtctgcataactggtcttaaat

SEQ ID NO: 429343 - DNA, 498 bp, Homo sapiens
aagtcataggagagtgttacctatttttagacaagtgcttttgtaaatttcatacacaatggtagaagaatattttaaaccctaattgaactaaaccatctcattatctggctctactgaccaaagcgtgttgccatggtgataagggaatcaagtcagcaggtcctactgtgagaattttccactccagatgcttcatcagttccatcttgctcatctccagacacattgtgatcaatttaatggcagagaaacaggctctacaaagggggagaaaaggagtgtttttagcaaaccttaygccaaaatatgttgacatataatttacaaaataagcactttctaaatacaataacactttaggtttttcaagaacaaatgaaaacctttaaagatatatgtattaatttaacagtttatgaatttttatacatatccaggtaaaaatcaaagctcaagcaataaaatgtttcgttgtctgcataactggtcttaaat

SEQ ID NO: 429344 - DNA, 605 bp, Homo sapiens
ccaaacttgaatttgtccagctgactggacaaacacctatatctctgcttagaaataagtggccttcttgagaaagaagaaaacccagcctctttaattttcrtaacagaatattgtctttcttgcccaaatagatgtctattgctcttcagccaacctggagtttacttccatcagttaccctgactgatgttttgcaaagggaagcccataaagagtctagtcacccttagaggcaacatgtttcctattcagatcttttaaaaggccagactctcggttcatctgttcaggatcagaaaaagacctggaaagggaaggggattctctacagaatataaattaccccacaggagacagctttgcagggccacttcaaaatatgtcaaagaaatatattttggggtaaaatacttaagtttctgtccaggcctgctgtcatgtgatgctatactagattcaggttggaatctcgtatcttattgctacaaagagtctgtttcatcggtcataagatctctgcttcccatcatggcctaaactagtttttcaggtttactttggaatccagttggccaagaggaggtttcatccagctggttggg

SEQ ID NO: 429345 - DNA, 633 bp, Homo sapiens
gacaaataccggttgggcacccaccatgtgctggcactatgctcctgactgtgaagcaaaatcagtctcgtttatactccttggagctcattgtccaatgcagagacagtcattgaacaataatactcacatcagtaatagacccagttacagatygtaaagagtgcttttcagaaaaacaaaggcgatgagaaacttgaaaggggacctgattgagactggggactgggaaggcctcatgggggaaatgacatgtaagctgagtcctggaggatgagtcagagttgaccacacatagagtccagagacatttccaggcaggaagaagaaccgatgtgagctggaacctggcaggtaaggggagggaggctgagtcatagggacaagcaatgaccagagcaccccggggcctgctgattgctcttatcccaagtgcaatggggtgacattaaaggatcctaagcaggtctgatcttgcaaacgtgatcacacatgagtttgagaaagatcactctgcaatgtggaaaacagattttgggaggcaagagtagcgtcaaggaggccagttcagccactactgcagcagcccaggtgtgagcttggaccagtggcagtggggatggagagaagtgg

SEQ ID NO: 429346 - DNA, 543 bp, Homo sapiens
tcccttgacacgtggggattacaattccagatgaggtttaggtggggacacaaagccagatcactttggttgttcagatatttagtttcctgccacttggaaaccttgctggatttctgtgggatgacaataattttaaaaatagtatttactggatgcttaccatgttcagacatgattctaagtgctttctctgtattaatcactaaatcctcataataaccctatgtgggtagatattagtaaccacattcatagataaggacagtgtcccagcaagcctaggcaggtttgcctacagccgtggagtggtagagccagtatttgaacccaggaaatttgcctctagcaccygctgctttgcccacaggctgtctcagaagtatggaaagcagtgctgttcatacaattcagttcactccacacacttgttggggcataacaagttcttcaagggccacataactctagcactgtatatttcatatttattgagtgcttctgttttctaggcatggtaccaagtgccttcatatacaagcc

SEQ ID NO: 429347 - DNA, 576 bp, Homo sapiens
ctgacctttcctgacactacagcatcctacttcactgaccgctgcttctcctctttcatcttccatgctggctcctcccatcctttgtgaacttctccaaaagctccagtcttagtactctgctgtgacttctttaggctctcagaacttttaaccagcattccaatgatgatgataacaccctcgcccccacctcccatcccaccccaaattgctagtcttctttctcactcatgtttcaggcttttgctaactacaataatttccacttgaatgtttctggaattgcagactcagactgccctaaagtacactcataatcttccacctcatatataacacttgtttctgattctctaacttctgctaatggtactaacatgtggctttsaaattttacaattatctctggctcttccttctccttaattcttcataggtaatattaagcatgtatttttcttcaaaatgacttgtatctatccattctgcttcattcccatgccatcacctcataccttgatagcactaatggcctcctggttggccttttttttttttggtctctccccttcc

SEQ ID NO: 429348 - DNA, 550 bp, Homo sapiens
caaaatagttacattaaaaaaaaaaaagacaagaaaaaagccaacatttcctacagttaaaatttctattcacaatagctgaatctgagtgataaataagtgtgggttcagtgtactattcctccctttttttgtgtatctttaagactttttataatgaaaaaattttaatcatctttattttcaaacattacctaagtgaaatcatcccttatacaaagcaaattatacaagaaaatttataaagtaacttcaaaataaattgattttaaaaacaaaaaaagcttaaacacataacaaagtttttatttaatatatacaaaagctcaagaatatggtcataaacagagataaccatttgtagctataagatctctctgagataaacaytgattttaacattcttggaaagacaagttactggaagccacagattctatgaaaacacccagtgactattcataagcaggaagattaaaaggcaaacctctattcagcaaacatcactgtttataaattgccttaaagtcccctcaagatgagtcatttt

SEQ ID NO: 429349 - DNA, 595 bp, Homo sapiens
agaccctttactgtcagaagctgccttagttagagactatcgggatgggggtctcacttaggggctggaaggtgaggagaaagttacaagaaaggcctaggaattgaacgcgtgtaggttgggtgcacttacaagtaagtataaactgctcttcaattcaagtttattaatgctgccccaccccagggttttaatccggtctgggcagaagcgggcgataaaagccaaaggagaccataaagtgtaggatatttcctggttagtggctgccgggtaatcacgatgcatccatcttcctcggcgtcgcagccctcagtagccagaaggcagtctccttccctggggggcaaaagccccgagcccagcctgcccgttgccccgctcccgcggtggatgaacctcaacccttcccaggctccttcctggccccagggtcccaggamccccgagaccctggggtgcggcgccactgaggcccagaccgggggaaggagaccctgtcactcgggagcggagccctgtcccgggagcgcacggaaatgcctcctccacgctcccaaggttcctgctccgccaggcccaaccggaaggagtc

SEQ ID NO: 429350 - DNA, 356 bp, Homo sapiens
ttggagtgtaagctcctcggagcagagatcctgtttccgtatttcctgtacctagaacagtgccagatccgtagtagacactgaaacaaaaaatctttaaaaaaaaaaawatatacgaatgtggcaccaccatttacacaggccactaagccaaaaatctcgaacttgtcagattgtctcttctcagccatcagcagtcaacaagttctagcatttggtctcttaaaagtggttcaagagtttatttttcctctccttcctctgccagtaccaaccagtcttccgtatcactatgtattgcaagagtctcacaagaagatatccatcactgactgatcttcctcccgtttaacatc

SEQ ID NO: 429351 - DNA, 544 bp, Homo sapiens
cactgaaacaaaaaatctttaaaaaaaaaaaaatatacgaatgtggcaccaccatttacacaggccactaagccaaaaatctcgaacttgtcagattgtctcttctcagccatcagcagtcaacaagttctagcatttggtctcttaaaagtggttcaagagtttatttttcctctccttcctctgccagtaccaaccagtcttccgtatcactatgtattgcaagagtctcacaagaagatatccatcactgactgatcttcctcccgtttaacatccccaacaggtgccagggtgatgttttttttattctaaaaagaaaccagattatatcgctcactcccttgcttaaaacagttcttcaatgttaggtaaataaatcatggagtcaccacgagggcgttcatctgccaggcactattctgaacgatattggctcattaaattctcacagaaaccctatgcagcaggtacggtgaaaatgttcctgttacagatgaggtaactgaagcacagagagyttgagtggcttgctgaaacacca

SEQ ID NO: 429352 - DNA, 635 bp, Homo sapiens
ggaggttagaacacgggcagagaagagatgctgatgcccagatctgacagtggagtctaggacaccaaggccagccttcaatcctgtctataagcaggtcaaacattgaagtcattctggagagagtcccattttattatctgctcaaatatccccgtattttattgtgaacattgcatactcacactcttttttyacaccaaaaatgcacccaaaccccaagttctatcaattacaaactgcttcgtaaacattgtttctttagcaaaaaatgttttcctgcttttctctccccatctctatcacaacttgcttccagactccccaaacaactcaaccaccatctctttttacacatttacatgcttcctagtttctatcctttaatttttggaacctgtttccccggttgtcttctctttctcttctgttaacaaaatcccaccgaaaccttgtagctaaagttttaaacttgacaactcttttatcttggtacaattagacaactgcttccaaagtcctcaccttcaggaataaaaggccttggatcttgaacctcctcccctaatactgagactttcttggagaggtataaaacaatgcctatgagatgaagtctggcaggtttgccacac

SEQ ID NO: 429353 - DNA, 635 bp, Homo sapiens
ggaggttagaacacgggcagagaagagatgctgatgcccagatctgacagtggagtctaggacaccaaggccagccttcaatcctgtctataagcaggtcaaacattgaagtcattctggagagagtcccattttattatctgctcaaatatccccgtattttattgtgaacattgcatactcacactctttttttacaccaaaaatgcacccaaaccccaagttctatcaattacaaactgcttcgtaaacattgtttctttagcaaaaaatgttttcctgcttttctctccccatctctatcacaacwtgcttccagactccccaaacaactcaaccaccatctctttttacacatttacatgcttcctagtttctatcctttaatttttggaacctgtttccccggttgtcttctctttctcttctgttaacaaaatcccaccgaaaccttgtagctaaagttttaaacttgacaactcttttatcttggtacaattagacaactgcttccaaagtcctcaccttcaggaataaaaggccttggatcttgaacctcctcccctaatactgagactttcttggagaggtataaaacaatgcctatgagatgaagtctggcaggtttgccacac

SEQ ID NO: 429354 - DNA, 635 bp, Homo sapiens
ggaggttagaacacgggcagagaagagatgctgatgcccagatctgacagtggagtctaggacaccaaggccagccttcaatcctgtctataagcaggtcaaacattgaagtcattctggagagagtcccattttattatctgctcaaatatccccgtattttattgtgaacattgcatactcacactctttttttacaccaaaaatgcacccaaaccccaagttctatcaattacaaactgcttcgtaaacattgtttctttagcaaaaaatgttttcctgcttttctctccccatctctatcacaacttgcttccagactccccaaacaactcaaccaccatctctttttacacatttacatgcttcctagtttctatcctttaatttttggaacctgtttccccggttgtcttctctttctcttctgttaacaaaatcccaccgaaaccttgtagctaaagttttaaacttgacaactcttttatcttggtacaattagacaactgcttccaaagtcctcaccttcaggaataaaaggccttggatcttgaacctcctcccctaatactkagactttcttggagaggtataaaacaatgcctatgagatgaagtctggcaggtttgccacac

SEQ ID NO: 429355 - DNA, 622 bp, Homo sapiens
ggacatctttaggggagcataattttggataccacagacttgcacattctaactgctacacattttaaattcttttgtttttgatacttgccacttcatgttgtctttctccaaatctgtaaactcagattttgcatacctccaggggagaaaattcctctttaaatgtttgtttttctttttttctttctttctttcttttttttttttgagacggagtctcactctggcccaggctggagtgcagcggcgtgatcttggctcactgcatgcacctctgcctcccaggttcaagcgattcttctgcctcaggcccctgagtagctgggactacaggtgcctaccaccatgcctggctaatttttgtatttttagtggagaggggtttcactgtgttagccaggatggtctcraactcttgacctcgtgatctgcccacctcggcctcccagtaaatgttttaaacagcatctgaagacatctttttactgataatagaaaaactttgctttacattagacgttttttctcttaactgctctacttgttttcttgtttaacctgcttgcctatctacttaccatgcttacctatctacctgcttttcaaaatataaaaattg

SEQ ID NO: 429356 - DNA, 601 bp, Homo sapiens
taatggctgtagtctgtgcacaaagtgccactggcatttccatccacctggagatgtaactgccccagtcctggccagayttcatagggttaatttgaaaattgcttccaaggagaaggcagggaaagaatgtgttggagagagactgaaggatctacatcagaataaggtggaattgactgaattaatttatatgacttgaggaactcatgttgaccctgtctgccaccttacttttatatatatgttatatatataacataaaatataaaatataatgtaaaagtgaggtgggtgtgtatgcatatatatttatatatatttatatatatatggggtagtggaaggaagggggagttaattatcaaggcttcatgtttaccaatttttgattagcataatctcatcttgaactttgcttggaagagataatttattttcctggagttttattgtacaagcgcacacacacacatttgtacacacacattcttgggccagcttctctcacacagctgaattatgtgagattgatctcttatagtctctccttttttctataaagcagaagctctggacatcactccctcaccaataggat

SEQ ID NO: 429357 - DNA, 603 bp, Homo sapiens
ttttttcttttttcttttttttttttttttgagatggagtcttgctctgttgcacaggttggaatgcagtggcgcaatctcagctcattgcagcctctgcctcctgggttcaagaaattctcctgcctcagcattccaagtagctgggattacagccrtgtgtcaccatgcctggctaatttttgtatttttaatagagatggggtttcactgtattggccaggcttatctcaaactcctgacctcctgatctgcctgcctcagcctcccaaagtgctgggattacaggtgtgagccaccacacccggcctactttctttattttctaactagtcctttaattccttctctgggcagtatcaagggcctggacaccagggaggttaaggtcccaccagcttctgggggcctctcttagtccaccagtatcagtagcagtagtagagtaacattatttgttgctgtgctgtttaagtcagcttgagttgagcttctttagtttgtaactggaaaattcctagttaatatagtaccatacaggattccagcaagggggaaatcaggtgcttactacatataaaacgcttagcatcattcctaaaa

SEQ ID NO: 429358 - DNA, 632 bp, Homo sapiens
tcaacttcaaattatggaagaacttagttctcaatattttcacctttgaaggactaagtagtttgttgtctgggagctggatggtrctgctcagagcgacagtatatttgcatgaattaaaatactggcatatgttctcctcaagcttcctctattttctgttttgagaaacaatgacaaaaacgttgcctcaaatcagaggacttttagaaaacaaaaccaaaaggcagtggcataattaattcctgtcattcttgttaggatgatgcatataaggaaagttttggaacaatctggaagaaagctctgataaaattacagaagagataggtaatttttctaatgattattaatcattaccatcttcatcattctcacttctgttattaatgttcatattgagcttacgactggccctgaattatggtaattaatttctggtccacacactgatttgcattcatgttcaagagctcaattaacagatttttgggcagaactataagtcaaacaggatcactaccaatataaataaagaaatttctatattacacttttggaatagagaaatgaaagacacatgcttgacaaaatcgtttcctcactgtggacactagccatggtttggacta

SEQ ID NO: 429359 - DNA, 632 bp, Homo sapiens
tcaacttcaaattatggaagaacttagttctcaatattttcacctttgaaggactaagtagtttgttgtctgggagctggatggtgctgctcagagcgacagtatatttgcatgaattaaaatactggcatatgttctcctcaagcttcctctattttctgttttgagaaacaatgacaaaaacrttgcctcaaatcagaggacttttagaaaacaaaaccaaaaggcagtggcataattaattcctgtcattcttgttaggatgatgcatataaggaaagttttggaacaatctggaagaaagctctgataaaattacagaagagataggtaatttttctaatgattattaatcattaccatcttcatcattctcacttctgttattaatgttcatattgagcttacgactggccctgaattatggtaattaatttctggtccacacactgatttgcattcatgttcaagagctcaattaacagatttttgggcagaactataagtcaaacaggatcactaccaatataaataaagaaatttctatattacacttttggaatagagaaatgaaagacacatgcttgacaaaatcgtttcctcactgtggacactagccatggtttggacta

SEQ ID NO: 429360 - DNA, 632 bp, Homo sapiens
tcaacttcaaattatggaagaacttagttctcaatattttcacctttgaaggactaagtagtttgttgtctgggagctggatggtgctgctcagagcgacagtatatttgcatgaattaaaatactggcatatgttctcctcaagcttcctctattttctgttttgagaaacaatgacaaaaacgttgcctcaaatcagaggacttttagaaaayaaaaccaaaaggcagtggcataattaattcctgtcattcttgttaggatgatgcatataaggaaagttttggaacaatctggaagaaagctctgataaaattacagaagagataggtaatttttctaatgattattaatcattaccatcttcatcattctcacttctgttattaatgttcatattgagcttacgactggccctgaattatggtaattaatttctggtccacacactgatttgcattcatgttcaagagctcaattaacagatttttgggcagaactataagtcaaacaggatcactaccaatataaataaagaaatttctatattacacttttggaatagagaaatgaaagacacatgcttgacaaaatcgtttcctcactgtggacactagccatggtttggacta

SEQ ID NO: 429361 - DNA, 632 bp, Homo sapiens
tcaacttcaaattatggaagaacttagttctcaatattttcacctttgaaggactaagtagtttgttgtctgggagctggatggtgctgctcagagcgacagtatatttgcatgaattaaaatactggcatatgttctcctcaagcttcctctattttctgttttgagaaacaatgacaaaaacgttgcctcaaatcagaggacttttagaaaacaaaaccaaaaggcagtggcataattaattcctgtcattcttgttaggatgatgcatataaggaaagttttggaacaatctggaagaaagctctgataaaattacagaagagataggtaatttttctaatgattattaatcattaccatcttcatcattctcacttctgttattaatgttcatattgagcttacgactgrccctgaattatggtaattaatttctggtccacacactgatttgcattcatgttcaagagctcaattaacagatttttgggcagaactataagtcaaacaggatcactaccaatataaataaagaaatttctatattacacttttggaatagagaaatgaaagacacatgcttgacaaaatcgtttcctcactgtggacactagccatggtttggacta

SEQ ID NO: 429362 - DNA, 538 bp, Homo sapiens
tggcagaaacttttatgtgttcatcacaatgaattaaatatatttcttctaccacttaggcgcatagttcatctgcatgttgcagactgactgctattagatgtggccatgtggctaagttctgcccaatggaaagggggaagaagtagaatgtgttatttattcccaggactcgcccattattttgtctcacatgaatattcaaatcctctcaggatgtatatgattatgagagaacacttagaatctgagggtagactcataataattgaagtctgagcttcatggaagtactggcccaaaaagagactcatttaagtaattacacagggtaagaaataaactattgtgctcagccactgaaatctgggagtttgtaacagcacctggtgatattttaatattatagtaatatataatctcctaaactcctttaggactaartatttttaaatatttgtgtgatatgtgatcaaaagtgactttaaataaatgtttcattgttaattagtgtatttttaattcttttagctgtgtg

SEQ ID NO: 429363 - DNA, 579 bp, Homo sapiens
attcacttttggtagctatcatggctctgtcttgttttagcttggggacagccaatctgtgacttgtcaggtctgtgagttttcctgggggcctgcagtgagccccacatggcggtggagactagggaaagttgaagtagaagatacttttctgttctcaaggagtctgactcattggagcaaaaaactaaacaaagttgaataaatttgcctgatagcttttttcttctagctcatgtagtatttgtgtcatattaattacttacttttatttaaatttatttagttacttttatttaaaatcagcttcattacaagtacagattattatcatattttgaaaagtgggagatctggcactagtgaccttgaattcctgtaatgatcacctgtagctaaaaagcccttatgggtgtacmtttttcagttttctacagttcccaccagtccccttgtataataatcagcctatttgattcttattcattatctgtgaggatacaagatttcaatatattggcttagatagttgaattggaattcctacaggaagttgatactaacaaaaataacatataa

SEQ ID NO: 429364 - DNA, 579 bp, Homo sapiens
attcacttttggtagctatcatggctctgtcttgttttagcttggggacagccaatctgtgacttgtcaggtctgtgagttttcctgggggcctgcagtgagccccacatggcggtggagactagggaaagttgaagtagaagatacttttctgttctcaaggagtctgactcattggagcaaaaaactaaacaaagttgaataaatttgcctgatagcttttttcttctagctcatgtagtatttgtgtcatattaattacttacttttatttaaatttatttagttacttttatttaaaatcagcttcattacaagtacagattattatcatattttgaaaagtgggagatctggcactagtgaccttgaattcctgtaatgatcacctgtagctaaaaagcccttatgggtgtacattttkcagttttctacagttcccaccagtccccttgtataataatcagcctatttgattcttattcattatctgtgaggatacaagatttcaatatattggcttagatagttgaattggaattcctacaggaagttgatactaacaaaaataacatataa

SEQ ID NO: 429365 - DNA, 695 bp, Homo sapiens
aagagcatgagtaatttgctgagggtgtctgaatagtcataagctatccattactgacctgcttcccataaagaatgagctgagagtcctgacttaagactcaggaaggagtgaagatggacgctcagcctgtttcagcagtggatcrtcatgtgattccaccttacttggtaaagagcaatcacaatttctttaaacaagtctctgtcatccttcccttagtgataatggctttcttaatatcttgattcttgttatatgttatctatgacagtgccagttattcagagtaaaatttaaaaaataatcttctatgctgtgttccagatggctcctataattggtttattacttttacagatgttttggagaaatttcagaaaataagctaacagtagattgcatcagctagtgaaagtggccttcccctgttgattcttctgctcggacaaatataatctgtgcattagctgaagtgctatgtttcataggcccagaatttatgggatttgagggattacaggtttattgtttaatatgggaagatggtcttgttgcttcttggaagactggacccctgcaaataagtttaatagccacaaatcatatttcccattgaactgacttttaagaaaattatataattataatcccctatttttaaactccattttatagttttaaaggtttttgac

SEQ ID NO: 429366 - DNA, 644 bp, Homo sapiens
tctttcagctgtttaataagagttcagattagtgtcaacaaactgaccctactaagacagacaagaatttgatttgtattttttaaaacctcaatamatttactttcaccttttcagctatttaatgcctctatttgtgttcactcattatcaacaaagataaagtacttatttagattttttaaaaaaattatctcttttcaaatgaaaaccatttgtgaaagcacattgatgggaatgtacctaaacaaggatatacctcctaattagctctttttagttgctcacattgctgtaattaaagctcattgaggccaattcaaatgaagaactgtcttctttattttttaaagtatcatttcaaatgattttgaaactgacattatcctcattatcccttcttagaaatgagctttcatgattaaagaacagaaagtgagattagctcaatggttgatgaaggtttattattgttttctttccttttgttttgcttccgttttgtttttgaccgttatacttattatttggcctttgttttgcaccaaaactcttgtaatatgcatgtattcaagtcagactgaaaccatctttgcaaaaattataagtgagtaaattatgagagtgaaagagacctgacctaa

SEQ ID NO: 429367 - DNA, 644 bp, Homo sapiens
tctttcagctgtttaataagagttcagattagtgtcaacaaactgaccctactaagacagacaagaatttgatttgtattttttaaaacctcaataartttactttcaccttttcagctatttaatgcctctatttgtgttcactcattatcaacaaagataaagtacttatttagattttttaaaaaaattatctcttttcaaatgaaaaccatttgtgaaagcacattgatgggaatgtacctaaacaaggatatacctcctaattagctctttttagttgctcacattgctgtaattaaagctcattgaggccaattcaaatgaagaactgtcttctttattttttaaagtatcatttcaaatgattttgaaactgacattatcctcattatcccttcttagaaatgagctttcatgattaaagaacagaaagtgagattagctcaatggttgatgaaggtttattattgttttctttccttttgttttgcttccgttttgtttttgaccgttatacttattatttggcctttgttttgcaccaaaactcttgtaatatgcatgtattcaagtcagactgaaaccatctttgcaaaaattataagtgagtaaattatgagagtgaaagagacctgacctaa

SEQ ID NO: 429368 - DNA, 644 bp, Homo sapiens
tctttcagctgtttaataagagttcagattagtgtcaacaaactgaccctactaagacagacaagaatttgatttgtattttttaaaacctcaataaatttactttcaccttttcagctatttaatgcctctatttgtgttcactcattatcaacaaagataaagtacttatttagattttttaaaaaaattatctcttttcaaatgaaaacsatttgtgaaagcacattgatgggaatgtacctaaacaaggatatacctcctaattagctctttttagttgctcacattgctgtaattaaagctcattgaggccaattcaaatgaagaactgtcttctttattttttaaagtatcatttcaaatgattttgaaactgacattatcctcattatcccttcttagaaatgagctttcatgattaaagaacagaaagtgagattagctcaatggttgatgaaggtttattattgttttctttccttttgttttgcttccgttttgtttttgaccgttatacttattatttggcctttgttttgcaccaaaactcttgtaatatgcatgtattcaagtcagactgaaaccatctttgcaaaaattataagtgagtaaattatgagagtgaaagagacctgacctaa

SEQ ID NO: 429369 - DNA, 644 bp, Homo sapiens
tctttcagctgtttaataagagttcagattagtgtcaacaaactgaccctactaagacagacaagaatttgatttgtattttttaaaacctcaataaatttactttcaccttttcagctatttaatgcctctatttgtgttcactcattatcaacaaagataaagtacttatttagattttttaaaaaaattatctcttttcaaatgaaaaccatttgtgaaagcacattgatgggaatgtacctaaacaaggatatacctcctaattagctctttttagttgctcacattgctgtaattaaagctcattgaggccaattcaaatgaagaactgtcttctttattttttaaagtatcatttcaaatgattttgaaactgacattatcctcattatcccttcttagaaatgagctttcatgattaaagaacagaaagtgagattagctcaatggttgatgaaggtttattattgttttctttccttttgttttgcttccgttttgtttttgaccgttatacttattatttggcctttgttttgcaccaaaactctygtaatatgcatgtattcaagtcagactgaaaccatctttgcaaaaattataagtgagtaaattatgagagtgaaagagacctgacctaa

SEQ ID NO: 429370 - DNA, 420 bp, Homo sapiens
ccagccaaagaagtgagctcctcaacttttccattcctacagagctctatgacttctaatccccaaatccacttattctgtttatttatgatacaaaagagacaaatgaatcaatcacctgattattaagttaaatcctggccatctctgactgaggccaaagcytaagatctgaggaacccagaacaactgtcatgaggactaagctctgattttttttttatcttgcccaagtttctatctaaggagtctggagagtcatgcactataaaccataaattctcatcagatggattttatttaaccctatatattgtgacttactttccaatctgactctggcataatattacaagacaagaaagaaaatcaaaatattttgccccaagacatgtttctctaccttatcttgaaatggcc

SEQ ID NO: 429371 - DNA, 500 bp, Homo sapiens
atcattcattagaattgagaatttcaaaaaattagggaataaaatttccagaaacttttaggtatattgcaattatagcactctcctgtgggaaggattaaaaaatgatgccaagtggcttcaggtagggagaasggtctgtatggagaaaaaggtgtcagcactagggatgccaggtacatctttatgaaaaagaaattgacgttatctatgcattggttacattcataaaggcagaaagtggaggatttaggtcagaatcaagtcacagaagcacagaaactggtaattgctaaacctgttgaagcagatgtctgaagtccagtgttagtatagcctttcaaagctcctgatcatcctttccaacatactgtgatatattcaaaagggaggataatagtggaataattttggggttgtcatttgcagaagtaaaatgtaggattaattggcctctcaatgttttttctcatgactttgagattaaattattatgtact

SEQ ID NO: 429372 - DNA, 583 bp, Homo sapiens
gaagggaacaacagacattggggtctacttgagggtggagggtaggaggaaggaaaggataaaaaaatacttattgggtattatgcttattacctgggtgataaaataatctgtacaacaaagccctgtaacatgcagtttacctatataacctgcacatgtactaccctgaacctaaattaaaatttaaaaataaataaataaataaattctgactctctctctmtacacacactgtctctctctctctctctctcatatacataaattgctatttctctgacataaccacagcgtgaagaataaattggagggtgcaataatgaatttgggaatgagagtctcagaaggagaggagagagagaaagaagaaaaaatgtgtgaagtaattatgactgaaactttgcaaatgtaattttaaaaagataaacctacacttttaaaaacctcagtgaactccaagaagaataaactcaaagagatctacagcaagacatatgacatattttaaatgaaggcacatcaaaccaaagggaaaatcttgaaagcagcaaatggaaagtgactatcacatagatgtaac

SEQ ID NO: 429373 - DNA, 583 bp, Homo sapiens
gaagggaacaacagacattggggtctacttgagggtggagggtaggaggaaggaaaggataaaaaaatacttattgggtattatgcttattacctgggtgataaaataatctgtacaacaaagccctgtaacatgcagtttacctatataacctgcacatgtactaccctgaacctaaattaaaatttaaaaataaataaataaataaattctgactctctctctcyacacacactgtctctctctctctctctctcatatacataaattgctatttctctgacataaccacagcgtgaagaataaattggagggtgcaataatgaatttgggaatgagagtctcagaaggagaggagagagagaaagaagaaaaaatgtgtgaagtaattatgactgaaactttgcaaatgtaattttaaaaagataaacctacacttttaaaaacctcagtgaactccaagaagaataaactcaaagagatctacagcaagacatatgacatattttaaatgaaggcacatcaaaccaaagggaaaatcttgaaagcagcaaatggaaagtgactatcacatagatgtaac

SEQ ID NO: 429374 - DNA, 494 bp, Homo sapiens
cattattctcaagtgtacatagaacgttctccaggatatgttaggtcacaaataaatctcaataaatggaaaagattgaaaacatcaaaatactttctccaaccacatggaatgatttggggttgtttgtccacattctcctccctaggatttgtggcacccttcatgattctggtggattctcattttggaaaagttgatcctcaaamgtatacaaaattacaagagactccaaataggcagaacaatattcaaaagaaaaacaaaattggagggttcttacttcacaatttcaaaacctactacaggttttgaaggagtgtggtactggcttaaagatatacaaatagaccattagataagcattcagaatccaaaaatcatatatctatgcctaattgattttcacaagggtgccaagaccattcattgagaaaagaataatttcttcaatacatggtactgtgaaaacttgatattcacataatacaaaa

SEQ ID NO: 429375 - DNA, 537 bp, Homo sapiens
ggttgttggattagttcaggcaagagaggagagtgtttttgactagggtggagatggagataaaaagaagtaaaccatctatgacaagctgggcttgatgtcagaggaagaggggaggagaagggcagacactaacagacaggctttgatttgggtcatggccaacttaatgctgcaaaggggtattaatgggaattcatccagatcagacttaccctcaaactcattatctgaccctatttaaaatggacttacagacccataaaaccaattctggttaggtgtgtttgtgtgctaaaggcagtgagaaaatgtgtcttggtcatgaagtggcctcattttgagtctaagtggtgagaagttgaagtgataaaaaatttttctctgtgacacaaatggtaccccaccccaatctctgaaatattcctktctacatcttcatagcagtggctgtaattccggtatgtaaaggcaaatataaagaggcaaggtagtatgttttcccagctattaaaactcaataggagtataatatca

SEQ ID NO: 429376 - DNA, 537 bp, Homo sapiens
ggttgttggattagttcaggcaagagaggagagtgtttttgactagggtggagatggagataaaaagaagtaaaccatctatgacaagctgggcttgatgtcagaggaagaggggaggagaagggcagacactaacagacaggctttgatttgggtcatggccaacttaatgctgcaaaggggtattaatgggaattcatccagatcagacttaccctcaaactcattatctgaccctatttaaaatggacttacagacccataaaaccaattctggttaggtgtgtttgtgtgctaaaggcagtgagaaaatgtgtcttggtcatgaagtggcctcattttgagtctaagtggtgagaagttgaagtgataaaaaatttttctctgtgacacaaatggtaccccaccccaatctctgaaatattcctttctacatcttcatagcagtggctgtaattccggtatgtaaaggcaaatatraagaggcaaggtagtatgttttcccagctattaaaactcaataggagtataatatca

SEQ ID NO: 429377 - DNA, 562 bp, Homo sapiens
aagtggacaatgaagaagataaaatgattgtgcctgaaatgattagctgatggctaagtactaacctaggtggaattgaaaatagccttcagagaaagaagaggctggtgtgggctggggcctctcggtgggttttatgtatgaggaaggcattgaagaagggcaggactttggattgatggggaggaggtgagataacttgacctgtgtaggcggtggggcaaaggtgagcaggtgtacacagaggacagcaaatggtcatcakccaggatagagacacacatgtgtggtgcttgtgacaactgggaataggaatttccacctgtatctgtaagtaaaaagaaaacactgtaggttcctgagcacctcttacatgctagacatgtccatataaatcattcgtacctactaaactcttatctgagatttacagataagagaactgaggcttagagatgctgaacagattccccaattcatatagtgagcaactggtaggtctggaattcatcctccacttctcactgcacacataatacactccccatttcatgaccctacc

SEQ ID NO: 429378 - DNA, 562 bp, Homo sapiens
aagtggacaatgaagaagataaaatgattgtgcctgaaatgattagctgatggctaagtactaacctaggtggaattgaaaatagccttcagagaaagaagaggctggtgtgggctggggcctctcggtgggttttatgtatgaggaaggcattgaagaagggcaggactttggattgatggggaggaggtgagataacttgacctgtgtaggcggtggggcaaaggtgagcaggtgtacacagaggacagcaaatggtcatcatccaggatagagacrcacatgtgtggtgcttgtgacaactgggaataggaatttccacctgtatctgtaagtaaaaagaaaacactgtaggttcctgagcacctcttacatgctagacatgtccatataaatcattcgtacctactaaactcttatctgagatttacagataagagaactgaggcttagagatgctgaacagattccccaattcatatagtgagcaactggtaggtctggaattcatcctccacttctcactgcacacataatacactccccatttcatgaccctacc

SEQ ID NO: 429379 - DNA, 574 bp, Homo sapiens
aaatactatctagttgggtgcttccatcagatgagcagatgagctctgattataaagaagactccatgctttgttttaaaacttytgtgcgttatttggggggatcataaaacctgtgtgtgtgagagggagagagagagagagagagagaaagagagaaagagagaagaaaagaaaggaagaaaggaagaaagagggagatggagatcaggagagtaagatctcctttccatgtatgtaagacaccaagttccaactaggagaacagagatgccaaaggagaagggaatccaccctgggtgacaacaattaatctggacggtcttgactttttgaatgaagaggaatgtgttgtcaatcaatgagtcactgaatctcttgccacttttcagtgggagagaaattgagatcagtgcagcatggtataggtggaatagggtgtggacaaggcatcaggaagcctgagttctggcccttgtccttgcaatagctccttgtgtggagttgagtgattcatttgcttgctgggctgcactgaactcatatttaagaagaagtttagatagtatattac

SEQ ID NO: 429380 - DNA, 574 bp, Homo sapiens
aaatactatctagttgggtgcttccatcagatgagcagatgagctctgattataaagaagactccatgctttgttttaaaacttctgtgcgttatttggggggatcataaaacctgtgtgtgtgagagggagagagagagagagagagagaaagagagaaagagagaagaaaagaaaggaagaaaggaagaaagagggagatggagatcaggagagtaagatctcctttccatgtatgtaagacaccaagttccaactaggagaacagagatgccaaaggagaagggaatccaccctgggtgacaacaattaatctggacggtcttgactttttgaatgaaraggaatgtgttgtcaatcaatgagtcactgaatctcttgccacttttcagtgggagagaaattgagatcagtgcagcatggtataggtggaatagggtgtggacaaggcatcaggaagcctgagttctggcccttgtccttgcaatagctccttgtgtggagttgagtgattcatttgcttgctgggctgcactgaactcatatttaagaagaagtttagatagtatattac

SEQ ID NO: 429381 - DNA, 574 bp, Homo sapiens
aaatactatctagttgggtgcttccatcagatgagcagatgagctctgattataaagaagactccatgctttgttttaaaacttctgtgcgttatttggggggatcataaaacctgtgtgtgtgagagggagagagagagagagagagagaaagagagaaagagagaagaaaagaaaggaagaaaggaagaaagagggagatggagatcaggagagtaagatctcctttccatgtatgtaagacaccaagttccaactaggagaacagagatgccaaaggagaagggaatccaccctgggtgacaacaattaatctggacggtcttgactttttgaatgaagargaatgtgttgtcaatcaatgagtcactgaatctcttgccacttttcagtgggagagaaattgagatcagtgcagcatggtataggtggaatagggtgtggacaaggcatcaggaagcctgagttctggcccttgtccttgcaatagctccttgtgtggagttgagtgattcatttgcttgctgggctgcactgaactcatatttaagaagaagtttagatagtatattac

SEQ ID NO: 429382 - DNA, 598 bp, Homo sapiens
ataaggacattacttagaaatctggcaatcattcaccttttgagtgtagttgtttccaaaacacaaagtaaaggatcacaaacgactaggttttggtccataactacatgaattacaaatcttatgtaagactcacatcagtccttttaggtgggtatcacttatcccttttrtggatgctgaatcttagttatagaaagataatattgttgaacagcgaatttcattgacaataagatttatccaaaacatgaaaataaggcagaaggatggttatgtttttttcaatgctgaagtattacctaacaagcacattagactattatttaattctctactaagtgtacctttgtttgatttgctatttactattgattaaggctcagatactgagttacatactaatttgtgggtgtttgttgagtagaaattcaagagactttcggccagtagaaaagatgccgcaaaatgtaatagttttttgctctgtaggaaactagccagctttgtgtctgacttgcaaacttatttcagcatgcccttcctgatagactacgtgaatttctgttcctcaagttctctctgaaccagctttacc

SEQ ID NO: 429383 - DNA, 556 bp, Homo sapiens
tgtttccaaaacacaaagtaaaggatcacaaacgactaggttttggtccataactacatgaattacaaatcttatgtaagactcacatcagtccttttaggtgggtatcacttatcccttttgtggatgctgaatcttagttatagaaagataatattgttgaacagcgaatttcattgacaataagatttatccaaaacatgaaaataaggcagaaggayggttatgtttttttcaatgctgaagtattacctaacaagcacattagactattatttaattctctactaagtgtacctttgtttgatttgctatttactattgattaaggctcagatactgagttacatactaatttgtgggtgtttgttgagtagaaattcaagagactttcggccagtagaaaagatgccgcaaaatgtaatagttttttgctctgtaggaaactagccagctttgtgtctgacttgcaaacttatttcagcatgcccttcctgatagactacgtgaatttctgttcctcaagttctctctgaaccagctttaccatcttgct

SEQ ID NO: 429384 - DNA, 598 bp, Homo sapiens
ataaggacattacttagaaatctggcaatcattcaccttttgagtgtagttgtttccaaaacacaaagtaaaggatcacaaacgactaggttttggtccataactacatgaattacaaatcttatgtaagactcacatcagtccttttaggtgggtatcacttatcccttttgtggatgctgaatcttagttatagaaagataatattgttgaacagcgaatttcattgacaataagatttatccaaaacatgaaaataaggcagaaggatggttatgtttttttcaatgctgaagtattacctaacaagcacattagactattatttaattctctactaagtgtacctttgtttgakttgctatttactattgattaaggctcagatactgagttacatactaatttgtgggtgtttgttgagtagaaattcaagagactttcggccagtagaaaagatgccgcaaaatgtaatagttttttgctctgtaggaaactagccagctttgtgtctgacttgcaaacttatttcagcatgcccttcctgatagactacgtgaatttctgttcctcaagttctctctgaaccagctttacc

SEQ ID NO: 429385 - DNA, 512 bp, Homo sapiens
gaaagatacctttggcaggtgacaagattcaggtttgtcaggggacatgaggaatgaatgtagtagttcagctttgaaaggcattcagtgaaggtcatgttaagttctctactgggaaaattttttttcctgtgttgtattcatagtacttggataatttattttaggttcattcatttacttattttacttcttaccatccttatggtcagaactttgagttttgatggtccctcggaagtggtcaagggatccagtcagttgcaaaagacagcaggctctttactatgtcaaagtgagggcacaaataaattggtcttcctgtcaaacctagtccagagtaagttgttgccccaamaagctgtgttctcaaagcccggggaatcactcaggtgtcctggcctggttgggtggatgagcttgtatcaggaggctagggaaagagggatctgcaaagagaggaggcagaatggatccgattcttggctaatcaggaaaagggctaatttctt

SEQ ID NO: 429386 - DNA, 512 bp, Homo sapiens
gaaagatacctttggcaggtgacaagattcaggtttgtcaggggacatgaggaatgaatgtagtagttcagctttgaaaggcattcagtgaaggtcatgttaagttctctactgggaaaattttttttcctgtgttgtattcatagtacttggataatttattttaggttcattcatttacttattttacttcttaccatccttatggtcagaactttgagttttgatggtccctcggaagtggtcaagggatccagtcagttgcaaaagacagcaggctctttactatgtcaaagtgagggcacaaataaattggtcttcctgtcaaacctagtccagagtaagttgttgccccaaaaagctgtgttctcaaagcccggrgaatcactcaggtgtcctggcctggttgggtggatgagcttgtatcaggaggctagggaaagagggatctgcaaagagaggaggcagaatggatccgattcttggctaatcaggaaaagggctaatttctt

SEQ ID NO: 429387 - DNA, 588 bp, Homo sapiens
atacccaaatcaaagatcaaataaaaggatacttgtgaaaaaaaattataaagtatgcatcccatgtagaaagttctgttggtttgtagaatcaagtgggtttctatcaaagtttgargagaatcaagggataggtttgtctggtgacatcatcactgtaaacagcaacagctttccataagtcctacagtgctaggcagcaaggacattggtctgttccaaagtagcaatatttacattccacatactttctgttaaaagatttctggtgttcagttagacagcacatatactaaaattggaacaatacagagaagatcagcatttgcccctgagcaaagatgacaggaaaattcatgaagcagtccacaaattaaaaaaaaaaatgagaaagactcctgcaatgcactgcaaggataatatattaaaaataaaaataagtggatcttagtataaatgtcataaatgtatattggggaaacaaacattttgcagggagaaagctgtagtgctttactcatttactcagacacttctggaagtaatgtataaccaggacattttgtcatgaagtagcagaataacttt

SEQ ID NO: 429388 - DNA, 562 bp, Homo sapiens
tttactcagacacttctggaagtaatgtataaccaggacattttgtcatgaagtagcagaataactttcctttcttatcccataatcaggagctggcctagaataagaactgagctccttagatatcaagttcaatatttcatcaacaagaacaggcttttccttgagaagggcatccctaatagctcctacccttattttgttctaatttctgatgaattttgccacagtagagtagtgaaacttgctgactatagakagagctgatttcagcaggagttacagaatttagcctagagaaaaactgagctgagaagagaaaaatcctgttaggaccattttcttcattcctatatggctgaggctgggccttcctggcagcacatctttgatgactttgtccagttgagttttaaataattcaagtgattggcctcctattgtatctcctgggagctcattccatcatagaaaggagctgactcttggaaagtctttcttgacataatattattgtgtatgattgtctcccccacacctccaacaactagttcttgtgtat

SEQ ID NO: 429389 - DNA, 631 bp, Homo sapiens
tacttttttttattgtagtcacattccccttaacagtccctcakccctcacagtcaggggtgtggggtttagaaataaattagttataataagctaccacttctgcccactgatagaattcttctcataaactgcagcctggggatacatgtccctattgaaacttgaaatgagaggccattccctctctggaaaggatgaaaggacaggtctttctctactgcacggtgagggaagagggcattcttcttagaggaaacagcatgggacttcaaggagttaagagaaaacctagaaatgtagatgggaagcccccagtgttaaacttgctcactggtgacataccaaaagctagatggataatgatttggattgtggaagtaagtggaaaggaaatgccaatgccaggtgtttctatgctgctgttgctctgtttggaaaaaaattcccattgactgaagggctgtgtgctggttaagtctatttgtaaacttcagtcttagaaatttacatattttacaaaacatttgcagagtggtcattatgtgcacaggactgagctaaaagtttttatatgcattgtcctattgaattgaatctatacaactaccgcatggcaagaaacatttat

SEQ ID NO: 429390 - DNA, 631 bp, Homo sapiens
tacttttttttattgtagtcacattccccttaacagtccctcatccctcacagtcaggggtgtggggtttagaaataaattagttataataagctaccacttctgcccactgatagaattcttctcataaactgcagcctggggatacatgtccctattgaaacttgaaatgagaggccattccctctctggaaaggatgaaaggacaggtctttctctaytgcacggtgagggaagagggcattcttcttagaggaaacagcatgggacttcaaggagttaagagaaaacctagaaatgtagatgggaagcccccagtgttaaacttgctcactggtgacataccaaaagctagatggataatgatttggattgtggaagtaagtggaaaggaaatgccaatgccaggtgtttctatgctgctgttgctctgtttggaaaaaaattcccattgactgaagggctgtgtgctggttaagtctatttgtaaacttcagtcttagaaatttacatattttacaaaacatttgcagagtggtcattatgtgcacaggactgagctaaaagtttttatatgcattgtcctattgaattgaatctatacaactaccgcatggcaagaaacatttat

SEQ ID NO: 429391 - DNA, 462 bp, Homo sapiens
tacaaaatcaattcaatgaagagcttttttgataaatgatgctagaacaattaaatatccataggcaataaaacaaaaaacagggtaataaaacagaacaaatcttgatctaaatcttacagcttatacaaaaataaactcaaaagggattattggcttaaatgtcagtgtaagactataactataaacgttttaagaaaaacaacagagaaaatgtatttgacattgagttttgtaatgaattcttagacatgacacacagcactattcatgaaataaaaatgtatacattggattcccacaagagtagaccaaaacaacaaatagagctaagatgtgactcaagtgtcaaagggagagagttgcagtgtagtggggaagtgcagatacacctctggtgattgaaagcygaggaagccagcatgaaggcactcagcctatgcagtcctgtctcccctgcct

SEQ ID NO: 429392 - DNA, 539 bp, Homo sapiens
ttttgtagtaatttaactttctgcatattgattattgtggtgtttacatggatttatatatgttaaaattcacataactgaaagagtagcaacaagtcaatattgctgtatacattaaaaaaataaggacatagttaagaaaataygagggcaagagaaagaaaaaaatttcaaaatacatgtctgataaagtacatgtgtctagaatatataaagacctcttaaaattctataatataaaaacattcaagcctattaaaaaatagagttgaacaatgtttcagcaaagaaaagaattagggccaagaacaagtactcagaataagtcatttggaaaatacagatttaactatgagaagacagtgctgcttacttattagagtgacttaaaaaaacttacagtcaggtacttgtgaggatgcagaagatctagacctctcatacattgctggttggagcgtaaaatgtattagccactcaggaaaatagatttgcagttgtttttataaaggtgtgtgtgtgtgtcatatgagctacta

SEQ ID NO: 429393 - DNA, 539 bp, Homo sapiens
ttttgtagtaatttaactttctgcatattgattattgtggtgtttacatggatttatatatgttaaaattcacataactgaaagagtagcaacaagtcaatattgctgtatacattaaaaaaataaggacatagttaagaaaatatgagggcaagagaaagaaaaaaatttcaaaatacatgtctgataaagtacatgtgtctagaatatataaagacctcttaaaattctataatataaaaacattcaagcctattaaaaaatagagttgaacaatgtttcagcaaagaaaagaattagggccaagaacaagtactcagaatmagtcatttggaaaatacagatttaactatgagaagacagtgctgcttacttattagagtgacttaaaaaaacttacagtcaggtacttgtgaggatgcagaagatctagacctctcatacattgctggttggagcgtaaaatgtattagccactcaggaaaatagatttgcagttgtttttataaaggtgtgtgtgtgtgtcatatgagctacta

SEQ ID NO: 429394 - DNA, 563 bp, Homo sapiens
aaatgaaatcatactcaaaggttctgggatacccgaggctttcagcagttctgagacccrgcagttctgttttggaatctctccatcactgccttttaataaagcctgatcatcccaggattgttgctgccagaggtctttgtcacttgtgctttctggcagaccttccatggagctggcaatgatctccttaatttcagtgtgcaaataactgacaatatctattagttttggatccacactcctctctgagtctgcctggtactggctgaataatgaattggctggctctaaatgtaaggtcaggggaaacacagacatgagaatcagaggtggaaagagaagaatgaagtggaaagagaagagcaagcatctttcttgaagctagagagttgaatattttggaccagaaaacacaagaaagcttggaatttaggcattaaagaaatgtcaaaatattgtattttaccaaaatattttctcatttcagcaatgttgaggatgacgaggacaatgaggagggggaagagcatggtgatgatgataatcataatgaacgttta

SEQ ID NO: 429395 - DNA, 503 bp, Homo sapiens
agactcaataaaattcaaacttttatgattatgtgcataatttccatttccacaatatattttttctagatctaaatttatgtttgagagtatttttgtagctgagtggtgtaagggacagagaaacctgaggaggggttggcttcccactagaaaccttccctcacaacagtttgagtaaatcttccctgcagtaatgatmaaaccatccaatgactcttgaaatcttgggagaatggtcttcttggacaaattgaggagagtcttaggatcaaaaggattcattagataaaatgttgtcattaatataattagttattaaatgaaagtatttcccaggctgaaaattactccctgctccaaatttatcgtgtgagaggtggaagttgggataaaattctggtggtggtgggggagtaggtagataaactcagaattttgaacctacattcctctatattaaaagttcttcaaatcttgtggacaatagacattgctcccaa

SEQ ID NO: 429396 - DNA, 661 bp, Homo sapiens
tgcctgtgtcacccacctggaactgaggttttgatattcctagtggtcagtattcttagcatggagctgccttgtctctccaagtagaaccaagaaactgtggtgtgcctcctgccactgtcttgcttggtcgcctccacacatggaacaggtgtggctgctgaacaaatcttacacttgaaaatggtcttgctcttcatccaagtcatgcaggtagaaaacatcaggctcatcccaccagtctctcctgatattgtttgatcctaatgctgacctcctaactgaatagctgaacattttcaggcctgtctgtttattgcagacaccctctgatgaaacatcaaagaggccacagcatgcttcttgtggaaccaacaatggtggaattttctttcctttctctggtttgaacamtgtatatttgtgatgcaggtggcccagcttcattctctgctgcattttttaattagtgtcgtttctgggtcgtgttgttggtgtcctggtgcttgttcttagatgctgtgctatgtgaacggcctgtgagggctcttgtgtttccttattggaatctgggtatattcttcaaagaaggttgttttttaaggatgttttggctgcatggaattgtttagttcttacttttctccaaaatgcatccata

SEQ ID NO: 429397 - DNA, 596 bp, Homo sapiens
ctacttggccataaacttgactatgataccatatggaaactgggaactgtggtgggggaaatagggagatgctaaggtcaataatagctgtcctctgaaggccagaagcactggtaggagatgttcttacagagttagtcgcacttatagcaacaaaaataaaatagtcctgaactgtggagtccacaggatggtatttttctatcaaaacaaagtaagaacaattataatgagctgagcagaagggtcagaatatcagccaaggaggattgaccaaatgggagcttcttgaatggtgataacacagcatccttaggtagatctatctgcccccaaagaaataaaaaatagataacctgcaggctgagagaaattatcccartgaaaagtcaaaatcccttgctaagtttttggatctgagtgagttctcagacctagaaccaattaattgaaaggaaggcctacttctcaatgaaaaggccctataatattacagtaaatgtatatgataataatactcctaattcttccccaaaggcaaatacaaccattcaactgggtaccatatcctaggaagcagggaatatccaaacgtt

SEQ ID NO: 429398 - DNA, 596 bp, Homo sapiens
ctacttggccataaacttgactatgataccatatggaaactgggaactgtggtgggggaaatagggagatgctaaggtcaataatagctgtcctctgaaggccagaagcactggtaggagatgttcttacagagttagtcgcacttatagcaacaaaaataaaatagtcctgaactgtggagtccacaggatggtatttttctatcaaaacaaagtaagaacaattataatgagctgagcagaagggtcagaatatcagccaaggaggattgaccaaatgggagcttcttgaatggtgataacacagcatccttaggtagatctatctgcccccaaagaaataaaaaatagataacctgcaggctgagagaaattatcccagtgaaaagtcaaaatcccttgctaagtttttggatctgagtgagttctcagacctagaaccaattaaytgaaaggaaggcctacttctcaatgaaaaggccctataatattacagtaaatgtatatgataataatactcctaattcttccccaaaggcaaatacaaccattcaactgggtaccatatcctaggaagcagggaatatccaaacgtt

SEQ ID NO: 429399 - DNA, 634 bp, Homo sapiens
ataccaggggtcatgtgctcggacccaatttataattagaatttacatacttgctagttggcagaacccctacactaatgccttggcctatggggtaagagctatcatcgtggagaaagctgagtgaaagcctcrgaaattgccctattagggaaaataccagagatcagtgccacccctacagatctaaattatgaagaggtggtggtttctatcacatcaccattgaatttaccattctgatcactggaaaaatcagccagaacctagaggaggacagtggactcacacaaatgcaatccagtagcagcccaatcgcaactgccatgtaaaatgtgatttccttgctaaagcaaattaacaatatttttaggtgcatagtatgtgcccatttatctggcaaatgcactctttctcagccccatcaggaaaagaagataagaaacacttcacattcacaatggacaagagcacacacccacagtctcactcttctttatgtagctactacttaattagaaaacctgtaagattccctatattagtcatttctcacattgctataaagaaatacctgagactgggtaatacataagaaaagaggttgaattggctcatagtttcccaggctgtg

SEQ ID NO: 429400 - DNA, 634 bp, Homo sapiens
ataccaggggtcatgtgctcggacccaatttataattagaatttacatacttgctagttggcagaacccctacactaatgccttggcctatggggtaagagctatcatcgtggagaaagctgagtgaaagcctcagaaattgccctattagggaaaataccagagatcagtgccacccctacagatctaaattatgaagaggtggtggtttctatcacatcaccattgaatttaccattctgatcactggaaaaatcagccagaacctagaggaggacagtggactcacacaaatgcaatccagtagcagcccaatygcaactgccatgtaaaatgtgatttccttgctaaagcaaattaacaatatttttaggtgcatagtatgtgcccatttatctggcaaatgcactctttctcagccccatcaggaaaagaagataagaaacacttcacattcacaatggacaagagcacacacccacagtctcactcttctttatgtagctactacttaattagaaaacctgtaagattccctatattagtcatttctcacattgctataaagaaatacctgagactgggtaatacataagaaaagaggttgaattggctcatagtttcccaggctgtg

SEQ ID NO: 429401 - DNA, 491 bp, Homo sapiens
aaacctgtaagattccctatattagtcatttctcacattgctataaagmaatacctgagactgggtaatacataagaaaagaggttgaattggctcatagtttcccaggctgtgcaggaagcatggcagcgtctgcttcttgggaggcctcaggaaggtttactcacgccagaaggcaaagccgaagcaggcatctacagatgtctggagcaggagcaagaaagagaggtgggaggtgctacacacttttaaacaacaagtctcgtgataactcactcactcagtatcacaagaacagcactgagagggtggtgctaaaccattcatgaaggatccatccccatgatccaatcacctcccaccaggcccgacctggaagattggagattacaatttgacatgagatttgggcaggtagaccccctatatttctaagattcttttattttaaatattattgtaggatattgggggaatattttacatgaaac

SEQ ID NO: 429402 - DNA, 491 bp, Homo sapiens
aaacctgtaagattccctatattagtcatttctcacattgctataaagaaatacctgagactgggtaatacataagaaaagaggttgaattggctcatagtttcccaggctgtgcaggaagcatggcagcgtctgcttcttgggaggcctcaggaaggtttactcacgccagaaggcaaagccgaagcaggcatctacagatgtctggagcaggagcaagaaagagaggtgggaggtgctamacacttttaaacaacaagtctcgtgataactcactcactcagtatcacaagaacagcactgagagggtggtgctaaaccattcatgaaggatccatccccatgatccaatcacctcccaccaggcccgacctggaagattggagattacaatttgacatgagatttgggcaggtagaccccctatatttctaagattcttttattttaaatattattgtaggatattgggggaatattttacatgaaac

SEQ ID NO: 429403 - DNA, 549 bp, Homo sapiens
aatcttcatcacagttcaacttcttcctcttccaatgccacttccttcattaccttgcataggatgattctgaatgtactcaccaaaaatctcctttaggaaaagctctattccagagcatgttttcagagaatcttaactaagaagatttaatgctttttacaaatttagtttataatgttgagtgcccatggtmtatgatatggtttggctctgtgtccccacccaaatctcaccttgaattgtaataatccccatgtgtcatgggagggaccccatggggggtaattgaatcatgggggcgggtttttcccatcttgttcttgtgacagtgaataagtctcatgaaatctgatggttttatgaaagggagttctcctgcacatgctctcttgcctgccaccatgtaagatgtgactatgctcctcctttgccttccgccatgactgtgaggccttgctggccatgtggaactgtgagtcaattaaacttctttcctttgtaaattacccagtcttgggtatatcttcattagcagcatgagaacag

SEQ ID NO: 429404 - DNA, 652 bp, Homo sapiens
atgggcttagtgccccacttgtgcactcatgatgcagttcccacactcaacacactcatgggacagtgggaagtggagagggatacacaactacctaaaacaaatcataatattatataatatgtacaataaacattcatagtgatatgagaatatagagggagtggggagcaaattctgtctgagagaattagggaagttgttgcaaaggatgtttgagtatacttttttaagaaggaaaatgagtgttccacatatgcgcatgaagaggcatgtgagtggaattacgtgtcaccatgtggctgaagatgatacatagaagagttttgttttgccattgacaaaacaagagggaataattctgtgactataattatgcattttcccatattattgagaaaatcagtacatttctctgtcaaagggttagcacagctgtgtctgtggtcctccacctttctctgtcacacctgaaacagacttcagggctgaagcttcctaatgcttcataggataacccaagtcaggatgtaaatgttctctcctcccaactttggaacactcacatttattcaatgtaaatcttttgctcataatttcctgwtataaaacatttttgtagcatctcaaaacagctaacagactttcttat

SEQ ID NO: 429405 - DNA, 490 bp, Homo sapiens
ataatgggaactatagttatattgtttatttattttcccttccattgcttttataacccttttgagcaataactacctaacaggcatgggattagggactgaagataaaatattttttgccctcaaatattttatgtacatgcatagagtgtatgtgttaattgttagtcctgttttaraaacaatgtcccttaggaagtcttccgtcttaggaggattcccaaaagaaggatggtttctgttcttgaattagaattttatgtctgtaatctaccctccaccccatctctatttagtgaagtagttgtaatctgcatatgccagccctcataggctcactcctgtaactcaactatagagtccataaagccaggctcattgcacacacagcaatggcagctggcagatgtttatcagatatctatgatgcagaattttatgggggatgaagaaggcaaaaatttgctgcagacttgtcagaggcaagttg

SEQ ID NO: 429406 - DNA, 592 bp, Homo sapiens
actgatgctgcttacagccaaagaaatcatacagagactatcctactgcttgcacctagaattaaagtcaatgtgcactccccaacaaaaaccayagatacatcttcaggaaaaagtcctcccatactaaagcaaattcataaagttgaaagaaatgactgttacacaacatgtacagataccaatgtaagaacacaggaaacattgaaaatgcaagaaaatatgacatcttcaaagaaacaatagttctccaggaacagatcccaatcaaaaacaatcctggaaaaagaattcaaaataaagagacagatatcataaaaaggaaccaaacaaattctggaactgaggaattcagtgaatgaaatacaaaatgcattcaaaagcttcaacaatagcctagattaagcagaagaaagaacatcagaatttgaagatataagtctcttgaaataacccagtcagacaaaaataaagcaaaaaataagagagagagaaaaaagcctgtatgacatatgggacactagaaagcaaccaaatatttaaacttttggagtcccagaaggaaaagagaaaataaaaatgttagaaaacc

SEQ ID NO: 429407 - DNA, 489 bp, Homo sapiens
actgatcctgcaagaaatgcttaagagaggtctacacctggaagtgaaagaatgttagctgccattatgaaaacacatgaaaatataacaactcctggtagaacaaagacacaaataaaggaaaataagactcaactcttaccactaaagaaaatcaccaaaccacaacgatagacaaagmgaatgaaaggaacaaaggatatacaaaacaaccagaaattatttaataaaatgaaaagaataaacctttacatatcaataataaccttgaatataaacagattaaactttacacttaaaagatactgaccagctgaatggattaaaaacacataggccaactatatgctgactacaagaaactcatcttacctgtaagagacatagaaagtaaagggatgaaaaaagatattccatgcaaattgaaatgaaaagcaagcagaagtagctatgcttacatcggataaagcagactttaagtcaaaaact

SEQ ID NO: 429408 - DNA, 570 bp, Homo sapiens
tgcagcacctgggggctacttgggaaagctaaatctcctgccctacctcagacctgaatcagaatctacccttgaacaacatcccaggtgattcataggcacattaaagtttgaggagcactatgtatgcagttcctacaagttagccctctaattactcaagaaggaaaagaagaggaagaaaggcaagaaaaagagaagttccaccttctcagcttatcaaaattgcatacaaatttaaacgtgggtgaattgcttcacctctttttacccgaatttcttggtctatcaagtgggcatggtgatcacagctacctcacaagggtgtygtcaggattaagggagtgaatgctggtgaaacactgagaacagcacctgcccatgccaagctctcagtgttatggggtgaattgtgtcccctagaaagatatgttgaagtcctaactcttggtacctgtgaatggaccttatttagaaaaaagggtttttgcagatgtaatcaagttagggtgatgtcattagggtgggctgtaagccaataggacaggtgcccttattagaagaggcaaa

SEQ ID NO: 429409 - DNA, 578 bp, Homo sapiens
acaattccacaagcatttatttggcgatgtgtttgcgcgaggcacagagctggttgatcagaggaagctcggtgagatccatccctgctctcaaggagcctgctgtgtacaatgccaccgcctctgcaaacttaccaagcttatcccagcaaatttctccttcccttggcttatgttatagtggaccatgaggtgcccaaagcccctctggaatttgcagttccaagaacaaatagttatttccttttttgcttaagtcaatttagtaattgtcattcaaaaccagatgaacgccttgaagaatagcagaatttcaacaggtagagatgggggagaatatcattgtagaaaatggaaacagtgtggatcaaggtagagtggatctcgtgcagggtccccttggtgaacagtggccatgtccgcaacactgggtgcattgggacaggtaaatggagaggaratagggttcaaaatacagcttgtgagtcatatgctaagagacttggctgtctccttaaagaattgtggggagaaggcagagagcgatgtaagggtttgggcaaggatgtgcatggctt

SEQ ID NO: 429410 - DNA, 562 bp, Homo sapiens
tctcgtgcagggtccccttggtgaacagtggccatgtccgcaacactgggtgcattgggacaggtaaatggagaggagatagggttcaaaatacagcttgtgagtcatatgctaagagacttggctgtctccttaaagaattgtggggagaaggcagagagcgatgtaagggtttgggcaaggaygtgcatggcttgattcatgcttggggtcagtggctctggggacaggcagtgtaatggatggatttaaagtaagagcgagtgaaggcacagagttctcttggtgtttataacttttcttcttaataccttactctttagattttatgatatgttacagatgtacaagttgtgtattcatgccttgcttcctctctcaggagataggctttctggctcagtgaaattattccctctcctgtctgcattaggaaggtagcccctacaattataatgcatgttacttcttgtatgcagctaacttgagttttttgccccttctagtaaaggttaagtgtgtgctgtaaaatcttgacctatgtggcctaaaattgcaaagt

SEQ ID NO: 429411 - DNA, 562 bp, Homo sapiens
tctcgtgcagggtccccttggtgaacagtggccatgtccgcaacactgggtgcattgggacaggtaaatggagaggagatagggttcaaaatacagcttgtgagtcatatgctaagagacttggctgtctccttaaagaattgtggggagaaggcagagagcgatgtaagggtttgggcaaggatgtgcatggcttgattcatgcttggggtcagtggctctggggacaggcagtgtaatggatggatttaaagtaagagcgagtgaaggcacagagttctcttggtgtttataacttttcttcttaataccttactcyttagattttatgatatgttacagatgtacaagttgtgtattcatgccttgcttcctctctcaggagataggctttctggctcagtgaaattattccctctcctgtctgcattaggaaggtagcccctacaattataatgcatgttacttcttgtatgcagctaacttgagttttttgccccttctagtaaaggttaagtgtgtgctgtaaaatcttgacctatgtggcctaaaattgcaaagt

SEQ ID NO: 429412 - DNA, 562 bp, Homo sapiens
tctcgtgcagggtccccttggtgaacagtggccatgtccgcaacactgggtgcattgggacaggtaaatggagaggagatagggttcaaaatacagcttgtgagtcatatgctaagagacttggctgtctccttaaagaattgtggggagaaggcagagagcgatgtaagggtttgggcaaggatgtgcatggcttgattcatgcttggggtcagtggctctggggacaggcagtgtaatggatggatttaaagtaagagcgagtgaaggcacagagttctcttggtgtttataacttttcttcttaataccttactctttagattttatgatatgttacagatgtacaagttgtgtattcatgccttgcttcctctctcaggagataggctttctggctcagtgaaattattccctctcctgtctgcattaggaaggtagcccctacaattataatgcatgttacttcttgtatgcagctaacttgagktttttgccccttctagtaaaggttaagtgtgtgctgtaaaatcttgacctatgtggcctaaaattgcaaagt

SEQ ID NO: 429413 - DNA, 562 bp, Homo sapiens
tctcgtgcagggtccccttggtgaacagtggccatgtccgcaacactgggtgcattgggacaggtaaatggagaggagatagggttcaaaatacagcttgtgagtcatatgctaagagacttggctgtctccttaaagaattgtggggagaaggcagagagcgatgtaagggtttgggcaaggatgtgcatggcttgattcatgcttggggtcagtggctctggggacaggcagtgtaatggatggatttaaagtaagagcgagtgaaggcacagagttctcttggtgtttataacttttcttcttaataccttactctttagattttatgatatgttacagatgtacaagttgtgtattcatgccttgcttcctctctcaggagataggctttctggctcagtgaaattattccctctcctgtctgcattaggaaggtagcccctacaattataatgcatgttacttcttgtatgcagctaacttgagttttttgycccttctagtaaaggttaagtgtgtgctgtaaaatcttgacctatgtggcctaaaattgcaaagt

SEQ ID NO: 429414 - DNA, 657 bp, Homo sapiens
aaacacaagtaatcactggctgattcaggtgctttataaatctattttaataatttgctggaggttgtaaattataacaaggtgaatgaagccagtgatgaagtgttgtgttgggatagctttctccctgagaggagaaactgaggcagataagaactgagaaatggatagaaaattatccaaagaagttacacaaattggccaataaacacatgaaaaatgttcaatatcattagccatcagggaaatgaaatgcaaaaccatgagacagcacttcacactcactaggatgactataataaaaaagacagacagtaacaagtgtgggggaggatgtggataaattggaaccctaacacatcactgatgagattctaaaayggtgcagtcactttgggaaacagtctggcagttcctcaaatggctaaacaacaggttgacgtataacctagcaattccactcctcagtgtatgcccaagagaaatggaaacacatatctacacaaaaacttgcatgtgtgtgttcacagcagcactagtcacaatagccataaggtgaaaacaaccaaatgttcattgataatgaataaataaaatgtggtatatccatatgatggaatatttataaaatatttcataaaagaaatactgatacat

SEQ ID NO: 429415 - DNA, 612 bp, Homo sapiens
tatgggatttaaaaaaggaagtgaccaggtcactatctgtattagtcagggttctccaaagggacagaactaataagatatatgtatatatgaaaaggagtgtaatagggaggattggctcacatgattacaaggtgaagtcctatracaagccatctgcaagccagggaagagagaagctggtagtaggtcagtccaagtctgaatgcctcaacaccagggaagcagataatacaggcttcaatctgtggtcaaaggcccaagagcccccagcaaggcactgatgcaagtcctagagtccaaaggccaaagaacctggagtctgatgtccaagggcaggaggaagaaaagaaagaagactcagccagcaaggttattccaccttcttctgcctgctttgttctagtcacactggcagctgattgtatggtgccccccacattgagggtgggtcttcctctcagtccactgacacaaatgtcgatctcctctggcaacacccctcacagacacacccgaaataatactttaccagccatctaggcatccttgaatccaatcaagttgacatctaacattaatttcacaagtccacaccttgtcaattgggca

SEQ ID NO: 429416 - DNA, 517 bp, Homo sapiens
tgacaaaggctccaaacagtatccctatctgccactgacacctcaagcaccattgggtctgctcggtcatatggcccaagtggcagagcagcttgcacagcagcctagacctcttgcagagccttcatttgctctgggccccactcaaaactagcagccttttgggtcgctcaawaaataggccagagtaacccacccaaatgaggaatgtgttgcctccaaaatccaaatatgcccactaggccttgtacctctttcttggttgtaggaggggacaaatgcaacaatgtatccttcaccttagaaggaatatttcaacaggcccctcaccagtggacccctagaaatttcactgatatagaaggtccatgaattttagttggatttatttcccataccctgacatgaaagtgtttcaccaataagtcccgagtgcttgctacttctcactcactgggtccaattagcatagtgtcactgatgcaatgaactagtgtgatatcttgtggaagggaaa

SEQ ID NO: 429417 - DNA, 343 bp, Homo sapiens
taggagttttgaagtcactggtagatgattgtctagattccagtattgctgtgactccttttccctcactgtggcctgtgctttattttctggaygttctccttcccttccccccaccaatcttctgtttttcttctgtgttctgatgtgccttggtgtatgtctgcttttatacattgtgttggggtctctatggaactttttaatgtggaaacatatgtcattttggggaattaagttgaaattgtttttggttatttctctgttttcccaattctctttttctagaactcctgttattcaagttgcttgacttacttgactggtctaattttattattag

SEQ ID NO: 429418 - DNA, 508 bp, Homo sapiens
tgagtcattttctaaccagttatcctaacactgggtttctgtactgtctttaattttcacattatctctaaagtcttcaggaggaaatataagcagtgtggtgctagaatagctttctrtgtgaattcttttcccccttattcattactggaaccagtaattgcctagagaatgatgggcaaaatgccagctcatcatttctttaagggtctaagaattggctttggagaatggaagaaaattccagaaacactgtcaagaaagttattatttatttcaaatgttatttggaacagcaaaggacaatatgttttatagcacaacttttaagatgactgaattggcaataaattcacatgatgaaacttcagcaagtctttatgtttctgccggggaattctttggttcttggcgtaaatttttaaatagttaatatcagcttcctattcttaacattcctttagttgtagagctaatgtgaaaacagcttgctgtgttgtgaagaatg

SEQ ID NO: 429419 - DNA, 508 bp, Homo sapiens
tgagtcattttctaaccagttatcctaacactgggtttctgtactgtctttaattttcacattatctctaaagtcttcaggaggaaatataagcagtgtggtgctagaatagctttctatgtgaattcttttcccccttattcattactggaaccagtaattgcctagagaatgatgggcaaaatgccagctcatcatttctttwagggtctaagaattggctttggagaatggaagaaaattccagaaacactgtcaagaaagttattatttatttcaaatgttatttggaacagcaaaggacaatatgttttatagcacaacttttaagatgactgaattggcaataaattcacatgatgaaacttcagcaagtctttatgtttctgccggggaattctttggttcttggcgtaaatttttaaatagttaatatcagcttcctattcttaacattcctttagttgtagagctaatgtgaaaacagcttgctgtgttgtgaagaatg

SEQ ID NO: 429420 - DNA, 334 bp, Homo sapiens
gtgatggagctgctgtagcctctgtgattcggaaaagagctagcgaagaggcagagaggaaagagaaagagttgggtccttgctaacattactgcattatgcagttaattcacagtcaacctattttgtgattatgcaacatacagatcctttattgtttaaatctctttcggatggattttctgttacttgcatacaagttgaatgagtagacayttaggatgttcttgttttgtgaaaatagtaaccacatttgatgatctgtctacaattgcaagccattaatataattttaatgtatgtatgaaatacaataatcaacacatctccaatg

SEQ ID NO: 429421 - DNA, 334 bp, Homo sapiens
gtgatggagctgctgtagcctctgtgattcggaaaagagctagcgaagaggcagagaggaaagagaaagagttgggtccttgctaacattactgcattatgcagttaattcacagtcaacctattttgtgattatgcaacatacagatcctttattgtttaaatctctttcggatggattttctgttacttgcatacaagttgaatgagtagacacttaggatgttcttgttttgtgaaaatagtaaccacatttgatgatctgtctacaaytgcaagccattaatataattttaatgtatgtatgaaatacaataatcaacacatctccaatg

SEQ ID NO: 429422 - DNA, 574 bp, Homo sapiens
agacaaacttccacttctaatgaagataaaactgcgcttattctttcattcgttctttaggcaaagttccttcccgtctcatctgtgccttgccctccaccctctgctctcaccacaaagccctacttgtgccttctgataatcctmatccactctcccttctctaaccacttaacctcttcaccttcaagccattttctccctccctcaattctgtattacctgcctcactcctcttctctctcccagtcccccctgccctttcttcatctgcccctattctaaagccccctaatggttttccaaccagcttccaactgcactgctcggacagtgttgtaaatgggtctctactacctctcttccactgttcctgtgcctgtccggggctgcttatttccactcttgtgatccttattttctgaactggcactttggaaagaacctctcaagagaggaggttgtaaggctgtcctcagcccctgccagtggaaacacctggcagcaactatggatgacagagtgattttctgtcctatcaactcaaacgcaaacaggagagagtaagtaatat

SEQ ID NO: 429423 - DNA, 581 bp, Homo sapiens
tctgaatgagggtagcttaagatctttctttgtaccaacttttaatgaaggccttttttaaacaacaggaaaagttaaaatgtctagcacatggttttaatacaagctttattcttaagtaatttaaaagggaggatatagatttctcataactcaaagactttaaactctatggaaaataaatctagcagttacaaataagtaatagaaatacaaagaaacttaatactagttacaattaaggccaatgacaactcagcggcctttcgttaggaatcgaaatctcacagtattggtgctcattttttaaaaaattatcaagctttaaaattggaaaaaaaattattaagatgaggaatggatatatttacattaaaatcaaatcaacttttcacaatgagacaaacagccaaaggcattcattcatgaagaaatayctagacatcgaatactaaaatactgagatgacagagtctagcatttcagaatctattacttaatcaagggtaagcagatatagtcttttaggtacagaaattcaaggggatggagggatgaatgcacagaacacagaggatttt

SEQ ID NO: 429424 - DNA, 480 bp, Homo sapiens
aaatatgtattaatcctctaactatatgatctacatttttttcttcaaaataagcaatggttccatgttgatcctcctgtactttgacatctgttgcctrctttacttagtagtatgaagtggcaaaaattctatctggagtaagggatgtggaatacgggtaaaacttaaagaccttgtcttgcttgattctttcttgattgaactgtattcagcagtcttttttgttgttaatacctctaggatgataaattccatcctctctctgacctatatgtacttcatttctcttgaacatctagggcttcagtgatctaaacgattctattcttaaatccaaccttatctcagcatagtttaaacttggcttccatttctggaaaaaaaaaatcttcatggagatccgggaagcaccggaagaattaatgctcaacacactgcatgatatttccttaaaaataactaaggagaacctgcttc

SEQ ID NO: 429425 - DNA, 490 bp, Homo sapiens
acagtatctcactatgttgcccaggctggtctcaaaatcctgggctcaagcattctcctgccttggcctcccaaagtactgagattataggaatgaggcactgtgcctagcctggttaagtgtttataagaatgtcagtatattattggaaccaattaagattctgttaggagaagctacatgagaaaaatcagttcttttaaagaaatggtaacacaataatatagtatctaacatattttttcacatcmaaacaatgaattgtataaaaaactgagagtgatgatttcagatatttttcctctgcctctctgtgactttcaactgtccctcactgttaaagtttgtcaacctgtgacatcatctcatgcaaacacttaaagattaagcgagatcatgaaaacatgggttcttggtggaaaatcaaaaatcttatttgttctttagaacttggttataatttctttatgaagctgccaatttattcaca

SEQ ID NO: 429426 - DNA, 402 bp, Homo sapiens
ttttggagtcaggattttgatcccaagctccttcttgcattggttatacggtttttcaaamcttgaaggaaaagaatggaaagatttgataatgaatgtacttcagtttaacatctacgttaatttgctatgtcaaattaatgttatcagtttttaaggctatacctgttatgtttcttaataccatcattatacaaacaaatctctgttgagaaagagtagaaaagagaataaaagtgtagaaatatggtaataataatacctgccatttcttgagcaattaatctccttgtgcattagtttcttgtctataaaatgaggaagatattagtaaaatacatgattaagtgagcaaatacacatgaagtgtttttgtagcttataagttatagctaatactga

SEQ ID NO: 429427 - DNA, 402 bp, Homo sapiens
ttttggagtcaggattttgatcccaagctccttcttgcattggttatacggtttttcaaaccttgaaggaaaagaatggaaagatttgataatgaatgwacttcagtttaacatctacgttaatttgctatgtcaaattaatgttatcagtttttaaggctatacctgttatgtttcttaataccatcattatacaaacaaatctctgttgagaaagagtagaaaagagaataaaagtgtagaaatatggtaataataatacctgccatttcttgagcaattaatctccttgtgcattagtttcttgtctataaaatgaggaagatattagtaaaatacatgattaagtgagcaaatacacatgaagtgtttttgtagcttataagttatagctaatactga

SEQ ID NO: 429428 - DNA, 626 bp, Homo sapiens
acagtgggtcaggagagcttgggctatgggtagctgcgtgcagagaaaagagttctgttagataaggggagctgactctcaaataaacctggttattatgctaagttaagggggatccactgcttcagtgctcctctggagggattaatggaggtcataggtccttcagacatgactcagaggcctgttggaggaggctttgggctcccgtgttttcacagaaacgctctttactgttttatattttgtggttacatgtatgacttaactaagttaaagattctgcttctaaatagattaaataccaccgagctatgtggtgaagaaagaaccaggaacaattatttccgaagacccgctgaagtcagattcataaataagattctagatgccagaaatcataggtgagatcctgggagccaggctaaatctccacttgatcttagccaaaaggctgagaaatgatcaggytaaatcgccaggtcaggcttgatgatgcttggttaagacaatgaatgcacagttacgttttctttgcacagaaaaaggtaaaaagggttaaatggtgactaatcgtaatagtaattcccatttattaagaaaccatgacatttcaggattgcaaa

SEQ ID NO: 429429 - DNA, 538 bp, Homo sapiens
aattatatggtatttgcccagaatgttcttgagtttgaggaaatttaccagaatatctgtcaattactcctaactaagccatgctaaccaactctttgccttggaatgtgtattcaagagaacaaaaacccagcagtctctgtggtggaaagcagcagtctccagttaactttagcagaaccaggtgcccaagtgactcagaagtgatggtatacaaaatgaaaaggtattgtcaacaaccattacaaaagaaagagctaaacagcttaaaagtggagtacagaaaataataaaaggaagaaaatgtctgcccactcaaagaaaaatgcactccatgatcttaattgctcacaattgagagtttaagcattcattatttaaaagttaagtcttttatgcataaaaaaatacagagaaggcctgagcaaagtgttaacaagtaactagaagcacttcttagcctcaaattacctatgagracaacgtatattgagcacaattgggggaaaatattttaattactgcatgacatgttctt

SEQ ID NO: 429430 - DNA, 575 bp, Homo sapiens
tgttaaatatcagatatttaatagtcaatagctcagatatagtttagaggacaaactagaagtggaaaatgacatgattctctttttcccagttcttccaagagcttagtgtgtgactctggaccaataatttagtacaattaagcctcactttttctttcaatgactgaataattatttcctttgatctgcatagtaaatataatggttaaccataggcataaccattacatgaaacaaatgactcaacgaaaatagcaagaacaaccaaacatccccagaacacattaagcatgtatcattctcatcaggatttaattttacattcttaaatcccagactatttaaaaggcgtgactgtctttacaaaaaacttgctaagggtatatgtaacaatagtacttgtattagtttcctagggctgttgaaaaaagtaccacaaattgggtggcttaaaacaacaaatrtatcacatcgcagttctacaggccagaagttcaaaataagcaggttagcagggcacattctttctgaagcctgtaaagaaactcttaccttttcctagatattggtgg

SEQ ID NO: 429431 - DNA, 597 bp, Homo sapiens
catttgtgagctatatgaacagaacagatatattagtagctgcacaccaacgagaagacaaacattgcattaatgtccaggcaaattaattaaatactgtaataacagagcaagaattctcagacgattacagaattcattgtcatgacartggattaccttcaatgtctagtttacagctcaaaattactagacatgcagagaaacaggaaagtatgggccataaacaggaggaaacaataaatagaaactgactcacaatggtcacagatgttggatttagcagacaaaaccttaacagcagcaattttaagtatgttcaaataattttaaaaagtaatatgtaatcagtagaaagagaacctccagagaattaaatttatagaaaaattataaatttgagaactaaaaaatttgataaattttaataatttaccagagaaactcagcagattggagatggcagagtaaagtatgagtaaacttgaagataaatcaatacaaattacccaatttgaagaataaagaggatacacattgatagaaaaataacagagcctgagaggcttgtggaagagtatcactcaggctatccaa

SEQ ID NO: 429432 - DNA, 597 bp, Homo sapiens
catttgtgagctatatgaacagaacagatatattagtagctgcacaccaacgagaagacaaacattgcattaatgtccaggcaaattaattaaatactgtaataacagagcaagaattctcagacgattacagaattcattgtcatgacaatggattaccttcaatgtctagtttacarctcaaaattactagacatgcagagaaacaggaaagtatgggccataaacaggaggaaacaataaatagaaactgactcacaatggtcacagatgttggatttagcagacaaaaccttaacagcagcaattttaagtatgttcaaataattttaaaaagtaatatgtaatcagtagaaagagaacctccagagaattaaatttatagaaaaattataaatttgagaactaaaaaatttgataaattttaataatttaccagagaaactcagcagattggagatggcagagtaaagtatgagtaaacttgaagataaatcaatacaaattacccaatttgaagaataaagaggatacacattgatagaaaaataacagagcctgagaggcttgtggaagagtatcactcaggctatccaa

SEQ ID NO: 429433 - DNA, 598 bp, Homo sapiens
gccataaacaggaggaaacaataaatagaaactgactcacaatggtcacagatgttggatttagcagacaaaaccttaacagcagcaattttaagtatgttcaaataattttaaaaagtaatatgtaatcagtagaaagagaacctccagagaattaaatttatagaaaaattataaatttgagaactaaaaaatttgataaattttaataatttaccagagaaactcagcagattggagatggcagagtaragtatgagtaaacttgaagataaatcaatacaaattacccaatttgaagaataaagaggatacacattgatagaaaaataacagagcctgagaggcttgtggaagagtatcactcaggctatccaatatgcaactgcaattcccaagaaacaagcatgaaaatattttgaaaaaaatagttacagaatttcccccaaatttggcatagaacatttaattcagattcagaaaacttaatgaatgtcaaacagaactaaaacaaagaaaactattcgtaagcaccttgtaattaaactgctgaaagccaaagaaaaaaaaatcttgaattcagctagagaaaacacac

SEQ ID NO: 429434 - DNA, 598 bp, Homo sapiens
gccataaacaggaggaaacaataaatagaaactgactcacaatggtcacagatgttggatttagcagacaaaaccttaacagcagcaattttaagtatgttcaaataattttaaaaagtaatatgtaatcagtagaaagagaacctccagagaattaaatttatagaaaaattataaatttgagaactaaaaaatttgataaattttaataatttaccagagaaactcagcagattggagatggcagagtaaagtatgagtaaacttgaagataaatcaatacaaattacccaatttgaagaataaagaggatacacattgatagaaaaataacagagcctgagaggcttgtggaagagtatcactcaggctatccaatatgcaactgcaattcccaagaaacaagcatgaaaatattttgaaaaaaatagttacagaatttcccccaaatttggcatagaacatttaattcagattcagaaaacttaatgaatgtcaaacagaactaaaacaaagaaaactattcgtaagcaccttgtaattaaactgytgaaagccaaagaaaaaaaaatcttgaattcagctagagaaaacacac

SEQ ID NO: 429435 - DNA, 598 bp, Homo sapiens
tagagaaaacacacacattaattacaggagaagaaggctttgattgactactaactctcctaagaaattatggagcctggataatattggaatgacaaagcaaatggctacacatttaaacaattggtcaataattaattctatgcttagtgaagctatccaaaaaaggaagatgaaatcaaaacatatttagataaatataaagtgagaaaatttattaccaggaggatagcattccaagtaatgaaaaagatgtacataaacatcttttatatacaggctatatcaacatatttttttctcttaaattctttaaaagagaaatgattgtttaaagcaaagacaacttatttgtgtttatattgtagatacaaatgacaaatattattatatatatagctcaaaagccagaaagtaaatggaaatatacttttggaatgttaatggcattaactctgagtacattgggttaagtttaaaatgaatattktaatctacaatattctactcaggaaaagagggatactttataataaaaaaatggtcaacacagcagtataatgtaacaattataaatgtatacacacctaataacaga

SEQ ID NO: 429436 - DNA, 578 bp, Homo sapiens
tactaataaaattgagtatttaattaaaagtctccccacaaggaaaaggccaggcacagatagcttactggtaaattccatcaaacacttaaggaagaaaaaaaattaccaattctacacaaaatattgcataaaacagagaaggaaggaatacttcccaaccaattttatgacactagtattactccaatgccacaccaaagacattacaagaaggcaaggtgacaactggtatcyttcatgaaaaaagacaccaaattcttaataaaagtattagcaaatcagatcctcagttcatagaaggacaatgctctttcattacgaaaactctcagcaaaccaggcatagaaggggacttcacctcctttatgtggtgaagtctctgcataaaaatacctcattctctacagtgagagactaaatgtgtttcccttaagactgggaacatgtcaaggatgttcactttcattatctctacttaacatttcacttgaagtcctagatatttcagacagctaagaaaaaggataaaagacatacagttggaaagaatgaagcattttgatcaaaaagttgat

SEQ ID NO: 429437 - DNA, 588 bp, Homo sapiens
acatttggtaactacattctgtttttgacaacctccccattacatttctagttatctattcaaaaccaaaggacaaaaaataaaaaaataaaaactacaccagtttacaaagaacaatggggcgaaagcaaaatrtattccttgctgtttcacacgtgcttttaaaggaaacaaacaaccaaacaaacagagaaattgtagttcctaagtttcttgacccaaatccaagcagactcattgacaagcctaaacctctccgtgtgtcttcctgcttctgaggctaaaatatggataagctcaaagtttgacacatggatatattttcaaatgacatgtttagtgtacaaaaaaagagatgtctatgtttttttcttctttataacattaagatgtgatgtaaaatatagtagccagagttgcatttttcacatgagcaaaagttacatgcagaaaaagaacagaagttcgttgattgtaggatatgtaaccttgagaactttatcttatagccaacggtcacacattctgaaatgtcttaagtgatctggtcagtgctaaaggtagtaagaaaatctggttgctgaaaat

SEQ ID NO: 429438 - DNA, 628 bp, Homo sapiens
ttattttaattttgaactccagatttaagtaatacaggtttctttcatacaagtcatgatgcatactcgtgtatgagcttttcatgttttacacaatttctattagcatgtttatgttatttttgactcataagagctttcatatattaaaaatatagaacttcaatttgtaaatattatttcaagttttaatgtagttcaagtactgcctataaacaaatttttcattaagaagcttaaaggtttaatatactctaatgtgtttcckttatgtttttctttattgcattgagaaaatattttattatttcaagattaatgatttccacatatttactatgcttgtaaattaaatgtacatataattattattttagcaaaaaatcataataaaagcagagttgagtgaattacaattagaattgaataaaatgaaataaatcaagacatgttgaaagtattgatagtggcacataaattgagaaaaatttagagtcatgaatgtttatagattagtcaaccaaaagaagtagagaaaggcaataaaaattagaaacagatgaaatagaaaataaagataccacagatatattaaaaaattaatagttttcttaagaagtaaaaaaac

SEQ ID NO: 429439 - DNA, 628 bp, Homo sapiens
ttattttaattttgaactccagatttaagtaatacaggtttctttcatacaagtcatgatgcatactcgtgtatgagcttttcatgttttacacaatttctattagcatgtttatgttatttttgactcataagagctttcatatattaaaaatatagaacttcaatttgtaaatattatttcaagttttaatgtagttcaagtactgcctataaacaaatttttcattaagaagcttaaaggtttaatatactctaatgtgtttcctttatgtttttctttattgcattgagaaaatattttattatttcaagattaatgatttccacatatttactatgcttgtaaattaaatgkacatataattattattttagcaaaaaatcataataaaagcagagttgagtgaattacaattagaattgaataaaatgaaataaatcaagacatgttgaaagtattgatagtggcacataaattgagaaaaatttagagtcatgaatgtttatagattagtcaaccaaaagaagtagagaaaggcaataaaaattagaaacagatgaaatagaaaataaagataccacagatatattaaaaaattaatagttttcttaagaagtaaaaaaac

SEQ ID NO: 429440 - DNA, 628 bp, Homo sapiens
ttattttaattttgaactccagatttaagtaatacaggtttctttcatacaagtcatgatgcatactcgtgtatgagcttttcatgttttacacaatttctattagcatgtttatgttatttttgactcataagagctttcatatattaaaaatatagaacttcaatttgtaaatattatttcaagttttaatgtagttcaagtactgcctataaacaaatttttcattaagaagcttaaaggtttaatatactctaatgtgtttcctttatgtttttctttattgcattgagaaaatattttattatttcaagattaatgatttccacatatttactatgcttgtaaattaaatgtacatataattattattttagcaaaaaatcrtaataaaagcagagttgagtgaattacaattagaattgaataaaatgaaataaatcaagacatgttgaaagtattgatagtggcacataaattgagaaaaatttagagtcatgaatgtttatagattagtcaaccaaaagaagtagagaaaggcaataaaaattagaaacagatgaaatagaaaataaagataccacagatatattaaaaaattaatagttttcttaagaagtaaaaaaac

SEQ ID NO: 429441 - DNA, 569 bp, Homo sapiens
aggtgtctgaattttaattttgtagagtacatagtgccctctggcatgttatgtaccttttcagggtatcaagaatacttgccactttctgctcactagagcattttaatatatgattaatatggtggctaaacacggtagttttcagaatgacaagatgatccaagtctttacagaatacgttgtgacaaagaacaggagaactgacacagcctagaggaaagacagtacatgtgcacttctackgttcccatgtaaaaacatgtggctttggttccctttacccctgaattttgaaaataatttactgtatcaattatagtcaccatatcaatacttgcataccccaaatctgtgatgatctgttatattagcagacacacagtgtggaggctcctcagggtacctgaccacatatggtccagatacagcaacaactatagttatgagtacattcaccaatattctagatctcctctccatctaggcacagaaatggattgcatttccctgcccttttcgaaatgaggctaagtctatttgaagggctttggccagtaaaagggcaa

SEQ ID NO: 429442 - DNA, 515 bp, Homo sapiens
agaacaaatataccaggcaaattcccatttattttctgctartctccattaggaaaagctgcagacaagacagatactatgtgtttctttcacctccacacgctgcctgtctttacttaaaattctttctttctgcctatccattcattgctagttacaattttctgtaacaatgggctgccatttaatttctctcctctaagcctaactgttcctcaacccaaggactcactgccatgaagcattattttacagtgtggagaagcacctggctctcccaaatggtctttcatttgcactgatcaacaagaacaacaaaagccttgtgtcagaggtacaaggcaaccgctttgtctgaaaccacccactcgtcttttgttttcttccacagcacactgtgcattatgttccacgtgctcctctctggggctctgcagatgtgaaactttaaatgcagggtatttaaaaataataaggaatatagaaaaaaaagcaccctgaaaattacagagctt

SEQ ID NO: 429443 - DNA, 515 bp, Homo sapiens
agaacaaatataccaggcaaattcccatttattttctgctagtctccattaggaaaagctgcagacaagacagatactatgtgtttctttcacctccacacgctgcctgtctttacttaaaattctttctttctgcctatccattcattgctagttacaattttctgtaacaatgggctgccatttaatttctctcctctaagcctaactgttcctcaacccaaggactcactgccatgaagcattattttacagtgtggagaagcacctggctctcccaaatggtctttcatttgcactgatcaacaagaacaacaaaagcctygtgtcagaggtacaaggcaaccgctttgtctgaaaccacccactcgtcttttgttttcttccacagcacactgtgcattatgttccacgtgctcctctctggggctctgcagatgtgaaactttaaatgcagggtatttaaaaataataaggaatatagaaaaaaaagcaccctgaaaattacagagctt

SEQ ID NO: 429444 - DNA, 550 bp, Homo sapiens
aattcagaaacctgctggaacccagtaaaagaatctgcaatcagctgggaggactcttctccagggggatgcctttgaacatacaggggcagctgaattattccaaaggactcttctgcctgagagactgaaaatacagactgacaatggcctggtcatatattaatataaaaataaaactctggcccacagtctgcagtgtccagcccaggagaccaacacactatctagagaagccagctatccataactcagactcatctcactgggaggaagtcagactactgtcttgtattattatccaggaagtcaaatcataamccctgtcacaattggactaaaatggctagggcttggtcaatgactcacagcttccctaatttttttcccctgcttcccatttaggaagaaagcagagaaacagagaaggagtgaaagccaaatatagtacctccaactaatcatccaggaattaccccctctagttagcctgtgcggcttccctattccaacagcctccaatcaggacacatctgacaccttctgtttt

SEQ ID NO: 429445 - DNA, 644 bp, Homo sapiens
agcatttagaacactggcatgctgatggaagctatttatatcagctttttcacaatgaagcccattgtcccattaccatctcggttgacctgcatcatcaggtgtatatcctattaagatgcaaattctgtctgggagaggcagtgcatgaaactcttggcatttactgacaaatgaacttcaattagcaagtaaaatttcttagcctaggaagattcatggaactattatcagaggtgtttgaaccagagcaacttcatcttgaataggagttgggtcaagggagactgagacctactgagctgcattcccaggaggttaggcattctaagtaataggatgagataggctggcacaagatacaggtcaccaagaccttgctgataaaacaggatgcagtaaagaaaccggtcaaaacccaccaaaaccaagatggcaatgaaagtgacctctggtcatcctcactgctcattatacactaattataatgcattagcatgctaaaagacactcccatcagcaccatgacagtttacagacaccatggcaacattagaaagttaycctatatggtctaaaagtgggaggaaccctcagttctgggaattgcccacccctttcctggaaaacttatgaataaccca

SEQ ID NO: 429446 - DNA, 556 bp, Homo sapiens
tcttcagtgatctcatttaatttcagaaattcaaatattatccgccrgtgacttccaagtagatatctgtgtgcctcagctctctcctggactccaattctctactacttgccgtcaatcttttcctggatggcccattagcatctcagattcaacatactttgaccttaacttattgtttccccaaagagatctccttgtctggacaaagcctttgtccattttctctgattctttcttcctaatgtgcgaggattccttctctgtcaaagtgattaagccattcgcccaagggcatacagacagctgcaaagtccagattcaaactggagtttctctgactcatacactgggcttttccctctgtaagttactctgaggtaaagagattcaacaagatgtagttttagctcttgaaagtcctacaataaagttcaggaggcagttttgtaaaaaattaatgacccataataggtatttaaaaactattagtgtaccttcctatgtctccataatgatcattaaaagtttgtatcacaattttaagaaaattgta

SEQ ID NO: 429447 - DNA, 556 bp, Homo sapiens
tcttcagtgatctcatttaatttcagaaattcaaatattatccgccagtgacttccaagtagatatctgtgtgcctcagctctctcctggactccaattctctactacttgccgtcaatcttttcctggatggcccattagcatctcagattcaacatactttgaccttaacttattgtttccccaaagagatctccttgtctggacaaagcctttgtccattttctctgattctttcttcctaatgtgcgaggattccttctctgtcaaagtgattaagccattcgcccaagggcatacagacagctgcaaagtccagattcaaactggagtttctctgactcatacactgggcttttccctctgtaagttactctgaggtaaagagattcaacaagatgtagttttagctcttgaaagtcctacaataaagttcaggaggcagttttgtaaaaaattaatgacccataataggtatttaaaaactattagtgtaccttccyatgtctccataatgatcattaaaagtttgtatcacaattttaagaaaattgta

SEQ ID NO: 429448 - DNA, 609 bp, Homo sapiens
agcagtcaccagctgcaggtgtatgtccaccctctggtttackcctatgtaatttgaagacacggcattaaaaagaccattctattctgcatctaaaatttaaaaagtaccaaattgacactgaaaataatttttaagaagaattagtgaagagcatgacatattggccacttcagaaatctttcttctttcaatggacccatctcagcactcactgtttttaaacacctttgtaggtaaccaggtatcaatacgtgatagttttatgttaactcagaataatttccgcaaaagaggaaagagcaaagagggctttcagacacccagaggaagagtccttggattgtatgtgtatatttgtgtcagaggcattcaaaccagagcaactccatcttgggtgaggcctacaaaaatgaggctgagacttgctgggctgtgttcccagaaagttaggcattcctagcttctagatgtttatggttaagggaacagattgataacgtttactaaacagacccagacttgggagtgtcctaatatttcagtatcttgacaacaaaaacattcctaattttgctttaaaaataatatttattcttgcaaactata

SEQ ID NO: 429449 - DNA, 609 bp, Homo sapiens
agcagtcaccagctgcaggtgtatgtccaccctctggtttacgcctatgtaatttgaagacacggcattaaaaagaccattctattctgcatctaaaatttaaaaagtaccaaattgacactgaaaataatttttaagaagaattagtgaagagcatgrcatattggccacttcagaaatctttcttctttcaatggacccatctcagcactcactgtttttaaacacctttgtaggtaaccaggtatcaatacgtgatagttttatgttaactcagaataatttccgcaaaagaggaaagagcaaagagggctttcagacacccagaggaagagtccttggattgtatgtgtatatttgtgtcagaggcattcaaaccagagcaactccatcttgggtgaggcctacaaaaatgaggctgagacttgctgggctgtgttcccagaaagttaggcattcctagcttctagatgtttatggttaagggaacagattgataacgtttactaaacagacccagacttgggagtgtcctaatatttcagtatcttgacaacaaaaacattcctaattttgctttaaaaataatatttattcttgcaaactata

SEQ ID NO: 429450 - DNA, 609 bp, Homo sapiens
agcagtcaccagctgcaggtgtatgtccaccctctggtttacgcctatgtaatttgaagacacggcattaaaaagaccattctattctgcatctaaaatttaaaaagtaccaaattgacactgaaaataatttttaagaagaattagtgaagagcatgacatattggccacttcagaaatctttcttctttcaatggacccatctcagcactcactgtttttaaacacctttgtaggtaaccaggtatcaatacgtgatagttttatgttaactcagaataatttccgcaaaagaggaaagagcaaagagggcttycagacacccagaggaagagtccttggattgtatgtgtatatttgtgtcagaggcattcaaaccagagcaactccatcttgggtgaggcctacaaaaatgaggctgagacttgctgggctgtgttcccagaaagttaggcattcctagcttctagatgtttatggttaagggaacagattgataacgtttactaaacagacccagacttgggagtgtcctaatatttcagtatcttgacaacaaaaacattcctaattttgctttaaaaataatatttattcttgcaaactata

SEQ ID NO: 429451 - DNA, 609 bp, Homo sapiens
agcagtcaccagctgcaggtgtatgtccaccctctggtttacgcctatgtaatttgaagacacggcattaaaaagaccattctattctgcatctaaaatttaaaaagtaccaaattgacactgaaaataatttttaagaagaattagtgaagagcatgacatattggccacttcagaaatctttcttctttcaatggacccatctcagcactcactgtttttaaacacctttgtaggtaaccaggtatcaatacgtgatagttttatgttaactcagaataatttccgcaaaagaggaaagagcaaagagggctttcagacacccagaggaagagtccttggattgtatgtgtatatttgtgtcagaggcattcaaaccagagcaactccatcttgggtgaggcctacaaaaatgaggctgagacttgctgggctgtgttcccagaaagttaggcattcctagcttctagatgtttatggttaagggaacagattgataacrtttactaaacagacccagacttgggagtgtcctaatatttcagtatcttgacaacaaaaacattcctaattttgctttaaaaataatatttattcttgcaaactata

SEQ ID NO: 429452 - DNA, 610 bp, Homo sapiens
aacgtatgcaaatatccaaacattgcactgtatcccataagtacatacaataaaatgaaagatgacagtgtacacctatatgtacacacctgtatacrctataatctaagaaccctctacattaggactagagcgatattatcagaaacatatatgcatacatgcatatttacttaattgctgtctccgtgagagttttcttggcttccaggcatgaaacaagtgatgaatagggcccctctcctccagaaatacacgtgctatatttctaaacaaaaactcatttcatccaaagtttgaaaatgaccttggtaatttttcaactcaaaagaacatgctcaatcaaagtgtgaggcatcatttgaatactgctatgataaaaaatagaagatagtgcttaaaacctttaaaaaatgcttacccattcttgaaggtattggagagagaaattctatcaattcgaaagcctatcttctacatttttatttatgaaagtgaactctcctttcaagcaacttaaaattaaggtcatggaatgctttcaatgcacttggctgttttcatgtggcaatagcatacaaatggccacagtccccataactcaatccta

SEQ ID NO: 429453 - DNA, 610 bp, Homo sapiens
aacgtatgcaaatatccaaacattgcactgtatcccataagtacatacaataaaatgaaagatgacagtgtacacctatatgtacacacctgtatacactataatctaagaaccctctacattaggactagagcgatattatcagaaacatatatgcatacatgcatatttacttaattgctgtctccgtgagagttttcttggcttccaggcatgaaacaagtgatgaatagggcccctctcctccagaartacacgtgctatatttctaaacaaaaactcatttcatccaaagtttgaaaatgaccttggtaatttttcaactcaaaagaacatgctcaatcaaagtgtgaggcatcatttgaatactgctatgataaaaaatagaagatagtgcttaaaacctttaaaaaatgcttacccattcttgaaggtattggagagagaaattctatcaattcgaaagcctatcttctacatttttatttatgaaagtgaactctcctttcaagcaacttaaaattaaggtcatggaatgctttcaatgcacttggctgttttcatgtggcaatagcatacaaatggccacagtccccataactcaatccta

SEQ ID NO: 429454 - DNA, 569 bp, Homo sapiens
tattagcattatgctttctcacccattgaacatcccaaacccagaatctgatatccacaatacaaaatgttccaatgaacattttgagtgtcatgtcagtactcagaaagggttcagatttcggagaatttcacgtgacagttttgaactgggattaatcaacctgtagtgtattcaaaaacctgaataaaggtgaaagtcacaggagtcaraatggaataggtaggaacactaaagagaggcaggtgtcaaagacaactcacagatttaaagtcttggaaacggggaggatgttgctgaaataggtaccagtttcaggaggaaggtaatattttggtttgggatatggatagtttgattaacaaagaaaattgctaacttccttacaaaattggtggctctacagttagttttcaaatggaactgaacatcagcccaatgacaattatacaatctgagctgatacccatttactggcctggtactgactttctactggtgcacgcacactacatgcaagcaataaaaacacagttgaatctgtctggcctttatagatgaaagtagaa

SEQ ID NO: 429455 - DNA, 518 bp, Homo sapiens
tggattgaagtacctagagtcatttgtgtgctttgctagggaaacctctttgccaagtaagttcctctaactttgaccttgagggagctaagctggttcagaggaggaggaatcagtggttttctagctgcgatcagatttaagttttccttagtccattccctacagacatttatatagtagtggtttttcttacaatagtcactgggaaacaataaccaattaagtgaaaacttcataccatttgctcctctaatgctgtttttatgtgaccttctcatttgtagtttgacatcttttggaggtgaaatatctctggctgtaaaactcttccatttgtatagaagcttgtctttaatccsaagtagccattattaactcccttgggcaatttgggtcaaccttttttatcttggtattcatgtgggaagaaggctgtttacttagcagggtttagacatggggaaagaaatgaccactcccagtctaggggcttatgctcatttgtaacctatcct

SEQ ID NO: 429456 - DNA, 578 bp, Homo sapiens
atttgcagtaagtttattggggaataacttcattgcaagtcaaggagtatctgtagtcttctctgtttgtttgtttcaaaatgtcgacacatttcttcatctgcttcaatcaaacagggtttaattgaattaccacaggtcaaccacttttcttgcttggctaacaaatgagctacttgctaactttctttccagagctccaaaaaggatcagttgaggtcgcagtaacaattacattataggtcagcttttccctctgatatcatttaatattttgatttttatgtagaaattttaccaggttataatattctgtaacacttttgtcttctgktagcatattgaatacttggggttatttagctatcaatatgatctaaattttcaatccaaaagatctaacttgaaatggtactgtctatattggttagtctctgaaacagctacagagtagaaaatgcagaggctaagtcttagctgtttttttgtctttcttccttttattcctgttactttacataaagtacactggtggtagctaacatctttgtttcaagtaatgtgttaagtcaaaggag

SEQ ID NO: 429457 - DNA, 468 bp, Homo sapiens
ctaatgtattttttgttaaagtaagcagctttaatttaattataattatcatactataacrtctattctttaatgtgtacaatatggtgacttttagtacatttatggagtcatgtaactacattatctagttttaaaaatattctcctcattgtggccatcccaataactggaattataaaatatgtgactgctgttactggtttatttcacttagcatattttcagggttcgtccatgatcatgtatgaggatgtcatctgtttccaaaaccaaataatatcccattgtatctatatactatattttatatctccatccatcagtgatggacatttgagttgcttctaacttttgcctattataagtaatgcttacacattatgcttatgagtattcatccacaagtttgtgtgacatatgttttcaattatttggggaatatatttatgagttaccaattaatgg

SEQ ID NO: 429458 - DNA, 468 bp, Homo sapiens
ctaatgtattttttgttaaagtaagcagctttaatttaattataattatcatactataacgtctattstttaatgtgtacaatatggtgacttttagtacatttatggagtcatgtaactacattatctagttttaaaaatattctcctcattgtggccatcccaataactggaattataaaatatgtgactgctgttactggtttatttcacttagcatattttcagggttcgtccatgatcatgtatgaggatgtcatctgtttccaaaaccaaataatatcccattgtatctatatactatattttatatctccatccatcagtgatggacatttgagttgcttctaacttttgcctattataagtaatgcttacacattatgcttatgagtattcatccacaagtttgtgtgacatatgttttcaattatttggggaatatatttatgagttaccaattaatgg

SEQ ID NO: 429459 - DNA, 468 bp, Homo sapiens
ctaatgtattttttgttaaagtaagcagctttaatttaattataattatcatactataacgtctattctttaatgtgtacaatatggtgacttttagtacatttatggagtcatgtaactacattatctagttttaaaaatattctcctcattgtggccatcccaataactggaattataaaatatgtgactgctgttactggtttatttcacttagcatattttcagggttcgtccatgatcatgtatgaggatgtcatctgtttccaaaaccaaataatatcccattgtatctatatrctatattttatatctccatccatcagtgatggacatttgagttgcttctaacttttgcctattataagtaatgcttacacattatgcttatgagtattcatccacaagtttgtgtgacatatgttttcaattatttggggaatatatttatgagttaccaattaatgg

SEQ ID NO: 429460 - DNA, 589 bp, Homo sapiens
ggtgcacacccacagcgctccaatgacaagtcatatgctgttcccaccaaaccacacttccctagaactatagtaacactatttttattttttttactatttggctttctcaaataaatttcagggtgttatactaagaggtgatatctgcctacaaaattttatttgtatcttgatatcgatacacccatcaaaaaatactattcatatgatcatgatgttacgttctaaccctcaattgccaacttgaagtttcctgcacgcccttttcttagcctgtttgcatcgctacaaaggaatacctgagactgggaaatatataaagactcatggttctgcaggctgtacaggaagcatggtgctggtatctgctcagctcctggtgaggcctcaagaagtttctaatcatggctgaaggtgaagggggagaaggcacatcacatggtgaaagggggagtagaaaaygccagtctcctttaaagaccagctctagcatgaagtaaaagagagaacttgctcattaccatggggaagacacgaagatgtacatgaggaatctgcccccatgacccaaacacctcccaccagg

SEQ ID NO: 429461 - DNA, 616 bp, Homo sapiens
taaaattctgaaatagtatgaagtgggggaaaaggaagacaaccctggttatcaatgaaacacaacgaaattctccatgacgaatgtaaaggtctcttctaatgaaagttatgcacttctccaccttcctttccctctcctcacccaaacaccatcaggggaaacctccctgttgagccactcagacaatgagctgcagtcagcagccagctctctgtcaaagggcatgactgaagacagaattagcattgtgcaagaaagagtcaaagaaatctcccagaatatagaaaaatggggacccaasaagtgagataaaagtgagaagctgtggagaacacattgagcagatccagtaaccattagcaaaagtcttagtaaaaacaaggaaaaaaattgtatatatgtatatataatattttatatatatatataatgaggttattgaattgtgggatgagaagtgataattgtgactgaattaataatttgttgaagaatttctatgaactgagtaatagaacaaatcttgagactaaagtggccctttgagcaacaacaaaaaaagtagacacttacttaaatgtttcttaagtttctgaactcaaaggatgtacaa

SEQ ID NO: 429462 - DNA, 616 bp, Homo sapiens
taaaattctgaaatagtatgaagtgggggaaaaggaagacaaccctggttatcaatgaaacacaacgaaattctccatgacgaatgtaaaggtctcttctaatgaaagttatgcacttctccaccttcctttccctctcctcacccaaacaccatcaggggaaacctccctgttgagccactcagacaatgagctgcagtcagcagccagctctctgtcaaagggcatgactgaagacagaattagcattgtgcaagaaagagtcaaagaaatctcccagaatatagaaaaatggggacccaagaagtgagataaaagtgagaagctgtggagaacacattgagcagatccagtaaccattagcaaaagtcttagtaaaaacaaggraaaaaattgtatatatgtatatataatattttatatatatatataatgaggttattgaattgtgggatgagaagtgataattgtgactgaattaataatttgttgaagaatttctatgaactgagtaatagaacaaatcttgagactaaagtggccctttgagcaacaacaaaaaaagtagacacttacttaaatgtttcttaagtttctgaactcaaaggatgtacaa

SEQ ID NO: 429463 - DNA, 499 bp, Homo sapiens
aatcaatgattaaatcttaaaaagagtatttacaatgtaggtgtgaagattactgaaattattcaaataggattgctttctgatgcaaaatatgaattatctgtagccagaaactcatacgtttaaccaaaacatgattaataaaagttgcagtggaatgatactcaaatattgccttgttcaacatagagagttacatatactcattattttattaagatcttgaaaaatctcaaagtatgtttggttaagttctgtcagcattctaacaatgaaaacaagatttagttcctccaaccactagaataaaataaaggaaaaaaaactcccttatttttttttacctgacaattatatgtttttatcatattccaacttctactcatttagtaaaatatttactattagtataccattccctatrtgaggatctataaatcatgataaatagaaaataatacaataaatagacaagaataaatgcaaacatgtaagtatt

SEQ ID NO: 429464 - DNA, 550 bp, Homo sapiens
caattaatatgcatcatcataccaacagactaataagaaaaatctgttacattgtctcaatagatacagaaaaataatttgacaaaatttagcatattaacaattaaatgttaacaacagaacatgtatagaaattctcagcaaactaggcatcgaaattaactccctttacctaataaaaggcatctgcaaaaaacctacaattaatgtcatactccctgwggttcagaaaaagcaagatgttcattctcactacttctattcaagatcatgttgtgggttcccagccaatgatacaaggcaagaaaaagaaatagaaaatgtatagactgaaaactaagaaataaactttttctattcttgggtgtcattattgtatacatagaacatatcaaggaatctacaaaaagctactatacttgataagtgactttagcaaagccacaggacataagaacaacagaacataatcagttatatttctgtacactggaaatgaacaatcaaattgaaatagttaaaaatagtaccaattgtaataatataaaat

SEQ ID NO: 429465 - DNA, 550 bp, Homo sapiens
caattaatatgcatcatcataccaacagactaataagaaaaatctgttacattgtctcaatagatacagaaaaataatttgacaaaatttagcatattaacaattaaatgttaacaacagaacatgtatagaaattctcagcaaactaggcatcgaaattaactccctttacctaataaaaggcatctgcaaaaaacctacaattaatgtcatactccctgaggttcagaaaaagcaagatgttcattctcactacttctattcaagatcrtgttgtgggttcccagccaatgatacaaggcaagaaaaagaaatagaaaatgtatagactgaaaactaagaaataaactttttctattcttgggtgtcattattgtatacatagaacatatcaaggaatctacaaaaagctactatacttgataagtgactttagcaaagccacaggacataagaacaacagaacataatcagttatatttctgtacactggaaatgaacaatcaaattgaaatagttaaaaatagtaccaattgtaataatataaaat

SEQ ID NO: 429466 - DNA, 550 bp, Homo sapiens
caattaatatgcatcatcataccaacagactaataagaaaaatctgttacattgtctcaatagatacagaaaaataatttgacaaaatttagcatattaacaattaaatgttaacaacagaacatgtatagaaattctcagcaaactaggcatcgaaattaactccctttacctaataaaaggcatctgcaaaaaacctacaattaatgtcatactccctgaggttcagaaaaagcaagatgttcattctcactacttctattcaagatcatgttgtgggttcccagmcaatgatacaaggcaagaaaaagaaatagaaaatgtatagactgaaaactaagaaataaactttttctattcttgggtgtcattattgtatacatagaacatatcaaggaatctacaaaaagctactatacttgataagtgactttagcaaagccacaggacataagaacaacagaacataatcagttatatttctgtacactggaaatgaacaatcaaattgaaatagttaaaaatagtaccaattgtaataatataaaat

SEQ ID NO: 429467 - DNA, 550 bp, Homo sapiens
caattaatatgcatcatcataccaacagactaataagaaaaatctgttacattgtctcaatagatacagaaaaataatttgacaaaatttagcatattaacaattaaatgttaacaacagaacatgtatagaaattctcagcaaactaggcatcgaaattaactccctttacctaataaaaggcatctgcaaaaaacctacaattaatgtcatactccctgaggttcagaaaaagcaagatgttcattctcactacttctattcaagatcatgttgtgggttcccagccaatgatacaaggcaagaaaaagaaatagaaaatgtatagactgaaaactaagaaataaactttttctattcttgggtgtcattattgtatacatagaacatatcaaggaatctacaaaaagctactatacttgataagtgactttagcaaagccacaggacataagaacaacagaacataatcagttatatttctgtacactggaaatgaacaatcaaattgaaatarttaaaaatagtaccaattgtaataatataaaat

SEQ ID NO: 429468 - DNA, 667 bp, Homo sapiens
cttcattattaaaaatgtgtatttattctgacatctttttccacagtttacttaaaatttttgtcttacataaattctattaaaatactggcatgcaaaatgttctctgagccgcatgatgagttattgttcaagacaagcccacagcaaaatctatggaagtctcattaaggagcttgtaaatgatgtatttctcattaactttgagacttagcttttgaactcaccttttccttccyttagataaacaatattccaattctccatatttaatatgtgttagttcttaagagttttatccctcccccatctctactgaaatactaaacaggcatgtaaagtcatttatttcattgatttagtctgaagttttcacaacaaggaaataccaatcacaaacaggaatccatatccagtaatttagcaatcaatgcaagcagtcagggttttaaaataataaggtaataagaaaaagaaggtaaaatctgaggtttgataattttgttatttcttgctcattagaaagaagaaagacaaaaatcatctccaattattttcaaggtttattgatgttttcctagttgatagataaaaagacaccatggaaaataataaaaacagggctagattatttgggctcaaaattaatttacaacactatcttctt

SEQ ID NO: 429469 - DNA, 594 bp, Homo sapiens
aaactttgatcattataaatgtacaatcagtgatttttagtaaccatatagtgttgtagcaatataaccaaaatccacttttattattattagaaaccaagatcttgctgactgatatgcatattgctacagggtgtcattgcctttaggccccctaagctcactgagtaagttaatgtatgtgtgtattttaatcagtagatagattaactatagatatagttataaattattacagatatagataactagttttcagcttatctgaatccactcaaataccactatactgcttcatgtatagtacagtaccttagaggactcctaatttttccctatcatcacttgtggtatgtatctcacacacacacacacacatcctatgtgtattatatatatgatgaatatacacatgtatgtgcacatatattatatatgtgtgtctatatatgatatatatagtatatgtgcatgtatgtgtgtatrtatatattcattgcttctgctctttgtttcagcttcataactttgttgtttaaaatctcatatatgataaccaattattgtcattatatctttctattaataagatgt

SEQ ID NO: 429470 - DNA, 560 bp, Homo sapiens
agttatttggagggtctcttaagaggtgcatatatttagaatagttatttggtcctggagaactgatctttatttcaaatttagtgacactttgtagccctaataattmtttttgatacaaagtctattttgaagaatgcattcttttacttagtgtatttctttggcttggcagggtcttaaaaatagcatttagttgaaattttaatatcttttattgatatgtaatttacacaacatagagtttgcttatttaaagtgtacagtttaatgattttttatatatattaggagttttgcaaccaactcgataatataattttagaacatttttttcatcccacaaagaggcctagttgtcagcggccattcctcattgccaccacccttctcaagctcctggtaacagcaaatccactgtctttctttatagatttccctattccggacacttcatataaatgaaatcatacaggctgggtgtggtggctcacgccttaatcccaacactttgggaggccaagggggacgaattacctgaggtcaggacttcaagacct

SEQ ID NO: 429471 - DNA, 560 bp, Homo sapiens
agttatttggagggtctcttaagaggtgcatatatttagaatagttatttggtcctggagaactgatctttatttcaaatttagtgacactttgtagccctaataattatttttgatacaaagtctattttgaagaatgcattcttttacttagtgtrtttctttggcttggcagggtcttaaaaatagcatttagttgaaattttaatatcttttattgatatgtaatttacacaacatagagtttgcttatttaaagtgtacagtttaatgattttttatatatattaggagttttgcaaccaactcgataatataattttagaacatttttttcatcccacaaagaggcctagttgtcagcggccattcctcattgccaccacccttctcaagctcctggtaacagcaaatccactgtctttctttatagatttccctattccggacacttcatataaatgaaatcatacaggctgggtgtggtggctcacgccttaatcccaacactttgggaggccaagggggacgaattacctgaggtcaggacttcaagacct

SEQ ID NO: 429472 - DNA, 560 bp, Homo sapiens
agttatttggagggtctcttaagaggtgcatatatttagaatagttatttggtcctggagaactgatctttatttcaaatttagtgacactttgtagccctaataattatttttgatacaaagtctattttgaagaatgcattcttttacttagtgtatttctttggcttggcagggtcttaaaaatagcatttagttgaaattttaatatcttttattgatatgtaatttacacaacatagagtttgcttatttaaagtgtacagtttaatgattttttatatatattaggagttttgcaaccaactcgataatawaattttagaacatttttttcatcccacaaagaggcctagttgtcagcggccattcctcattgccaccacccttctcaagctcctggtaacagcaaatccactgtctttctttatagatttccctattccggacacttcatataaatgaaatcatacaggctgggtgtggtggctcacgccttaatcccaacactttgggaggccaagggggacgaattacctgaggtcaggacttcaagacct

SEQ ID NO: 429473 - DNA, 643 bp, Homo sapiens
cagcattttaaaaactatacttctaaaaactcttatttatagagatgtcccttaacatgcaagatatataataagcacttaggataggctggcaatggcaaaatatatattagtcctaagtarctaatacatatgtacctatacatactaactctcaaatgaaatgataaagactctaattgtagcaaccaaaagatctttccttgtttgaagattgattgaagagaatcctgacttatgtttctgtttatatgaaaagtaacaatgaagaaagagaagcagaagaaaaagtgcattcaaaatgctatagcaatcatgaggctctcaccttgcagttaaaaaaactccagcaaagttgagcttattaagggacaaaatggaaaatttggtaagtaatggaggtaaagacgattgataaccaaaagaaagggaaagggaagaacaagggaggggtgttatttaggatatgcgcagtgtagacaccatgtagctctgcttttagcagctcaaaatgtcatgtcattgttcagtgtgttcaaaatgccatatatgccatatagtttgtgcagtgacattttctaggttatatcagcagggaagaatagtgtcatgggccctccaaggtgtgatcctatggaatgca

SEQ ID NO: 429474 - DNA, 417 bp, Homo sapiens
agtacctacctcatatctccaccatatattaatatatactcactcatctgtcccattcactagacagtgagtacyttcaaaaaagaaactgtctttttaaagaaagtttgtatccccaacactgaacacaggggctaacacaaagtacatactcaacaataaattgtagatttaaacaataaaggaaatgaaaatgcaatattacctataggacaaaaatcataaatcccaatgaactagaataatcatcattttgtattgactctataaaacaacagaaatatcttcaaattctttgaaaaatatttttcatcacttactatgctgagagcaattctaagtgctaagcattcaggaaaataaaaatctgaatgaattttgataaacgctttcaaataactctattacaataagatg

SEQ ID NO: 429475 - DNA, 567 bp, Homo sapiens
acagcagggtgaccatagtcaataataatatattatatatttcaaaataagagtaaatttcaaatgtctcaccaaaaaataacaggtattcaaggtgatggatatgttaattagcttaatttaatcatgacacattgtatacatataaacaaatgtgtatgcgtatatatatgcatatgtgtgtgtgtatatatgtgtgtgtatgtatatatatatatatacttttttttttgagacagaatctcactctgttgcccaggctggagtgcagtggcatgatcttggctaactgcaacctctgcctcccaattttaagtaattttcctgcctcagcctcctgagtagctgggactacaggagtgcaccacgacgcccggctaatttttgtatttttagtagagacggsgttttactttgttggccaggctggtctcaaactcctgggctcaagcaatctgccttccttggcctcccaaagtgctgggattacaggcctgaaccacggcacctggtctctaatatatattttaaaggcctgaaatcaatgaaggaccaaataaatggagt

SEQ ID NO: 429476 - DNA, 571 bp, Homo sapiens
gtgtggttgtgcgtgctgtagtcctagctacttgagaggctgaggcagcaggattgcttgagcccaggaggtcaagactgccatgagctatgatcacacygctgcactccaacctcagcaacagagcaagaccctgtcccttaaaaaaaaaaaaaaaaaaaaaaaaactagctgggcatggtggctcacacctgtaatccctgcactttgagagactgaggcaggcagatcacttgaggtcaggagtttgagaccagcctgggcaacatggtgaaaccccgtctctactaaaaatacaaaaattagccaagtgtggtggtgcatgcctgtaatcccagctactcaggaggttgaggcaggaaatcacttgaacctgagaggcagaggctgcagcgagccaagatcatgtcacagcactccagcctgggtgacagagagagaccctgtctcaaaaaaaaaaaaaaaaaaattctagaagataacataaagggtaatctagatgaccctggatttggcaatgacttttctagttataaaaccaaagtcatgattgatgaaagaaagaattagt

SEQ ID NO: 429477 - DNA, 578 bp, Homo sapiens
agaagattaggctaaaagcagagagctacaaaatactggttagtgtttaagataccactagaaatttgaaaccatggtaaaattgtctatgggtgtgtttttaaaaattctaaagaggaaagggataaactaaattttaagaacctagattctggtgggaggattgtagccagctgaaagctgagatacaaattgtgaaaactttggggagttcatggagaaagccatctttcaacataactggctgttcaagaccaatgacagggcagaggatcatcaaatgttgagaatagtgttcttttaacatgctctagggtacaaagcrtattaactcatcatttcacctgcaagggaaagagaataaaaagctgcattgtgttactgtgtgccccacacaaagtagaaactcattaaatatttatcaatagaatgaactcttttaatgttgtgagacaaatatcttggattaaagtacatttgaaatcccagtcagtcttaagaaacaactaagtctaaggctgtaacaaaaaaatgtatatatgaactaagatctaaaaatagactgctatttgttgaat

SEQ ID NO: 429478 - DNA, 556 bp, Homo sapiens
ataatattaacaactaccatttctgagagcttactatatgccaagcactgttctaaatctcgtgtatactaaactaaagcatgattattatgcctgcttaatgggtgaggaaatcatatatacctyctgatttgaagtggtcacaagtaagggaacattttataatcctcttcattaggactcagtagtattaattgttaggaatgactaaaaaaaacagtacaagcatcttttttggggggaatcacacatgctgaaaaggctttccataatctttctttgaaaagacttcttcactgaggtaataaaactcatagtgtattcaaaccaataaaaccaaatgcttaaatcaaatatttaaacattcatttatatgcattttacatctctctgtagagtaaaataaagcatcctttgaccagaggctttcctcccatttcccctgggtccaatgtcatgccagcccatttcacagataatagagctgggatggccagcagcagctgatgtagtattgattactttatgacactacacattgaatatttagtctaat

SEQ ID NO: 429479 - DNA, 620 bp, Homo sapiens
aaattaaacaatttctcatttccaagatacaacggtggaagagtataagatacatattcccttaccaaaagggagaaatagtccagaaaaaaagaagtaacaggccccaaacaagtccaaaacccaatagggcagacattaagttaatctttcactgtatgtgctgcttccyagacacactgcaggctttgggccccaaaactgcctcactctttactatggctttgttggactcaggccacatttcagctttctcaagttgtagctgcacagtggtgcctgcagctttcacaggctggcattgcatgttgccagtgactgtacattctgggatccctgcagcagtcctgctcccagagctccactaagcattgatttagtgggaactttctatggcagctccaaccccaaagttctgctgggcattgccttagtgagggatctctctgattactccaaccctgggacaagtctcttcctgaactcccaagcagtctgcaacattctttaaaatctaggtggatgcaattatacccccacagctcttacattttgttggtctacagaattaataccatgtagacacagccaaagtatatggcttgtacccttcagagtgg

SEQ ID NO: 429480 - DNA, 639 bp, Homo sapiens
cttttttctttttttctcagtctagctaayggtttgtcaatattatctttcaaaatatcaactttttgttttgttgagcttttgtattgtttttggtctcaattttatatccttcttctctgatcttttttatttctatattgtgccttgcagaggacctttctagttaaatacatttgggaacttttgagcttcctggatctgggtatctatgtctgtcccaagacttaggaagttttaagttagtatttcattaataagtttttattaccctttttgtcatcttgtctttctaagctcccacagtatgaatagctgtttgcttaatggtgtcccacaagtcctgtaggctttctttattctttcttattctgttttctttttctttctgtctgcttgagttatttcaatagacctgtctttgagttcataaatcatttttttctgcttgatctagcctgttgtcaaaactcttgattgtatttttatttcattaactaaattgctcagctccaatatttctgtttggttcatttttatgataccaatttcttgttgaatttctgatttagatcatgaattcttttcctgatttttttcagttgcatatctgtattttcttctatcttgctgagtttc

SEQ ID NO: 429481 - DNA, 639 bp, Homo sapiens
cttttttctttttttctcagtctagctaatggtttgtcaatattatctttcaaaatatcaactttttgttttgttgagcttttgtattgtttttggtctcaattttatatccttcttctctgatcttttttatttctatattgtgccttgcagaggacctttctagttaaatacatttgggaacttttgagcttcctggatctgggtatctatgtctgtcccaagacttaggaagttttaagttagtatttcattaatargtttttattaccctttttgtcatcttgtctttctaagctcccacagtatgaatagctgtttgcttaatggtgtcccacaagtcctgtaggctttctttattctttcttattctgttttctttttctttctgtctgcttgagttatttcaatagacctgtctttgagttcataaatcatttttttctgcttgatctagcctgttgtcaaaactcttgattgtatttttatttcattaactaaattgctcagctccaatatttctgtttggttcatttttatgataccaatttcttgttgaatttctgatttagatcatgaattcttttcctgatttttttcagttgcatatctgtattttcttctatcttgctgagtttc

SEQ ID NO: 429482 - DNA, 564 bp, Homo sapiens
aaacagggtctcaccacagtgcccaggctggtctagaactcctggactaagcaattctccctcttcagcttcccaaagtgctaggattacaggcgtaagccattgtgctgggcacaaatatatttatgcaattgtcaatacaagatcaagatttctcaagaaaaaatatatgaaagtacattataaaaaagacttttaaaatcagtgtattattaaaaagtacattataaaaatatacttgagtttattgtaaaaatgcttcttattcagaatgcttctatcaacatccaatagttgtacattttcatcctccctttatacgtactgtatttattcaattccaaacaattgaataaattgaatttattcaattccaaaatagatgaaatayatttcatctattacataaatataccccacattgaattcatttggaaaacaattgtgtctcaaattgaaatcataatagtctaaaatataaattgaatgccatttaatgacattgaattatgaattgtagaaatctacataaaggacttgcttgttttataaaggaaaagagaa

SEQ ID NO: 429483 - DNA, 612 bp, Homo sapiens
aagaatcgtttgaacccgggagtcggaagttgcagtgagccaagatcgccactgcattccagcctggcgacagagcgagactctgtctaaaacaacaacaacaaaaagggtgttkggggtggtggggggtggtgggggtacagggagagctccatgtagtttaacacgtggaagttcctggagggtgtgacacctagggaggacatggaagctcagctcccctttccacgtatcttgtcctatgcattgcttcatctgtatctttgcaatatcctgtatcataaatcagtaaaaataagtgcttccttattttgagctgagctgccaaagtaattgaacccaaggagggagtcataggagccccaatttatagccagtgggttacaagcacaggcaaaataacctggagcttgtgattggtgttagaagttgggggcagccttggggactgacccctcacccgtggaatctgccactacttccaggtatatagcgcaagagttgaactggattgtaggatattaatgctgcagaattgcttgttcaactatgttgatggtggtgtgagaacagagggggaaaatgttgttttattctgcacagcactgaatg

SEQ ID NO: 429484 - DNA, 488 bp, Homo sapiens
tgtccttctctacagggaacttccatattttcttccaactgtccatttctagccaggggtaagcagatttatctttaagctgttacctgagtggagcctgtatcagttctactcatatcctattgatcagagctgctttgtatatccatacctcactgcaaaagaggctggcaaatagatgctctatctgaatatcaaggtatatatttaaaacttggggcctcttttattataaggagtaagaaagarattgatccttgaagacagccttggctatactaggaatgtcctacacctaaaaaaattagctggcagaacattagtcaacttccgaatagatgcttttaatgaccatgagttttgtacttttattgatagatcccattattatcattttttaaaaaaatcagccaaagttaatgaaggcctcttgagtcctgaggaaatatatgcacaaaatcccttcttgggatcttcgactgtttctt

SEQ ID NO: 429485 - DNA, 578 bp, Homo sapiens
acctcactgcaaaagaggctggcaaatagatgctctatctgaatatcaaggtatatatttaaaacttggggcctcttttattataaggagtaagaaagagattgatccttgaagacagccttggctatactaggaatgtcctacacctaaaaaaattagctggcagaacattagtcaacttccraatagatgcttttaatgaccatgagttttgtacttttattgatagatcccattattatcattttttaaaaaaatcagccaaagttaatgaaggcctcttgagtcctgaggaaatatatgcacaaaatcccttcttgggatcttcgactgtttcttacatgctttgccttatagactcactgctattctagtcactcttccttccaaggacatgctacagtttatagtggccctgctgagttattgacccaggatattaacctggttatgaaaagctagaatgatcaagctacagatttggattattatattttgttgaacagtgcagttattttcatatagataaacatttctcttactgagaaatcattttcttctgggtactgttgagttct

SEQ ID NO: 429486 - DNA, 503 bp, Homo sapiens
cttggtctgggaaaacctaggactttaatcacctcattgttgatttcactccaaaaaactattgtaaatttcccaccatgaacataattatattaccatttccaattgtctaatcaaggaaaagcagacatatttcattcagtgtatttttttccatctcttacctacgttcttcacattgtactaagcctttctgatgggttctaaatggagaaagaaaacaatgagatgcagtcccctgtatgatgctgyttcacacaccagcactgaaccagagttcacttacttttgctgcaacccaatagattgttgacatccaagtggcttgcactgggaacacaagcatcacactttgagccagtgacaaattgtttacagaaacactggcctgtgaccaagtgacaggtttcattcaaggctcctgagagatgacaattacaaggctgacatctgaaaacaaggcaaataaaccatcaaagagaatagtgttttgattaataatt

SEQ ID NO: 429487 - DNA, 386 bp, Homo sapiens
caactacacacatcactgaaacaattggagccttccagctccatattacagacaagccctctatcaatactgacaaacttaaaaayattagcagtaattattgcttaggaagacacgtgccctgtatttcactccatccttggctaccttccccttgctcatcagactctcctcccaggccctcttcttgtttacttatacccagccccgaaaataacagtgaaaggttgctcgtagatactcaacgttttctcatacaccatgaaaatcgaacctccccctctacgcagttaccccatcagtccccattacaacctctgacagctgccgccctaggtggatccctaggagtctgggtacaagacacccctttcagcactccttct

SEQ ID NO: 429488 - DNA, 386 bp, Homo sapiens
caactacacacatcactgaaacaattggagccttccagctccatattacagacaagccctctatcaatactgacaaacttaaaaacrttagcagtaattattgcttaggaagacacgtgccctgtatttcactccatccttggctaccttccccttgctcatcagactctcctcccaggccctcttcttgtttacttatacccagccccgaaaataacagtgaaaggttgctcgtagatactcaacgttttctcatacaccatgaaaatcgaacctccccctctacgcagttaccccatcagtccccattacaacctctgacagctgccgccctaggtggatccctaggagtctgggtacaagacacccctttcagcactccttct

SEQ ID NO: 429489 - DNA, 386 bp, Homo sapiens
caactacacacatcactgaaacaattggagccttccagctccatattacagacaagccctctatcaatactgacaaacttaaaaacattagcagtaattattgcttaggaagacacgtgccctgtatttcactccatccttggctaccttccccttgctcatcagactctcctcccaggccctcttcttgtttacttatayccagccccgaaaataacagtgaaaggttgctcgtagatactcaacgttttctcatacaccatgaaaatcgaacctccccctctacgcagttaccccatcagtccccattacaacctctgacagctgccgccctaggtggatccctaggagtctgggtacaagacacccctttcagcactccttct

SEQ ID NO: 429490 - DNA, 386 bp, Homo sapiens
caactacacacatcactgaaacaattggagccttccagctccatattacagacaagccctctatcaatactgacaaacttaaaaacattagcagtaattattgcttaggaagacacgtgccctgtatttcactccatccttggctaccttccccttgctcatcagactctcctcccaggccctcttcttgtttacttatacccagccccgaaaataacagtgaaaggttgctcrtagatactcaacgttttctcatacaccatgaaaatcgaacctccccctctacgcagttaccccatcagtccccattacaacctctgacagctgccgccctaggtggatccctaggagtctgggtacaagacacccctttcagcactccttct

SEQ ID NO: 429491 - DNA, 608 bp, Homo sapiens
tatagttaatcctggtttcaagtaaggtatgattttgagactaacctctgtctggaacaactaggaaattcaatcgagaataagatacatagccatgctcgtaatagaaaataccagtagaggctttgctaaagccattgtatttatgaatagtggtgcaatgtttattttcaatctaaatagaattctcaaatttttcctaaagaaaaattcttttaaaatattctaatatggttgtgttgtgtatgtgaaagaacagtttaaaaattttaaagcatgttttcatttttttaaattataaagtaggattttttcccattttgatgaaaaataagtgtgtgattataaaatataattctttatttttgccataatttgaccctggctttactttgtttctgccaagaatccattgggaaatactgtctacctgctttttcrggatattctctatttttcttagctaaaaattttaatttgtatcatacagcttactacttaacagcttgggcttaaggattagatagccggtgctcaaatttagactttcagtttctgtccacctagggagcttgaataatttgagtaaattatgtagtctgtctgtc

SEQ ID NO: 429492 - DNA, 616 bp, Homo sapiens
ttgacaaacttatatgttagatcaattaagaatgagaaaaataaaagttatttagccttcacttatttctgcgttgatgctcttttttttctttctttttctttttttttttttttggcagagatggggtcttgctatgttatccaggctggttttgaacttctggcctcaagtgatcctcccactttggcctcccaaagcactggrattacaggtgtgagccactgagaccagctgttgctcttttttttctttatagagatctgaatttcttacataaatcattttctttctctttaaataatttcttttaacatttcttggaaggcaggtctgctggcaacacattctgtcaacttttgtcaaagaaagtatttatttcttcacttttgaaggatagtttctcaaattacagaattctgtgttgctggttttttctctcagcattttaaatattttactccattctattcttgcctgcgtggtttctgaggaggagtcagatagaatctttctttttgctcctctgtaggtaaaatgtttttttcctctagctttatctttgattttttgtagtttgaatgtaatatgcataggtgtagtgtttttggcattt

SEQ ID NO: 429493 - DNA, 516 bp, Homo sapiens
atgtaactaatactgaatatgctctgcttgcagcaacaattgttttttcaggtaaaaactttttttcaggtaaaaaccattcagtggtaaaaatctgtattacatttggcaatgaaatgatgaggtttgtggttactaaattattaattacagccaaatgtaccaattttgttttatcacaatttccttctctacaggagcattcctttaagcttatatacatgctataattttttgcaacttaaaaaaacgctttcttgacctcatatccactttcacctactcttatttctctgttccactttacagaaaaaaatttctttagagggttgtgtatactcccttctccattccttttgttaactcctaaaccctctacagtaagattatgtcctctcctctccacatcaccataacyagtcaatatctttgggatcttggcattgctgattccagtggtcaattcctagtcttcagcttacttgacccatgagctacatttgacagatcacgtcc

SEQ ID NO: 429494 - DNA, 633 bp, Homo sapiens
cttgctgtgttccaggtctaagaggaaagaccttcagtgtttccccattcagtatgatactaactgtgggtcagtcatatatgcttttattatgttgagctatgttccttccgtaccccgttttttgagggtttttatcatgaacagatgttgaattttatcaaatgcttttcagcatcaattgaaatgatcatatggtttttgtcctatagcatgttgatataatgtatcacattgatttatttgtatatgttgattatccttacatttgtgggataaatctcacttggttatgattaatgatctttttaatgtattgttgaatttggtttgctagtatgttgttgaagatttttgcatcaatgttcatcagggatattggcctttagtttcctttttttatgtgtctttatttggctttggtatcagggtaatacttgcctcacagaatgagtttagctatattccctcctcctttattttttggaatagtttctgtaggatwgatattaattctttaaatgttttgaaaaattcagcagtgaagccatcaggtcctgggtttttctttgctggaagactttttattatagctttgatcttattacttgtttttcgtctgttcaggtttta

SEQ ID NO: 429495 - DNA, 572 bp, Homo sapiens
tgctttcctcagggaaatatttctgacctgctaatctaaattaggtcacttttctacatttacttgtgacattctgtgctattcctttacaatgcttatcagaaattaaaacatatttgttgatatgacaaattgttaatgtctgttttctggactaaaaacatctaagaaccatagcagttttgctgatgtcatcacctttccctagtgtccagcaygtggtcagcggtcaatgttcatttattgaatgattgaacgcaatccatgtttaaaagtgcttactttgttgtcattcagcacatatgagtttggttctttgcatcgcggccttttgatctcatagaacaactatggaaatcccaactcaaaatgctcaaacatgatttagtgaatatgagcccatgttactcttgtatttgttactgttgttgtcatcatcattgtcattctatcatgttaggtttcattttgatggttctgtgacttgaaagaaatccttgtttctataagataaatgtgttgtataaagaggcagtaagcttaggggtttcacttgggcttgtttcataatt

SEQ ID NO: 429496 - DNA, 585 bp, Homo sapiens
tatttattttatttttttatagttggattattttttattctaatgttacttgaataagaacaaaattaaaataaacacacaaaaaaatgcctctgtgaatcagtcacagggttcctgtaagtctgggctggtgtcctttctcttctgcttgcctagctctttgatggtctctgtctctgcaggactaaacttggaggttagcgtcacattgtcataatcaaattcctcatcaagtgagaagggttgagcttcatctccacatatctcttccatctgtttgtccattctttttacagtaggctttggcttcacttcacaggtgggaggctgggccacagaaggatacaggaaggaatgctggtgcttacatcctactccacttctcctgggagcagcagcaaatcctcacttwtttggggtttattctcttcatccatgtccaaatcttccaaatctaggaaattgtctacctgttcttccaaacattgtgatgaagtacgaagaaaaatggttttatttctaagatggtagtcattagcttcatttttatgagtaacttttgcttaggtaaaaatgttttccgaa

SEQ ID NO: 429497 - DNA, 640 bp, Homo sapiens
tcccttccaccaacaaacctgtaaaatcaaaaacaagttagttatttccaagataaaatgaggtacaggcagtgggtaaatgctcccattccaaatgggagaaattgaccaaaacaaaggggytacatgccccatgcaaatctgaaatacagcatgaagtcattaaatcctaaagcccaaaataatctcctttgactccatgtctcacatccaggatgtgctgatgcatgaggtgggctaccaaggccttgggcagctctgccctcatcactctgcagggtaaagcctctatggctgctttcacagtctgatgttgagtgcctgcatcttttcaagttgcacagtgaaagctgttggtgaatctaccattctgggggctggagaacagtggcccttttctcccagctccactaggcagtgccccagtggagactctgtatgggagctccaaccccactttttccctctgcattgccctattagaagttctccatgagggctctgccccttcagctgacttctgcctggacatctaggcatttccattaatcttctgaaatctgggcagaggttcccaaacctcaactcttgccttctgggcatgcgtaggcccaacaccacatggaagctgccaaggcgt

SEQ ID NO: 429498 - DNA, 536 bp, Homo sapiens
ctaatatattcttatatcagacaaatcagactataaaccaaaaacaaacaaaaaggacaaagaaggacattaaataattataaagacttcaatctaacaagatgtacatgtcttaaatataaatacacccaccactggagcacccagatttgtaaaacaagttcttaaagatctatgaagagatgtagacaagcacacaataatagtgggaagcatcaacactccactgatggtgttagataagatcattaaggcagaaaactaacaaagatatcctgtacttaaattcgacccttgaccaattggacctaacagacgtctacagaacactctactcaacaacaacagaatatatatttttcttctctgcacrtggcacatgctctaaaaatgaccacatacttgatcctaaggcatatttaaacaaattcaagaaaatcaaaatcatactaactatattattggaccacagtgcaataaaattagaaataaatacaaagaagatctaccaaaacaatacaagtacatggaagtta

SEQ ID NO: 429499 - DNA, 558 bp, Homo sapiens
atctgcccaccttggcctcccaaaatggttggattgcaggagtgagccaccacacccagcctaaatttcttcttgattaacatttccatgattatctgaagtcagtaacattggattatctggaaaggggtgccactggtgaaattcaggtgtttcaaacacatttacctggattcagtcatccctgtactttttcttyttcttctttttttttttttttaagagagagggacttcctgacattaaaaaatggtaagagaaaaaagcacctgatttcttattactggtcctatttaaaacttgacttagctttattttcactttcaatattgcttataggaaataaatgttaagttttgaatcaaaatcggcaccagtaattttacctgattaagtgcctaaaattttgtacttattaatttgcaaatgtttaatcagacattactaaacaaataggaagatctaagggataggcacaaatggggaatcattacccatttatttcagatagatttcccaaactctgttaacaaactggctagtcattttaggaactga

SEQ ID NO: 429500 - DNA, 678 bp, Homo sapiens
tctgttaggtgcttctgtttttaaagaaagaccatgcagccatttcttccccctaatgtcctacttcctctctggctcagcagctcggcaccattagggactgaaccgctgtctactaaacaagtttaagaaagaaaacaagtttgagaaaattcttaatacatataaaggtcagattagttgtcctgcctgagatggaaacaacccttttcccctgtcagccacttaaacattcctacaagtttaaccggtgtaatccygggacatcctggtctatccactgttactgtttgttatttttcctcttccctgcaggcttccctctgggctccacggtgcagtctgaaactaagggcatctggatgtggtgtgtgccccacctctctaagccaaaccacaccctggtccttctggacaccgagggcctgggcgatgtagaaaaggtaaggcagagaaacttcaccgctcatggttgacctctcatcttttaattttttcagctcccttcaacttctgtacatatctctgtaaactcaaatctaattatgaataatgaggctaaattctgtttcctcagacttccttattaatttcaagtattgaggcatatttaagagtagatcttcttatttttaacactggagtgaatgatataatttaataaatatgtattgaaga

SEQ ID NO: 429501 - DNA, 678 bp, Homo sapiens
tctgttaggtgcttctgtttttaaagaaagaccatgcagccatttcttccccctaatgtcctacttcctctctggctcagcagctcggcaccattagggactgaaccgctgtctactaaacaagtttaagaaagaaaacaagtttgagaaaattcttaatacatataaaggtcagattagttgtcctgcctgagatggaaacaacccttttcccctgtcagccacttaaacattcctacaagtttaaccggtgtaatcctgggacatcctggtctatccactgttactgtttgttatttttcctcttccctgcaggcttccctctgggctccacggtgcagtctgaaactaagggcatctggatgtggtgtgtgccccacctctctaagccaaaccacaccctggtccttctggacaccgagggcctgggcgatgtagaaaaggtaaggcagagaaacttcaccgctcatggttgacctctcatcttttaattttttcagctcccttcaacttctgtacatatctctgtaaactcaaatctaattatgaataatgaggctaaattctgtttcctcagacttccttattawtttcaagtattgaggcatatttaagagtagatcttcttatttttaacactggagtgaatgatataatttaataaatatgtattgaaga

SEQ ID NO: 429502 - DNA, 641 bp, Homo sapiens
aaatcaacatcaggccatgagttccatgcaagctcattgagagtttgagaaacaaatttaaatgtcatattaagtacrgggctagcttcatggcatgcaacctgtgtagtcgtccactccctatggtgagatgggcctgtgcttggttcaatggtttatgttactgtcttcaaataaaaatttcttgtctccaaataaaaatgcaagttcccttgtaaagaataagaaatgaggggacttgcatttttatttggaagtaggactcacaaattatataacttactttccctgctaacaaactcatttatatggtatttaaatggaaatgtatttttccataaaacacaaaaacatattggttgcaatgggtaatttaattttgtaatgtgaatccaagagccataaaaaagagtgaataggaaaaatagggatgttattataaagagttgaattcatagaggaagatgaaaaaggaggaggaagagaataaaggagtgataagaaacttcaagataattagaatttttgtaatttttagaatgctgactcttaaaacttgtataaataatgagtaagaactgtaaattttccctaaatatatgtgattcagggctggggactctggtggtgacttatgtaga

SEQ ID NO: 429503 - DNA, 641 bp, Homo sapiens
aaatcaacatcaggccatgagttccatgcaagctcattgagagtttgagaaacaaatttaaatgtcatattaagtacggggctagcttcatggcatgcaacctgtgtagtcgtccactccctatggtgagatgggcctgtgcttggttcaatggtttatgttactgtcttcaaataaaaatttcttgtctccaaataaaaatgcaagttcccttgtaaagaataagaaatgaggggacttgcatttttatttggaagtaggactcacaaattatataacttactttccctgctaacaaactcatttatatggtatttaaatggaaatgtatttttccataaaacacaaaaacatattggttgcaatgrgtaatttaattttgtaatgtgaatccaagagccataaaaaagagtgaataggaaaaatagggatgttattataaagagttgaattcatagaggaagatgaaaaaggaggaggaagagaataaaggagtgataagaaacttcaagataattagaatttttgtaatttttagaatgctgactcttaaaacttgtataaataatgagtaagaactgtaaattttccctaaatatatgtgattcagggctggggactctggtggtgacttatgtaga

SEQ ID NO: 429504 - DNA, 637 bp, Homo sapiens
tgctgcaatggacatacacgtgcatgtgcctttatggtacaatgatttatatttccttgggatatgcattcctttgggaataatgggattgctgagttgaatggtaattctgagttctttgaggaatcaccaacctgctttccacagtggctaaactaatttacactcccaccaacagtgtatgtgttccattttctccacaaccttgccagcatctgttatttattgactttctagtaacagccattctgactggtgtgagatggtatgcayttctgtagtgattagtgatgatgagtgatttttatatgctttttaaatgcatatatgtcttcttttgaaatgtgttcatgttctttgcccactttctttttaatggggttgcttgtttttcgcttgtaaattttttgaagcttcttatagattctggatattagatctttgttggatgcatagttggcaaatattttctaccattctgtaggttgtctgttactttgttaattgtttcattttgttttgtttttgttttttgaaacagggtctcactttgacacccaggctggagtgcagtagcacaaacatgggtcattgtagcctcaacctcccaggctcaagcagtcctttcacctcaacc

SEQ ID NO: 429505 - DNA, 633 bp, Homo sapiens
gaaaggtaaaatgaatgatttgacaatctaactgaaaagatatgtcattattttttcttgattatttattgtataaatatcctttgtttcaaggatataactaaccaggtactactaaaatatattgtgtaaaatgtgttttaaaaattaggtcattttatttcatatgattctatgtttatacacttcaaatttgctaagatatttttctcaacaaagaacaggagaagcacttaataagsaaaacagtatctgggccttaggaaattatagcatatattataatctggatatatttttcatggtacaaattggtctaagattgttgaatagaacattgagtcttaaacttcctcagtgaatttaaaccccagtcactggagattttcaggtattaacgaccactaaaatcatggccatctgtcaattacaaaccaccactactataagcctcgatccaggctcatacaaacatatatgtcaggtgccgaattgcaggcctttgtttattccacactcctgctaaacttttcaccacccagtccatgctaatatctggaatcagcttcaagacattctccagatactcatcttctgttgtggagtgtcaacctaacttcagctccagcatga

SEQ ID NO: 429506 - DNA, 633 bp, Homo sapiens
gaaaggtaaaatgaatgatttgacaatctaactgaaaagatatgtcattattttttcttgattatttattgtataaatatcctttgtttcaaggatataactaaccaggtactactaaaatatattgtgtaaaatgtgttttaaaaattaggtcattttatttcatatgattctatgtttatacacttcaaatttgctaagatatttttctcaacaaagaacaggagaagcacttaataagcaaaacagtatctgggccttaggaaattatagcatatattataatctggatatatttttcatggtacaaattggtctaagattgttgaatagaacattgagtcttaaacttcctcagtgaatttaaaccccagtcactggagattttcargtattaacgaccactaaaatcatggccatctgtcaattacaaaccaccactactataagcctcgatccaggctcatacaaacatatatgtcaggtgccgaattgcaggcctttgtttattccacactcctgctaaacttttcaccacccagtccatgctaatatctggaatcagcttcaagacattctccagatactcatcttctgttgtggagtgtcaacctaacttcagctccagcatga

SEQ ID NO: 429507 - DNA, 576 bp, Homo sapiens
gagttttcagttctctgagatcaattttgttctctttgaaaacggctattttatctttcaactcttgaatagtttactgaatcctgccaggacttccctgcattttagtgctgaactggacccagagccagtagrcttgtggggcatgtgacctactgagataccagctaaggtggctaaaggagttctggcatcaccccttccctaaccctagtctgcacacagctcatggcaacaaaagggaccccttccttccagttaaaaagaggagaggaaaaaatagggaggactttgtcttgcatcccagataccaactcagccatagcagaataggacattgagtagagttgtgaggacccttttccaggccctaactcccagatagcatttctagacacaccatgggccagaaggaaaaccacttctgtgaagggaagtccttgcaggattcatcacctgctaatttaagagcctttggaccctgaataactagtagctatgcccaggtactacgtcaagggcctcagaagactgagacttgctggcttcatgtgagactcagcacattcacagctt

SEQ ID NO: 429508 - DNA, 580 bp, Homo sapiens
tatcggctcttgcagccaagccctctgcaccgccacacgtgctgtctgtcttctgcccgctagtgtgaacaccgtgaaggcaggaactctggtttgttcatcctcagcgtttagaacagcttggcacgtacaggcttgctaagtaaatatcccttcctctaagtcaggacaatagataatgtttgttctgccacaaaagctaccagttttgtcatttccaattcatttcccataaagcaactagagttttttattttttatttttaaaataactcttgtgcttcctatttattttaaaaataactcctggcttcccatatttagaataaaatccaattccgtgcatacgaagccctacagtgcatttatctggctatcacgtacctgacctcatcttgtaccacttgcccttagttactgtgctctgacctgtctgttcctccaggtcactgagatccctcctctctttagggctttgtaatagctgttacttctgtctgaaatattccttccwgaacttaatgtgggttggcgggggattgtgggggttggttggggtatgcgtgtgggaagtaatgct

SEQ ID NO: 429509 - DNA, 506 bp, Homo sapiens
gtaattaattattgattcaatttctttaacagatataggccaacttagattatctatttctccttgtgtgagctttcgtagtttgtgtctttcaaagaatcagtccatataatgtaagttatcatatttgtaggcagaattgttcataatactcctttattatccttttaatgtccatggagttagtagtggkggcccttctttcattttgatatttaaaaataaatgttttatttgtcaaatagagatgaggctttgctgtgttgcccaggctggtctcaagttcctgcattcaagtgatactcctgcctcagcctcccaaagtgctgggattatagatgtgagccattgtgcctggccacattttttatattattaatatttgtcttctctatttattagttagcctggctagaggtttatctattttattcatcttttcaaagaatgaacttttgatttcattgatttttctctattgttttcttgttttcaatcccattgat

SEQ ID NO: 429510 - DNA, 580 bp, Homo sapiens
aggttagggacagtggtgagaaaatgagataaggaggtgacgtaggcctagctcatgcagaaccttagattttgtttgtttgtttgttcgtttgtttagagtcagggatcttgctctgttgcccaggctggaatacagtggcacaatcatgactcactgcagccctgaactcctgggctcagatgatcctcctgcctccacctactgagtagctaggactataggcatacccaacatgcccagctaattaaaaaaaaaatttagagacaggatctccctatgttgctcargttgttttagaactcctggcctcaggtgatcctccagcctcagactcccaaagtgttaggagatgtgagccatagtgccacagatcctcatgagccacggtgcccagctcttgtgagccacagtgcccatttctcatgcagaatatatcaagccatggtgaacagtttggactttaccttaagagtatggggttcctgaatcaaggaacagaaaaaatatatatataagaaagagtaatggggagccactataggattttaagcagaggaagttatatgattagtttgca

SEQ ID NO: 429511 - DNA, 580 bp, Homo sapiens
aggttagggacagtggtgagaaaatgagataaggaggtgacgtaggcctagctcatgcagaaccttagattttgtttgtttgtttgttcgtttgtttagagtcagggatcttgctctgttgcccaggctggaatacagtggcacaatcatgactcactgcagccctgaactcctgggctcagatgatcctcctgcctccacctactgagtagctaggactataggcatacccaacatgcccagctaattaaaaaaaaaatttagagacaggatctccctatgttgctcaagttgttttagaactcctggcctcaggtgatcctccagcctcagactcccaaagtgttaggagrtgtgagccatagtgccacagatcctcatgagccacggtgcccagctcttgtgagccacagtgcccatttctcatgcagaatatatcaagccatggtgaacagtttggactttaccttaagagtatggggttcctgaatcaaggaacagaaaaaatatatatataagaaagagtaatggggagccactataggattttaagcagaggaagttatatgattagtttgca

SEQ ID NO: 429512 - DNA, 580 bp, Homo sapiens
aggttagggacagtggtgagaaaatgagataaggaggtgacgtaggcctagctcatgcagaaccttagattttgtttgtttgtttgttcgtttgtttagagtcagggatcttgctctgttgcccaggctggaatacagtggcacaatcatgactcactgcagccctgaactcctgggctcagatgatcctcctgcctccacctactgagtagctaggactataggcatacccaacatgcccagctaattaaaaaaaaaatttagagacaggatctccctatgttgctcaagttgttttagaactcctggcctcaggtgatcctccagcctcagactcccaaagtgttaggagatgtgagccatagtgccacagatcctcatgagccayggtgcccagctcttgtgagccacagtgcccatttctcatgcagaatatatcaagccatggtgaacagtttggactttaccttaagagtatggggttcctgaatcaaggaacagaaaaaatatatatataagaaagagtaatggggagccactataggattttaagcagaggaagttatatgattagtttgca

SEQ ID NO: 429513 - DNA, 656 bp, Homo sapiens
atctcttagtctggaaattgagagtggaaccaaaaagaagtaggccataatagcaggtatacagtgaattagatgaaggagagatgaaagagaggatattgctgtagaagtggatgtgaatggtagaaaattagctatagcagtccttggagagtctgcacttacatccaagaaacataaggagaagaacragaggtggagggatgtgagcccatgtctcaaatataattgtcccccaataacctgttgatttctcagaatactgaagttagagaaaacaaacttaattgtctaatgtcaggattttactgccctagcatgcaggtgagacttttgcccaccagtactatttcattatcatcatcacagtcttcaagatgaatctcctaagtccagagaaccttggtctgaaatcctcagaaaactcttttcacaaactttattctattactgaaataccaggggtttggtctaggtcccattgcttagtgcacagaaagccaattactgagacaatgagtattgccagggaaaaaggctttattagggtgccgcagttgaggagaatgggagatcagtctcaaatctatctccctgaccaactaaaatttggggggttatagcagggaaggaatgtaaaacaggaattagtgagg

SEQ ID NO: 429514 - DNA, 618 bp, Homo sapiens
aactatatctattaaagaaattgaatccacatactaaccttctaaaacagaaagcaccaggcccagatggtttcactggtgatttctaccaaacatttaagaatagattatatcaattctctgtagtctctttaggagatggaagcagagggaatactccctaattaattctatgaggctggaattcccttcataccaaaaccaaagacattataagaaaagtacagaccagtatctctcacgtagatataaaaatcctcagcaaaatattagcaaaccatatccaacaatgtatacaaagaattatgcaccatgatcaagtgatttatctcaggtatgcaaaactggttcaacatttgaaaataaattatgtaactcatcgcatcaacaagctaaaaaggaaaatcacatgattctatctattgatgctatcttagtctgtttatgctgctataacaaaataccttaggctgggtaatttataaacaacagaaatttatttcttccagtcctagaggttgggaagtcyaagatcaggatgccagcagtattggtgtctgatgatgtctgctgtctgcttccaatggcactttgttgctgcaccctctggaggggagg

SEQ ID NO: 429515 - DNA, 566 bp, Homo sapiens
gttatgtttcaataggaattttggagggaacaccatcattcaaaccatggcaaatgcgtaaaaaggatttgacaaaatccaacatccattcactataaatgctgtcagtaaactggaaatatgggaaacttccacatcatgtgtcatcagggaaatacaaattaaaacaacaatgagatactactacatacctattagaatgaaccaaaatccagagcactgacaacaccaaatgctggcaagcatatgaagcaatatctttgcattcatttattgctggtgggaatgcagaatggcgctgtcactttggaagacagtttgctggttttcacaaaactaaatgtactcttaccatatgatccagaaacsatgctccttggtatttacccaaaggagttgaaaaagttatgcctacccaaaaccctgcatacagatgtttatagcatctttattcataactgccaaaacttggaagcaagaaaaatgtctttctttggacaccactaaaaacttgtagccctcacttaataagtggtttgaagggacacgcatagtggctcacacct

SEQ ID NO: 429516 - DNA, 622 bp, Homo sapiens
gatcatatccttccttaaatttttcaagggctagaattaatactcttgtacatgtatttaataaccatgtacagcccagaagtttattaacttttacttggtgtattagggttctcttagaggaaaagaacagaataggagacataaatatgtatatgtaaaggagagtatatacatatatataaagaggagtttattaagtattaacttacacaatcacaaagtccacaataggctgtccacaagctgaggagcaaggagagccagtccgagtcccaaaactgaagaactcagaatcctgtgtttgagggcaggaagsatccagcatgggagaaagatgtaaactgggaggagaggcctgtctctctttttcacgtttttctgcctgctttatattcactggaagctgattagattgtgcccaccagattaagaggggatctgccttccccagcccacgactcaaatgttaatctcctttggcaacaccctcacggacacacccaggataatactttgtatccctccatgcaatcaagttgacactcagtattaaacaacacacttgttcttggaatatggtgggaattattctgtcaaacttgcttctaaaatctggaca

SEQ ID NO: 429517 - DNA, 598 bp, Homo sapiens
atgcattgtgagaatgggaaagtggtacctaacagtaggttaaaaagcaggacatgaaattaaatgtttttacccacaaatacataaaaaatatacattaaaataatggaagaaatatatcaaaatgctaataattgttatattaattcccaaratctaattcctcaaaccagctttcaaaatcattaaaatacatacacaccccttatacacaagtcaaagactatctactttaccactaatggaagcataaggtttaaattaacatagtaaatgagacagaggaggccagcaatgcaatgaaaaaaactcactacaaaaacctggcaccttaggacacttgggctaatagactcaataccaggattcaaaactatacaactgaatcatatgcataggtcatttactaattctaattatctgctttactatcttctccattagcaaatgtgctaatctttaggcaattggttgttcattactgatatcaaatattaaatgtaatagagccttgtttgggagtaattccttgaaatattaagtagaaagataaataggttaaaataataaaacaaaggaagttccatacacagtagca

SEQ ID NO: 429518 - DNA, 604 bp, Homo sapiens
attatcattagtactccctacaaccttatacagagggttactgtaaccctcattctataaataagcaaatcaaagcagaggggtttcatatcttgctcggtgtcacacaggtgctaaatggagggtttgggatttgaacctaagcactcaaactgtggagttttggagtttgaggtgctatcttcatatgtatcttcagtactgtttgtgtgcatgtatgtccttccttgtttcagtgccatagattatattctaatgaatttttttggtatcacattttacagtgacatttgaattttctttcaagtctcatattcatcagaacaatcagaagtggaaatagctgtggtttgaatactttgatcttgtctacctaaataacaggctttctaaaagaaaataatgtttatttgggaatagggctttgcagtgggaattctgttgttacagtaaaccatgtgcatatacagrgaggtaaaagaagaccaaagtttttaaaggaaaaatgaggaggatttcataattattttgagataattattcttggctacaagggtcaataaagtgcctccattctgaggttggaccggcagttgctggcaga

SEQ ID NO: 429519 - DNA, 576 bp, Homo sapiens
tgtaaaaacattaaatcaaactctactgagttagaatctgcaataatttgagtgctgtatgcgtggttctttttaagaaaaccaatgcttgtgaaacatatgtaatggaaagtctattgtgagtagtaattattttattgatgtgcatatttatgctaccgggaatttttgttgagctgtttgtacttaagagtgaaaaattactcttagcgagaaacaataaagtatttgattggcttcagggaagggaaatacgggcaactttgggagaagagaactggagagtgggtgctatctttctctttccaagtggcaagtcttctcctaggtagctgattgaggagactaaaatagatataatccttacttgtaaatggaagctataaggattttaaattataagaggagttgtcaaagctagagagttatgttaaaaacctaagagtatcaacctcaaagcaagtaaataaaaaagaaggagtttctstcttttaagctgttcagagaattgagaaataatcttaagaatcatcctggccatggattaataaaataatattaattcatacataaaaa

SEQ ID NO: 429520 - DNA, 629 bp, Homo sapiens
gtgctgtccaacgtaaatataagccatacatgtaatttaaatttttctsatggccacattaaaaaaagtaaaaagaaatatgtgaaattaatgttaataatacatttaaaacattatcatttcaacatgaaatcaacattttaaaattattaatgagatgtcacattcttttgttgtagttagtctttgaactcctgtgcgtgctaagtctgaaatccttacagcacatttcgatttggactagtcacatctcaagggttcagtagccacatgtggctcatgcctgccatcctggatggtacatctgtagagtctacagggtaagtgctgtctctagtggaagcagagcttcagaagagttgcctgatcataggacctggcttcaggacacagccaggcttccagggaaggagtgactgctagatattagaacttagtttctaatatcttgtctgtttattgtgtgagattctgtgtaggaaaaatggtcccagactttgcaaaacaccagtgactggctttgtcctttttagagaacagatcaaagtatgtttcaatccagaattgaaagctgaatttggggataaatgtcagattatgttagatgttacagataatttaaaaatatt

SEQ ID NO: 429521 - DNA, 512 bp, Homo sapiens
tcaacatgaaatcaacattttaaaattattaatgagatgtcacattcttttgttgtagttagtctttgaactcctgtgcgtgctaagtctgaaatccttacagcacatttcgatttggactagtcacatctcaagggttcagtagccacatgtggctcatgcctgccatcctggatggtacatctgtagagtctacagggtaagtgctgtctctagtggaagcagagcttcagaagagttgcctgatcataggacctggcttcaggacacagccaggcttccagggaaggagtgactgctagatattagaacttagtttctaatatcttgtctgtttattgtgtgagattctgtgtaggaaaaatggtcccagactttgcaaaacaccagtgactggctttgtcctttttagagaacagatcaaagtatgtttcaatccagaattgaaagctgaatttggggataaatgtcagattatgttagrtgttacagataatttaaaaatatttagc

SEQ ID NO: 429522 - DNA, 609 bp, Homo sapiens
gtatgctggtatgctgtcaagattttttaaaaactatttattttttttttgggttttatttatttatttatttwtttgagatggaatctcactcttgcccaggctggagtgcagtggcgcaatcttcgctcaccgaaacctccgcttctgggtcaagcaattctctgcctcagctcctgagtagctgaatagctgagtagctgaggagccctgagtagctgggcttccaccaccacgcccggctaatttatgtatttttagtagagatgaggtttcatcatgttggccaggctggtctcgaactcctgacctcaagtgatccaccagcctcagcttcccaaagcgctgggattacaggcgtgagccactgcgcctggcctattattattttttgagtggctgctcttagcccagcagcaaactttgagggatataagcttgcagatgagttgaaatgcatacacatgaatgcacaaatgtgaagttaaatgccaaaacaaaaatgtaagccatcaattcaaaagtgataacaaagtgtttatttcagaaacttatactaagagttactgtgagccaagaacttttataaaacctagaaggggaggcaga

SEQ ID NO: 429523 - DNA, 547 bp, Homo sapiens
atttagtgttcataaaataataactttaaagtatatcctgaaaagacagggctatcattccttcttttgaagaaattaggatattttcatctcactggatctgaatctatgttctaaccttggtcaaaaggtacctacttatgaggggaacaaacattcttctcagtatgtcactaaaaacatactagtaatatgatctaaaatgccttgagtccaactgccttccagctctaaaattctttaattctaagtaactctcaaatatctaaactaggtttctacttttcccaattagtatttgtgtttcgaccaccctgcatggaaacatgggttatgaaatgccttcacaagtatggtagaaaatatgctgctattgtatgttgccttggacttctagaagtctaggtgttggtggttattatatggygatagtaaagtaaaatcctccctactgttctagtacccacaatactacttttcatactttagctactttaccttcagtctctctgtcaacctctgatctaaagacttctttactaaataa

SEQ ID NO: 429524 - DNA, 551 bp, Homo sapiens
tcagatgaatgggaccttaggcactcactcacaggagaccgggaatatttttccttctaccagagaaaaataaaattgttttcatcaatactgtttttaagttaattttttaattgacaaatagtaattgcatatatttatggggtacaatgttttgatatatgygtatactgtggaatgatgaaaacaagctaataatattttttaattttaaataaaagcactgtattttgcaatcccaatgtatgataaaattttatattgctagcatacttcagtactctactcagatgctaccttctttagaaaaacttttctggtggaattaattaatcactcccttcttcatgtctgcttggtgtagcactttacccgatctggtttgtattatggtttgatgaatgctgcctgctttccacactagattttacactggatttctacactagattttagcatgcctagcacatgctctgtgtttgtttaattaaatgaatgaaggtaccacactgtccttgagtttacccaactgtggaaataaaattaagtcc

SEQ ID NO: 429525 - DNA, 564 bp, Homo sapiens
atgatctcggctaactgcaacctctgcctcagcctcccgagtagctgggattacaggtgcatgccaccacacccagcaatatttgtatttttagtagagatggggtttcaccatgttggccaggctggtctcgaactcctgacctcaggtgatctgcccgccttggcctcccaaagtgctgggattacaggcgtgagccaccacacctggccataatgtagttttaatattgaaaagagaactcactgtggtaaaaaataattgcattgattttctgggaagttacctcgaagggaactcctctccttcattcaacttttaatttactaaaaagatattttctaaaagaactttagaatatacctgcacccaaacaacaaaagcaattacctggtatccttacattcttgcactggtcttagactactgataagacaaaatgtgggtggtttactttactggttcacatatggaaaggttggggtcaagataaaagagcaatgataagaattagtttaaaccaytgcttcccaacctttccatttcatggcaaatgataatatt

SEQ ID NO: 429526 - DNA, 508 bp, Homo sapiens
tttagtgtaaattaacatcatgctcctatatwaagttctaggttcagatgattgtaaacagttttatcatcacccaatggaacattcaaattccaaaagtcatttggaatttggtacaatactttgtcctgtaacatcccttgcctcacttatcatcgtgacaacatcaaaaacaagaaacacccccacaaaatttcaaaatgctctctaggagatgagacagttgctcagtgagtaccactagtatagggagtcctagccttccaaaggtttatagtccagtgaaagactggtatgtaaacaaagaactaaaatacagtgtgataaatgaggagacagaaatacacgcatggtgctaaaggaacccacagctgaaaggaattaactccaaggaggaactcacctggaggtcacccttctgttgggccttaaagactggatacaccaggcagaaaataggaaacggagcaatatatacagtgatgtggaacacagctaaggaattggg

SEQ ID NO: 429527 - DNA, 527 bp, Homo sapiens
gggtgactttctaccaaagaaatccctcaaattaaaattttgagggaaacacatagttttatttactccttttaatctttttaattgaaatatactamtatgtatacaatctacagatctaagtgcccagttcaatgagctttaacaattctatacacctatgttatcttcatccaaaacaagatacagaacagcttcatcacctcagaaaatttctttgtgcccctttgcaatcacttctcaccctgtctctcaccgttcaaccacttcctgacttatatcacaatagatctgtttttcctatagtctgttattagacttcagacaatatcaggtgcattcagggtagtacggctgtagacctgttgtcagacttcaaataaatggaatcacacaggatgtactcatttgcatatggcttgtttcacttaaaatgttttcaagatgtatccacgttgcatgtatctgagttcattctttttgatcgctggctagtactgtattgtattgtatgaatacaccaaaat

SEQ ID NO: 429528 - DNA, 527 bp, Homo sapiens
gggtgactttctaccaaagaaatccctcaaattaaaattttgagggaaacacatagttttatttactccttttaatctttttaattgaaatatactactatgtatacaatctacagatctaagtgcccagttcaatgagctttaacaattctatacacctatgttatcttcatccaaaacaagatacagaacagcttcatcacctcagaaaatttctttgtgcccctttgcaatcacttctcaccctgtctctcaccgttcaaccacttcctgacttatatcacaatagatctgtttttcctatagtctgttattagacttcagacaakatcaggtgcattcagggtagtacggctgtagacctgttgtcagacttcaaataaatggaatcacacaggatgtactcatttgcatatggcttgtttcacttaaaatgttttcaagatgtatccacgttgcatgtatctgagttcattctttttgatcgctggctagtactgtattgtattgtatgaatacaccaaaat

SEQ ID NO: 429529 - DNA, 527 bp, Homo sapiens
gggtgactttctaccaaagaaatccctcaaattaaaattttgagggaaacacatagttttatttactccttttaatctttttaattgaaatatactactatgtatacaatctacagatctaagtgcccagttcaatgagctttaacaattctatacacctatgttatcttcatccaaaacaagatacagaacagcttcatcacctcagaaaatttctttgtgcccctttgcaatcacttctcaccctgtctctcaccgttcaaccacttcctgacttatatcacaatagatctgtttttcctatagtctgttattagacttcagacaatatcaggtgcattcagggtagtacggctgtagacctgttgtcagacttcaaataaatggaatcacacaggatgtactcatttgcatatggcttgtttcacttaaaatgttttcaagatgtatccaygttgcatgtatctgagttcattctttttgatcgctggctagtactgtattgtattgtatgaatacaccaaaat

SEQ ID NO: 429530 - DNA, 547 bp, Homo sapiens
cccgcgccagtagtgctttctgctccgcactcgccgtgagccaggtgtgcaaccggatttggggcgagggtcgcgctggatacctcgcatgtagcccgctgaccggactacagctcccagaagagccttgtggaggcmgcagacgcgaagccgctggcgccatcttgaaatctgatcctccatccccgaggctttgcgtctgcgcggccggccgctgctgctccgggagcccagtctgctaaaaggggaggacgttgaggacgcggcggctggcgggagagacagctggggagagacatggcagggtcggagcgcggcctgcgcctctgtcactcagcatcctcttaggcgtttccacgcccgccccctgcccgaggggcggggctgacggctctggtacccggagtcggcgcgccgggcaggggcgcgcccctgcagagtggggaccccactgggctgtgccatgctgaccggagaccaccgaggcgggagacagagcgcggcgaagagccattgagtggtcacccagtagccgccgccgccgccg

SEQ ID NO: 429531 - DNA, 547 bp, Homo sapiens
cccgcgccagtagtgctttctgctccgcactcgccgtgagccaggtgtgcaaccggatttggggcgagggtcgcgctggatacctcgcatgtagcccgctgaccggactacagctcccagaagagccttgtggaggccgcagacgcgaagccgctggcgccatcttgaaatctgatcctccatccccgaggctttgcgtctgsgcggccggccgctgctgctccgggagcccagtctgctaaaaggggaggacgttgaggacgcggcggctggcgggagagacagctggggagagacatggcagggtcggagcgcggcctgcgcctctgtcactcagcatcctcttaggcgtttccacgcccgccccctgcccgaggggcggggctgacggctctggtacccggagtcggcgcgccgggcaggggcgcgcccctgcagagtggggaccccactgggctgtgccatgctgaccggagaccaccgaggcgggagacagagcgcggcgaagagccattgagtggtcacccagtagccgccgccgccgccg

SEQ ID NO: 429532 - DNA, 518 bp, Homo sapiens
gagggtcgcgctggatacctcgcatgtagcccgctgaccggactacagctcccagaagagccttgtggaggccgcagacgcgaagccgctggcgccatcttgaaatctgatcctccatccccgaggctttgcgtctgcgcggccggccgctgctgctccgggagcccagtctgctaaaaggggaggacgttgaggacgcggcggctggcgggagagacagctggggagagacatggcagggtcggagcgcggcctgcgcctctgtcactcagcatcctcttaggcgtttccacgcccgccccctgcccgaggggcggggctgacggctctggtacccggagtcggcgcgcsgggcaggggcgcgcccctgcagagtggggaccccactgggctgtgccatgctgaccggagaccaccgaggcgggagacagagcgcggcgaagagccattgagtggtcacccagtagccgccgccgccgccgcctcgggaagcttgccacccgctaggagggaagatg

SEQ ID NO: 429533 - DNA, 563 bp, Homo sapiens
tgctttctaatttatatggcacaccacctgaaggccagcacagagaaatatatgacctgtttaaaacgaaaggaagtgtacctgggcacgaccaagaatctatcaaaaaagcatcagaaagctccatattaaggttaataaaaataggtgaaccgcacatttcaaaggagartctgggacactattcaaataacaaagacttaaagcaggctgggttcactgcccagaataataggcacacgcatttacagaatggggggattttgtccactgtacgcatgctcattcacactcacatctaaccctacaacaccagctccgagaaagtggatgcaatgaaggaaatgttaacatgagcagtgaccctagtgtacgaacaatatcaaattttagattctttttgtttccatgatagtctaatctgtattatcttttggctatatcaaccttgactttgaaatctccaaataaacatttcaaccaaaatgtacggctatattgtaatttcagcaagaagggttttcattgtttgcacatatcttcaaaaagaaaaaaaagtgtgc

SEQ ID NO: 429534 - DNA, 486 bp, Homo sapiens
tgtattctatgttcaggatagctatatttgtgaactatgaaatttagcctattcactgacaattttattttttcataacactatccactgtttatgtcagaaaacagactcacattcagttaatagagcttaaataaatcacatgtcttctaaggaacccataataaattactgctcctaagaaagaattaagcaaaaagtattcattgtttgatttttttataaagtaaaatttttattgccttatacaaattacttttatagacmtaattacttttttaaaaaagcatatctatgggatgttaattattttataaaatactttgaaattttatttaaagcttagaacaaaaaaattaatctgaatgtgtatttataattccaaggctccttaatcaccttacgcacacggggtgaattcttcttatctggaaagcagcattaatcctgcagaatttaaaatgaattatgactccttatcacaag

SEQ ID NO: 429535 - DNA, 486 bp, Homo sapiens
tgtattctatgttcaggatagctatatttgtgaactatgaaatttagcctattcactgacaattttattttttcataacactatccactgtttatgtcagaaaacagactcacattcagttaatagagcttaaataaatcacatgtcttctaaggaacccataataaattactgctcctaagaaagaattaagcaaaaagtattcattgtttgatttttttataaagtaaaatttttattgccttatacaaattacttttatagacctaattacttttttaaaaaagcatatctatgggatgttaattattttataaaatactttgaaattttatttaaagcttagaacaaaaaaattaatctgaatgtgtatttataattccaaggctccttaatcacyttacgcacacggggtgaattcttcttatctggaaagcagcattaatcctgcagaatttaaaatgaattatgactccttatcacaag

SEQ ID NO: 429536 - DNA, 603 bp, Homo sapiens
gatcctcttgccttggcctcccaagtagctgagatcacagttgtgtaccaccatttccggctacttttaaaaaattattttgtgtagagatggagtcttgctatgttgcctaggctggtctcaaactcctggcttcaagcaatcctaccaccccaccctcccaaagtgctgagactataggcatgagccactgcacccagccaagtctgtttcttaaactgataaatcacaggactactatataaacccagaataacaaattactaatttataatgagaattttaacatcttagggaactagactctcttttatgatyccagcaaaatatctcttggtatatgtgccacatttgagagccaaattacagccaaaaggttgtttttgaaacttgaatctagagcaagaggaattaattagtggattctaaatttcaaataatttgatagcttcagagcatcaaggtgtacacataggttcttttttcctggacagtaagtgtccactgatgattgtcctcccttcttaggtacatctctttttctatctctgatatgctaatattttcagtcagattataatctggtttggggatccttgtgac

SEQ ID NO: 429537 - DNA, 550 bp, Homo sapiens
ataatatctttctaagggaacagttaaatcaacttcatttggtcttccatggacatgagtttcaagtggctttctggcctttcttctgttggcctctttgctattatgtgaagacttcatttatactcaatctaattcagctaccatgggccatatcaccagtgcccattgtgttctatgcatcctaatattttcattaatctgaaggggagagggttttaactttgaaggatactcargaggactttcttatgaactcagatggaaagtgtcctgaaatttgtccttttaaaaatatctgtgcatttttttgtgctatgacattcttacatgtatcattctgtgatcaaatctccagcttactataaatgatacctacattctaaagagccaattctagttgtaccagcatggccttagagaaaagtaagggaatacaatttgtatttatcttctatttggtcggagttaagtatttaaaacagtaaggtagatctcagatccaccaccattaaaaataaataaataaataaataaataaataaataaa

SEQ ID NO: 429538 - DNA, 504 bp, Homo sapiens
tatgaaacaataaatgtaatgcaccatattacaaaggacaaaggacaaactccatatgatcatctcaataaatgcagaaaaagcatttgagaaaatctagcatcttatcttgttaaaaaacaatgaacaaactaggaaagaagagaacttcttcaacctgataaagggtatctatgaaaaacccacagctaaccccatacttaaaggggaaagacttgaaaacatttcctgtaagatgaggaataaaacaagtatgtccrctctcaccacttctagtcaacatagtacctgatgttctaatgagggcaattaggcaagaaaaagaaataaaagcaccccagctggaaaggaataagtaacactatttctatttgtagatgactttatcttgtatatagaaaattctaaggaatccacacaaaaatttaagaattaataaatgaattcaccaaattgtagggtacaagatcaatatacaaaaaaatttgcagttctatgcaccag

SEQ ID NO: 429539 - DNA, 504 bp, Homo sapiens
tatgaaacaataaatgtaatgcaccatattacaaaggacaaaggacaaactccatatgatcatctcaataaatgcagaaaaagcatttgagaaaatctagcatcttatcttgttaaaaaacaatgaacaaactaggaaagaagagaacttcttcaacctgataaagggtatctatgaaaaacccacagctaaccccatacttaaaggggaaagacttgaaaacatttcctgtaagatgaggaataaaacaagtatgtccgctctcaccacttctagtcaacatagtacytgatgttctaatgagggcaattaggcaagaaaaagaaataaaagcaccccagctggaaaggaataagtaacactatttctatttgtagatgactttatcttgtatatagaaaattctaaggaatccacacaaaaatttaagaattaataaatgaattcaccaaattgtagggtacaagatcaatatacaaaaaaatttgcagttctatgcaccag

SEQ ID NO: 429540 - DNA, 512 bp, Homo sapiens
ctactaaaataattaacctaaggttatttattcccatatgagtgtctaaactcccaaaggaatggtgattttcaggccctctcttcaggccaatcacargtatttagtttgttctgagaaccacatagtctggccctcctacttcatcactaaccaccacccttgcttaacatttctaagcctgaagaccagggccatctcccagaggcgttttctagctttcaagcttctttatatatatatatatattttattattatgaacaaaaattcagaaggagaaaaaacaatctgctatagcaatacctagagcgaaaacctgggccttcattgctatttttagggtttttataattccattttgtaaacatttattgaaaagttgcttatatgccaggtactggaaatacaaaggtgaaaaagtatatataccctgtggttaaagtactcagaatctattgagggaagcaggcacatgattcagagagataattattagaaaaattagattta

SEQ ID NO: 429541 - DNA, 546 bp, Homo sapiens
aatattcttgcacaacaaactatcattcccaatattaccaaacatctattttcattatattccaaccagcgcttctgaaagctctcacacattagaataacatttgcaagagttttgcatggctgagaaaaactttgcaatatcaagtgttatgggttgaaccatgtcctcccaaatatgtatcttgaagtcctaatttccaggtaccttggaatgtgatcttatttggaaataggtctttacagaggtaatcaagttaaaatgaggtcgtcacggtggatcccaatacagtatgactggtgtccttatgaaaaggggaaattaagggctacacatataggaagactatcatgtgaacaccaaggcagaggttggggagatgcatctataagccaatgaatacggaaaaattctgacacacttctggaaaggagaaatctttcctcatagccataagaaagaaccaaccccatgaamacattgatctcatacttctagcctccagaactatgagatactaaatttctattgtttttgccatgcagt

SEQ ID NO: 429542 - DNA, 554 bp, Homo sapiens
taaaataaaataaaataaaacaaaaagaaaaacaaatttgtctaatttagcgatgttatcaatagaatatacactgtaaaaatcttgcataaaacaacttaggtagtcattttcctgaaaggaaggcaaacaaatttttatggaactaatatataacaatctatgaattatatatgatatctttggcccatgaacaaaacatccagacatgcataacaatgattaaaatagccatttttcatagttcctggctcttaatcatttaaaacacaccacaactttctatgtattttaaaattttaacgttaaaaaggtatatttgacactgtgggaagatagaacatattttattcaacaatgttgctagcttgatttataacttttaaatatttagacatatggtatgtgaacctcygcttgtactcatgccccaggtcctataagtgttaggggtagccaggacccagcaatgacagaagaaatgaagcctaaatctatgaacggaaaccaaacgaaaatatcaagcttgttcctactgtaaactaaaatatcat

SEQ ID NO: 429543 - DNA, 619 bp, Homo sapiens
aactgagacacagagaagttaaggaatttcccaaagtcacacagccagaaagcggcagagccaggacccaaacccacgcctttgaacagcagagaccatattatgttctgatgcaatcagattcccaatcaatccaacctgtagtctttcattgtcctttgcaccactcataacctgaactaaaaaatattcttgcctttttatgagtccatcaagcatgtgacaatacccactggtactgaaaacaactaaatcaccactagttgcttatgacgtaactggaagtcatcattgagaatgagctttttaaatacagtgcaggcatggtctgtactgaggcttaatgaaccagaaaaagcaaactgcaagaaaaaagttaktttatgacctctctgggaattgagactctatttcctcctttttacattttttgtattcccctcagcacttcatgtgttattgtgaacttcataggcatttaataaacgctggttgatgaagtaaatggaaggctcaagtgaattttaggcaaattagctttggagacaccccatttattatttacccacttgacaagatgtcacatccacaaatccacaaatccttcccaacatttatt

SEQ ID NO: 429544 - DNA, 595 bp, Homo sapiens
attcccaatcttgtttctaactttctcagcctcatccatcccaattttaaaatgctaaatttttaaaaactaaacccccatctttagctgaatgctaggatgataagtaaatctatagtcctaacaactctttaggtttagggtacatctacattccaagaagtcacttgaagcttttcccatccctgtaaaaccaaaccaaataataataacaaaaccamcagctattactttgcttcactataacttagtaagggcctaacttaaaaacaacaacaaaaaagcaaagtttctgaccccggggcttaagctttataggtcacattgcagcctaaagactgcattctcctttgtggttgaattataaacctttgaaaaatgctgacagaccttaactatagcaggacaggatgagtgggtccacgtaatgaacttttacatgactggagatagaatctagaaagccaagcctgaaatacatttctggtttgggctttgggccaacacaaacagaacacatcataagtcatctctgtgatttcagtaccatgcacaggagatgcctcagcatcaacacgacacatgatcctcactg

SEQ ID NO: 429545 - DNA, 636 bp, Homo sapiens
attgtacaaccttcaccactataggttctagaacacttatattaccctaagaggaaaccccatatctattaaacaatcactctccactacccctagcctggcccctggtaaccgctaatctgaattctgtctatatggatttatctattctggaaatttcatataaatggatcatacaatggtgtctggcttcttttacttagtataatgttttccaggttcatccaggtttgtagcaygtatctgtatttcattcctttttatggataaataatgtttcactgtctggatataccacaatttgtttaaccgctcctctactgatggcatttgggtcatttccaccttttggctattgtaaatagtgttgttataaacattctcatatgagtttttgtttgaacatctgttttcagttcttttgattacatactcaggagtagaattgctaggtcatatagtaattctatgtttaagttattgagaaaccagctccaatattttaaaattattgtcttcatgaagcttcttgaagataactatgtctaatccaccactgaatgctcaggcacagtactcagcccattggaaaataatttgattaacagtatgaaaatcactatgggtcaaggtcca

SEQ ID NO: 429546 - DNA, 575 bp, Homo sapiens
atgagtttttgtttgaacatctgttttcagttcttttgattacatactcaggagtagaattgctaggtcatatagtaattctatgtttaagttattgagaaaccagctccaatattttaaaattattgtcttcatgaagcttcttgaagataactatgtctaatccaccactgaatgctcaggcacagtactcagcccattggaaaataatttgattaacagtatgaaaatcactatgggtcaaggkccagttttccctgtgccaacaggttgctgacccttagaagagcacagaaggtcaggggctaccacttacttttatttataggatctgccatgggaattccaatccggatacagttcgcagcttctgggctctttggctgggggagatcttacagtttggcagttgcagcctcatcagaatcatgggatttgatcttgcaaaaatgtactctgtttgacacaggacattcttcaggattttacattcatcgcgacacaagttacggggctttgggacggatgaagtttcatcgcagtacgggaaggcatagtggcacagggaaggaatg

SEQ ID NO: 429547 - DNA, 631 bp, Homo sapiens
gataatgtaaaagcttttttaaattgtagagataatatatggctattcttaaagtatttacaatgaccaaagggacatttatttaaaagacagttatttactaagctcccacatcgtaagaggcactgcggttagtgctgtggtgctcacttcccagcttgaaggtctagcgtaggagtctagaaagtcaaagtataggagcaaaccaagtggaaaaatcacctgataggacactaattttctgcttctctctactcccattcattaaaagaatcattttaaagrtgaaagtgggggaagtatcttcagtttagtactgaaaatagtttgtgttgcaaagctcttaaaaacttaacctttaaatacacatacaaatgaatatatcatatacctgacataaagacattgaaattttactgttgcacaatcctgcaagcactccacatgtttactttcataaatcctagagtaatgctgaagcctttttggcttaaattttacttgggttgtaaaattaacccaacttttattgggtaactaataccataaacctatggggagaaagaaggttcttgatgacccacacttggatcttggaaacctaagtacagagaccagaatacacccccat

SEQ ID NO: 429548 - DNA, 581 bp, Homo sapiens
caagtccaacaaggagagtgagaggtgacagagtattatagaggcsttggtgaaaggagtaaaagtttggagtcattgttgagtacgatgatgaggtgctgataacacaaactcttgatttcgaggaaggagtgttcaaaggaggaggaggaaaatgactgctagagagaaaggtgatggatggcatgtgaaaatagttgagtgtgctgagaatcgttgattagagtggcgaaaggtaatgaagggaagacttaataggtgatttcaggttcagacatctgaatgagggcatggacctattccatgcagctcagggagacagaacgaggtccaacaagtggtcattcctaggagacagattctctacccccaaacattaaacattaaaacatgtaagtaagtgtacattaaaaacattaaaatgtgtaagtaagtagcactatccagcaatggaataatctgcctcttgaaggatttcaatcatctgccaaggatgttgtgctgaaaatttggtatgcttaattagatggcttcttctatcttttttaatactaacatatcatagatacttaatatatgga

SEQ ID NO: 429549 - DNA, 581 bp, Homo sapiens
caagtccaacaaggagagtgagaggtgacagagtattatagaggccttggtgaaaggagtraaagtttggagtcattgttgagtacgatgatgaggtgctgataacacaaactcttgatttcgaggaaggagtgttcaaaggaggaggaggaaaatgactgctagagagaaaggtgatggatggcatgtgaaaatagttgagtgtgctgagaatcgttgattagagtggcgaaaggtaatgaagggaagacttaataggtgatttcaggttcagacatctgaatgagggcatggacctattccatgcagctcagggagacagaacgaggtccaacaagtggtcattcctaggagacagattctctacccccaaacattaaacattaaaacatgtaagtaagtgtacattaaaaacattaaaatgtgtaagtaagtagcactatccagcaatggaataatctgcctcttgaaggatttcaatcatctgccaaggatgttgtgctgaaaatttggtatgcttaattagatggcttcttctatcttttttaatactaacatatcatagatacttaatatatgga

SEQ ID NO: 429550 - DNA, 581 bp, Homo sapiens
caagtccaacaaggagagtgagaggtgacagagtattatagaggccttggtgaaaggagtaaaagtttggagtcattgttgagtacgatgatgaggtgctgataacacaaactcttgatttcgaggaaggagtgttcaaaggaggaggaggaaaatgactgctagagagaaaggtgatggatggcatgtgaaaatagttgagtgtgctgagaatcgttgattagagtggcgaaaggtaatgaagggaagacttaataggtgatttcaggttcagacatctgaatgagggcatggacctattccatgcagctcagggagacagaacraggtccaacaagtggtcattcctaggagacagattctctacccccaaacattaaacattaaaacatgtaagtaagtgtacattaaaaacattaaaatgtgtaagtaagtagcactatccagcaatggaataatctgcctcttgaaggatttcaatcatctgccaaggatgttgtgctgaaaatttggtatgcttaattagatggcttcttctatcttttttaatactaacatatcatagatacttaatatatgga

SEQ ID NO: 429551 - DNA, 586 bp, Homo sapiens
gccctctcttcagtctcagctatattctgcaaggtaaggtaactgatctaggatggtaatacctcccattcatgttagccccaggtctcgcacctttccttaatggtttctcctaattctgccaatgcctccctaaataattacattataacatttcccttagtctatcggcttgtgccatgtgtttcctgccagaagcttaaccaaaaaacagtttgttacaaagccagtggcaacaatcattgtggtattatatcagatttctgtcagcaaaggttaagacaccaacaagcacttcttactggcatggtggtgagcccaaaaagttcagaggtttcagaagcttattgctagagcagcttacacactgggtaaatgactcaatatatactaggaacaacaacaaaaaaacctttgagagaaattattttatggttaaaaatgttcatggaacatgacttagctataagttttgggtcactattgttctttactttgttgttgaaaatgtayagagactggaaatgaaagcacatcttgaaaatctctgtagtataaaaataactcttccagaaagcttcaaact

SEQ ID NO: 429552 - DNA, 616 bp, Homo sapiens
aaaaaacataattgtgttcataaatattattaagaaaagcagaggatctcaaaagtcagatttggatgaacattagttgatgcattgaaacatggattakgtcaaatatcccatggattctaagctgccttaattgtaaaaaaactctttgatgctctgcttagtacgtaagcaccttcaattgctgtcaagtgtacatacagcaacaattaaagataaacaaataaacatattgggatatgctgtcatcagagtacagggaaatgacccaaaagctcaatgtttccaagaggaaattagttccgaccccacgtggccattgttacagactagaatctggattttgtttgctcttgattacacagaggaagaaacaaaaaataagttgtcctggtgataagcaaatggctgggatggttttcctcagtgaaaatcaatgtgatgtcttattcccaggcctagagataggtgggagatggggagggaagctatttagtttaccagcattactaaagttgcccttttttccctggtggatttccttttcctgatttcagagcttagagaactcagttctgtctagaggccctaacattccacttcccacactcagcat

SEQ ID NO: 429553 - DNA, 457 bp, Homo sapiens
aacatttggattgagagggtaaaccaatgataccctcagaaatgatggaagaacagtggaaatgccagtccccagaaagctgaagtcaagaggtctgaagagaaagsgccaattagttccttcttccccatcctcacatcacatagttacattttaatgaaagttccacctggttaaattgcattgatgactcctactgtttttaggatacagtgtaaattccttaacctgactcataagctagctcacaaattggatcttgactgtatttccagcctcaacatctcgggttcagacaaaacaaagagaatcagatagaaaattcctgcttggagtcaactaaatgcaggctaagtgaggctaaggggagcagccttcaatgaattttactggttccttcaactagcactaattgagcacctggttggtggccaggttgtggcagctggtgcaggtt

SEQ ID NO: 429554 - DNA, 457 bp, Homo sapiens
aacatttggattgagagggtaaaccaatgataccctcagaaatgatggaagaacagtggaaatgccagtccccagaaagctgaagtcaagaggtctgaagagaaagcgccaattagttccttcttccccatcctcacatcacatagttacattttaatgaaagttccacctggttaaattgcattgatgactcctactgtttttaggatacagtgtaaattccttaacctgactcataagytagctcacaaattggatcttgactgtatttccagcctcaacatctcgggttcagacaaaacaaagagaatcagatagaaaattcctgcttggagtcaactaaatgcaggctaagtgaggctaaggggagcagccttcaatgaattttactggttccttcaactagcactaattgagcacctggttggtggccaggttgtggcagctggtgcaggtt

SEQ ID NO: 429555 - DNA, 531 bp, Homo sapiens
cccaaatgtcaccttatcggagaggcctcctctaatcaacccatgtaaagtagcaacctctaccacatcactctctttcttctcattgtgatgatttctgtctcttcttaagcatccttgggttccccctcaagaatgtaagctccacaagcaatagagcagaatttgtgcctgtttcactgtcatatccttcgttcttagaacaggagctggctcacagtaggtgctcagtaaatatctgtgggctgaaggaaaatctcagggcccttcttcgtcaggagcttgtaccattatgtctctacctcctccccaacccaccacgcatgatgggttatttagtgcattagttaatccctcctctcttaatcaattccacatgtccatatctggttattacttastgtttatcaaaacagcttaactatgggctcccaaagactccttaggaatgagacaggaccatggtgaacagagactcccctgttccctaccccgtggcactattagcctctccacggcctcaggcatgga

SEQ ID NO: 429556 - DNA, 515 bp, Homo sapiens
ctaccccgtggcactattagcctctccacggcctcaggcatggagtcccttgatgtcccagtttaaggtttttactctactgtgggcataaaactcttccctgtktactttctgcacagagcagctcaacggcttttttagaaccattgtagaaggtaaaagtaaaaatttctacccataaaaccatgtaaaataccctcatgatttcatctgtgaccctgaacctttctttttctccaaatcccttttatttttgtaaaagaatgcactacgcgccagcatctggcttgtaaaaataaatacagtgactggctttcccaagtaacttggcctaatcatccagtgctcctgaaaagacccgtctcctgagatgcagcaatcttatgaacgatctattccatggtccaggcacagagggggcacttacatgggttgaattacacaccccagagtatctgcatttagaatgaggactaactcttgactcctatagaattagatgttttcctgtggtg

SEQ ID NO: 429557 - DNA, 515 bp, Homo sapiens
ctaccccgtggcactattagcctctccacggcctcaggcatggagtcccttgatgtcccagtttaaggtttttactctactgtgggcataaaactcttccctgtgtactttctgcacagagcagctcaacggcttttttagaaccattgtagaaggtaaaagtaaaaatttctacccataaaaccatgtaaaataccctcatgatttcatctgtgaccctgaacctttctttttctccaaatcccttttatttttgtaaaagaatgcactacgygccagcatctggcttgtaaaaataaatacagtgactggctttcccaagtaacttggcctaatcatccagtgctcctgaaaagacccgtctcctgagatgcagcaatcttatgaacgatctattccatggtccaggcacagagggggcacttacatgggttgaattacacaccccagagtatctgcatttagaatgaggactaactcttgactcctatagaattagatgttttcctgtggtg

SEQ ID NO: 429558 - DNA, 477 bp, Homo sapiens
ggctgatgaagtcctgaagtctaaaaggatctatttcagttctttatcaatatcacagagctgattctgccccacagtcagctgggatgaaagaagaggcctgtagtaccttggggaacagtaatcccctctggctggactatgcaggactgatcctgaagaatcccaaagccctggaaccactataaacagggaggtgtgactgacaactgtgacaacatgggacaaattacacagactcataccaaagccaggtctgcacctagcaaagtgctttaagttctgggctgcactggagccctagttkgtgcttaagcttagtttgcctgagaattctggcatgtggaggggcagcagaggtgagccagtgagagtcttaagagagaccgcggaacctccaagaccagacctcacactaggggccaagtcagaaacatgcttttctatttgctgcaagcacaaatgaagaccttgtgg

SEQ ID NO: 429559 - DNA, 555 bp, Homo sapiens
acttcctggtctcctctctacaagatgcctcccccctgaactgcttgagtagccgtgttgaaagttatccttgagtttatcttgggttggatattacattatcacttcttgagttgggctagcacccagctacacttcttcactatggctaacacttggaaatggataaaagaggaaaatagttcatcaaaagctggtcactttgttctctgcagaaaggagacttcagccaaaggccaatgagagaaaaggaaataaaggcttcaaggtctctggttggggttcacagctggaaatattatccaacagaagaactctggctggaaagaaggaacagcctctttgctcagatagcattgatgatgatamtgttagtaatattatcaagctcctaatatgcatcaggtacagtgctagctactatatatgcatcatcttattatgtcatttaatcttttcaacaatgctatgagatagatttttttttaccatgccctttttatagactgattctgcaggagaccacagaagataaaagaaaagaaagaaagaaag

SEQ ID NO: 429560 - DNA, 606 bp, Homo sapiens
tataccatgttttctttatccattcatccactgatggacatttgggttgcttctgccttaaacggctatcatgaataatgctgcagtgaacatgggtgtacaaatattttgagaccccgacttcaattcttttggattaaatactcaagaaatgggattgctgcatcagatggtaattctatttttaattttttttaggaacttccattctgttttccatagcagctgcaccattttacattcctatcaacagatcacaatggttccaatttcttcacacttgctatttttttaatagtgcattctaatgggtgtgaaatggtatctcactggrgttttgatttgcatttctctaattattagtgatattgaacatcttttcatatgcttttggccatttgtatatcttctttggaggaatgtctattcaagtcctttgcccactttttaatcgggccaatctttaactgacaaaattctataggttgtataaaattaaatctctttcattttgatgagattattagtgacagactaagcacatttaaactttagcaaaacatttgatcaaatgactcgagtgacttatgacattcttatggacaa

SEQ ID NO: 429561 - DNA, 615 bp, Homo sapiens
tatggtacaagggcagcaagtgttgaactgaaatacttagattatgcaactgactcaagggttcaacacaaactgtcctgctaaaaagttatgatcagggcaaagtcagcatttagggcaataaaatagttaatgatttacctggttatgtttccaagaagcckctttctgctgttcactctcgtgtgctgcagcctctacaaattgcacacattgtttggcatcagccagttggcgctctttctgtcgtaccaccctctggagcttctgtatttcaagttggctgcagaataaagcactctgaagatcaagcagagctacctgttgctgagctggagaagtaccctctgagctctgaaaagagagtagaaatcacaatcacaaggagggcaagcactgagctcccacaaagactaaaaataaaatcaagactgcaaccaaaatggcacatccccaactgaagtctctcctgtcctacgtgaccctcacatacgtgaagttgtccaagctggctttggtgcagcatttctcgaagctttgccattgtgtcattttgaccttcaattacctggtacaactcctcagtctgaaaatgagagagggaatatcaaatat

SEQ ID NO: 429562 - DNA, 556 bp, Homo sapiens
tctaatgatcatcctctaaacattttatcatttattaatcctccctgcctgtgtctattattatattcatatctctacgctgcaaattttgggtctcaatttttactgtgcctttgtttttactagtgtctgctgttgcaaaaagaagaaaacattctctgcctgagttttaatttttgtccaaagttaattttaatctatacaattaaaaccttttgcctatcactctggacttttggattgttttttacattcagtgttataatatttgattatgctgattggttttggtgggtactgatgcgaattaataaaaacatttcatttccatgtttattttctaatctcttccacattgtaggctatgtttaccataygtagcagaatgtatttacatttcttggttctagtcatttgtattcttcgtgagtgtgagtgtgtgtgtgtctgtgtgtgtgtgtctgtgtgtgtgtctgtgtgtgcctttggcatttaggaagggttgtatagctcatgttaaatattgcactaaaaatgtttttgatggttttcctcc

SEQ ID NO: 429563 - DNA, 562 bp, Homo sapiens
gttgtttaatttgatgttccttcagagagaccattgctggagaattctattctaccatcttactccaccttctacctgtttttattttttaaatgtttctagtacataattgtgaagtgatagcttattttaatcttgggaatcaaaagcatgtagctaagaacttttcccaaggaatattttaaaatttttatatcaatgtttatggaatgacatactttttgattcaaggttcttaaatgtagttttagttttgattcaatgttatagaacactgttttttaaactgtgatctgaagcccacatgtaatggaatcayctggggtgcttatattaaaaaaatgcagattctagggctcacaccaactaaatctcctgggattggagaccaggaggtagctcctataatctccacagctgcttctcaggcacaccaagtttaagaaccattctttcatattttcagactggggattcttacaaaatgacaaagaaggaaaaccttaatcttttaaagttagagttcaagcattagactatatgcttcttaaacacagtttgt

SEQ ID NO: 429564 - DNA, 615 bp, Homo sapiens
atgagcctgttaccttccttgcctgagataaatgaccacatttgtattggmgctctcacagcacagaggatgacttctcatactgtgcctgtagccccttactgtgcttatctacttgggtgtgtgtcttgccctctagtgtgggggctccgtggaggcagggctgtccctacgcatccatgggtctccagcagctcagacagcacagccacaggttcctggtctctctcactggcaaggtgctctcagaagctttgctgactgccttccctccctctatgcagtctgcacaaggaaatgacatggctgccaggcttctcaccccttccacatgtgggggccatacacctgcaaatccttcagtttctatccatcccattgagttgactctgcccacagatggtcatgtgcctgcatgactatggtagataataagctaccaaaggctgctaggcaatgccacatgtttctgtggggctgaggggaaatatccagtcagctacatctggaacagagcagaactcacagtgaaaataggagatagagaagaaagggcctggctgctatacatggaagaggaagtctcagctgttgagagatgcaaagcatgaaaaa

SEQ ID NO: 429565 - DNA, 318 bp, Homo sapiens
gcaaggtgctctcagaagctttgctgactgccttccctccctctatgcagtctgcacaaggaaatgacatggctgccaggcttctcaccccttccacatgtgggggccatacacctgcaaatccttcagtttctrtccatcccattgagttgactctgcccacagatggtcatgtgcctgcatgactatggtagataataagctaccaaaggctgctaggcaatgccacatgtttctgtggggctgaggggaaatatccagtcagctacatctggaacagagcagaactcacagtgaaaataggagatagagaagaaa

SEQ ID NO: 429566 - DNA, 318 bp, Homo sapiens
gcaaggtgctctcagaagctttgctgactgccttccctccctctatgcagtctgcacaaggaaatgacatggctgccaggcttctcaccccttccacatgtgggggccatacacctgcaaatccttcagtttctatccatcccattgagttgactctgcccacakatggtcatgtgcctgcatgactatggtagataataagctaccaaaggctgctaggcaatgccacatgtttctgtggggctgaggggaaatatccagtcagctacatctggaacagagcagaactcacagtgaaaataggagatagagaagaaa

SEQ ID NO: 429567 - DNA, 318 bp, Homo sapiens
gcaaggtgctctcagaagctttgctgactgccttccctccctctatgcagtctgcacaaggaaatgacatggctgccaggcttctcaccccttccacatgtgggggccatacacctgcaaatccttcagtttctatccatcccattgagttgactctgcccacagatggtcatgtgcctgcatgactrtggtagataataagctaccaaaggctgctaggcaatgccacatgtttctgtggggctgaggggaaatatccagtcagctacatctggaacagagcagaactcacagtgaaaataggagatagagaagaaa

SEQ ID NO: 429568 - DNA, 318 bp, Homo sapiens
gcaaggtgctctcagaagctttgctgactgccttccctccctctatgcagtctgcacaaggaaatgacatggctgccaggcttctcaccccttccacatgtgggggccatacacctgcaaatccttcagtttctatccatcccattgagttgactctgcccacagatggtcatgtgcctgcatgactatggtagataataagctaccaaaggctgctaggcaatgccacmtgtttctgtggggctgaggggaaatatccagtcagctacatctggaacagagcagaactcacagtgaaaataggagatagagaagaaa

SEQ ID NO: 429569 - DNA, 637 bp, Homo sapiens
ttaatgctctttaaattttactataatttaaaagtttattgggttacaactgtatgaaaaataggcataggaaaataaggcttcaaaaaaatatatcagcatgttaacatcagtgtattasggcagtggtagtcagaatgagaactaatccatggcattttaccagatgccaggcactgttctaaagcattttataagaatttactcatttaattgaccttagtacctgatggggtaggtagttcctttattactattttaacacatgaagaaactgggacataggaaagttttcaaactgggatttgaaccaaccagtctggccccaggatcttgtctcttaactgccacactacactgcctcaagaatgagagagattgtgtttttcttctcttctggttttcaatgtggtgggtggccctatagttgtagtctttttataatgcaaaacaaaattatttttaatttatggcttgcatgtttctaaaaccttatctggtctctaagtaggccttagtatttctataataatcagttggatagaattttatattattattgttattagcagtatgccaaaaactaattgtagaaattcaaacttatactcagcctcattttgggtaagatttctcc

SEQ ID NO: 429570 - DNA, 637 bp, Homo sapiens
ttaatgctctttaaattttactataatttaaaagtttattgggttacaactgtatgaaaaataggcataggaaaataaggcttcaaaaaaatatatcagcatgttaacatcagtgtattagggcagtggtagtcagamtgagaactaatccatggcattttaccagatgccaggcactgttctaaagcattttataagaatttactcatttaattgaccttagtacctgatggggtaggtagttcctttattactattttaacacatgaagaaactgggacataggaaagttttcaaactgggatttgaaccaaccagtctggccccaggatcttgtctcttaactgccacactacactgcctcaagaatgagagagattgtgtttttcttctcttctggttttcaatgtggtgggtggccctatagttgtagtctttttataatgcaaaacaaaattatttttaatttatggcttgcatgtttctaaaaccttatctggtctctaagtaggccttagtatttctataataatcagttggatagaattttatattattattgttattagcagtatgccaaaaactaattgtagaaattcaaacttatactcagcctcattttgggtaagatttctcc

SEQ ID NO: 429571 - DNA, 578 bp, Homo sapiens
ctcatttaattgaccttagtacctgatggggtaggtagttcctttattactattttaacacatgaagaaactgggacataggaaagttttcaaactgggatttgaaccaaccagtctggccccaggatcttgtctcttaactgccacactacactgcctcaagaatgagagagattgtgtttttyttctcttctggttttcaatgtggtgggtggccctatagttgtagtctttttataatgcaaaacaaaattatttttaatttatggcttgcatgtttctaaaaccttatctggtctctaagtaggccttagtatttctataataatcagttggatagaattttatattattattgttattagcagtatgccaaaaactaattgtagaaattcaaacttatactcagcctcattttgggtaagatttctcctattaacctcctgtcctcctcttccccaatacttgtcaggtgtggaattggccaacagcatccaaatgtgacagctgactccagggaggggtgagccccacaccctgtgctcttaccaggactggtggtttcctcccgttcagcc

SEQ ID NO: 429572 - DNA, 653 bp, Homo sapiens
gaccctggtaggctaaacgctgactgaggcccagggtcacgaggctgggactggttatccaactgtgaaaggggccaatacagggatcaggacagtctgaggtcacccccatgcagtgacgaccaccgccccttctgaaccctgtggactttactcaagtctgtcacagcacttctcatgccatttggcagtgacttgctttccagatggagctcctggagcgctgggataatgttttcttcatatctgtatccacagcacacagcacagcaccaatcaagtctacagaggagctctcaggaaatgttttctcagtggtcaaaaagagaccactcatctcccctcacattctgtcccattgattctctcagaatccctgtattctccatttcactgaatcttcagcatggctccttccctaaagaggatcccagtaacccatctgaagmccaggaacagacacctgtgatgagctgtgacaaaaaaatggcagtgataagggatgtcattacataccacttgtctgggctgcctcataacctgatgcatccctatgttacagcagttaccacatcctgttaaaattacctgtttgtgtgccatctttcccgacaatattaagtatctcaggggcagccattggttttattgcc

SEQ ID NO: 429573 - DNA, 453 bp, Homo sapiens
gcccagtccacaggtgattcttaagcatgctaaactgagaacccctgagctagaggatgcacaggaaatgggtaattcacaamttgaaggatcagcagtgggctatgcacctagattgaatttctcagaatccaggagtcttggaacctacagcagagcttatctggtgtgtttctgggaggaaaataggacataggatacagacaatctgtgagatagtttctcaataaagaaaaaggggataggtattttaccaaaactgggatgtggaaaggggataaagagggcgcatgtgtatatggaaaagaatatttaatattatgttctaacttcatattaaaaaaaactgatatttttaaatacaaacaaataaaagaaaaactcaacaaaaccttcttgaaaggaagaacaatgcattagattctaccttctacagtataagtgattctgtag

SEQ ID NO: 429574 - DNA, 453 bp, Homo sapiens
gcccagtccacaggtgattcttaagcatgctaaactgagaacccctgagctagaggatgcacaggaaatgggtaattcacaacttgaaggatcagcagtgggctatgcacctagattgaatttctcagaatccaggagtcttggaacctacagcagagcttrtctggtgtgtttctgggaggaaaataggacataggatacagacaatctgtgagatagtttctcaataaagaaaaaggggataggtattttaccaaaactgggatgtggaaaggggataaagagggcgcatgtgtatatggaaaagaatatttaatattatgttctaacttcatattaaaaaaaactgatatttttaaatacaaacaaataaaagaaaaactcaacaaaaccttcttgaaaggaagaacaatgcattagattctaccttctacagtataagtgattctgtag

SEQ ID NO: 429575 - DNA, 453 bp, Homo sapiens
gcccagtccacaggtgattcttaagcatgctaaactgagaacccctgagctagaggatgcacaggaaatgggtaattcacaacttgaaggatcagcagtgggctatgcacctagattgaatttctcagaatccaggagtcttggaacctacagcagagcttatctggtgtgtttctgggaggaaaataggacataggatacagacaatctrtgagatagtttctcaataaagaaaaaggggataggtattttaccaaaactgggatgtggaaaggggataaagagggcgcatgtgtatatggaaaagaatatttaatattatgttctaacttcatattaaaaaaaactgatatttttaaatacaaacaaataaaagaaaaactcaacaaaaccttcttgaaaggaagaacaatgcattagattctaccttctacagtataagtgattctgtag

SEQ ID NO: 429576 - DNA, 610 bp, Homo sapiens
taacttaactaaaacacactttgccattagtcttgagtgtgggcacagcattattcttttctaggccttaagggttccttctgcttaaaaataatgtctaactttaatgaagtttacccattattaaagtgccttctggatatatgttatcttgttctattggtttcaatacacctattttctttaaaaagaaaaaattatgraccatgaatgttaacaccagaaaaaccttaaggtacatctgatctaatttcccactttaaagtgagaaaatcaaacattgcctagggatctcatttttccccaggctaatttgggttttcatatttccatctcaaagtggactttctttggctaactttaaggtttttttttttttacatatatacaacttttattttttatttctttttttattttttatttttttattttattattattatactttaagttttagggtacatgtgcataatgtgcagcacagcatggcacatgtatacatatgtaactttaagttttaaatgtaaatgcctgaaaagtaactcaggatctagccttttcattagttttgatcatgtatgaaagcaagtatttctttcccccaaat

SEQ ID NO: 429577 - DNA, 559 bp, Homo sapiens
tgtcaggttgcataaggttctctttgtataatgagatttcactgagaaagattcttgctttggaagcattccaatcttcttggagtttcttcccaagcaggtcctccgccctgccacctccccgagcagcccttcgatgactccctgtcttctgtggtgcrtttcagttacaaaaagcccaaggggaatgtgtccatcgtcttgcaagtaaaaatgcttctgaagctatagctacagagaataaataggggcaaaggtgggtaggagggggaaggaagcagaagaaagagatacaatacaaaccaaagggtggattggagagaaaaatggagtgaagatatgggttggaaaggcagctgggaagttcaaggagaacaggaagatgactgagaagtagtttatgtaaaaagatatcttctcactaagtccgcaagggctgcaggagactatcagacctcagaagggctgtgtgctgtccaccctggaagtcccagaccctgacactgacttacttgctggtgactatggtgtgcagcctcctcctcaatactgtcagtga

SEQ ID NO: 429578 - DNA, 559 bp, Homo sapiens
tgtcaggttgcataaggttctctttgtataatgagatttcactgagaaagattcttgctttggaagcattccaatcttcttggagtttcttcccaagcaggtcctccgccctgccacctccccgagcagcccttcgatgactccctgtcttctgtggtgcgtttcagttacaaaaagcccaaggggaatgtgtccatcgtcttgcaagtaaaaatgcttctgaagctatagctacagagaataaataggggcaaaggtgggtaggagggggaaggaagcagaagaaagagatacaatacaaaccaaagggtggattggagagaaaaatggagtgaagatatgggttggaaaggcagctgggaagttcaaggagaacaggwagatgactgagaagtagtttatgtaaaaagatatcttctcactaagtccgcaagggctgcaggagactatcagacctcagaagggctgtgtgctgtccaccctggaagtcccagaccctgacactgacttacttgctggtgactatggtgtgcagcctcctcctcaatactgtcagtga

SEQ ID NO: 429579 - DNA, 599 bp, Homo sapiens
ttggccaggctggtctcgaactcctgttcgagcggatcaagtgatccgcccacctcggcctcccaaagtgctgtgattacaggcatgagccactgcacccggcctttacaattattttattccagttagcaatggggagagagggttacgtttttccagcatttartaagttttaatggtcccaatctaaaaacaggagcatctttttgagataatgtatatataaaataacttatatttttctccaaaaagaaaaaagtcatacctggcatttggactcagatattatacatggagaattatatgcttttaaatataaactattttgaaagaaaaaaataatagggattttggaattaagacttaactaaaaaactcacctgactttctctttcttttttagccatgagttcaagttcctctttggcattactcagttctttttccagccctgcaactgtgtccaagtctcctaaaatgaaaatatagcactagttttaattgctattaacataatgtggtatctgctgcctcctttgagtaatttacagaggacacattccaataataagaaaaaagaaaacatacacacaagttgt

SEQ ID NO: 429580 - DNA, 599 bp, Homo sapiens
ttggccaggctggtctcgaactcctgttcgagcggatcaagtgatccgcccacctcggcctcccaaagtgctgtgattacaggcatgagccactgcacccggcctttacaattattttattccagttagcaatggggagagagggttacgtttttccagcatttaataagttttaatggtcccaatctaaaaacaggagcatctttttgagataatgtatatataaaataacttatatttttctccaaaaagaaaaaagtcatacctggcatttggactcagatattatacatggagaattatatgcttttaaatataaactattttgaaagaaaaaaataatagggattttggaattaagacttaactaaaaaactcacctgactttctctttcttttttagccatgagttcaagttcctctttggcattactcagttctttttccagccctgcaactgtgtccaartctcctaaaatgaaaatatagcactagttttaattgctattaacataatgtggtatctgctgcctcctttgagtaatttacagaggacacattccaataataagaaaaaagaaaacatacacacaagttgt

SEQ ID NO: 429581 - DNA, 574 bp, Homo sapiens
cctcctggacagacctcgcaccaggtcccgggcacttgcgggtgggcgtgctcaatggcagaacacgtggggctgagccctgtgagaggtgggacccagagagsgggctggggccgaatgggtgtaaaggtggcaggtgacgccaggcctgtgccagcttctgggtattttgatttttgggccttcagaggcatcgcagagattcgaagtgaaaacccgatccttgtgcagcctcccaacagccaaggcagggtggcacccgaggaacacctgtccctggtaccctcgggaagtggctgcttggtggccagtgacattttggaggtcaccccaccaccccaggtgtctgatctgcattctcattctctctgcagctgcttaccgcaatctcggtcagaatttgtgggggccccacagatatgggtgcctggcgggggtccgggtgcggacagtggtctcgggctcgtgtgctgcacacagcctcctcatcaccacggaagggaagctgtggagctggggtgagtaccgtgcgggtgctgggcactggggaccactgtcaccagctgtccccaca

SEQ ID NO: 429582 - DNA, 574 bp, Homo sapiens
cctcctggacagacctcgcaccaggtcccgggcacttgcgggtgggcgtgctcaatggcagaacacgtggggctgagccctgtgagaggtgggacccagagagggggctggggccgaatgggtgtaaaggtggcaggtgacgccaggcctgtgccagcttctgggtattttgatttttgggccttcagaggcatcgcagagattcgaagtgaaaacccgatccttgtgcagcctcccaacagccaaggcagggtggcacccgaggaacacctgtccctggtaccctcgggaagtggctgcttggtggccagtgacattttggaggtcaccccaccaccccaggtgtctgatctgcattctcattctctctgcagctgcttaccgcaatctcggtcagaatttgtgggggccccacagatatgggtgcctggcgggggtccgggtgcggacagtggtctcgggctcgtgtgctgcacacagcctcctcatcaccacggaagggaagctgtggagctggggtgagtaccgtgcgggtgctgggcactggggaccacygtcaccagctgtccccaca

SEQ ID NO: 429583 - DNA, 556 bp, Homo sapiens
tgaaagcagggactgcatctcaatggtgagtgtggccaagagaactagagcccagcctaaattcacacaggatatcaagagtcgcatgctaccgatgaaaacatcatgacgtttccaactcagcagagatagtgcctgtcccccagtcagcattgtggtgcagggcacaaatgacaagtccaaagagaggaaaatcaatgaaaggttgaagagttaccagagtagaattaatagggacagtaatagaatcagaaagcttgctcttgagtaaacgtggaaggattctcaggagcttctgaaagcaaagctacttcaagagattgcttatagaaaaatgataaccatgcttgaaaggacaaacatgggatccaacaacatgatgtctatgtcccagactaggactgagactgagatcatgtctttctattttttagtgagaaagtactggaagttaaagaaaawcttatcataaactttataaaaaactcataaaacttatgcaacaagtatgataattcatacacatatacatacatatatatgcgcaaatgcctaa

SEQ ID NO: 429584 - DNA, 498 bp, Homo sapiens
acaattatgtcctgtagatcaaaattgagagtgaaaatacctagatacaagttctgagaggataacccaaagaggactttgtgaaactacttaaaaatggcaagtcaaccacaaatctatatttgttcagcttttggatttcctcttgctaagtaattttaaagctacttaacagtatttaattgacatttaactcactattctacttgcttcaagtttttcatactgaagcgctcacaattataacttgcatatgaaaaattaccttagcctgatttccaaatggctraagagtttgatgtaatttctactagaattctgtaatattgatgcagcagatgctggagcagcatttttcagctgtcaattatgaccctttagtaggtcatgaaatcaatttagttgattgtgattagcattaaaaagagtaaaaaaagaaaggaagagaattgcacagaacataagaaattgagtgcaagttaagtattgttatgtgaa

SEQ ID NO: 429585 - DNA, 463 bp, Homo sapiens
caggcaatccctctttgcctggaatgctctttctagtcccacaatgtgcacaagcagctcctttgattctaaggcctctggcctttgtgatcaccctatctaaagctggtcacttctgttagtgtcttgtttagacatttgtacatttccttcaagcacttgctatgcatttccattattttctgtttgtctgtattttccatgaggggaggcactgtgccaatcttgctctgcattttatctgtagtgtctaagtcagtgtctggcttgtggtaagtgttcaatacatatttgtttaaaagcattatgacaaaaatctaaagtaaattttttttycattaaattccatgttcctaacttactttataaaattggaatgagttctgaaaaatcaatcacctacaatgaacagattgcaaaatttttaggaaaaaagttttaagatttagtctagtcataatga

SEQ ID NO: 429586 - DNA, 588 bp, Homo sapiens
cttagcaaaataccaccaaatggacagaaaaccttggcaatgtatactggcagagtattagcatgtttgctatgtaaaggtccatatattgatatttctttgcattctataaaatcttcaggttttgaataattttattatatgtacagggtgaacaaatctcaattattgtaagaactttagaaagaatatttttttcaygcttaatatattctctcttacctactctctttcctaacctacactttgagaacaagaaatgacatctattttactctatccaggaatctacccaaacagccaaaagcctaagtcccttcatggtcttgccaatattagctgtgtaactctggttggataaattgcttaaccttgttgagtttggctaaccaagaccattctaccccacccatcattcacctctgcaccttgaaagctgcttactctgaacatctgtgactctgggagtgaggacttttttctggctctgagaatatgctcagtttaccaaaaaatgcaaaccagaagtacactacagttgttacctctggaggcagacttcaaccaaagataggtggagagttggta

SEQ ID NO: 429587 - DNA, 588 bp, Homo sapiens
cttagcaaaataccaccaaatggacagaaaaccttggcaatgtatactggcagagtattagcatgtttgctatgtaaaggtccatatattgatatttctttgcattctataaaatcttcaggttttgaataattttattatatgtacagggtgaacaaatctcaattattgtaagaactttagaaagaatatttttttcacgcttaatatattctctcttacctactctctttcctaacctacactttgagaacaagaaatgacatctattttactctatccaggaatctacccaaacagccaaaagcctaagtcccttcatggtcttgccaatattagctgtgyaactctggttggataaattgcttaaccttgttgagtttggctaaccaagaccattctaccccacccatcattcacctctgcaccttgaaagctgcttactctgaacatctgtgactctgggagtgaggacttttttctggctctgagaatatgctcagtttaccaaaaaatgcaaaccagaagtacactacagttgttacctctggaggcagacttcaaccaaagataggtggagagttggta

SEQ ID NO: 429588 - DNA, 646 bp, Homo sapiens
cttgtgtagtgtcaccctgatttgtgtaggstgtagtgtagggctgatttgtgtaaccaataggatattgcagaaattttggagtgacttctgagggactatgatgttgtgacttctgttttgctttgaaagaattggttaagatgcgttgagaggacactcaagcagctctttggaagggtccatggagcaagaaactgagctttctgccaacagctagggagaaacttaggcaccctgccaatacccatgtgagtgaggcatcttagaagcataccttcaagccccagtcaaacctttagatggctgacatttctactgacatcttttttggttaatttttaattttaaattaaatttgtttttagagacaaggtctggctctgtcatcagggctggagtgcagtggcatgatcatagctcactgcaaccttgaactcacagacttaagcaatcctctcacctctgcctccccagtagttgggactacagatgtgcaccaccatgcctggctaagtttttcttcttttatgtagagactgagtctcattaggttgactaggctggtctcgaactcctggcctcaagtggtcctcttgcctcagtctcctaaagtgctaagatcataggagtgagccattgcacc

SEQ ID NO: 429589 - DNA, 646 bp, Homo sapiens
cttgtgtagtgtcaccctgatttgtgtaggctgtagtgtagggctgatttgtgtaaccaataggatattgcagaaattttggagtgacttctgagggactatgatgttgtgacttctgttttgctttgaaagaattggttaagatgcgttgagaggacactcaagcagctctttggaagggtccatggagcaagaaactgagctttctgccaacagctagggagaaacttaggcaccctgccaatacccatgtgagtgaggcatcttagaagcataccttcaagccccagtcaaacctttagatggctgacatttctactgacatcttttttggttaatttttaattttaaattaaatttgtttttagagacaaggtctggctctgtcatcagggctggagtgcagtggcatgatcatagctcactgcaaccttgaactcacagacttaagcaatcctctcacctctgcctccccagtagttgggrctacagatgtgcaccaccatgcctggctaagtttttcttcttttatgtagagactgagtctcattaggttgactaggctggtctcgaactcctggcctcaagtggtcctcttgcctcagtctcctaaagtgctaagatcataggagtgagccattgcacc

SEQ ID NO: 429590 - DNA, 597 bp, Homo sapiens
aagccgagtgatagaattcatgctaataaattaaatgttttcttagaataatgttaaatagcaaataaaaggcaaaataaagtcaagagaaggagattggaraggaaagaaaaaagaaatgttttctattttagaacctttaacactattttttcctgtctttaaataaggtaatctcatgttttcattttgcacagaacccaacagacaatgtagctggctctaaaggcagaaaatatttctaccaggagaatggaaaatgggatatgtccttaggtagcataaggtagcataaactttctaccttttctgaattattctatctttgatatctcaatcacaacaatcatcaatggagcccctgtcaatgaaatcaagaattgaatcaggcagcaaacatgccagtccctatcatcgttcccctcaacgcggctcagcagcttgatgaatccttttccgcttatgacaaatgaggtatgaccagccgctcccttgctctgcttccctctcgaggagtgagataaatggccaccatataatgtgaaatggaggacttgagagtaacgcaattccaaaacacgtggtcaccatgcaaaa

SEQ ID NO: 429591 - DNA, 623 bp, Homo sapiens
tgatgggggtccgcctcttctgcataaagacgaagaggtcatccaggaactctttcctttcaggatcaccgtccagttcatacagcttggcaaaatctcgagagatctctcttccccggcctccatctgcatcatcactccaggccaaaccaccattctgcttgagctgctcatccagattccagttcrgctgtcctgctgtggagacagaagatgaggccttggaagcatctttggtatggtcttctttagcttgttgtccatgtggtgggagccctggtgctggaagtagattggacatgggtgccactctgggatcttggcgagctactttctgcacatgaaaatattttgaagcagcctgggtttctttctcagccacctctgcaacttcatcatccccgtcctcatcttccaaacctccgtcctcttcctcaggctctgagttcatgttgccccgttcaaacacttgggccactgctgcggtgggtggaactctggctaagggacctaagggagtgctgccagaaggtctcccagctgtggcggaaaagagagtcggctgcgtgaccagcttttgggcatacaagaactgggcttctctcatctgctggccctgcttc

SEQ ID NO: 429592 - DNA, 623 bp, Homo sapiens
tgatgggggtccgcctcttctgcataaagacgaagaggtcatccaggaactctttcctttcaggatcaccgtccagttcatacagcttggcaaaatctcgagagatctctcttccccggcctccatctgcatcatcactccaggccaaaccaccattctgcttgagctgctcatccagattccagttcagctgtcctgctgtggagacagaagrtgaggccttggaagcatctttggtatggtcttctttagcttgttgtccatgtggtgggagccctggtgctggaagtagattggacatgggtgccactctgggatcttggcgagctactttctgcacatgaaaatattttgaagcagcctgggtttctttctcagccacctctgcaacttcatcatccccgtcctcatcttccaaacctccgtcctcttcctcaggctctgagttcatgttgccccgttcaaacacttgggccactgctgcggtgggtggaactctggctaagggacctaagggagtgctgccagaaggtctcccagctgtggcggaaaagagagtcggctgcgtgaccagcttttgggcatacaagaactgggcttctctcatctgctggccctgcttc

SEQ ID NO: 429593 - DNA, 623 bp, Homo sapiens
tgatgggggtccgcctcttctgcataaagacgaagaggtcatccaggaactctttcctttcaggatcaccgtccagttcatacagcttggcaaaatctcgagagatctctcttccccggcctccatctgcatcatcactccaggccaaaccaccattctgcttgagctgctcatccagattccagttcagctgtcctgctgtggagacagaagatgaggccttggaagcatctttggtatggtcttctttagcttgttgtccatgtggtgggagccctggtgctggaagtagattggacatgggtgccactctgggatcttggcgagctactttctgcacatgaaaatattttgaagcagcctgggtttctttctcagccacctctgcaacttcatcatccccrtcctcatcttccaaacctccgtcctcttcctcaggctctgagttcatgttgccccgttcaaacacttgggccactgctgcggtgggtggaactctggctaagggacctaagggagtgctgccagaaggtctcccagctgtggcggaaaagagagtcggctgcgtgaccagcttttgggcatacaagaactgggcttctctcatctgctggccctgcttc

SEQ ID NO: 429594 - DNA, 568 bp, Homo sapiens
tttgtgggcagaaatagctaaaaggaaagagctgtttttagaagtcaagtctcccactattgttattgctacaagcttttgttggtgaatcttaaactgtatgatctatctagactcacataaggaaagcggagtttttattaaagacattttaaacttcaagccaaccttagttaaattcatatatagttatatgtaattatttcgtagtatggacactcccaaatattctggaagtttaataagacatggctttaggtagattggtctatttgggktttttgttcttgttgtcatattcattctgtagttcaaactgcattgattcacttctgtggaaaataatcctaaacaggaagggtggggacagaagacttagtccctaatatggaaattataagtgtttgttctttcagagtatggtaaggacatatcaaacaaacaggaagtattattatgcattgcaggcaaaggggttaaaggtctcctgttcgaacttttggcccttctagaatccctgatccttcattattttgtttaacttgatgtaagtcttgaccagtagctg

SEQ ID NO: 429595 - DNA, 603 bp, Homo sapiens
tagcagaacaaaaaataagtgaactctttttaattatctcattcataatataaagtggtagaggatgagcaaaaaggtcaggatataataaatataaaatttacatctccaaactaatttacctttttttaataccagctaaagccaatgaaaataaacatgtattctattatgttacaccattacagattattattaatgtcttgtttccaattttaggcwattttggtataatccaaatctatatattagccagggtagagggttttgcttaaggtagttgacatcatatagtccaaagcacaggaagaagtaaaacatatctgtaatcttcacccatttccaaacagaaggggataatcgggccaattcttctattgtgcgccctccttcttcatgcagagattcctttgaagtcagagggagatgaaggagctgaggctgagaatgtggctggaggaaaaaaaaaatgaatattattaggccagagtctcataaccatgatttatgccacattaaccattgtgtttgctataatgcagggcctttttattatcgtttttaccttctagtttaatcaaggatcactaatacaacttttaa

SEQ ID NO: 429596 - DNA, 622 bp, Homo sapiens
gtgtgcaagggttttcttttctacacatcttcaccaacacttatcatcttttgtcttttgattaatagccattctaacctgtgtgaggtggtatcttattatggttttaatttgcatttccctgatgattagttatattgagcatgttttcatatactgtattagtctgttcttgcactgctataaagaaatacctgagactgggtaatttataaagaaaagagttttgattggcttacagttctgcaggctctgcaggaagcaaggcggcatcagcctctggggaggcctcagaaaaagcacaaagaagggaggtgctacacacttttaaacaaccagatctcacagtaaytcactcactgtcacgagaacagcaccaagagaatggtgctaaaacattcatgaaaaaccacccccacaatacaatcctcccaccaggccccacctccaacactggggattacaattgaacatgagatgagctttgggtgaggacacgaatccaaatcatatcatacacctattggccattggtatgtattcttttgagaaatgtctactcagatccttcatccactttttaatcaggttatttgttttttcactattgagttgtttagtt

SEQ ID NO: 429597 - DNA, 524 bp, Homo sapiens
cttgttactgaaacattcctattacaaatgatatatgaatattttgactttgaggaactagtgagggaaagacatcttgattgttattccaggattctttggttgcaaataatggaaaggtacaaactggagaataagaattattggaaagatttgtagacrtatggaaccaaactgcaaaaaccaaccaaccaaccaaacaaaaaacctagcttttcgccatatttaatgggatctcaagcttcggtctctctctgtctctctatccctatccctttctttcttcttcatcacgtgcacatactcatgtcctttctctgggcatgtctactccaactttggtgctcgaattcaataggcctacctgaatatccatgatcttctttctctaaatcttccaccacaaactacatctccagtgttctcttatctgatgttggagcaaccatacatcgttacactaaacagaagattttcagttatttttattttacctttctctcagctttaagcacattcaatac

SEQ ID NO: 429598 - DNA, 581 bp, Homo sapiens
ctgctgcttatgacagaatacctgaaactgggtaatttgtaagaaacaaaatctatttcttacagttctggaaaatgagaagtccaaggtcaagggggcacatctggtgagagcctggttgctattgagaactttctgcagcatcctgaggtggcacagggaatcatgtgaggggtgagggggataagcatggtcactcaggtctttcttcttcttctaaagtkcccatgaactacttaattcttgaattaatgggttatcatggaagtgggactggggactttataagaatgggttaatggattaatggacctaatagcattttaaaggctccacctctccatactgccacattagagattcaatttcaacatgagcttcggaggggacttatgttcagtcattgcaggaaggggtggtgaatttgcaagcttgcacacaaaaaaactagaaatctgtacaggttcacatatatggtttatgttgcttcccaaacacagagaaacttaccaagaattgcacttttgtgtgtgtgtgtgtttgtgtgtgtgtgctctcagtacaatatatagcaacttgtc

SEQ ID NO: 429599 - DNA, 581 bp, Homo sapiens
ctgctgcttatgacagaatacctgaaactgggtaatttgtaagaaacaaaatctatttcttacagttctggaaaatgagaagtccaaggtcaagggggcacatctggtgagagcctggttgctattgagaactttctgcagcatcctgaggtggcacagggaatcatgtgaggggtgagggggataagcatggtcactcaggtctttcttcttcttctaaagttcccatgaactacttaattcttgaattaatgggttatcatggaagtgggactggggactttataagaatgggttaatggattaatggacctaatagcmttttaaaggctccacctctccatactgccacattagagattcaatttcaacatgagcttcggaggggacttatgttcagtcattgcaggaaggggtggtgaatttgcaagcttgcacacaaaaaaactagaaatctgtacaggttcacatatatggtttatgttgcttcccaaacacagagaaacttaccaagaattgcacttttgtgtgtgtgtgtgtttgtgtgtgtgtgctctcagtacaatatatagcaacttgtc

SEQ ID NO: 429600 - DNA, 431 bp, Homo sapiens
aacaaagtccatgtgagtcagctttctgctgcacagagcagagagaagggtgaatttggtaagacaaagagaaaatatctacaacccaaatcttcagttggctaagtcaactcaccttttgtttcttagctcacatgttattttctcatagctttcctaaagccctaaatacaaaattgtgcatcagctgtctttactcttaggacrtcgttgtttatctttctaggtcttgttacattatctaactatatatgatttagttgggtctataggttaatttacataatgactcacttctttctctcttcttttaacttttattttaggttcaggggtacatgcacaggtttgttatataggtaaactgtgtcacagaggtttgttgtacagattatttcatcattcgggtactaagcctagtacccaatagt

SEQ ID NO: 429601 - DNA, 544 bp, Homo sapiens
tttaattacacagtaagtggagcctcacacagagttgatgtttagagctgtctagcagtctaggactgggaggattagtagggactggtaaggggatcggaatggagtatccgctagaagagattataagacaaattattataggagagtcagggtagttgaaagaagcagcagataagcagctctcttaaaaatgtttgctttttgaaggcatttcaaccaaatatgaaagcagctcatactgcctttagtctctraatagagaggagtaagagaatgaacatatctctagtttgcacattttctgccatcacatttcaaattacctctcagtaaaaatctgactagtagaaactttacctgaaaactttgtcccttaagaaagtacacattttgtacacattttcttattatggatttcaaacaatgcacatttatgtatgcaaacctgtatttcctttgagcactcctctcactctaccaatcattaaaaataatagcacgagccaaaaactcattagtaatcaatactactatgaaactt

SEQ ID NO: 429602 - DNA, 584 bp, Homo sapiens
ttcttatgtttacaattcttcctcaactgttttatagatagaattttaaaatagattttgtctatgaaagatagtgttcatttaaattgcactagcatgcaattatgtcacaagatgttgtcatctatttaaaatagctttttgtctcctgagatgtttatttcaaatagttacactaaataagagtttctactagagaaagattaaaactctagaatttttaaaaaatctacattctgcaaggcaaaagaaaacttataagttttgggaaatagcaaaggcagcatctcctcagacactgaggcaccatttggtgcttaaattccagtaccaactgtagagttttaattgcatttgctttcagaacactggaagaatacaatgaagtccagatgtaagatagtatctcacttaattcttgagtttttttcattctggaagttaagaaatcaagyaaaactacatgtaagacaatatatagacatccaattaaaagagaagcttagaaatcagctaacacatactcaaataaacattatttagcttccctaaagaaaggccttgttagccttaatcacaaatcc

SEQ ID NO: 429603 - DNA, 623 bp, Homo sapiens
ttttttcaaacttaatgacaaaataaacctaaagatccaagaaacatacagaattctaataaagatgaagacaaccaaacacatattaaggtacacgtaataaaatttctgaaaagaattcataggaagaaactcttaataatggccaataaaaatatacattatgtacacagggaaaaacaagataagaatgacaacagacttcttatcagaatcttagcaatccagaagacaatggaatgccatctttaaagtgcttaaaaatgacctgtaaatgygttattcaatataaatttaaatatttcacaaatgaagatgaaacaagattgtttattttctgggaaaataaaagcaagcagagtgatattgtttgtacctgtgtccttgccaaaatttcacgttaaaatataatccccaatggtggaggggggtcctggtgggaggtgattggattatggtgacagattttcatggtttagcaccatttcctcttggtactgcatagtgatagatttctcagaagatctggcttaaaagtgtgtagcacctccctgctctcttcttgctgctcctggccatgtgaagtgttagctccccctttgccttcagccatgattgtaaat

SEQ ID NO: 429604 - DNA, 551 bp, Homo sapiens
cagttgtggctcaaaggagctcaggttcagctcaggccaatgcttcagtgggaacaaaccataaggcttggcagtttccatgtggtgttaagccagtggatgcacagagtgcaatagttgagattttaaaggtagtatggaaaagcctggatgtccaagaagaagcctgcttcaggagtgaattcctaatggagaatctttaccagggcagtrtggaaaggaaatgtggggttggagcccttacacagagtccccactggaccactgcctagtggaggtgtgagaagccaccatcctccagaacccagaactgtagatccactgacagcttgcaccatgcacctggaaaaatggcaggcactcaaagccagcccatgaaagcagcagtggggactgtatctggcaaaacctcaggggcagaactgcccaaggctttgggagcccatcccttgcaccagtgtgcactagatgtaagtcatggagtcaaaagagattattgtgtcactttaagatttaatgattgccctgctgggcttcagacttgtgtgaca

SEQ ID NO: 429605 - DNA, 621 bp, Homo sapiens
aaactcacagctaagaggagcctaaggagacatcatggctaaatgtagtgtgagtgtgatctattggatggaatcctggtacagaaaaagaacattaggtaagaaaatttgaatgaaatatggactttacttaataataatgtataatatttgytcaataattgtggcaagtgtaccatactaatgtaagataataataaggaaaactaagtgtgagtatgtaggaattttctgtactattgtcttagtctattcaggcgctatcacaaaaatcatagctttcatagtttataaacagcagaaatgtattccttacagttctggaagctggaaatgtcaagatctgggcactggcagatttggtgtttggcaagggcctgtttcctggttcatggatggcacatttttgctatgtcctcatgtagtggaaaagggacatggcagctctctggagcctcttttataaaaacactagttttatttatgaaggctctgccctcatgacctaataaattccaaaaggccccaactcctaataccatcacattggtgattaggtttcaacatataaatatgaacacaaacattcagaccatagcaactatgtttgtaatttttttt

SEQ ID NO: 429606 - DNA, 691 bp, Homo sapiens
tgggtcaattaaacctctttttgttataaattacccagtcttggaaggttctttataacagtgtgataatggactaatgcaatgactctaagggaaagtacaaatcagttgtattccaatggcagaggaagggcctcctcaatgtcttagagtttcttcaggaaattccctgacccctagattgagttaacattctctcctcgcctagtatgtccttraaaacataataaaattcaactattgctacttttgttacactgaatgacttttgtttggaaatgtctaaaatctgtgaagtcagagattagtcagttttgtccatcctgtaagccctagcacctatgagtgcctggaacattcattattaaatgaataaagtaatgagtaaaaagtttcagtctattcttgtttttatcttgtcaaaaataactcttcttcctcagtccatgtaagccatctaaaacttttctactcattccacagttgcctgaaaatgtgaagatcagaaatggactgaggcaaaagtgataatgaagacattctcataggcgttgggttccgagatcaattccttaaattttaaaagattcttgctatgatctcatctttaatccataatgtgctattcatttctctatttttccttgatgctccagaagtatattctttaacgtggctttacacaccaaag

SEQ ID NO: 429607 - DNA, 608 bp, Homo sapiens
agaagtatattctttaacgtggctttacacaccaaagtagactagattttctgcctgttaatgatgatgggcttcttacttacagtatagtactgagttgtgtttcttattcccatcccgcaatgtgtgtatgtgtgtgtttcctgataatacaggtaaagcactgataaatgaagataaattgttggctttgttccaaaacaagcttattgttctaggaccccaaactgtctcaaacatcattaagaagcagcaggccacctaaggttgtgcatcaattagcaattaggtcacacattgggtggttgcaggcactcagcctttggccttgttcctygcagcacactcaagcagggcaccagtatccaaacaatgcccaccctgttgtatcttgttccttaattgggacaacttagagatgctaatgtgcacaggcagactctgtcctccaattaggcctcattagtgactccgacagtggtgaccactgcaaagtgatatttgctcttgggaaggctttgtgaggtattctgagttcctgcaggggagaaacaaggctgcattttacactctgcccagcagccagctccttctctcaattttctaca

SEQ ID NO: 429608 - DNA, 608 bp, Homo sapiens
agaagtatattctttaacgtggctttacacaccaaagtagactagattttctgcctgttaatgatgatgggcttcttacttacagtatagtactgagttgtgtttcttattcccatcccgcaatgtgtgtatgtgtgtgtttcctgataatacaggtaaagcactgataaatgaagataaattgttggctttgttccaaaacaagcttattgttctaggaccccaaactgtctcaaacatcattaagaagcagcaggccacctaaggttgtgcatcaattagcaattaggtcacacattgggtggttgcaggcactcagcctttggccttgttcctcgcagcacactcaagcagggcaccagtatccaaacaatgcccaccctgttgtatcttgttccttaattgggrcaacttagagatgctaatgtgcacaggcagactctgtcctccaattaggcctcattagtgactccgacagtggtgaccactgcaaagtgatatttgctcttgggaaggctttgtgaggtattctgagttcctgcaggggagaaacaaggctgcattttacactctgcccagcagccagctccttctctcaattttctaca

SEQ ID NO: 429609 - DNA, 596 bp, Homo sapiens
tccaacagctgcctaaactactggcattgcaggatgtatcaagacatttgccatctaaagagccattaggagaataataagggtaggactttgttggccatttccatcatgtgattttttttcccctagttacttgcatccttcttcctgcccccttgacttgtatgagcagttgctrcagagatggcaggatgtcaatgcccccaaaattgaacctgtgatttgtttttctttgatttatgtgcttgtagtcaataaactttataaaggaaagtatcagactgaacaatcaatcaaagataaacagattcctgtcctttaaaagcatttcagcccagtaggtgagtctcattcatcttttgcaggcatgctttcggcctttccattgagacacaaccgactgctcactacaggcagcttttctaccaaagggctgctgcagttgagctgagatttatcaatttcatggcaccagtggtcctgacatggtatcattttcaggatctaaatggttaagcatgctgtttgtatgctgagacctgggctttccatagacctgaaaagagagaaaggtgactagttttaaacactttata

SEQ ID NO: 429610 - DNA, 563 bp, Homo sapiens
ctggttttttatgtgctgaatatgaaaataatcccttcataggtagttctttagctgtacaaaagtgcattatgcaaacaacacatagacagaataaaccttggagattcagrgtcagaagagcttataaattaatctcctaagtacaccttgagcatgcttagagagtacgttcagtcataaaaacttgaccaactgaacctgcaaagttttaataggggtgagtttgatgatgaaaaatgaaaatgatgttaaatgtatgcccattttaacactgcccaaaagtttcagactggtttcactctctgctggctccaatgccatttgctgtctagcccttcgtttttaatcaaccaagctttccttaaattctgcaggctaaaaactgtcccaaagttaggtattcattctgacacaaatgctttgataaaaatgttaaattaaatgtagccagaaatgaaacctggatttcctcgcagaaaacagatatagaatgtatggcttcctccgtcagtccctttcccagtaagtttcaagcatttacacaacaggctcctggtcca

SEQ ID NO: 429611 - DNA, 401 bp, Homo sapiens
ggatgaccttagagttggatctaaactcacaaactaagtgattaagttttcaaaaggmattcagagtcagtaaaacaacaggctttattttttctccctactgtatttttcacgtttgagcaggcaattttggtgaatagaaactaagacttacaggggaagctaatgagtttattcaggaagcacaatgtgaaattagtgacacagttttgaaaaattaactctctcagacaaagcttgtaaaaattgattaacaagctagtagtggctattgacaggacatgctttcacatcttttagaaaacaactttcaattattatgaaagtatatacgtatttggaattaacacacatttatgtacttaagtgttcttttttctcctaatgttccattttcagtt

SEQ ID NO: 429612 - DNA, 467 bp, Homo sapiens
gtgtcacctggctctattagtcttttcttttcttccctttttgttattatttattggcatttcgcctgcagcaaaacataagttttaaatgtkgactttatggtgtgtgtgagtcagtgtagagagggtaaagtatttcaagagcagtacaaaatataagaactcttgaattttaattttaagcagtttaacataggtatgtaatgaaggtttatttattgaatttgaaaaattaatatcttacagccttgagtgtattttgctttgtctgcccctgggtttgtacatattggtgttttattcttcctttttaatatttcaacaggtgagggtggcaagaaggctgatgatgctgttttacacctagaggtcttatggaaccaggactgcatttgtacgcggaacaaacaactttgggggatggtttagtaattgcctttggtagggcttgtctcacattcattaaa

SEQ ID NO: 429613 - DNA, 467 bp, Homo sapiens
gtgtcacctggctctattagtcttttcttttcttccctttttgttattatttattggcatttcgcctgcagcaaaacataagttttaaatgtggactttatggtgtgtgtgagtcagtgtagagagggtaaagtatttcaagagcagtacaaaatataagaactcttgaattttaattttaagcagtttaacataggtatgtaatgaaggtttatttattgaatttgaaaaattaatatcttacagccttgagtgtattttgctttgtctgcccctgggtttgtacatattggtgttttattcttcctttttaatatttcaacaggtgaggstggcaagaaggctgatgatgctgttttacacctagaggtcttatggaaccaggactgcatttgtacgcggaacaaacaactttgggggatggtttagtaattgcctttggtagggcttgtctcacattcattaaa

SEQ ID NO: 429614 - DNA, 585 bp, Homo sapiens
tgatcacctttctgcagggcctcatgtcatctcacccagacatcaatttacagtgactactgtactcactggtagatggccaccaggtatccctgactgtcattaggagtgcataaaggacgacgggcaaggaaccagttaacagaaccaggctctgacaaacctcagggtctcaaggcacctctttatcaaaagagcatcgctatttactttaactgtggcattaggagcagtggcaacagtttgtgtcggagcgagtatgtaatataggtaaggtgtctgaccaggactctttcagtctaaatgaaacaaatactaacacaggagaagtgaagaatgtgacagttttgctcttacagtttacatcttcttcagaagaccttggcacacttttcagaaggtgaataaagggtattcatgccatgtcataggccactcaacacagaacttccattttactgatttattcycagaatgcagttgctgacaaaatgcacattgattatgaaaaatgaggacttctaaaatattgatagaactttttatgggggagggaattaacttagaacttaaagcatgaataat

SEQ ID NO: 429615 - DNA, 585 bp, Homo sapiens
tgatcacctttctgcagggcctcatgtcatctcacccagacatcaatttacagtgactactgtactcactggtagatggccaccaggtatccctgactgtcattaggagtgcataaaggacgacgggcaaggaaccagttaacagaaccaggctctgacaaacctcagggtctcaaggcacctctttatcaaaagagcatcgctatttactttaactgtggcattaggagcagtggcaacagtttgtgtcggagcgagtatgtaatataggtaaggtgtctgaccaggactctttcagtctaaatgaaacaaatactaacacaggagaagtgaagaatgtgacagttttgctcttacagtttacatcttcttcagaagaccttggcacacttttcagaaggtgaataaagggtattcatgccatgtcataggccactcaacacagaacttccattttactgatttattctcagaatrcagttgctgacaaaatgcacattgattatgaaaaatgaggacttctaaaatattgatagaactttttatgggggagggaattaacttagaacttaaagcatgaataat

SEQ ID NO: 429616 - DNA, 585 bp, Homo sapiens
tgatcacctttctgcagggcctcatgtcatctcacccagacatcaatttacagtgactactgtactcactggtagatggccaccaggtatccctgactgtcattaggagtgcataaaggacgacgggcaaggaaccagttaacagaaccaggctctgacaaacctcagggtctcaaggcacctctttatcaaaagagcatcgctatttactttaactgtggcattaggagcagtggcaacagtttgtgtcggagcgagtatgtaatataggtaaggtgtctgaccaggactctttcagtctaaatgaaacaaatactaacacaggagaagtgaagaatgtgacagttttgctcttacagtttacatcttcttcagaagaccttggcacacttttcagaaggtgaataaagggtattcatgccatgtcataggccactcaacacagaacttccattttactgatttattctcagaatgcagttgctgacaaaatgcrcattgattatgaaaaatgaggacttctaaaatattgatagaactttttatgggggagggaattaacttagaacttaaagcatgaataat

SEQ ID NO: 429617 - DNA, 554 bp, Homo sapiens
tcaagcagctctgaatactagccagcaagcgggatgaggggaaggagaattggaggatccgattaggctaaaagtaaaggagtaaaytgaggcaagattgtcaagggctttgtatgacctgataaggcattttaggcttcattcatcccatgggaaaaagaaaagcgagggagtttttaagtaaacaagtgacagcatcagatctgtttctgaaaggagtggccaggcaggaagatgttcgccctttcctagtcagtcctcctctcgcccaccatcttctgtttctcaggctgcctgcacagctagcaggtggcaaacgaagccatctccagggtgatgtggactggttctagagccggaatccctctcctgagcaaaggcttctgatggcgttcaccctgcagagggtggatttgcacattcttcttttcctgtcttacaaatatcatcagtgatctcaaaaataaaaacgaaaccctcaagacaggactctgctctgctattttttttttttaatcttcaggagatataattagtaactaattttttcaaaa

SEQ ID NO: 429618 - DNA, 546 bp, Homo sapiens
gttttataagaagagagagagagacccaagtatagtatgctagcatgctcagtcccctcaccatgtgataccctgtgctgcctcaggactctttagagagtccccaccagcaagaaagctctcaccaaatatggccccttgaccttgaacatctcagcctttacaactataagaaataggttctttttctttataaataatccagtttcatgtattctattctaagcaacagaaaaaggactgacattggtgttttactttgcgaaaataacctccctgaggctctgttttcttatctatgtaatgtatacaatgtggaaagtaaaacttcctcttgcaattttgttgtgatactgaaacctgaaaatctttgagaaacactcaggactgtgctcatagaaggacttctgtgaaatgggctttccattcttaactgcaagtccagtaggccaggctccagccctgacaacctgstgattctaggaagcgcacaccattgcttggctttcagttccttcttctaccaagcctgatggacctttctca

SEQ ID NO: 429619 - DNA, 529 bp, Homo sapiens
ccaggctctcaagagttatcctgtcttctggattcctgcctaccccaactcccccagccttgttgaggttctctactgcctcctgaatacacatgaacccctataccaattttaagaaaaaaatgattctctttcctctttgtccaagcatcctatccctcaaacccaaaaagaaagaagctctcccttctctctctgtgatggrgacagtatttcttctagtatcctgcagccttcccagtcctgctgcttgtggtagaaatgctgccacagcccaacattgaggagccctcgatgactgccctttacaactcatattcagttctgcctccaaaatgcatgtgtccacttacgtgagatggtaaatgtttaacaatggactttctgaaagggaaaaaccaaaagctgttttgcagtgcttgccaatttctctagtgtaataactcccaacctgaccaatttcacactgcaacagttaaacaaccacattgcaagattcctgaaatttaacaattgggtttcagggccc

SEQ ID NO: 429620 - DNA, 529 bp, Homo sapiens
ccaggctctcaagagttatcctgtcttctggattcctgcctaccccaactcccccagccttgttgaggttctctactgcctcctgaatacacatgaacccctataccaattttaagaaaaaaatgattctctttcctctttgtccaagcatcctatccctcaaacccaaaaagaaagaagctctcccttctctctctgtgatggggacagtatttcttctagtatcctgcagccttcccagtcctgctgcttgtggtagaaatgctgccacagcccaacattgaggagccctcgatgactgccctttacaactcatattcagttctgcctccaaaatgcatgtgtccacttacrtgagatggtaaatgtttaacaatggactttctgaaagggaaaaaccaaaagctgttttgcagtgcttgccaatttctctagtgtaataactcccaacctgaccaatttcacactgcaacagttaaacaaccacattgcaagattcctgaaatttaacaattgggtttcagggccc

SEQ ID NO: 429621 - DNA, 490 bp, Homo sapiens
aattccgttagcctctctgctgtgttggatctcatttattttcctctgtttgcctctcatttttgtttagaattttctagtgactttccgaaaaaggttatatgggaggtaaattttgaattctagcctgaacaagtcatccaacctttctggggctgatgacacccacctcagagcataataggaaggagtaaatgccatatgaagcacttasctcactgtcaggtccataatgtaggtattctgtgagcagtcatgatttctaattcccaactgtaatatccttgggagacatcattcgtgttctgtttatatttttgacagccttccacccagccccatccttgtgcagtgcctggcacatacatggtagaaacatggaaaatactcaattagtaacggggtggatggatacatgggttagatatttagctggggacatttgggcacaagcttccaaaagtcaggaatggatgttcccagcctccca

SEQ ID NO: 429622 - DNA, 515 bp, Homo sapiens
ggcaggtcgcttgagcccaggagttcaagaccaggctcagcaacatggtgaaatatagtctctacaaaaaaatgcaaaaattagctgggtgtagtggcacttctgtagtcccagctacttgagaggctgaggtgggacaatcacctgagcctggggaggtagatgccgcagtgagccatgattgtgccactgtactccagcctggacaaaatcatttaggaatccgcagaaaattttmatagattatttagtaaacagtactagaaactgctgaactactcagcaaaaattaggtctctatttcatgcaatattccaaaatggtttaaagttttaagtatataaataacaataatacaatggaatgtaaataagtaccaataaactataaaacaatttgaagaaaacatttgaaaatatttgtctgttctcaggctgaggtagccttcctaaatattaaaaagaaatatttaatagtttctaatacataagatatttaaactcttatgtgtcaac

SEQ ID NO: 429623 - DNA, 558 bp, Homo sapiens
gttttacatttaatggattctcttttccatagagaatacattaaaataaattttaatgttgggctatttttgggcctgctgttcagttttattaagttagtgttatattattgctatttttgttgtactcagactcactaaaaaaccatttcttcaccgggcacggtggctcatgcttgtaatcccaggactttgggaggccaagaccagcggatcacctgaggtcaggagttcaagaccagccttaccaacatggagaaaccccgtctttactaaaaatacaaaattagccaggtacagtgacacatgcctgtaatcccagctactygggaggctgaggcaggagaatcgcttgaacccaggaggcaaaagttgcgtgagccaagatagcgccattgcattccagcctgggcaacaagagcaaaactccatctcaaaaaacaaacaaactaacaaacaaacaaaaaacatctcttcagctttgtcatttggaaacatttattattgcactggaagtaaaatgacaagattctatatttggccagtttccctctcata

SEQ ID NO: 429624 - DNA, 558 bp, Homo sapiens
gttttacatttaatggattctcttttccatagagaatacattaaaataaattttaatgttgggctatttttgggcctgctgttcagttttattaagttagtgttatattattgctatttttgttgtactcagactcactaaaaaaccatttcttcaccgggcacggtggctcatgcttgtaatcccaggactttgggaggccaagaccagcggatcacctgaggtcaggagttcaagaccagccttaccaacatggagaaaccccgtctttactaaaaatacaaaattagccaggtacagtgacacatgcctgtaatcccagctacttgggaggctgaggcaggagaatcgcttgaacccaggaggcaaaagttgcgtgagccaagatagcgccattgcattccagcctgggcaacaagagcaaaactccatctcaaaaaacaaacaaactaacaaacaaacaaaaaacatctcttcagctttgtcatttggaaacatttattaytgcactggaagtaaaatgacaagattctatatttggccagtttccctctcata

SEQ ID NO: 429625 - DNA, 542 bp, Homo sapiens
gctcctcccacatgaaacaatttcttcacttgaattcctccaacctcgctggctgtttcttcccaatctcttttgctggttcccagttgtgtcactccccactcattactgaagagccctaaagttcagtccttgaactccttacctatcaacaatcatccttgcttatctcagctagattccgggctttgtatactgatcaattacaaatttgtatctccagcccagacttgtctgctgaatttccaacttgtacattctgctgcctactcagtatctccacttggatttctagtaaacatctaaaatgtgtcatctccaaaactgactttctaatttatcacgacacttactttcaaaaaatacatgcacactttctgtagtttcctgcctcttaggtcacagcaactctattcttccacagttcaagccaaaattttcggtgatctccttgactaccctgtttctcttactttctctataaagtctcttagaraaaatcttgttagtgctaccttcaaaatatcatggtgtgagttcaa

SEQ ID NO: 429626 - DNA, 602 bp, Homo sapiens
aagtaatacagtgaggtcatttcagagtgacttgtccttattgattgtgtgctgaccagcaaagagatatttccatctgctctaggtcccataaactacctcttcaaatacctgctgaaaatgtttctatgtccccacaagcttttagccagcccatctttatatatgcctataatggattagaataaaataaatacatgaaaactgctgataaaccaaagctttactagtaaatctttgtagctctctctcctcyaggagctgatccaggttatatgggatctgaagcttttacaattttaaaggtcctttccaaaaaaaaaaaaatgcaaataaaatgttgcaatggccccactcatgcatgtgaagggcccagaaacttcaggctaattggctccatggtaaattcacctgtgcctggcacttgtctttagataagagactgagaatgaccaaaaatcaaaatccacaaagttgtaagtaggaggcaatgaaaaagcatgtatttctgctaatagccagagaaaccatgctcttctccatgtcagctgatgaggagagggagaggaaaacttgtttagatttaactatgcagttattat

SEQ ID NO: 429627 - DNA, 599 bp, Homo sapiens
attgttgatgaaatttatctgcattttagtaagaatttcatataatgcaggctgtgtgaagtggcttatgcctgtaatcctagcactttgggaggccgaggtgggtggatcacctgaggtcaagagttcgacaccagcctggccaacatggtgaaaccctgtctctactaaaattagccrggcatattggcgagtgcctgtaatcccagctactggggaggctgaggcacgagaactgcttgagcccaggaggtggaggttgcagcgagccaagattgtgccattgcactccagcctgggtgacaagaacaaaactctgtctcaaaaaaaaaaaaaattgtataaactggaaactcagtgaatgttgtggaataaatgcaaattaatctttttccaagtaagcaaattctcaaagtatgtttctttagaatattttttgttgatcactatctatctagttctatcacatatctgtatctaaataccaataatatatggattttaaagaagatgatatatatcagaaaaaattacccttaaaatttttccaatatgttgtatttaaataaaatacaaggggcattatcaggttaattaat

SEQ ID NO: 429628 - DNA, 558 bp, Homo sapiens
tttctttagaatattttttgttgatcactatctatctagttctatcacatatctgtatctaaataccaataatatatggattttaaagaagatgatatatatcagaaaaaattacccttaaaatttttccaatatgttgtatttaaataaaatacaaggggcattatcaggttaattaattgcagataaaagtaaatatagatatatatgagcctttttctttcttttttttacttttactctgcttggtgttgcataaatatgatagcatataatttttgatgcaggattttttcactttatgttgagatgttttgtatgctgaaataaaaatatgagaataagcaataattattgtaaggtcagcatctgttgattttcttttcctccaggtaaaaatagacattagtttatcagtttagagaaawgaacacaggtgcttcctagtggcaggcacctagcacactccaagtaggaattcatagatatgcctttttaaagtttatttcttttaattcactttcattccacgtgatttattttttgtggagggaagaa

SEQ ID NO: 429629 - DNA, 552 bp, Homo sapiens
ctgccatcattttaaataacataagatcaactgtttaagtgagaagctaatttacctgccagcatatttagctttgttgagattcttccatatcctacagataaaaaatgagattaaaccatgtatatgtatctattcagtactaaattattctgtatgaaaagacaagtactgtgaaacttctattaaagtggccacaagtatccctaacatagaagtagtccccctctccgcrccccgccccccccactttttttaagttggctaatttaatgagatatttacattgttatcagtaaccactaaggagttacaaaccattacttctacaggcaatggccagtgtaattaaaccttttaaccttgctagttttcccagtttgccattatcagtcattggtcacagtacatattttttcattattagccacaaactagctatgtgaccttaaaaggttatttaaagtctccagactttatttcccgacccccccaccccaccccatgaaaggaagaaggaggagacaatgatccctgtggtccatttcatct

SEQ ID NO: 429630 - DNA, 442 bp, Homo sapiens
gcaagccaaaaaaaaaaaaaaatggaatggcatcttaaaattaatgaaagaaaaattatctagaattttatatccagtgaaaatattctttaaaattaaggagaaataaaccmccttttcagacaaacaaaagctggaaagaattccagcagatatgcaaaaaaaaaaaaacaaaaaaaaaacgttaaaaggaagttcttcaggttgaagaaatataccaggtggacatgtggatctaaacaaaggaataaagagtgacagaagtggtaaatgtggtggtgaatagaaaagatactttatctcatttttaattttctttgtcagataattctctgaaataaataatatatggtaggttttataacatatagaagtaaaatgtatgataacaacaacacaaaggacaggaaggagaaaatgataatgtagtattgcaagtttc

SEQ ID NO: 429631 - DNA, 610 bp, Homo sapiens
catttggaatctttaagttgtttacaaagctatgcacattcaggttaaaaatgtcaagccacacaaaaggatttttttttttaaaaaaagtaaagttattctctcagttttccaccccagaagtaaccactgtagcagtttcttgtatatctttccagaaattgtctatataaccataaaagtaygtaaaatatatatatatttttaaatacagatgagaccatatcatacactgttctgtcatctgcttttctttaaaaaaaaaagttttgcttactttccatattacatatataaatccatctcatttgaattccatattattcatagtactccatctatttagagaattctcaattacatctagaatatcagtatgcaaagataaattatgtaaaattatggcaacatatctaatacgaattttacaattttaacatggagattctcctcttgctcataagaagctatgcattttaagagtacccagtgaatatctattttgattgcctctgtttcaggataacatagatatttttataaaagtaacaggtccttaatttataggtatatacagtcatgtgttggttatagacagggatatgttctg

SEQ ID NO: 429632 - DNA, 540 bp, Homo sapiens
caggataacatagatatttttataaaagtaacaggtccttaatttataggtatatacagtcatgtgttggttatagacagggatatgttctgataattccatcattaggtgatttttgtcactgtatgaacatcatagagtgtacttacacaaacctagatggtatagcctactaatggtatacgtagactatatagtatagcttattgctcctatgctacaaaccygtacagcatctttctgcactgactagtgtaggcaattgtaacacaatagtatttttataactaaggatatctaaacatagaaaaggtacagtaaaaatgaaaaggtacagtaaaaaaataaaagattaaaaatggtacacatgtaactatataaggtacttaccatgaacgttgctctgggtgagtcagtgagggagtggtcagtgaatgtgaaggtctaggacattattactcaccaatataggctttataaatgctgtatacttaggctacactaaatttttttaattttttctttcttcaataataaatc

SEQ ID NO: 429633 - DNA, 540 bp, Homo sapiens
caggataacatagatatttttataaaagtaacaggtccttaatttataggtatatacagtcatgtgttggttatagacagggatatgttctgataattccatcattaggtgatttttgtcactgtatgaacatcatagagtgtacttacacaaacctagatggtatagcctactaatggtatacgtagactatatagtatagcttattgctcctatgctacaaacctgtacagcatctttytgcactgactagtgtaggcaattgtaacacaatagtatttttataactaaggatatctaaacatagaaaaggtacagtaaaaatgaaaaggtacagtaaaaaaataaaagattaaaaatggtacacatgtaactatataaggtacttaccatgaacgttgctctgggtgagtcagtgagggagtggtcagtgaatgtgaaggtctaggacattattactcaccaatataggctttataaatgctgtatacttaggctacactaaatttttttaattttttctttcttcaataataaatc

SEQ ID NO: 429634 - DNA, 540 bp, Homo sapiens
caggataacatagatatttttataaaagtaacaggtccttaatttataggtatatacagtcatgtgttggttatagacagggatatgttctgataattccatcattaggtgatttttgtcactgtatgaacatcatagagtgtacttacacaaacctagatggtatagcctactaatggtatacgtagactatatagtatagcttattgctcctatgctacaaacctgtacagcatctttctgcactgactagtgtaggcaattgtaacayaatagtatttttataactaaggatatctaaacatagaaaaggtacagtaaaaatgaaaaggtacagtaaaaaaataaaagattaaaaatggtacacatgtaactatataaggtacttaccatgaacgttgctctgggtgagtcagtgagggagtggtcagtgaatgtgaaggtctaggacattattactcaccaatataggctttataaatgctgtatacttaggctacactaaatttttttaattttttctttcttcaataataaatc

SEQ ID NO: 429635 - DNA, 514 bp, Homo sapiens
tctttgttaaaagggtttgtctcaactaagaatgctgaagggtagacaggaaaattattgttcagaatcccagttttctaaattgaggttcaacaatggaacaggattcaaatgataaaattgtatccatttataagagataaccttaggtgaaaaaggtaggatacaaagctctctctctmtatatatataaagcaaactaaatatggcctgaaaaggactctgtaattctatatttgagtccttgtggatgaactgtaacctaacttaatagacaagattgaaaacttaatttaggagtatgcgcctgtaacaatcactgagtcttcgccaatcccagcagccatatttcatccagtcacacactgctgagggttcaaactgtgtgcaaataaggcaactgctgaactgtaatgaatccagctgtttctgtacctcacttccaatttctgtatgtcattttacttttttttggtctataaatttgttctgaccacaaggcatccctggagtc

SEQ ID NO: 429636 - DNA, 637 bp, Homo sapiens
tctgacacagcaatttcactcctgcgtttatattccacttaaatgtatgttaaatgtacaccgagacatgaccaagaatatttacactgacattgtttgtaacagcccgacgctcccaaacctgggaacaaatcaaatgaccatctatgacagaatagataacttgtggcatattcataaaatggaattcgaaatagtaatgaaagtgaataaactacagtcactcataggatgactctcacaaacacaatgttgagaaaatgaagcaaaacccagaagaatgcatgataaaaatatgacacccatagtgtcaagttcaaataagtttaggaatgcatacayatggagtaaaagcataaaggtaagcaaggaaatgatcacagaagtcaagattatgcttacttatgcagaagagagatggttataattggaaaaggttggggaaaaggcttcaatattgctagtaatgttctatttttaatctggatggagactacctgagtacttgttttataattatttgttagactgtaagtttttacacactttctgaatgtgcattttacaattataaataggcactaaaaaagggaaaacctaatacagaggatcttcactctcaaggtatttggtatcc

SEQ ID NO: 429637 - DNA, 600 bp, Homo sapiens
attgctagtaatgttctatttttaatctggatggagactacctgagtacttgttttataattatttgttagactgtaagtttttacacactttctgaatgtgcattttacaattataaataggcactaaaaaagggaaaacctaatacagaggatcttcactctcaaggtatttgktatcccaatgccagctattccctattcagggaagcaaaagtcatcataatatgacaatgttcactaatacagattacttaatgaactgatcactccactcaaaatttccccctccctccccgattaacaccagcagtttctctcaatgatagtaaacatccacaatatgaataaaaggtgcatcgtctgcaaattcattcattcaacaaatatttccgaagtgtccactgttctgggggaccagtaaggtccacgacagacaaagatccagacagaggacatgggaacttccactcccaccccaatttggcctccatcttcttaccctccttttctactaagtttcaaacacgaagaatctaaaatgaactcggggcacatatgaagttactattaaaactattttgttagtcttttcaatgca

SEQ ID NO: 429638 - DNA, 614 bp, Homo sapiens
tcttggaaggaaaccttagagttcattgcaattcactaaatacttattaaaccttacttggtgctaggcactgcagttgcaaaagcaagtaagatgaggttcttgtgtttaagaaaacacatgagggagacagatacagcctgggtctgtgctgggtctctaggactggagtcagttctgcctcacccctgcaggggccaactcatgcaggctgcattttctagcaccttccaactgggtcctcccagtgggaagcgctggcaagaggttagagaagaagggagaagccaggacttctccccctgtgcctggaggtttccaaaattggccatgwttcacttattgctcccgcccctgctggactggcccactagggctccagctcctgagctaatgagcccagcgacccagctactgagctttggtatatttattgcttcttgtcttggtcctttcatcacagggtggtggcgattttctgctgttgttcacccccaggttctctctcagtcccctctatgacatctgcaatgaattcctttaattaaatgacaatcttttaaataattagcctggcttctctgtccccagttagaccctgactgatacacaac

SEQ ID NO: 429639 - DNA, 584 bp, Homo sapiens
cttgaaaactgcccaggcaggtcaaagtgctttgatttttactatcaggctctcatttcgcttgtcattacaggagtttgccagtgacctagaggcataatagattatgggctgaatggtgtcccctctaaattcacatgttgaagtctttacccctagtacctcagaatgggactgtatttggaaacagggcctttaaagtggtaattaaggtgaaatgaggtcatcagggtgggccctaatccagcatggctgctgtcctaataagaagaggagatgaggacacaggcatacacggagggaagaccacagagcacacagccacctgtaagccaaggagagtgctcgcatgagaaaccaatctgtargtagctcgagtatggacttccagcctccagactgtgacaaactcaatttctgctgtttaagccacacagcctatggcactttattgcggcagcccaggcagacaaatacagaccccccttacgtttgtgggaacgtgaggggatacggagttgtagaagaagctgcaggtgcttgaatcccatgtaccctgcccccgatcgatcagtgagcctgga

SEQ ID NO: 429640 - DNA, 543 bp, Homo sapiens
aaaaacaatggaaaaatatcagtgaaactaaaagttgtttttttccaaagataagatctacaaactcctagctagactgactaggaaaaaaaggagagacgcaaataaagtgagaattgaaagttgagacactataacagataccacagaaacrtaaagggtcattagatattactacaaacaatcatatggcaacaaattggataatctagaagaaatgttaagttcctagacacttacaacctatcacaactgaccaataacaaggaaggagattggatctctagtaaaaaatctcccatcaaagaaaaggccaagacctgatggctgctcttctgaattctaccaaacacttaaagaactaataccaattctcaaacttttccaaaatactgaagtggaagggatacttccaaacccattttacaaagtcagcattaccctgataccaaagccagacaaggaatcacaagaaaaaaaattacaggctaatatccctgatgactatatatacaaaaatcctcaacaaaatattagcaaact

SEQ ID NO: 429641 - DNA, 561 bp, Homo sapiens
aacactgatgaaataattgcagaaaatacaagtaaatgggatgctatgctcatgaactgtaaaacaacactattgttaaaataatcatactacacaaagtgatctacagattcaatgcaatccctatcaaaatggcaatgtcatttttcacagaaagagaaaaagataatccttaagattatatggaaccacaaaagaccctcaatagccaaaacaatcttgagcactaagaaaaaggctgaaggcatcacactccctgtgttcaaaatatgttataaagctattgcaaataaaatggcatggtactggcataaaaacagatgcattgaccaacggaacaggctagactgccagaaataaacccrtacatttatggtcaactgattttcaacaaaggtgctaataacacacaatgaagaaaaagcagcatctttaataaatggtggtggcaaactggatattcacatgcagaagaatgaaacttgacccttatctcacaccatatacaaaaacaactcaaaatgaattaaagacttatatatacgagttgaaactaaaact

SEQ ID NO: 429642 - DNA, 616 bp, Homo sapiens
ttataaagctattgcaaataaaatggcatggtactggcataaaaacagatgcattgaccaacggaacaggctagactgccagaaataaacccgtacatttatggtcaactgattttcaacaaaggtgctaataacacacaatgaagaaaaagcagcatctttaataaatggtggtggcaaactggatattcacatgcagaagaatgaaacttgacccttatctcacaccatatacaaaaacaactcaaaatgaattaaagacttatatatacragttgaaactaaaactgctggaggaagataggggaaaggtctatgacactggtctggacagtaattttttgaatataactctgaaagcacaggcagcaaaagcaaaaatagacaaatgggatgacatcaaacaatagagcttctgcacagcaaaggaaacaatcaacagagtgaagagacaacctaaagagtgagagaaaatatttgcaagctatacatctgataagaggttaatatccaaaatacacaaggaacacaaacaatatcaagaaagcatagctcaattaaaaaaaaaaacaaaggacctgaatagacatttcttaaaagacgatatacatatgac

SEQ ID NO: 429643 - DNA, 543 bp, Homo sapiens
cagggaaggccaaacatctaccaatccaccaggctgttaacattctaacctgytttattagagaatgatatttcatagccacaattggcaacttattttactcattatcattaggaaatgaaaaccttcggggctcaagtgtattccagacctacctagacctttgttttatctaaaactttaccttagttaaagacacttatgtaatgaaggaaaatcacaagaataaaacaaaaacaaaatcggttttccagcctaaaacttcaataagagttatatttattttatataccacggaactacgagccctccagaaattccattctgttagatggtagtagatgattctcctttcccctttctgccaatccatatgcatcttctttttaaaaacatgacctcttgacctcccattaattcagcatttgtactgcgcctactgtgtgtgagacccaatgttggaaacaaagttacccaagacacagcctctgccctcatgaactcacagtctttaaggtgacctcgccgtgcagacacttacca

SEQ ID NO: 429644 - DNA, 583 bp, Homo sapiens
ctcaagtgtattccagacctacctagrcctttgttttatctaaaactttaccttagttaaagacacttatgtaatgaaggaaaatcacaagaataaaacaaaaacaaaatcggttttccagcctaaaacttcaataagagttatatttattttatataccacggaactacgagccctccagaaattccattctgttagatggtagtagatgattctcctttcccctttctgccaatccatatgcatcttctttttaaaaacatgacctcttgacctcccattaattcagcatttgtactgcgcctactgtgtgtgagacccaatgttggaaacaaagttacccaagacacagcctctgccctcatgaactcacagtctttaaggtgacctcgccgtgcagacacttaccatgctataaggtgatgatgcccttacagagattgtgctaggctcaggagaggtgacgtggaggagtgaagaacttggagcagggcagagagaatcagcactgaagctgggtcctgaacaatggatggccctttgctgaccatccagatgcaaacacaggaggagaaaaaggttc

SEQ ID NO: 429645 - DNA, 561 bp, Homo sapiens
cagtaaacaaatgtttgtaagagttttatgtataagagcaaaaactggaaatccagatctccttcaacggatgaatggtcaagcaacgcgtggtacatgcattgggtggaatattactcagcagtaaacaggaagaaactatggacacatgcaacaacctggatgaaactccagagaattatgctgaaagaaaatgtcactaacaaaaggttacacgttataagattccatgtatatgccattcttgaaacgacaaaatcatagaaatggagaacagttaatggttgccaggagttaaggaatgaatagaaagtaggggtacctataaaagcacaatggcgggatggaaagggtagggaggaagyggtccttgtggtgatgggtatgttttgtgttgactgtgtcagtgtcagtttcctggttgtgatactgtactacagttttgtaagatgttaccatttaaggaaactgagtaaagggtatatgcgagctttctattattttttacaactgcctatgaagccacaattatctccaaataaaaagtttaaattaaaaaag

SEQ ID NO: 429646 - DNA, 580 bp, Homo sapiens
agctaagtttcctttattattgttccttttactctttataattgacatasgtgaatttattcattcagccaatttgtttaggtaaatgctggggaggcttcataagtcataaagatattttgatatgtaaatgtagcaaacacaatgcttgctgtgtaatagatgcaccattattggccacaaatatttctgctggagttagtttgtagctccaagtaaagataaagaaatacacatggtgaagaaataaaatcgattctgtatatggagaggacattgttcttatgctgcaaaattgactctttctgaatttaaagagacattctgcttattttctgattatctttagttatgtttgtgtgtctacttatgtttatcccaactgtgtatgcatcacagcccttctttttattctttgtgttatggctacaactttattgctgtttgttttgtgccatgtcacttcacacagtactttgtaggttctgatgaaagtttgtcaatgaactttcagatctgttaattgagataaaaggcatgcagtgttcacaggtgagaggaaataaatcagtcagaattg

SEQ ID NO: 429647 - DNA, 605 bp, Homo sapiens
gtttccctgaaatgtttggaattcttttcaattagaactgtgtgtgaaggtcttgtttaagctctcatacacactgggctgatcatgacaattgtctgggtctcaaggcytatttcagagtttctactgcaaagatctggtggcgattcctctgtgtcctcctctcagtgtctccgtgtccttccttctccttctgaggacttctgtggtcgtcttgttctccccactcaatgtcctatactcttgcatctgggtttactcatcctctgactctagagctaagagcgacaggtgtgttccttcgctgtgcaggcatgttataaattcattcatttcccaacagtgaaagtccaaaatgtgctctgaaacaaacgtgggttctaatgtaagtggatgccaaaggcccagcagtctggatgttgggaagggagtattcagagcctgaccacggctgggagtcctgaaggggttctaccaccactctgacctgtggggtggccccatgtcagacagaggcagagagacgtttagaatatatgcagaaaggctatgtttcttttctttctttacagaacgagaagggcggtggaagaaggaatttttcg

SEQ ID NO: 429648 - DNA, 548 bp, Homo sapiens
tgaaataacccgcagcctggacagctcactcttcttgaatggtaggaagagttccctctacccttttactgaggacactaagatgaatacctcacaatgctcaaataattggccaatctcagagtctttataaaatgaaaactaaactaagctaaaagtgagctaccagttggaaacaatctagctactagttggaaacagtctaggtgaaaagacatttaaccagatataggttatataagagaaaaaaactgcaaagggaaaaggctcawaaattagtaacacaccagactgaaaagctttgcatcggtttaatttaaatataaatacatgtgaggatcctgctatgtaccaggacccaaagacagaatgagaacaaaaactgagcacctttgcccagaaatgaaaacggtgtcatgggaacattctgaagatgtgggctcttcctgcagaatcctgtaccacctcacccaccctccaccttcaaggaaagaaagcctgttaagataatgtgagccatctcccgacactccgagttaatctataat

SEQ ID NO: 429649 - DNA, 580 bp, Homo sapiens
agctaagtttcctttattattgttccttttactctttataattgacataggtgaatttattcattcagccaatttgtttaggtaaatgctggggaggcttcataagtcataaagatattttgatatgtaaatgtagcaaacacaatgcttgctgtgtaatagatgcaccattattggccacaaatatttctgctggagttagtttgtagctccaagtaaagataargaaatacacatggtgaagaaataaaatcgattctgtatatggagaggacattgttcttatgctgcaaaattgactctttctgaatttaaagagacattctgcttattttctgattatctttagttatgtttgtgtgtctacttatgtttatcccaactgtgtatgcatcacagcccttctttttattctttgtgttatggctacaactttattgctgtttgttttgtgccatgtcacttcacacagtactttgtaggttctgatgaaagtttgtcaatgaactttcagatctgttaattgagataaaaggcatgcagtgttcacaggtgagaggaaataaatcagtcagaattg

SEQ ID NO: 429650 - DNA, 580 bp, Homo sapiens
agctaagtttcctttattattgttccttttactctttataattgacataggtgaatttattcattcagccaatttgtttaggtaaatgctggggaggcttcataagtcataaagatattttgatatgtaaatgtagcaaacacaatgcttgctgtgtaatagatgcaccattattggccacaaatatttctgctggagttagtttgtagctccaagtaaagataaagaaatacacatggtgaagaaataaaatcgattctgtatatggagaggacattgttcttatgctgcaaaattgactctttctgaatttaaagagacattctgcttattttctgattatctttagttwtgtttgtgtgtctacttatgtttatcccaactgtgtatgcatcacagcccttctttttattctttgtgttatggctacaactttattgctgtttgttttgtgccatgtcacttcacacagtactttgtaggttctgatgaaagtttgtcaatgaactttcagatctgttaattgagataaaaggcatgcagtgttcacaggtgagaggaaataaatcagtcagaattg

SEQ ID NO: 429651 - DNA, 530 bp, Homo sapiens
tggttacttctgagagacacaaagatgaagaaagcacactcccccagaacctcatcaataagtagccacgcatttgacagaatgaggtgcacattgcaggctaacgattcacacacatacatacacactgctgggggcacaggcagattcaccagcacaccctgcaatcattccgacttccaacaaggttatcccaaatcataaatatgtatatgttttgcctaaaaccaaccctcacttcctcccaccccgtccctagtatttcctgttttcatcaatgacacactggcctcaggcataagtgagaggcaggtcttggtttcaggctcccctctcttctatcaaacccttctttcctgggtatgcctatatacattatttcaaaaacccttgtaggggagatactaattattcccattttacagataaaggaaataaagytcaggagttgaatggacagtccaaggtcatacagtaagagactacctcaggatttgaatccaggtctctccaattcaagagtcagtgcc

SEQ ID NO: 429652 - DNA, 482 bp, Homo sapiens
aagcttgcctacattaacaatggaaaacttttgtactaaaagacaccataaaaaaagttaragaaaagccacagactgagaaatttgcaatgtgcatttcattccagattatgccctcttgggaaattcattcatgtccacaaatagatatgttcaggagtgttcactatggcatttctggcaactgtagggaaaaaaaggaaactcaaatgtttatcaatgggagaataaaaaaaatttggcaaatttatataatggaaaacagcattaaaaggaatgtgctacaattatatcactatgataaacttcaaaaacagttgtttttttttaaacccagtgttgaggaagagtacatataatacaatctatttaaagtttcaaaaccctgcatgattagcactgtgtattgttaatattttctataggtttatgcacgcagaatacatgcatgaaaacagtcaacagtaaagtaacgagagcat

SEQ ID NO: 429653 - DNA, 482 bp, Homo sapiens
aagcttgcctacattaacaatggaaaacttttgtactaaaagacaccataaaaaaagttagagaaaagccacagactgagaaatttgcaatgtgcattycattccagattatgccctcttgggaaattcattcatgtccacaaatagatatgttcaggagtgttcactatggcatttctggcaactgtagggaaaaaaaggaaactcaaatgtttatcaatgggagaataaaaaaaatttggcaaatttatataatggaaaacagcattaaaaggaatgtgctacaattatatcactatgataaacttcaaaaacagttgtttttttttaaacccagtgttgaggaagagtacatataatacaatctatttaaagtttcaaaaccctgcatgattagcactgtgtattgttaatattttctataggtttatgcacgcagaatacatgcatgaaaacagtcaacagtaaagtaacgagagcat

SEQ ID NO: 429654 - DNA, 609 bp, Homo sapiens
ctgtaatcccagctactcgagaggctgaggcaggagaatcgcttgagcccgggaggcagatgtggcagtgagccaagatcatgccactgcactccagcctagggtacaagagcgagacttcatctcaaaaaaaaagaaaatcgataagcttgcctacattaacaatggaaaacttttgtactaaaagacaccataaaaaaagttagagaaaagccacagactgagaaatttgcaatgtgcatttcattccagattatgccctcttgggaaattcattcatgtccacaaatagatatgttcaggagtgttcactatggcatttctggcaactgtagggaaaaaaaggaaactcaaatgtttatcaatgggagaataaaaaaaatttggcmaatttatataatggaaaacagcattaaaaggaatgtgctacaattatatcactatgataaacttcaaaaacagttgtttttttttaaacccagtgttgaggaagagtacatataatacaatctatttaaagtttcaaaaccctgcatgattagcactgtgtattgttaatattttctataggtttatgcacgcagaatacatgcatgaaaacagtcaaca

SEQ ID NO: 429655 - DNA, 609 bp, Homo sapiens
ctgtaatcccagctactcgagaggctgaggcaggagaatcgcttgagcccgggaggcagatgtggcagtgagccaagatcatgccactgcactccagcctagggtacaagagcgagacttcatctcaaaaaaaaagaaaatcgataagcttgcctacattaacaatggaaaacttttgtactaaaagacaccataaaaaaagttagagaaaagccacagactgagaaatttgcaatgtgcatttcattccagattatgccctcttgggaaattcattcatgtccacaaatagatatgttcaggagtgttcactatggcatttctggcaactgtagggaaaaaaaggaaactcaaatgtttatcaatgggagaataaaaaaaatttggcaaatttatataatggaaaacagcattaaaaggaatgtgctacaattatatcactatgataaacttcaaaaacagttgtwtttttttaaacccagtgttgaggaagagtacatataatacaatctatttaaagtttcaaaaccctgcatgattagcactgtgtattgttaatattttctataggtttatgcacgcagaatacatgcatgaaaacagtcaaca

SEQ ID NO: 429656 - DNA, 482 bp, Homo sapiens
aagcttgcctacattaacaatggaaaacttttgtactaaaagacaccataaaaaaagttagagaaaagccacagactgagaaatttgcaatgtgcatttcattccagattatgccctcttgggaaattcattcatgtccacaaatagatatgttcaggagtgttcactatggcatttctggcaactgtagggaaaaaaaggaaactcaaatgtttatcaatgggagaataaaaaaaatttggcaaatttatataatggaaaacagcattaaaaggaatgtgctacaattatatcactatgataaacttcaaaaacagttgtttttttttaaacccagtgttgaggaagagtacatrtaatacaatctatttaaagtttcaaaaccctgcatgattagcactgtgtattgttaatattttctataggtttatgcacgcagaatacatgcatgaaaacagtcaacagtaaagtaacgagagcat

SEQ ID NO: 429657 - DNA, 580 bp, Homo sapiens
agctaagtttcctttattattgttccttttactctttataattgacataggtgaatttattcattcagccaatttgtttaggtaaatgctggggaggcttcataagtcataaagatattttgatatgtaaatgtagcaaacacaatgcttgctgtgtaatagatgcaccattattggccacaaatatttctgctggagttagtttgtagctccaagtaaagataaagaaatacacatggtgaagaaataaaatcgattctgtatatggagaggacattgttcttatgctgcaaaattgactctttctgaatttaaagagacattctgcttattttctgattatctttagttatgtttgtgtgtctacttatgtttatcccaactgtgtatgcatcacagcccttctttttattctttgtgttatggytacaactttattgctgtttgttttgtgccatgtcacttcacacagtactttgtaggttctgatgaaagtttgtcaatgaactttcagatctgttaattgagataaaaggcatgcagtgttcacaggtgagaggaaataaatcagtcagaattg

SEQ ID NO: 429658 - DNA, 526 bp, Homo sapiens
ggagactcatataatgtggtcagcattttatttattttcaaaaagatatgaagcaaatggcatgttaatatttgaataggccacttatttaattcctggacttttgtctcttggtgcaaaatttgccacaattttgatacattccactctctgccctggtgcttggtgtgaggcctgagatgctggtttaaagaatggacacaggcatgaagtcaccacagttggattcagtgtgtgctgctgccaggactatatggggaacaagagggacagtggttgtcctcaagcagcaattggtcaggatgggacgggtgaggagatacttctagggcagagcagagtcacacgggttctggaagagacgcctgtgtggggttcattgaggatccatttcrgcgcaggtaagaagagcattgcagccagaagacggccagacacgctgcctcctacagaggtgcttcctgcaggagaacagtgtgcttgggtttaggccatgcatggaggggagggaagcctgtgaggaaag

SEQ ID NO: 429659 - DNA, 627 bp, Homo sapiens
gtgaacagaacagaagagaacagaacagagaggaatcttccacagggggcttttgtctacttgctcacctccatttctagcaaaacaaaacctacaaaccaaaaattcccaccacatggtagccacagtgaagcagctcccagaccattgtgagccctcagacagctgggtacaggagcaggtgggtgtctgagcctgaaggcagcatcagcctggaggggagctcccttgggggcggatatgcttgtgccagccttgggcccacacctagtgcacttgaacttcctgaccaggtaggtggctgtgctttgattctcagggctttagagttttcacatgatctgcttycaagcaccgaagagcaaatgccaccactcctgttctcctaagagcttttggattttcaccaagttgcttaatcagagattagcagcagggacaaggaaacctccgttgcccagctttggaggagctgccccagcctcctgcctccctctggcaccgtgtggcacacacactctcatccccaatcctgtacaagctgccctttatgaagcatttttactgcagtccaagaggagacgtctttccttgggatgtttcaaagcaaaatctagcaaataacac

SEQ ID NO: 429660 - DNA, 375 bp, Homo sapiens
tgttgtatctaatgtgcagtgaagcctgttttcartgaatgcacccttcagttacagtattttgtttaaaaaattccatttatctgccaagattccccattgtgaccatatttttcttttaagtctttgaatgtattcataatagctgttttgaagtccttgtttattcctttgtctgtattaatggacttttgactcttttttcccccttgatagtaggtcacattttcctgcttcatttcataaatacaaaatttttgttgtagagtggatatgatacatcatatctctaaactctttttatcttcccttgatgaatgttaaaattagtggctgattatattgaatttttggaaccttggtcttctgttttaa

SEQ ID NO: 429661 - DNA, 375 bp, Homo sapiens
tgttgtatctaatgtgcagtgaagcctgttttcagtgaatgcacccttcagttacagtattttgtttaaaaaattccatttatctgccaagattccccattgtgaccatatttttcttttaagtctttgaatrtattcataatagctgttttgaagtccttgtttattcctttgtctgtattaatggacttttgactcttttttcccccttgatagtaggtcacattttcctgcttcatttcataaatacaaaatttttgttgtagagtggatatgatacatcatatctctaaactctttttatcttcccttgatgaatgttaaaattagtggctgattatattgaatttttggaaccttggtcttctgttttaa

SEQ ID NO: 429662 - DNA, 540 bp, Homo sapiens
gtcaggtgtggtcagctttatctttccaatataaactttctcatcaagcctgacttaacagttttagcattcagtaatgaacattacctatattcattatttcagtcagagttgtaaaataataattttctaaatctattaatctttctgccttgattggctggaattctatgaagaactctctcttatcaatcattggtaatctggaataacagtttgtataggagaggcagaataaaggttgtttttttttttttttggttgtcaattttctgaataatgaaatgatgctttagcaacctccaatggtgatcaataacattgttggactcagatatttktatatattaaatgtgttgtagattatggaattttatgacatttgatgctcagatggtctcactcttggccagtgggcactccgcagaattgctcctttggtcttcttttgacaagatcccagtagtttgtgatgatgacttctttgatttctggtaaatagaatatcctcgacttacccagaaggctttttacactaga

SEQ ID NO: 429663 - DNA, 540 bp, Homo sapiens
gtcaggtgtggtcagctttatctttccaatataaactttctcatcaagcctgacttaacagttttagcattcagtaatgaacattacctatattcattatttcagtcagagttgtaaaataataattttctaaatctattaatctttctgccttgattggctggaattctatgaagaactctctcttatcaatcattggtaatctggaataacagtttgtataggagaggcagaataaaggttgtttttttttttttttggttgtcaattttctgaataatgaaatgatgctttagcaacctccaatggtgatcaataacattgttggactcagatatttgtatatattaaatgtgttgtagattatggaattttatgacatttgatgctcagatggtctcactcttggccagwgggcactccgcagaattgctcctttggtcttcttttgacaagatcccagtagtttgtgatgatgacttctttgatttctggtaaatagaatatcctcgacttacccagaaggctttttacactaga

SEQ ID NO: 429664 - DNA, 586 bp, Homo sapiens
cacagtgtatgcaatataccctgctttattagataatgccgaagagttccaaagtggttgtaccaaaccaaactcccaccatcagtgtgtgaaagctcttgatggcacacacgctcccccaacacttgatagtttccctcattttcatatatatgaaactttcargttgaagaagattcccagagtgtagaagactttctaataccatcctccaatttctgtccaaagtgtagcaatatatatagggcaaattagactaggactctgacaatatcctaatttatttcattggtgatagggaatgggtcaaatgaacacatacaggtttgcacaccatcaagaagcctatgggtttagtcattttagggcagtcaactgtttcctgctgatgtttattattgtgtatattttatgacaaaaataaagtaagagagaaatatcattcacaattccattactgtaacatactaatagtttttagttcccttatccacacacatatctgaattttatatggttacaatcatggtctagatataatttcatattatgcttttttgagctaaatgttttctctaaagcactt

SEQ ID NO: 429665 - DNA, 600 bp, Homo sapiens
tcgtgcatctctctctccaaaaggcttttcataatttataccagaggaatccaccttcttggaaagcagaagagctaagtttgacttacagcagcaagtgctctgttagcttcataaacaaataaaacatatgacatattgttgaagtaaagttttagcttttggaagatttaaaaattcttgcctagcttcctttgtaatacaaatttagaaaaaasgcaattttccgcaagcaggtgagtgggataaacaaatgtggtatagtcatgcaatagaatactacttgattgatacatgtgttacaacataaatgaattatgaaataattatgcttagggaaagaagccaaagaaaaaagagtacatactctatgattccgttacagaaaactctatgtaatgcaaacttaacatagtgacagaaagtagatcaacattgcctgtgaacatggggtgggtagagaggagcaggaaaaaaggattgcagaggggcgcatggaaacttttgaggccaatggatatgtttactaccttgattgtggtgatggtttcatggggatatatgtatgctaaagtttatcaaattgtacactgtaagtat

SEQ ID NO: 429666 - DNA, 621 bp, Homo sapiens
acggttcagcttgcaatttagaatttcaaaagcaggagttggccaaaagttgcctagggtttttaacctcacgtttttaccataaattttctttcttatttgttgagtgctgacctcacccttgtcataggtgggatagaagagatgctagctgcctctgatcaacattggagaaaatgcccaattaagaaataggcttcatagccaaggtgactaaatcccaaaggcttgtttgttttctttgtrcaacccaacttcttatgggcttgcttttggattctgttgtttcctttgtttttgtttggttggttgtttatatgttgttactaagactctgtcttggagatgttggacaataggctagtgtctcattggatctaggtgttccagatgtgagctaggtcctagaaggaggtggtaagaaggctttgcactatgccctggggagggctgttttgctggcgggtgaccaggttctgagggagtctgtacctagtagattttctcaacattcagcaggtgtgtgagacacctgacatggctgatcttggtacagaaggaatccagctggaagtgatctgtgtgtagcatgtctcatagaaatacaaggagccttgtctt

SEQ ID NO: 429667 - DNA, 606 bp, Homo sapiens
taataatgattcagtacaagtccattctcatgttccagttaatggctcatagcaacagctattctactgatccatttgtaacattttaaacaagaaaagtttttctggcctaaaactagtgactttgaaactatctgccctgtaatgttgaccttcttcagagaaacaatttaaatgtataaatataaagaaatatagttaagtaaaatccataagatgagagaagaaaaccgtcctctttaagacaacagtctgtaaggctatattgttttcttgatattgctatgctgggaaccagaaggtcatatggatcccacctggttctgttctctatcacaacacccttgaagggttattgacctaggcattttatgaagaagatgaatgaattgagaatgactgaacccatataaaagtggtctggtacaactttgctttagtttgacctttttgagagccaaagataaagtccaatgaaacattttattttctatgaggatattgttggggtatttcctcatcacatcacgttggaaagtctcagtacctagaccaastggcttcccctaaataactgatgtttgtcctacagatacagtgattcaa

SEQ ID NO: 429668 - DNA, 521 bp, Homo sapiens
atgtgtggaattaagtagtctggtgatgtccaattacttggaaatgtgagcaaatgttcttatcccttagaacaaattacatttttaaaaattcatttacttgcttacttatttacttaagtacatccccaaaattggttgagctaaaagaaattttatgctatgctttrttgtttcttggaggtataggataaacgatgggacaaaactggaaaagacaacaaaagctttggaatgttccacaacttccttttattcgagttcctccctccatctatgacacttccttactaaaggtatggcttttttttttttttttttttcacagatagagtgacctgtctgtctctccttcaaggtttgaggactttttctgctgtctttgtttacctagcattaagaagaatattggccgcataataagcccttgctgcatgttgaaggccattcatgagtgaacgaatgagcacttgggtaacctcctacactcgtcccatttcaggagctctggtagacggtca

SEQ ID NO: 429669 - DNA, 521 bp, Homo sapiens
atgtgtggaattaagtagtctggtgatgtccaattacttggaaatgtgagcaaatgttcttatcccttagaacaaattacatttttaaaaattcatttacttgcttacttatttacttaagtacatccccaaaattggttgagctaaaagaaattttatgctatgctttgttgtttcttggaggtataggataaacgatgggacaaaactggaaaagacaacaaaagctttggaatgttccacaacttccttttattygagttcctccctccatctatgacacttccttactaaaggtatggcttttttttttttttttttttcacagatagagtgacctgtctgtctctccttcaaggtttgaggactttttctgctgtctttgtttacctagcattaagaagaatattggccgcataataagcccttgctgcatgttgaaggccattcatgagtgaacgaatgagcacttgggtaacctcctacactcgtcccatttcaggagctctggtagacggtca

SEQ ID NO: 429670 - DNA, 521 bp, Homo sapiens
atgtgtggaattaagtagtctggtgatgtccaattacttggaaatgtgagcaaatgttcttatcccttagaacaaattacatttttaaaaattcatttacttgcttacttatttacttaagtacatccccaaaattggttgagctaaaagaaattttatgctatgctttgttgtttcttggaggtataggataaacgatgggacaaaactggaaaagacaacaaaagctttggaatgttccacaacttccttttattcgagttcctccctccatctatgacacttccttactaaaggtatggcttttttttttttttttttttcacagatagagtgacctgtctgtctctccttcaaggtttgaggactttttctgctgtctttgtttacctagcattaagaagaatattggccgcataataagcccttgmtgcatgttgaaggccattcatgagtgaacgaatgagcacttgggtaacctcctacactcgtcccatttcaggagctctggtagacggtca

SEQ ID NO: 429671 - DNA, 559 bp, Homo sapiens
cttctctactgagtgctaggtccatatgccctgtcactggctagatttcctcccctttgatatcccatgcacacctcaaatgtgacaaactcacggcagatctcacccgcatcctcctgtaaatctacctcttctctgactgccctacgctggtgactggcaggtccccctgagtcataaacttgggctttgtccttgactcccatgtctccccggtttcactgttccagcaacatttgatcagttacttaatccttcctcttaaacatctctctgagtcatccagcctctcctggatattgcctttgtcactgctgagtctgtcttgatttaaatttttgatattttaataataaawtttttttgatattttgttcatcatgtattttgtgcacacatatttatttctaaaaatattgcattaaaatattatttattattaataacttggggttttagcacttccttaaattttacatcagagataagcacctcacttgccttaccttattcttggtcctgcggacaatttttctcccactgcagtctcctatagtat

SEQ ID NO: 429672 - DNA, 522 bp, Homo sapiens
ggccatataaaatgcttctcttcatctgctaagagccatttatggacacttactatgagcaatatacattgcaaaagaccagaaaactcaccctctgcttatgattcagcactgtaacatgatagcctggaaactagtctgatagtttaatcagtgctatgtgatccttatttgtggttggctgcctcatcaattttcatttgggaattgaaatggactctgaggcagatatggcattaattatgggggaaattggttgcaatatgccttgaggtaaaacccttctgatgggaatctaagattgaaagaaagccaaattataaaaggatgatttactgaaaaaggcaaatgtatgcattaccatcactgcttagcagagaaaaagttgctgataaaccagaaagattgtggcatgactgaaaagtgaggaaaatctctaggtctagctctctmaaaaaaaagatttattcttatgctgaatgcattatatttccccagatacatacaacattttccaaaagt

SEQ ID NO: 429673 - DNA, 360 bp, Homo sapiens
tattggtaacaaaacccctactggtgacagaaaatatggcagtttattcaatcatgacagaaaaatctagaagtagactctccagactgtcagtgataccatcaaggtcttctttctgctctgccatcctttgcgtgtagcttttgtctgctttgttacaagatggcagccggtcccctaaaccatttgtccagggaggaagaaggaacagtgggcagggaggaaggggtggtattkaaatcaggaaagcaatcacttcccagaagctgtcactttatatttcactggccaggactgtgccacatgctcatctttctgatgtgtgatgatgaagctataattttcagctgggcacatggc

SEQ ID NO: 429674 - DNA, 575 bp, Homo sapiens
ctcactctctaaggctcaattttttcaattataaagacggatgaaactttgctataagatttttgagggggctaaattaagcagtgtatagatagcatacagcacagtgcctgctatttaatatgtttctaataagtggttgtagatgttgttgttatcctcatggtgtcatcatcatcattatcatattcttggggaaaaactcagcccagtgttcttcatatttcactaygagataaaaagctggaattgtaagagtagattcagaaagaaaaagaagattctgagaagggatttcagaacaacttcctctctggagtaaagaacagttaggaaagaataactggcagcctaaaggtgcctctgtagctgagtatactcccaggaagtctaggcagagaaccaacattaaactctgctcctctcggggcctggtgagagctatggaatgacccagagaatccagaaattccttcttctttataccaggggctgagtttgagatgttacggctcccagaggtgccttaactgatggaagcctgtgactcgtctgggggaaggccatcatcaccc

SEQ ID NO: 429675 - DNA, 638 bp, Homo sapiens
cccttttcttgcaggaaatgctttcagttgctggctgcccttcatcataccgttctcctaactccactagagtgctttttaaacaaaaatctactcacttggctttagcacatctactttatgctgttgtttttatatttacacaaaaggaaggcatggtttttgcaattgatttaataaaaacaataacaatagttaccttttattgaggacttcctgtgtgtcaggtgctcttctaagaactttgcaggtattgtatttaacactcaaacacctstatgtggcaggtgtctttatgacctacagtttacagaagagaaaactaaaacatgaacaagttaaatagcttgaccagggtcatgcaagtatttaatagtaaacagagaagccgagattcagtctggtctccatgattgtctgaagtgtcactagaagcatcatctagtagctttgtttttagagcaaaaattgcatagaagccaatgaatccagaaacagaagtattcaatgcttagtgcacataaaatccaccaggtaccttattaaaatgcagatttccaagattaaccctctgagtttctgattcagaaggtctttagagtcataaatctgcatttttaataaggattttgaaaaag

SEQ ID NO: 429676 - DNA, 596 bp, Homo sapiens
cggagggatggaagcaatggcatccggagagcccctaggactaactgaactgaaccatttggtggtctaccttgtgcttctcaggctctcctccctcttacccytaacactgtggcaatcaggcagcaacccattagaccaagaatgtatctaatagtcccattgtgcatagtaagctatggaggggcctgatgcaattgggtttgtctgttgggaatctgacataaatagtgacactgatttattatcagtgtcttctagatttctccacaatactcagagatttttataatatattcggtctgttatttcatcatgcaccatactgtgggggcttcttgggtcatactgcagatatttctcttaactcattcatctctgataaatgattcattagtaaaccaacggcagtcatggagcaatgcacacgttaggcttccttccctttaccaatgacataggtcccagtgccaggccttgtaatgatttaagagctagaaagggcaaagcaccaattacagtccatcaggcttggtccactgggtgaggaggaactagcaagcttaaccttttacacttatgctaacatgtaggtc

SEQ ID NO: 429677 - DNA, 576 bp, Homo sapiens
taaatcataaacctttatcccattttttccacatctattttactattttgtccttcaaaaatcagttgagatcaatacagaattacagctacctgctgatcttcccctcacctttgcctcgtagacaggaacttcctcaagtatttgtgagagcaacgttgagatgcccagctacccaggtacaccatgaggccacatcataatctgagttcaggtcttatcactaactgttcaaactttaattttaagctttaaagtgggaatgagaagaaataaatttccctattatgaagaaatgtgaggatcaaatgtgatatttagtgacatgaatattttgaaaaatatggartattttatgtaattacttttgtcttatatttctaaagtcaaacttgaaagactgaaatatttacctcttttacagttgtttttatgaaatcttttctttcagttaaatcataagtaggataattttcatagacctatgtatagtgaaaaggaaaaataatgttaaaagcagattttaaaatccagtaatattgtctttgaataaaagcaggaaatctgctacgtgca

SEQ ID NO: 429678 - DNA, 613 bp, Homo sapiens
aaatggtaatcaagctgttttctcttaagccagacattaaacagatgtacaaaaacataaaatgccactctttcattcttttgaaaagttatttttcctagaaaatattatttttaacattttaaaataaaaatttttcagttctaatgtcaaatacagtgaagatcaaaataactcatattaaaaaaagctcttggggtcctcactaattttttaagagggcaacagtatcctgaaaccaataaattggaaaaccactgagaaaaagataaatataaaaatatctgtcrtaacaacctagtaaattgcttctgaggaaatagtgatcaccttgcctcacactaaatccttaaaaagtacaagtatagctatagtaaaagttagaaaataagaagtattttgtctttaaacaagccaatttaaaacaccaaaaatcatcataccccttgcgtttgtagttgtataacaaaagtttacactttaactgctgtttatctgtcctcgtgcagctaatggtaataaggaccaagggcggacgaaaacgaagtcctagagctattttctggttttgattaatgccatctcccatcagagatggcattcccctgaactc

SEQ ID NO: 429679 - DNA, 499 bp, Homo sapiens
ctgggtccttaggtcttaaaatgaagaaaaaatttttagtatactaaaatgtcttccttcttgatttttcaaattaataaacacacctaaatataaccaattggtttcatgctcaacattatacatatatttctaatttttaattcaagcatttaaaatttggctttggttttcttttaatgtgataaaaaagtgggattttttggtaaatatataagtggatatatcaatatgtagatttcattataataatccctaggtttttctgaagcagcttattcaaaaagattttttcttttttttgagacggagtcttcctccgtggctcaggctggagtacagtggtgcgatctcggctcactacaacatccacctcctgggttcaagckattcttctgcctcagcctcccgagtagctgggattacaggtgtgtgccaccacgtccggctaatttttgtatttttagtagagaccaggtttcaccaccttggccaggct

SEQ ID NO: 429680 - DNA, 572 bp, Homo sapiens
tttaattggggtttttcatgtaaggagaaataatagttcccccctccacccccaagccctgcaagtagaaaaacctaaggcttatcatcttaacatatattcaagttataattgtgtgcctcttttagggtagtttctagaccctgtacatgtaaatgtaagagactcatccaaagtaatactttcttgcctttattatgaacacatgtaaaaccacccctttatttaagggtaaacattgacctcctwtcagggaaatgctattgtctccaagtgaatgcctcatccctttaaccatcaaattactatgtggttagcatgacatacactggagaagacgccaataaatccaaaggagataatttaagaataataaaacaacatacatgaaacaaataataaaaccaacatccagactaatgatccttaagtgtctggataccaattccaactgaaagagttttcctattaactccaagggaaaccagttcttggcatcagctatccaggcagaaactcacatacagaatataacttcagagaagtttaaaatggctctatacaccacaatt

SEQ ID NO: 429681 - DNA, 572 bp, Homo sapiens
tttaattggggtttttcatgtaaggagaaataatagttcccccctccacccccaagccctgcaagtagaaaaacctaaggcttatcatcttaacatatattcaagttataattgtgtgcctcttttagggtagtttctagaccctgtacatgtaaatgtaagagactcatccaaagtaatactttcttgcctttattatgaacacatgtaaaaccacccctttatttaagggtaaacattgacctcctatcagggaaatgctattgtctccaagtgaatgcctcatccctttaaccatcaaattactatgtggttagcatgacatacactggagaagacgccaataaatccaaaggagataatttaagaataataaaacaacatacatgaarcaaataataaaaccaacatccagactaatgatccttaagtgtctggataccaattccaactgaaagagttttcctattaactccaagggaaaccagttcttggcatcagctatccaggcagaaactcacatacagaatataacttcagagaagtttaaaatggctctatacaccacaatt

SEQ ID NO: 429682 - DNA, 607 bp, Homo sapiens
atccaactcttgagaatctggcctggggatggaatagaggagcatgaggaaccaagagtgggaggaatggggtccacttttggagaaaacaagaaaaatgcaaggaggaaaaattgcttcagctccctggcagactcgttctctaagaccgactcaggagacggtggaggctctctctgtgtccctccaggggctgctccaggaaccaggctcctttggggtgacaaatacgtccacccctagtagaaccagagaatatgaatagatgctgaagtcctaggactaaaactggtttcagtgaggaatgggggaggtcctactacaggttggggaggaatggatgagattgtccccctatttaaacatttcttttgttgtatttttttattatrgtaaaatatacataatataaaattgaccatttcaccagtttcacgtgtgcaattcagtggcaataagtaattcacaatgtgaatgacttttttttttttttttaagacaagatctcactctgtttcctaggctggagtgcagtggcactatcttggctcactgcagcctcctcctaggctcaagtgatcctgtcactgcagcctcctgagtagct

SEQ ID NO: 429683 - DNA, 587 bp, Homo sapiens
ttagtaaacatcttgatctgggccgggcatggtgggtcattcctgtaattctagcagtttgggaggctgatgtaggaggatcacttaaggccacaagttttagaccagctgaccaatatagcaagacccaatctctacaaaaaataaaaaaatagctaggcatgggtggtgcgtacctgtagtgacagctactcaggaggctgaggcgagatcacttaaccccaggagttcaaagctgcaatgagctatgagtgaaccactgcacttcaacctgggtggtcctgtctcaatcagtgtagttaaggaagctgaatgtggggcccaatgtgaaaaagagcctggttagctactaataaactaaagtgaatggtccgaactaagattaaagttaactcttttcttttccacgaatgctaagattctctgtggggtttcttcctaatattcaatgtgaggaaaggacagacattcttgcttttcaattgtctacagaagcctactttacccttctgaaaaagcaaacttatatttgcagaaaycccaagtctggttaaccatatttccaaaatctgacttgaaaagtcatt

SEQ ID NO: 429684 - DNA, 553 bp, Homo sapiens
tcaattaaaaaaacaaaagactcctggctgcaggcagagaactaatgaggatgggaggtagggatgagaggaaagaggataaatcaggaagaagatctctgtaaaggacacttaatcaatgagtaycaggccaggtacagtgactcctgcctataatcccagcactttgagagggtgaggtgggaggatcacttgagcccaggaattcaagaccagcctgggcaaatagggagacctcatctctacaaaagataaaaaaattagctgggcatggtggcatgtgtttgtggtcccacatgctcaggaggctgaggcaggaggatcccttgagccagagaggtcgaagcttcagtgagccattatcatgccactgtactccagcctgagtgacagattgagacccagtcttaaaaatcaatcaataccaatgtagagatcctcatacctttatggaatctaaattcagtcccatgacaagttcctaagagacaagctttcctggaagggaagagaagtgtggagggaggagggtcactgatggtaaaaaactgag

SEQ ID NO: 429685 - DNA, 514 bp, Homo sapiens
actgagagccagagagtcaagggtatagattccagccttggtctgaaggcctgagaaccaggagcaccaagggcaggagaggactgatgttccagctcaagcagccacccagtgtgaattcaatctttcttcaccgttttgttctatttgggccctcaatggattagatgatgcccatccacactggggagtgccatctgctttattcagtccaccaactcaaatactaattttttccagaaagaccctcacagacacacccagaaataatgtttaaccagatatctgggcatccaatggcccaatcaagttgacacataaaattagccatcacattgccttatttgaccctccttcatcttcactcttctctctctctgtagactagggcttctccaattcacacagcagaaaacatgtccctacagttcctaactttatttgttacagatccaattaccaagtggaatccatctttctaataattccarattcccaggtagggaattaactg

SEQ ID NO: 429686 - DNA, 619 bp, Homo sapiens
aaacttaccttagaaaacctaaatcatttatagtaggcagaaagcatgcctactccttattccaaagcggagtattatctttatcataataaacagtaagcatgactccctttctctatatctatcctccaaggatgctgtctatacaagcatccttgaaatgataacctgaaatgaaggaagtcccaaaacatgcataaatgtgagaaaccacacaccacttcttctcctgtttggtgaaaaactattttctcctgttttgtcaccaaagagtagaaaataagccaagaaaagagaaagatgactaaatatcaacataagagccaagttgaggtgtaagtgtgtatgtttgatagaaagactacgtgttcaaagttaaaaccaggaattaatgttaagccaggaaattaaagtgaaagtaaatttgggaaataatagtgccatataagtgtgatgaatcactgacatttttattgggcattaacaacaygtttttaaatataatttcccccaaactagaggctacttctttcttggaactgaatgataaatacatgcacataccccttacccaaggcagccatctgttctaagggatcctccaggttactgtccctac

SEQ ID NO: 429687 - DNA, 559 bp, Homo sapiens
tttggcagttttaaaacatagctctaaactatatgatactactcccatcttgaggtgagagctatgtctcttttctttgaatctagatgagtttatgattgactagaccaataaaataaaacaaaattatactttgacatctgaggctaggtcagaaaagaccatcaattttccatctggtcttcgaatgcttgctctggaagaagccaccaccgtgtaagttgacctaccctgagaccaccatcctggagagcccaggtgtaaatgctctgattgacagttccaagtgagttcccagctgacagccagcatctacttccatgggaataagccatcttgtaagccaaagtgagccttcggaggactgcagacctaactgacatctgatagcaaatgtgtgaggcatcctaagcaaaaactgcctacccaaactcttcttgattgctaacaattttgtgggcaaataaatggtggttgtgagccagtacattttggagtaatttcttatrcagcaatagtaatcagagtattcccccaccaaatatttatttttcttgtt

SEQ ID NO: 429688 - DNA, 574 bp, Homo sapiens
tatgcagcaatagtaatcagagtattcccccaccaaatatttatttttcttgttaccctaagctcctgaacagtatcctaaacaccggagaaccctaacaatcatatccaactgtgctttggatgtttgttagataagtttccaacaaaggcacatagaaaacaaaaaaattcatgaaactgaaacagaagtacatagacacatttctgaaaatttargttgattgatttttactttttaaaaagcagtaaataaaatattgttgtttggaatgaacacacggaaagcataaatggactcagggcaaatgcactccagaaaaacatggaagagagcccttatcctcagaccattctcatttttcagactatatggatgacttaaagatgtcttgatcggctgtctctgtatttccctgatgccaaattctgctgcggagaattctcctgaggtacctagtcccctacactttaaatagagtacccacccaggtatcccaaagctcctgtccctactagggtgctacccacaaggaggacacaagactctaacactcatgaaaacaatcatctct

SEQ ID NO: 429689 - DNA, 574 bp, Homo sapiens
tatgcagcaatagtaatcagagtattcccccaccaaatatttatttttcttgttaccctaagctcctgaacagtatcctaaacaccggagaaccctaacaatcatatccaactgtgctttggatgtttgttagataagtttccaacaaaggcacatagaaaacaaaaaaattcatgaaactgaaacagaagtacatagacacatttctgaaaatttaggttgattgatttttactttttaaaaagcartaaataaaatattgttgtttggaatgaacacacggaaagcataaatggactcagggcaaatgcactccagaaaaacatggaagagagcccttatcctcagaccattctcatttttcagactatatggatgacttaaagatgtcttgatcggctgtctctgtatttccctgatgccaaattctgctgcggagaattctcctgaggtacctagtcccctacactttaaatagagtacccacccaggtatcccaaagctcctgtccctactagggtgctacccacaaggaggacacaagactctaacactcatgaaaacaatcatctct

SEQ ID NO: 429690 - DNA, 587 bp, Homo sapiens
gtaaataccactggcatggtccctagcctcatagaaattaaagtcaccaagtcgcctcctggcagagacagatagtcaacaagaagtattacaaatattgtttctccccaaggctgagccccagcctcactcccagcagcttccgcctgctgagttgaaggtacccatgttgtctgagcagctattcaactttttattacactgatggaggtaytgggcaaggtagtagaaagaaaaagaaaagccagaaaatctagaaatgttaatgatatttagagtagaaataacagagctacttctgggaggaaaagagctgctactataagacaggaaacagctctatatactctgggttttgaccaatgttgctgaccacgatggaaaaacaaggactactgaatttatccccctgccatgaacaactagaaaaatggaaaaaacatgaaacaatggctttgtgttttctcaagggcaggcagtcaaaattttggggtttttttgaataaaatgccagatttcctcgaatgtgagctttaatggttggccttgtttgtgttatagttggacagctactagccatcagagat

SEQ ID NO: 429691 - DNA, 474 bp, Homo sapiens
tttcaacagaaatatgttggacagttatttgggttaatcatgaactcaagtccccaaatatctctagttcttgcataagagattccaaaattgaaccaagtaggaaccataaaactaagtgtaacacatgcaaaataaatcattcatttttgtcattgatgaaaagtatattttaatgctattacagtataattattatggcatttattttttgtctcctatcaaatratataatatttttgaattttgcatatttggtcagttttgcttagctttaaggacatttaaatacatttctccaaaaatttcaaacaggtgaaatccacctttatatcaaaacttatactgaaatatttttctcatcagccaatgaggatgcaaaaactgacaacctaagtagagattaatctcaaacaaataatgctagagaaaatccttgtagcattttcagaattaaatcttttgccattttta

SEQ ID NO: 429692 - DNA, 610 bp, Homo sapiens
aaaactctcagcaaaatcggcatacaagaaacacctcaacataataaaagccatctatgacaaacccacagccaacattatactgaatggggaaaagttgaaagcatttcctctgatacctggaacaagataaggatgcctactctcaccactcctcttcaacctagtactagaagccctagccagagcaatcagacaacagaaagaaayaaagggcatccagagctgcccccttctgcgcggtcacgctgagccagcacctgggcctggaaccaggccacagccccccagctttgcccaccacctccctaccatggacgcccgcaaagtgaacgagcttcgggcctttgtgaaaatgtgtaagcaggatccgagcattctgcacaccgaggaaatgcacttcctgagggagtgggtggagagcatgggaggtaaagtaccacctgctactcagaaagctaaatcagaagaaaataccaaggaagaaaaacctgacagtaagaaggtggaggaagacttaaaggcagacgaaccatcaagtgaggaaagtgatctagaaattgataaagaaggtgtgattgaaccagacactgatgctcctcaagaaatg

SEQ ID NO: 429693 - DNA, 610 bp, Homo sapiens
aaaactctcagcaaaatcggcatacaagaaacacctcaacataataaaagccatctatgacaaacccacagccaacattatactgaatggggaaaagttgaaagcatttcctctgatacctggaacaagataaggatgcctactctcaccactcctcttcaacctagtactagaagccctagccagagcaatcagacaacagaaagaaacaaagggcatccagagctgcccccttctgcgcggtcacgctgagccagcacctgggcctggaaccaggccacagccccccagctttgcccaccacctccctaccatggacrcccgcaaagtgaacgagcttcgggcctttgtgaaaatgtgtaagcaggatccgagcattctgcacaccgaggaaatgcacttcctgagggagtgggtggagagcatgggaggtaaagtaccacctgctactcagaaagctaaatcagaagaaaataccaaggaagaaaaacctgacagtaagaaggtggaggaagacttaaaggcagacgaaccatcaagtgaggaaagtgatctagaaattgataaagaaggtgtgattgaaccagacactgatgctcctcaagaaatg

SEQ ID NO: 429694 - DNA, 572 bp, Homo sapiens
acaatagaaattgggactattagaatggggaggtggtgagaggggcaaggattgaaaaactattgtgcactatgctcagtamctgagcaatgggatcattcataccccaaacctcaacatcatgcaatatacccaaataataatactacacatgtaccccctgaatctaaaataaaagttgaaaagaaaaagcatcacagctaggcagaggcaaacaagctcaaaagctggtgacctttataatggaatagcacaatactgggtcaatactgcctctgctttttggaagaatgtccatgtactacgaatagaggctctagtgtcagggaaaatagcatattaataatggtcaatttcttggctctttcttgtcacttttagcaaaatctgtgagggagaaataaacttaataattatcaagtctgcaaactgaaattaaagagaacacagctttaaatctgttctctgcctgtgggctgcaatcaaagttgaaagagagaaccattttgaagcctccaaattacaacagcaaccattgttttcatactttggacaaaagcagtaataagagg

SEQ ID NO: 429695 - DNA, 579 bp, Homo sapiens
tcattacagctgctaaatgacaaggcctaaagagccaggccagtgggagcagtgtcttggcaataccgaagtctcctttttcatacaagagggaaaacttccaaggccaagaaaaagagtggagcatctttttccctcatacaggtcagctagaaaaagccacaagggattaaagatcaaaggaacatttttctttctctgagttgtgaatagctttgggtgagtaataaattgaaaagatttaagggcaaacaaggcccaaaaagaaaaattaaaaatatgttaaagaacaacaaaactcagagagatgaataaaagaatatcctggggataatcatgctgatatgcagcttgaggagctagaccacaaaatgcacataagggccaattcctagggaccccccccsccgccaaaaaaagttatctctagctccagctgctgaccagatactatgctgggtggcctgcagcatcctcaaatttaagaggttcaaaatttaactctagtacttcttctatctagttgtctaaatcaggaattatacttaacctttttcatgatctctgctaccattactt

SEQ ID NO: 429696 - DNA, 564 bp, Homo sapiens
tgggactcagctcagtttctgtatcatatttaaaacagagtatgttgcttatttctaaaattgcatagcacctcaccactaactattttgctgcatagaggtatttcatcactaagagagctatatagagaaactcactcaaatcctgattcatcattgttgatagaacttaactattgtgtcatcatcacctgacatgggctgcagaagctccaaggattgctatagatctcaattgagacttctagtaacagagctagaaaggagccttttaaagtgtagccatgactctggtcattaggtatatgcatgttcaaatattcccttacgtgcttgttttcgctttcataacaatttccagggatgaaaacttagcagattatttttataatgaagagtattcaaattaacaatgtgtatccaccagctaacaagttttaaattccacagaaatcagcatcacaarcatagtaaaatcaagttttcattctttcctcttctgccataatgacttcattcaaggcctagtcccagaccaagtgcatggaaacgatggctcatgtc

SEQ ID NO: 429697 - DNA, 509 bp, Homo sapiens
cagcttacacctgcacacataagtatgtatatggtgatggtaagtgtctgtcttagtccattctcacactgctataaggacatacctgagactgggtaatttataaagcgaagaggtttaattgacccactgttctgcatggctgggaggcctcaggtaacttacaatcatggtggaaggggaagtaaacamttccttcttcacagggtggcaggagagagaagtgacagcaaaggggagaaaaagccccctataaaatcatcagatcttgtgagaattcattcattatcatgagaacagcatgagggtaaccaccccatgattcaattacctcccaccaggtccctcccgtgacatgtgggcattatgggaactataattcaagatgagatttgggtggggatacagccaaaccagatcagtgtcaatgaattcataaaagcaaaattcagaaattcatgttccccctcattttccatcaaagagaacaaaccaagactaggcatggt

SEQ ID NO: 429698 - DNA, 567 bp, Homo sapiens
tttacacattcagggactttagattgaaactgaagtcttttgattccaagtctcatttcctttccactgttgtctttgaaattccaggtgttagcgatttagtactgtacaaagaaattaaaaaaagagttaagatgacagaatacaccttagtttccattcagaaattattatcctgttccaaatcaaaagagagtaaaatgaaataaaaattaactgcaatgtctgtattgttgactggaaaagtttgctataaagttggcggcaggcygcagtggctcatgcctgtaatcccagcactttgcggggctgaggcgggtggatcacttgaggtcaggagttcgagatcagcctggccaagaaggtgaaatcccatctctactaaaatacaaaaattagccaggcctggtgacacgaacctgtaatctcacttactcgagaggctgaggtaggagaatcgtttgaacccaggaggcagaggttgcagtatgctgagatcatgccactgcactccagcctgggcaccagagtgagactccctctcaaaaataaataaataaataaata

SEQ ID NO: 429699 - DNA, 620 bp, Homo sapiens
tggtagcttgtttcacatagctctatatctttcccttcctccagactgaggatcgtctcatattcccttactcttttctccttgatcaatgtcatcaaagtaattcctcactccacctaacttaaatttacagattaattcatttrtgtaagatagctcttgtcttaagtgcagaagcagaaacacaaagcaagtcacataagaatgggatcactgtgtgtattttttccttagatatttttgaatatgtagatgattggatatgatttgaatcatatttgaaacgcttttcttattttatttttatatatacattggctggactgatatgttcccagatagtattccagaagaagtgagggagagaagaaaacatacagtgtggtccaaaagaggcagggtctagaaaaatactgaagaaacttaattatgtggaagaaagatcagcaagcattcagggcctttaactcattctggcaacagctttcatccgtagctacgatgcccacattagctttagcccacatccaagtccctgttattcatctctaattctgacatacattctcatatttaactttgttttgggtgttcaaatggtatttgaaaaaaaaacctaa

SEQ ID NO: 429700 - DNA, 548 bp, Homo sapiens
agggagagaagaaaacatacagtgtggtccaaaagaggcagggtctagaaaaatactgaagaaacttaattatgtggaagaaagatcagcaagcattcagggcctttaactcattctggcaacagctttcatccgtagctacgatgcccacattagctttagcccacatccaagtccctgttattcatctctaattctgacatacattctcatatttaastttgttttgggtgttcaaatggtatttgaaaaaaaaacctaaaaagcaagtaaacttgagtacaattttgatcttctatcttctgttatttctgtatttcactctatttctgggttaaaccactagaatttttttgcatcaaaagtaggaccaagttgatgttttattgatttagaaatgctatgctgtctcagactttacatgctatgctttgacagtctgactgctgggtgctggatggcagcactaagccttcataacactctcggtggtcaaagggttgcagctcttttgttgctgctgtttgcttatcattttttcctgacta

SEQ ID NO: 429701 - DNA, 402 bp, Homo sapiens
accagctgcagtctcagtgaccactgccacagagctccatcttgacctgaggattctagtgccagtcagctctcctacagtaattctgtgttccttactgacgatcttcagtaaacttgctttgccactgccctgcttcctggatccctgggactcatctatcctgagtggcatataagtgccaagcctgtgtcatttaarccttcctgacctagattgacactgttgtgactgtaactctgacccaatgccaccaccagctgatgccaaaacatctttttcctgcttgctcatctcgatgcaaacaactgtggattaatccaagcacaggtgtgcagcctgcatagtacaaagcaggggttctgcttgagcttctcaagcattatctcaactactcctcac

SEQ ID NO: 429702 - DNA, 590 bp, Homo sapiens
tttcttgacttgattattctaacataaacaccaatctagttagaaacatagatgttgttagaatttgccatagtatatgtgctggcatgggcagtgtttaatagtttctcctctgacggtggtgctgttattgttattgatttttcagggagacattcaggtctstatcttgtagtattttgcaagcagcactgattaacatgtacagctgctcttaccatattttcttgtagtacaatgaaattaatgggaaggagaccacctgaggcacattaactaatagttaagagaaaaattttaacctatttgccctccccatttctccaactggatagataataggtttccattaataaaatttactgtgctgcaatgtcatatgcaatgtgaattaccttcctgtcgggaacccggaaagcttagcataacatgcaaaactcccaaatagcaccagattttgttctttttttttttttccctgaattctatctctggtatgccttgtatatgtggagagattttaaatcacctggttttctgttgtaaaaggaaaacattcagattgatgatgatctgaaaatatttccctg

SEQ ID NO: 429703 - DNA, 590 bp, Homo sapiens
tttcttgacttgattattctaacataaacaccaatctagttagaaacatagatgttgttagaatttgccatagtatatgtgctggcatgggcagtgtttaatagtttctcctctgacggtggtgctgttattgttattgatttttcagggagacattcaggtctgtatcttgtagtattttgcaagcagcactgattaacatgtacagctgctcttaccatattttcttgtagtacaatgaaattaatgggaaggagaccacctgaggcacattaactaatagttaagagaaaaattttaacctatttgccctccccatttctccaactggatagataataggtttccattaataaaatttactgtgctgcaatgtcatatgcaatgtgaattaccttcctgtcrggaacccggaaagcttagcataacatgcaaaactcccaaatagcaccagattttgttctttttttttttttccctgaattctatctctggtatgccttgtatatgtggagagattttaaatcacctggttttctgttgtaaaaggaaaacattcagattgatgatgatctgaaaatatttccctg

SEQ ID NO: 429704 - DNA, 574 bp, Homo sapiens
aggcatgcaatgtaaaagttataaatattgatagagtaaatgatcaggcctattaaaatttgaagttggtaaatcgttgtatacatggcttatcataaattaccagtggtatgaagggatactatgataattgctgccttttttatacttccttttacctgagaaccctacttagtcagctgggcattttgcatcattgcctaagggaagaaaaagccagccaaaagcagggaaaacaagaggttaattcttaatttttgaggtttcaaaagtttaggactcaaaaagtgaatataaaatttggataatacaaaatgctcaaagtgatgtaaagaatagtaacattttgccccacctgtctgccaccagggttacctgccagattaggtgaccatttctttgacacaggtagaggaggagggacgaaagaggaatcaggagtgagtagatgctgtggtccctaagaaactaggatctgtggatgtaatgggaacaaacccacagwggtctgaagatcaaagagcagaggacacttttcatggaccttcattttttggagaggaaattcaggctt

SEQ ID NO: 429705 - DNA, 561 bp, Homo sapiens
tataaccaaaaaaaactggagaaaaccaaaatatattccagtaggaaatcagatcaattgtagartattcataaaataaaaaattttacagcagcaaaatacattagctactgctgtatataacaacatgtatgaccttcacaaacaaagtgttgaggaacaaaaaccaattgtttttaaaaaacggaggatacatatagtaaggtaccatttatataaactttgaaaatgttaagctttaaaaatatatagtttttagggatacatatgtaatgaatgtattatgaaaaccaaaatttctggcagaaagtaagaggaatgcactaggaaaaggatacattgtagtttcaattatgttgggaattttctatatactaagtgtatacttaatagtctacatagtatacaaaacatatatagatcaattatttgaatgcatgtgtttaaaaataaaatttaaaatcaatttaaggtagttgtagataataatatacaacagcatgaattgccaaaaaaaaaaactgctaataacttaattctcaatcttcaactcagttcttg

SEQ ID NO: 429706 - DNA, 477 bp, Homo sapiens
gtttccgtcatcactggtagcaaatatttacagaatgtcaacatcacactgtgcatcctcttccggcccgtctctagccagcttcctcgcatcttcgccatcatcggagaggactatgatgagcgtgtgctgacgtccatcatgactgttttatctctcaagtcagtggtggctcgttttgatgctgaagaactaatcacccagagagagctggtttccaggcagrtgagtgacgaccttacagagcaagcagccatctttgggctcatcctggacaacgtgtcctggacacatctggccttcaagaagttgttcacagaagcggtggaagccaaacaggtggctcagcaggaagcagagagggccagaattgtggaaaaggctgagcagcagaaaaaggtggccatcatctctactgagggcgactccaaggaagctgagctgattgccaacgaactggccacctcaggggacagc

SEQ ID NO: 429707 - DNA, 532 bp, Homo sapiens
gcttgaaactttttacagtgcagataaattggaaataaccttaatactcattgagagaaggctaagtctggcatagtaatacaaaggaataccatgtagccattaaaaagactaaagtagttttttctatatatgaatctgtaaagattaattgctaagttaaaaatgtgaaaaaagaaagtataatttcatcttgtttttaagtgtatataagtatacatatgcatataagaaggtatagaaaaatagacacagaactgtaaatagtcactatgcagtggtggagactcactgattttagactttatacatttctgtattcttaactttttacaatgagcctacagtacctttttattttaggaaaattaatttattcattaaaaatgcttcaaaaagaacaggctgcacaatattattttagctcccatttaacttgtagagttaaaatttcatgttaaattctcatatytatagaggagatgatataagaaaacttgaacaaatgtttttaagcaaaattatagttaga

SEQ ID NO: 429708 - DNA, 570 bp, Homo sapiens
tcacttttctattgtgttggaagtcctctcaagtgattttataggccgcccaagtaagatcctgaaatttcctctcctttccccaacgctttgtcatttggggtttgaaatgattatccaaaccacattatggtctctgacctgatgccaaatacagtttgcagttaactgagaccccttctgctgtggttaatctgtagatactaaatttatttgatactggtgtgtccttgaataattctgagtttgtgtagtcgccttgggcagtgcactgtcttcttctgttggagttagcgatagatattaagacatttcttttcaccccatttcatgttgcactgagcctagctgcctagctgatttgtgacaccttagaacctaatccaaggagttctttctartcaagagggatctgtgtggtcccacttcaaagcatccctgatgctgtaaacacacagcattgagggataaataagaagagaagaaaaaaaagtgtcatcaagaagcaagcacaaaataaaagggaacaaaatcgaaaacacaaatagtaagtggtaagaagggctgaag

SEQ ID NO: 429709 - DNA, 609 bp, Homo sapiens
aattaaaatctgtgactctcatatgtatttttaaactgagagtaaaacatttacacaagtctaaatacttgtgaaatatgtaatctctaacatattgtaaatactgaaattttaaattataaatttgaaatataacatttccaaacttgtcaatagtaatttgatacccaccatcattcattgaaaaatamatgagaagggtcttcttaatggtcagaaatgtaacattattcatttttctccttatactctaattattattctgcttttcccaaagaatttttcctagtataatacattttttgctttaatatttattgttattcaagctatcacactttcctgcatacacacacacacacacacacacatcaaagtgtttctaacaattttatttttatttatttttatttttggagactcaagagctctaaatgttaaagagaaaaagactttccacagtattgtaagtattactaatgcattattggctaaaacataataaatatacttaatagataataaacataagacaaattttattggaaatgtatttcttaatgaggcatataaagctttcattcttcaatcagtatgtgtaaccatggt

SEQ ID NO: 429710 - DNA, 621 bp, Homo sapiens
ataaatacttttgttttgtttaaagatgctaagtttggggataatttgttacacagcaataggtaaccaatgcaacctctgaatttatatctccagccagacatctccactgagctccagacttgtatatccaactgcctactctcacctctacttagatgtctaataaacatcttgatttcaatacattcctgatggttaacattaggtatcaacttgactggattgaggaatgcctaaaaggctggtgaatcattgttcctgggtatgtctgtgaggatgtttcgagaggaaattgacatttgagtcagcggactgagagaaggaagatccaccctcaatgtgtgtgggcaccatccaatcagctgccagcacagctagaacaaaagagccaaaagaatggggataagcagctgtggagtctcttactgtctctcccttcccatgccagatgcttactttctctcctcccrcccttggacatcagacttcaggttctctgaccttttgtactctgggatttgcaccagcagcctcccagcggctcttgggcctttggcctcagactgaagactacactgtgggcttccctgcttttgaggcttttggacttggactgag

SEQ ID NO: 429711 - DNA, 388 bp, Homo sapiens
tcctgtctaccacagccatattgaatgataaggacaaaacaggacatacagctaaaggctgggaaggaaagcaggccctggtcacagagaaagaaatgaggaataagagaaggaaactggtagacaatgtgtctcccgtctrctactaccttggattgattctcccagaagaactgactgctgagaaagaaagaatggagttgcattgtccctcaacacttacggagttggggtagccatgtaaggcagccagcaagagtctggcatggaccaaaggggtaaaagaagtgtgtttaacatgtgtaggaaaaatatacctttccatcccatagctagagaacagggctggtgagcagtccattccctgtgctttgaagtctaggcttga

SEQ ID NO: 429712 - DNA, 598 bp, Homo sapiens
ttgttttcgttcaagtcttaaacatataatgttttggatccagatcatgtgttttacacactggttattacctaatgaataaaaacaatgatgtctgattctaagatggtctctcccttattgatgacaagaaaaatcttctcagtaatcttatattgtccattgagataaatatgtagggtataatttcactggtcacacgaattatttaaagcatgacatgaattagtaaacgtgtattttgtcatcagcatcatcagcgccatcactttgtacaccgttattgtcataattaccactgytgtcattgccaagaagttttccttttcttttttctcatcttcctcctccagtcacaaaaatcatgctatcaagttttgccaaaaaaatccttaatatctactttaagaagcagttagtaacagaaaacattgttttataaattgatgtgttctgctgaaaaattttaaaagacatgttcccttaaatagctaatgcataaactctctgtactagttttctgttgctgttagtaccacaaactctgtggcttaaaacaacatatacctattgtctcacagtttctgtgaattaggag

SEQ ID NO: 429713 - DNA, 547 bp, Homo sapiens
cccccttctccagcccctggtaaccaccattgtactctctgcctctgtgaatgtaactttttaaaatttcacatatatgtgagatcagcatattatattctggtaatgattcaatagagaggggaaaaatttccatgtaagagagagagggctgggcgcggtggctcacgcctgtaatcccagcacttttggcggccraggcgggtggattgcttgaggtcacgagttggagaccagcctgaccaacatagtgaaactcatctctactaaaaatacaaaaattagctgggcgtagtggtgggcacctgtagtcccagatactcgggaggctgaggcaggagaatcgcttgaacctgggaggcagaggttgcagtgagccaagattgtgccactgcactccagcctgggcaacaactatgtcttaaaaaaaaaaaaaagagagagagagagagggaacaaatcattgaaacaatgttcctgaatgagtgaaagggaataggagtggtacagagattggctttagctggaaataacaagagaaacactc

SEQ ID NO: 429714 - DNA, 486 bp, Homo sapiens
ggaatctgtgaaacatcaaagggcaaatgcttggtaaatggctgatacatgtgtctgaaactccaaagaaaggtctgtactgtatttgagaatcattaacacttaagttaatattgaattcacaagtggttgcttctctccctgtttaaccaaaacactcatattgccaagagatagttccagctaccctgcttttctgtcaggtcgtcctttgtgccaggttccatcttgttcagggacataacttgtgctatttccttggctgaaacattggccctttgccttgacattactacctcctttcttccttaaagcttaacttaaaatccacttcttaataaaggcatttcctaatgcattcaaaataaawactgttgttttttcttaaatcatctcccaacatcctttactttgtttgcgtattgcttttggtaactgcaatttttaaatgtgtttctcagtgaattcttttggtctgtttcccct

SEQ ID NO: 429715 - DNA, 610 bp, Homo sapiens
tttcccatgacaatatgccacggcatgagcatctctctgtttcaaaaaaagaaagaaaaccacattatcatttttaatggctatatataccatgatttatctaggcacctattgatgagtatttaggttgtgttccaatttttcactattatcaactatgtggtaatgtttttggatgtgtacacatttgcactgattacatagtagctcagtttgcaagtctactgaaattaaaaraaaaaaaggattggtttaattcaataacttttttttcccccccagaagatatttagttaaaggattggctcatagaaagtctttcctagtctgatttttgggactgctttctgccagaagttgcccttcagtgtcctgttggggctgccttagtcagtcatcttcctaggaccagggcatttcgcctgggttgtgtgagtggcttaatgggaaagaatacatgactgtctcccaagtttgatgattgggacagtctgccacagctgctggagccaacacaaggactctcatcttcaatggacacctcacttgtggcttagttttagtggatgcagaagccctgctccagcatcttggtcatgcagtagtgtgg

SEQ ID NO: 429716 - DNA, 555 bp, Homo sapiens
aagcacacagtagaaactaaagttatttttcattaaaaagtgcaatttatattagcaaataatgggtttattgatattttaagtgaattaataaaaatttttacatttctcaatgttaatagattacaacaagtattagcaggtattaccttcataaataaaagctcttcgatcatttttaaggccataaaggggtcctcagaccaaaatgtttgagaaccactgtcactggttcaggaagagactaaaaagaggaaagaaagttaggaagatggttttgtaggcatgaatgcctgttttagtayacctatagagggaatgaatcacatttgagacaatatgaattaaggacattaacatccctaaatattaatagctaaagatttgtggtatctctcttattatatattcaaaataaaacaacattaagccatagaataaatgtgatgaaatccaacatatctctgagattttctgatttcaatgatctttttgaaatatcaagtaacacaaccttccacccacaccatacatttttagattctcttgttttga

SEQ ID NO: 429717 - DNA, 592 bp, Homo sapiens
acctttcttgaaaaggattctactatgaaatccaaatgtccagcttcttaacactgaaacacgtatatacaaacacacataaatatgtatatacgtacttacacatatatgcttatatatctatatatattgtatctatatttcaccactttccttcaaagtaatttagtatatccataacccaaaacaaaacaaaaagtccaaattctaaatataatagaacaaaaattaccattgggtaaatcctattcatttgtagaaatttatctgagggatgatacagtaaagaaaaacatattaaaaaaattcctgtcatatttttattctaactraaaaaaatcatgaactaaacatttgcataatgcactaaattactattttagacattaatttgtacactttgcacatatattttataagcttcatattagggactaaaacttactgacaagcacaaacaaaagcaactttctcaaacacacagcattttctagagccctgaaatagttttatttcatgaaaggaaagctttcaactacaaagctgtgaaccagctaaggctaaatttcagtttcatcagaagcccatcctt

SEQ ID NO: 429718 - DNA, 606 bp, Homo sapiens
ggcagcattttcctacctcacggtgatgaatatgtaggagaatgtgtgcctcagtatccttagaccccagttatacaaaataaatataattttaacagcgtacctcattagactgctaaagtattaaccagactttaatttctgaacatttcttagcatgcattttaamttgacacatttttaacattatctttctgcattagattaatgtaatgatctctgtttttcatgtaaagctaatattttgcctagtttaaccttttaaaaaatgatttaagtcagggacaatcacaagatgagacttagaacttatgaagtctgagatgtattttctgaagtgataatggaggggcaccccctggctaagtttcttaaaacaacaatatcgagaaaaggtagatttggagtatattttattcttacaacaatggctcacaacaaaatcaaaataacttggcaactctaaggaaacacattttgtgtaatcaaagttaaaaagcaacataaatgcatgtagctttctttaattagattcaaggtctgcatgtctctctctctctccctctctctctttttctcagatccctccctgaatcagtagtagaa

SEQ ID NO: 429719 - DNA, 616 bp, Homo sapiens
gagactatttggcccacaaaactaaaaatatttactatctggtcctctacagaaaacatttgccaacctctgccctatagcaagaagcatagtacttcatatatagtaggcgttcaatcattttaaaaaattacttgtttttactctacttctacaaaatgttgaggcaattataataaatatagagattaaaaacaaccagtcacaaaaggccacatattatatgacctatgtatatgaactattcagaacaggtaaacatgtagaaacagaaagtagattagtagtttcccagggctgggagaagtggggaaggaagaggagggaagaaaagagtgacggctaatgggtaactgtttttatttgggactgacgaaagtgttttaaaattgattggagtaatagatgcatagctttataaatatactaaaatcactgaattacatgctttagatagatgagttatacggcatgtggattatatccccaaaaaagctgctattgagaaaaacaaaaagataacagccaaataactaaagkatgcttttgccttggtgatggggatttaggtttagccgagagaaaaagaattttctctattagaaggtccagttac

SEQ ID NO: 429720 - DNA, 607 bp, Homo sapiens
gtaaaacatggtcaagctgctgctatattttccagatggtaaggtgtctccctgttaaatagaagaaatgaacaggagaagaaacaaaatggaaaatggcagaaaaagctatgttaaagagaagaaaaaaatactaagagagagaaaaagtaaagtatggaagaaaagaagtggaaaaaataaaagaaaatgcaaatggtattaatgtggtatttcagtctttcaacagtaaagtttatcacaaccatgcaaccagaaggtcctcactttgctaattctaatacgcagaattacctttcaaaatcaatggatatgttttaatttaggaactcaacaaaagttatgacattttgtcctcagaagtaaagagctgaaattctggattacttgtagatttttgaatttatggcctaaatcagaaataccactggcctctagaaagttggaaatgcaatgagactagctgaggcatgttcttcawcttcagtctttaagcacccattttctgatgtgaggcttttttttattaaataaaaaaactattattacttcaaggtattctctatacgatgtttttctttatcaattttatgcagtctcaaaattg

SEQ ID NO: 429721 - DNA, 592 bp, Homo sapiens
acctttcttgaaaaggattctactatgaaatccaaatgtccagcttcttaacactgaaacacgtatatacaaacacacataaatatgtatatacgtacttacacatatatgcttatatatctayatatattgtatctatatttcaccactttccttcaaagtaatttagtatatccataacccaaaacaaaacaaaaagtccaaattctaaatataatagaacaaaaattaccattgggtaaatcctattcatttgtagaaatttatctgagggatgatacagtaaagaaaaacatattaaaaaaattcctgtcatatttttattctaactgaaaaaaatcatgaactaaacatttgcataatgcactaaattactattttagacattaatttgtacactttgcacatatattttataagcttcatattagggactaaaacttactgacaagcacaaacaaaagcaactttctcaaacacacagcattttctagagccctgaaatagttttatttcatgaaaggaaagctttcaactacaaagctgtgaaccagctaaggctaaatttcagtttcatcagaagcccatcctt

SEQ ID NO: 429722 - DNA, 592 bp, Homo sapiens
acctttcttgaaaaggattctactatgaaatccaaatgtccagcttcttaacactgaaacacgtatatacaaacacacataaatatgtatatacgtacttacacatatatgcttatatatctatatatattgtatctatatttcaccactttccttcaaagtaatttagtatatccataacccaaaacamaacaaaaagtccaaattctaaatataatagaacaaaaattaccattgggtaaatcctattcatttgtagaaatttatctgagggatgatacagtaaagaaaaacatattaaaaaaattcctgtcatatttttattctaactgaaaaaaatcatgaactaaacatttgcataatgcactaaattactattttagacattaatttgtacactttgcacatatattttataagcttcatattagggactaaaacttactgacaagcacaaacaaaagcaactttctcaaacacacagcattttctagagccctgaaatagttttatttcatgaaaggaaagctttcaactacaaagctgtgaaccagctaaggctaaatttcagtttcatcagaagcccatcctt

SEQ ID NO: 429723 - DNA, 444 bp, Homo sapiens
attggaagtaaacagattaagaaaaattgctctaagaggttagtgccctttgacctagtgaactttaggccaaaatgtgcctgtttttacatatgaaastagtaagtatttctaggatacaaaattgccattaaggtagtatgaaagaggagggacttaggtaacagagatatcggcttcctgattccagattcacctcttcttagtcgcaagaccctctctaagcctcagtttccaggtctacaaagtagagataatattgacctcaccacaacgttgttagcgatgttaacacctagaacttaaaatgtgctcattatatgatcactcctttctgcctggaaactgacagctaaattgcttcttccctctcttttccttcaccttttcacaccacagagaggaaaacaacctatgaggcactttgtacaaatgaccagcgat

SEQ ID NO: 429724 - DNA, 472 bp, Homo sapiens
cggggggaacaaagctgagatacagaaatattccttgttcttttcccatctgagagcattaacgatgagtctagttactcaggatacttactggaatcactgtttccaagcctatagacaaaactgaagactaaagggaatgtgtcagtcagaactatttaatcatcaacttattttccccttcacataatataagccaccatatctaaagaggctcttgcaaacaaactcacactttcttggtctggcacatgagcatcccaaacactgaggacagcccaagtattagasacctttaaaaggtcttaaagttacatgattcagataggtaagcaatatatctacagtatgtcagaaaattggaagataataagtcatatattttcccttatcccaaattcaattttccaaaatcaaaataaacagatttagttattatagttttcataaaattagtcaaactataataata

SEQ ID NO: 429725 - DNA, 564 bp, Homo sapiens
ggaggatgtgtgtgtggaagtgagtgggtattttatagggcaggctaggaaggcttcactgaaaaggtgtcactcaagcagataccataaagtaagggaacgagccacaatgaattttccaaaaggcagaaacagcaagtgcaaagtttctggtgtgttcaaagaagagcaaagagtgtggctagaaaagaatgactgaagggtagagtaggacataatgcgatcagagagggggaccagatcatacaggtctctataggccatggtaagaactttggcttttactctgagaaggatggaaaaccacccacgggttttgagcagcatgtcataatcagaataacattttaaaaagaccactctggttcctgtgttaaaaatataatacacaggagtaagggaggaaacactaataggctattgmagtagtcttgataagagactgtagtgtcttcaactagggtggcagcagtggagatggtattaagtagtccgaatctggatatattatgaatataaagctgacaggatatgctaatggattggaagtgaaatatggaagaa

SEQ ID NO: 429726 - DNA, 569 bp, Homo sapiens
ggtaggccacagattcattcattcatttattcagcatctatgtattgagagtcagttgtgagtgargccctatttttatactaaggaaacatctgtgaacaatacagaaaaaaacttacctctgtgaaacttgtattctaacaggagagaaataagcaataaacaattacaaaaataaataggatgttagaaattttatggaatcaagactgcataaaggataactgaacacatgcatctaatttcattcctcctaaaacccatgaaaactatagtctttctttctttccaataaaatctacaaggttaagcagaagaagtaagatatcaacagcaagaacattgtgaaagttaggaagcagatgaactagtgctaattgccatagcagatctgacagagccaaatcccaagccagaaacttggaaaagtaagtgtcttactccattttctgctgctttaacagaatatttgagactgggtaatttataaataatagacatttatttggctcacagttctggaggctgtgaagtccaagagcatgacactggcatctagtgaaggcctt

SEQ ID NO: 429727 - DNA, 569 bp, Homo sapiens
ggtaggccacagattcattcattcatttattcagcatctatgtattgagagtcagttgtgagtgaagccctatttttatactaaggaaacatctgtgaacaatacagaaaaaaacttacctctgtgaaacttgtattctaacaggagagaaataagcaataaacaattacaaaaataaataggatgttagaaattttatggaatcaagactgcataaaggataactgaacacatgcatctaatttcattcctcctaaaacccatgaaaactatagtctttctttctttccaataaaatctacaaggttaagcagaagaagtaagatatcaacagcaagaacattgtgaaagttargaagcagatgaactagtgctaattgccatagcagatctgacagagccaaatcccaagccagaaacttggaaaagtaagtgtcttactccattttctgctgctttaacagaatatttgagactgggtaatttataaataatagacatttatttggctcacagttctggaggctgtgaagtccaagagcatgacactggcatctagtgaaggcctt

SEQ ID NO: 429728 - DNA, 569 bp, Homo sapiens
ccaaactcctgcaataactcactcctgcaataatggcattaaccccttcatgaaggctgagccctcttggcttaatcacctcttaaaggtcccatctctcagcactgttaccatggcagttaaatttcaccatgagtttttgaggggatattcaaaccacagtaattgrtaacaactagatttgtagcacagagaaactcactgtaccaagtacctctaggaccggggtgaaggaagtactactaaaaaaggaagactaggtgacaaatgtataagaaacagagtccctacaccccttcattcattccatgacattagtcaactatctcttgcctaccccaacaaaacttttattctctggagggtaaaatcatggctctctggactggcagacaacagccacagttgagagtatgggtactttactctttcatggagtaaaaaaacaattagcataaaagatcaggaatcaaaatggcttctgattgcaccagaattaccttcaaattcagagggaagatgatttccaataagttcctagaattccacacactactgtgttgattaac

SEQ ID NO: 429729 - DNA, 569 bp, Homo sapiens
ccaaactcctgcaataactcactcctgcaataatggcattaaccccttcatgaaggctgagccctcttggcttaatcacctcttaaaggtcccatctctcagcactgttaccatggcagttaaatttcaccatgagtttttgaggggatattcaaaccacagtaattgataacaactagatttgtagcacagagaaactcactgtaccaagtacctctaggacyggggtgaaggaagtactactaaaaaaggaagactaggtgacaaatgtataagaaacagagtccctacaccccttcattcattccatgacattagtcaactatctcttgcctaccccaacaaaacttttattctctggagggtaaaatcatggctctctggactggcagacaacagccacagttgagagtatgggtactttactctttcatggagtaaaaaaacaattagcataaaagatcaggaatcaaaatggcttctgattgcaccagaattaccttcaaattcagagggaagatgatttccaataagttcctagaattccacacactactgtgttgattaac

SEQ ID NO: 429730 - DNA, 569 bp, Homo sapiens
ccaaactcctgcaataactcactcctgcaataatggcattaaccccttcatgaaggctgagccctcttggcttaatcacctcttaaaggtcccatctctcagcactgttaccatggcagttaaatttcaccatgagtttttgaggggatattcaaaccacagtaattgataacaactagatttgtagcacagagaaactcactgtaccaagtacctctaggaccggggtgaaggaagtactrctaaaaaaggaagactaggtgacaaatgtataagaaacagagtccctacaccccttcattcattccatgacattagtcaactatctcttgcctaccccaacaaaacttttattctctggagggtaaaatcatggctctctggactggcagacaacagccacagttgagagtatgggtactttactctttcatggagtaaaaaaacaattagcataaaagatcaggaatcaaaatggcttctgattgcaccagaattaccttcaaattcagagggaagatgatttccaataagttcctagaattccacacactactgtgttgattaac

SEQ ID NO: 429731 - DNA, 578 bp, Homo sapiens
gaagattctgcctaccacaaaatgatttccatagaagtcaaaatagtggtcacttctggaagggagggaataaggaaatttaattggatagggaaataagaggggcttctaaggttctggaacatcctaattttaacctgggttggggggggggacatggtagtataytttcttatttttccttaaatggtatacatatgctttttacattcttttgtgtgtgtaatatatctcacaaaaagaaaaaaattcaatgcaagacaaaatggcttatgactacgaatgtggcatgtatttgattctaggatttttagagctagtgtatgtataaggcaggcatgttcctttgtgaaagaggtggttaggattgcccaagtgtttttgctaacactgggcaggctcttcttgcacaccaagaacatctgtggaatgagagctcatcatatgtgccacctaccatctccggtattcaaattaaatgggaaagggaaaactggaatgtgattaagaaactatagtgtatcagaaaacagtggtccacattgaagatgcttctggctgctgcttgggcagtcaca

SEQ ID NO: 429732 - DNA, 578 bp, Homo sapiens
gaagattctgcctaccacaaaatgatttccatagaagtcaaaatagtggtcacttctggaagggagggaataaggaaatttaattggatagggaaataagaggggcttctaaggttctggaacatcctaattttaacctgggttggggggggggacatggtagtatactttcttatttttccttaaatggtatacatatgctttttacattcttttgtgtgtgtaatatatctcacaaaaagaaaaaaattcaatgcaagacaaaatggcttatgactacgaatgtggcatgtatttgattctaggatttttagagctagtgtatgtataaggcaggcatgttcmtttgtgaaagaggtggttaggattgcccaagtgtttttgctaacactgggcaggctcttcttgcacaccaagaacatctgtggaatgagagctcatcatatgtgccacctaccatctccggtattcaaattaaatgggaaagggaaaactggaatgtgattaagaaactatagtgtatcagaaaacagtggtccacattgaagatgcttctggctgctgcttgggcagtcaca

SEQ ID NO: 429733 - DNA, 578 bp, Homo sapiens
gaagattctgcctaccacaaaatgatttccatagaagtcaaaatagtggtcacttctggaagggagggaataaggaaatttaattggatagggaaataagaggggcttctaaggttctggaacatcctaattttaacctgggttggggggggggacatggtagtatactttcttatttttccttaaatggtatacatatgctttttacattcttttgtgtgtgtaatatatctcacaaaaagaaaaaaattcaatgcaagacaaaatggcttatgactacgaatgtggcatgtatttgattctaggatttttagagctagtgtatgtataaggcaggcatgttcctttgtgaaagaggtggttaggattgcccaagtgtttttgctaacactgggcaggctcttcttgcacaccaagaacatctgtggaatgagagctcatcatatgtgccacctaccatctccggtattcraattaaatgggaaagggaaaactggaatgtgattaagaaactatagtgtatcagaaaacagtggtccacattgaagatgcttctggctgctgcttgggcagtcaca

SEQ ID NO: 429734 - DNA, 466 bp, Homo sapiens
cacggcttctttctttgaacatatttggctgctgctttctgaccagattggctatttttggcttctggactactcccagatcccagagaagtaatttgaatcaacacatttgttgaaaaggtaagcgagcacttttaaaagaatatagaaactcttgtgggtccttacttttatgttacctttcaagatcttcctactccatattacataatagttagttttatttttctcctcattgttttttttctggttgtcayataaattcttaaaactgtttgctgaatttttctgtctctgtatcttcataaattaacctgtagctttgtctctctcttgtccttactcagagtcctcaccagaaaatcattaatgctcttggagaagagaggggagtaaggaaggtgtgacaaaactgatgcaagggtcaagggcacaatcctcttttctttttcttttggaagatatt

SEQ ID NO: 429735 - DNA, 459 bp, Homo sapiens
ggaagctgaggtgggaggatcacttgagcccaggaggccaaggctgcagtgagctatggtcttaccactctactccatcctgggtgacagagtgagaccctgtctataaaaaataaataaatgaataaataaataagaaaaaaagaaaatctcaaatcsaatgataaaagacaattgatagatgctattacttagaattatctgaaaatgatttttaaaggagtgtaataaaaattcctcaacaaacaattacaaacatgtttgggacaaaaggaaaaaagagaaagtctcagcaaataaatagaagatataaagaaaaaaacaaatggacattttagaattgaaaaaaatgcaataacttattttaaaaactcgatagataggctcaacaacagaatagagggaaaggattaaagaatcagtgaacttgattggaaattaccccgatcccaacaacac

SEQ ID NO: 429736 - DNA, 575 bp, Homo sapiens
tatgatcagtctattaaatcatgataggtgtaacagaatttattcatcaaatgctggtatactggaatgaaggaacattcttttgaaccttaaaatgggtaaagaggcaagatggtattaacactaaagtgttagtggttaatggtaattttcacatgatgctgccatgtgaaaatagaaaagattagttcaacaaattcaggtaaacttaggcacaaaaggtctattaatgaacatcaagagaaataagagatgcttgaagaacatctctgaactctggatgtgacatcaagggaagcaactgtgccgttttcctttttcttcaggtattgggagactttttctgtaaggggccagacagcaaatattttaggcttggagatcattcactctctgtytattcaactttgccatagaagtgtgcttagcgtgaggtagccatataaaatatctaaataagccggcatgcacccatagtcgcaggtacttgggaggcagcagagtggaggccaacctgggcaacatagcaaaaccctgtgtcttaaaaaaaattttttaatttaaaaaagtaggta

SEQ ID NO: 429737 - DNA, 573 bp, Homo sapiens
ttttccatattgagaaactattccttccaaaaaaaaaatctagcctaaaagcagggtggtggcggcaggaacagaggtagagggaaagatagaaaaagggagggggaaatgtagattgaaagagactgtactggtccattctcacactgctaataaagacatacctgaractgggtgatttataaaggaaagaggtttaattgactcacagttcagcatggctggggaggcttcaggaaacttacaatcatggcagaaggggaagcaaacatactcttcttcacatggcagcaacaaggagaagtgccaagaaaaagggggaaaaggcccttaaaaaaccatcagatctcatgagaactcattcactatcatcagaacagcatgagggtaaccacctccatgattaaattacctcccaccaggtccctcccatgacatcccacaacacgtggagattatgggaactacagttcaaggtgagatttgggtggggacacagccaaaccatatcagagacaaatcacaatgtatgccgttatttggatcctggttcaatttaaaaattgaaataaa

SEQ ID NO: 429738 - DNA, 553 bp, Homo sapiens
atacctattattctttctacaagattaaattttcccataaaataaaagaaaaaaccttctccaatacctagcctaaatattgcaggctttatttctgtttcatgtargtctggtcttctttctgcatttgctttatcctttctctctgcagaccagctttctcttccttgctagacacagggccacatttgtgccccctttacgtggtctatgagttcaagagctttgtgccaactatgaggtgtctctacgtccaaattccaaattccttggacagaaaatatggtttgcccagtttgggtcaactcgccaattatctatagccaaaggagagagcatgactgtcctttcagcaggggctaagggaagacacattctgcttcaggcagaacatttcagctaatgtgccacagggtacagatgtaccaagctcagagtcctcctgggattactaagcagaacctgtagtgacctaagcccccaggtgaattgccttcagccatgaaaagactcatccactcaccccagggtgcctacacatcccatggttttc

SEQ ID NO: 429739 - DNA, 574 bp, Homo sapiens
cagtcttggttttatgttttaagcaaaatttccaaatgaataaccagaacatgaaaaaggcaatttgaaatcagtgctgcgattgggaccattatgctccctgaagtgattaaaagtttggaagtagaattgcacacagtcaggaaagtttttatacttctgagacaatgtccccaagatccaattatgccaaaagcactccagaaagacttcttttcctccttcctttcttcctgttggaactttccacacttagactattgagggatgttagagaaagcattttcatgtcctttttgaatttctgcaaacttcaaaatgctaaaaattcttgaaaagaagctggagagctaaatgttatttaggaatgccctctgtccatgcactatgggaccagcagctgtgggcacagtgattccaaatcaagtgctcaggggcatggctgtggacattttgggggaacttctatataaagccctggggagaccttaatggggagtcagtctctgacaagtccttgaacaatgggggagaatwtacacatgaagagacaagcaagggatgggaggaagga

SEQ ID NO: 429740 - DNA, 591 bp, Homo sapiens
gggaggtgtcagtagaaaaatggagttctaaaggccgggcacggtggttcatgcttgtaatccccgcactttgggaggccaaggcgggcagatcacctgaggttgggagttcgagacccgcctggccaacatagtgaaacaccgtctctactaaaaatacaaaaaattagttgggtgtggcrgcgggcacctgtaatcccagctacttgggaggctgaggcaggagaatcacttgaacccaggaggcggaggttgcagtgagcagagatcatgccattgcacgccagcccacgtgacagtatgagactctgtctcaaaagagaaaaaagaaaaatggagttcttgctgggcgtggtgctcatgcctgtaatcccagcactttgggagggtgaggcaggaggttctcttcaggccaagagtttgagaccagcatgggcaacagagtgagaccccccactccatctctacaaaaacatttttaaaagttaaccaggtgtagtggtgcacacatgtagtcccagatactcgggactgaggcagagggatcgcttgagcccagaagttcaaggctgtggtaagctgattgtgcca

SEQ ID NO: 429741 - DNA, 510 bp, Homo sapiens
cagacagagtccctacagatcctgacctgacctgtgtatggaagacgtcaggggcagatggatattcattcagtcttttagtctgacctttacatttaaaagcaaagaggaaaacagccctagttatagggctgggcctcagatccaacttaaaggcttaccagtggaataagaacatctgcccccgttccttagacatatgttttggattttattgcactttctctcttcatctgaggacagatgtgatagctctttccttctgaggatgttgtgagaatgacagtacataaggtgcctagtacataatttttcatttttttaatwtttttgaaacaaggtcttgctgtctcacccattctggagtgcagtggtatgatcatgcctcactgcatcctcaacatcctgggctcaagcagtcctcccacctcagcctcccgagtagctgtggaactggcaaaaggatctagttgctcactgcttgtggaatgaagtcaaaataataacgag

SEQ ID NO: 429742 - DNA, 510 bp, Homo sapiens
cagacagagtccctacagatcctgacctgacctgtgtatggaagacgtcaggggcagatggatattcattcagtcttttagtctgacctttacatttaaaagcaaagaggaaaacagccctagttatagggctgggcctcagatccaacttaaaggcttaccagtggaataagaacatctgcccccgttccttagacatatgttttggattttattgcactttctctcttcatctgaggacagatgtgatagctctttccttctgaggatgttgtgagaatgacagtacataaggtgcctagtacataatttttcatttttttaatttttttgaaacaaggtcttgctgtctcacccattctggagtgcagtggtatgatcatgsctcactgcatcctcaacatcctgggctcaagcagtcctcccacctcagcctcccgagtagctgtggaactggcaaaaggatctagttgctcactgcttgtggaatgaagtcaaaataataacgag

SEQ ID NO: 429743 - DNA, 510 bp, Homo sapiens
cagacagagtccctacagatcctgacctgacctgtgtatggaagacgtcaggggcagatggatattcattcagtcttttagtctgacctttacatttaaaagcaaagaggaaaacagccctagttatagggctgggcctcagatccaacttaaaggcttaccagtggaataagaacatctgcccccgttccttagacatatgttttggattttattgcactttctctcttcatctgaggacagatgtgatagctctttccttctgaggatgttgtgagaatgacagtacataaggtgcctagtacataatttttcatttttttaatttttttgaaacaaggtcttgctgtctcacccattctggagtgcagtggtatgatcatgcctcactgcatcctcaacmtcctgggctcaagcagtcctcccacctcagcctcccgagtagctgtggaactggcaaaaggatctagttgctcactgcttgtggaatgaagtcaaaataataacgag

SEQ ID NO: 429744 - DNA, 481 bp, Homo sapiens
gggcgagtgaggaactctctccgccccaagatcttctgggcggtgactcgggtttgaggccttggtctgtcacccaccgacacgggccccctcttcggcactgaccccttcgcttgcctctgctgcttgtcagaaaagggtgcgatgcccccgcccaggatcgtcgcgaggtttagatgggatttcggatacgcagccgccctaccgcggccctagttagttattgttacttgttacttgacccgcacttggttcataacgaccttggtggcggtgagcactgacggtccccacagcccgcgtggtgggtcctggactcgggcaggagacattaaaaatcagtaaaccctgtcccccgggggctggcaggcttgaggagagraattcttgctctacaagaactaaaccaaggatggataggaaactgttaagtgcttattgattgcttcccgcttgctggccttttgagtgcacgccgact

SEQ ID NO: 429745 - DNA, 591 bp, Homo sapiens
tattcctatcctttggctcccaagtccacatctaagtgattcgtcctaaggatgtatttccaaaattgtttttaaatcttgtttcaggccaggagcggtagctcacgcctgtaatccctgcactttgggaggcygaggtgggtagatcacctgaggtcaggagtttgagaccagcctggccaacatggcaaaaccctgtctctgctaaaaatacaaaatttagccacgtgtggtggcggacacctgtaatcccacctactcggaaggctgaggcaggaaaattgcttgaacccaggaggcagaggttgtagtgagccaagatgatgccattgcactccagcctgggcaacagagtgagactgtctcaaaaaataagtaaataaataaatctttttttaaataaaggttgctagtattatgcatgattacataaagtggggcctacccaggtcccaaatgacaggtggatgagcaaactttggcccccatttgaaagaatactatgataagcttaaaaatgacaaaatgaaattcgtcaaaatatagaaaagtatatatgaaagaatgtccagggaaaatattggaaaccca

SEQ ID NO: 429746 - DNA, 643 bp, Homo sapiens
atgatccttggcatgtatttgaagacatgaaacaactctgaccacacaaaaaagtaaacaacaaatctacaataggtacaaattatatacatttatttttaataattttaaataacactcttgtataaattctttcatatattcaaatcatacacaaatttagaaatgcatgatgaagcctagtacagcatatgtatgagacacattttttaagtttgtgttagaattttagtgacataaatacaagtttaatgtttcagaaacattccctaattgctcggcctataatttaatgtattatagagtgcttatgcctagcattacaacttgactttaaatcatttagcttttggactaacttagatctgaagccctgggcttactttctagggctgctgctgcagyaacaagtaacaattcctacccacatagcccaaaatataggaaccagggatgttcattataagtggtgttatgttcaccaagcatcctaaaaagtgtaggaccaaggtgaatgatctaataaccccattccaatcaaagctgtcaagaggaagtattgttgctttagttttctactcccaaaacagcacttaaagggttaaatatcctgatggtactcagctgaccaaaataaactagt

SEQ ID NO: 429747 - DNA, 527 bp, Homo sapiens
aaaagttagagaaaggccttacttatagagcagctgcctgtagatgtcactgctgaacaagggcagcgaagacattctttagtggcatcaggactctgataaaatccttctttacattcttcacagtgatttcctttgctattttcctggcagtttaaacaagcacctaaaagaagcaaattatttttaaaagttaaagatttaccttgaaagccaagtaactttcaaaaatcatgcctgcaacaaaaagatcataagaaaaagaaaaactaatagggattggatagagttaatttctaccccacctgatttctatactgccatgtctatgaattgtgtcccctactagattgtaagctccttagggaaaggtgggatacaagattagtggctcaataaatccttgctggttaatctgattacataccaaaagtagcaactatacgccaaggagaaaayaaaaacaatccaaatacatattaatagaagaatagataaattgtggcattttcataaatgaactaatc

SEQ ID NO: 429748 - DNA, 654 bp, Homo sapiens
tcccatttgctactggttcctttgtcctcagtcccctatattcctaatgattaattacaactattgtccctagtttctcaatgcctggctcctggtctcagtggccctgcctctccactttccaccacaatgactaggtccatgacacttgctttcagacttctcacatatcaaatgcctgccttttaacttaaacccaagcaagtcagatgttctgacacccaaaccacagacctagctttaaatatttctaatgccctaattcctgccttttcctttccaatgattctgtatgtatactcttaacaatttttattgttgccttctgttcagtatttattttcattgtagcccaggtctgatttctagatttatatttccataggccagtacctaaactgatgagtcatactcacccacagctagccttgcacttacattgagaygctcacactgccatatctaattttgcctattctatttcagggtacagtgggaagagacttggagccggacagatctgggctcaaatctaagttctgccatttattagttatgccatgtcgctaagtaatttagctgctaagaacaaaatggatgagttgtctgagaagtcagagaggttttatgtgtaaaacatcaagaatggaggtt

SEQ ID NO: 429749 - DNA, 630 bp, Homo sapiens
gtcccacatcttccctgctctgttctttccattatattttctcraaatgcttcagtttggatatttttaattgtactgtattcaagtcttctaactttgtcttcactgtgtacaatctactgttagattaatgcaatgagttattaattcacatgttgtatttttcagttccagtttgttcatttgatattttagagattccaatttctattgacattttgcctctcttcacctattttgtctgattttccctttattgtatgaaaatactaactttagtcaagtctttctaagttgactctaacacctagatcacctaaaggtctgcttccattgctcattttttttctctttggtattggtcacatttttctgtctttgcattgtccagtattttttattgtatgccggacacagtatataaaagaaccagagagggctcccctttcatctgttaggcagatataatgagagaattacttcaatccaatcagaaggtgaggcggcttgagggtggactgtaattttagtatgagttaatcaacttctggttccttactatttcttggtcagagcctagcaagcctgtgtctccttagccctaaaagactgtgagagatttgtattggc

SEQ ID NO: 429750 - DNA, 630 bp, Homo sapiens
gtcccacatcttccctgctctgttctttccattatattttctcgaaatgcttcagtttggatatttttaattgtactgtattcaagtcttctaactttgtcttcactgtgtacaatctactgttagattaatgcaatgagttattaattcacatgttgtatttttcagttccagtttgttcatttgatattttagagattccaatttctattgacattttgcctctcttcacctattttgtctgattttccctttattgtatgaaaatactaactttagtcaagtctttctaagttgactctaacayctagatcacctaaaggtctgcttccattgctcattttttttctctttggtattggtcacatttttctgtctttgcattgtccagtattttttattgtatgccggacacagtatataaaagaaccagagagggctcccctttcatctgttaggcagatataatgagagaattacttcaatccaatcagaaggtgaggcggcttgagggtggactgtaattttagtatgagttaatcaacttctggttccttactatttcttggtcagagcctagcaagcctgtgtctccttagccctaaaagactgtgagagatttgtattggc

SEQ ID NO: 429751 - DNA, 604 bp, Homo sapiens
cctgctggctgctcggacgctgcccgcggaggaggggcgagggcgctattaccatatattagcataccagcgcgcgtcacgtggccgctccagccaatggtcaccctagaagggcggggattgggcggaacacgccttagtgctgctcccagcctgaaccggtggccatggcaacgggcgggtgggcgggggagtggggaggtgccggagcccggtgcccccgggagcatctcctctacctgagcgccacatggcgaccacgcgcagttttcccaccttgcggatggagagatttgtctcagccagagagatccagattcagccaacatttattgagcacttaccacgtgccttaacactttgctgcagaaagtgatgtctgtcctattaaccccactagatagtagggaaagtggaggctcagagaggttagatcattcgctcaagatcatacaacaacattaaatggcaaaagtggagatctaagatcatttttgacttcagacccgggacaatcgccagttttttcaaatccagcaggggtctcctagcacctcctcacaatttcaggtgtgctgwgcagttgagaaaatccttgtacata

SEQ ID NO: 429752 - DNA, 599 bp, Homo sapiens
tctacattaatgagaattactaacatttatggagcacttagcctggccttgtgctatatacatcgttttatttaatcctcaaaataaacctaagcctctgggagattaagtaacatgttcaagaagatcacactgyaagtcagtggccaagccaggatctatgctgggactatctgattcccaagtccatgctattaacccaccacgctacatgcatgcctcctactccagcttggctcataggacccagggaatgtgtgttacatttctttagcatccttcccccatccatatatacactctttccggtcacccaccagcactgggcatagtaggtgctccatacacatttactgaatgagtgaaaataagtgactatgacatccttttatagcgataaaagtccattttttctcgagctgtcccaggtgggaataaaagcagctggtgactctcctccccaccccctagtatcctctttctgatgaataataatgtgggaggcctccctcctttccccatgggagagttaggcttcttggtgtcagagatccacaatagacacagtgatgactcatcttcagtgtgcatttggagag

SEQ ID NO: 429753 - DNA, 599 bp, Homo sapiens
tctacattaatgagaattactaacatttatggagcacttagcctggccttgtgctatatacatcgttttatttaatcctcaaaataaacctaagcctctgggagattaagtaacatgttcaagaagatcacactgtaagtcagtggccaagccaggatctatgctgggactatctgattcccaagtccatgctattaacccaccacgctacatgcatgcctcctactccagcttggctcataggacccagggaatgtgtgttacatttctttagcatccttcccccatccatatatacactctttccggtcacccaccagcactgggcatagtaggtgctccatacacatttactgaatgagtgaaaataagtgactatgacatccttttatagcgataaaagtccattttttctcgagctgtcccwggtgggaataaaagcagctggtgactctcctccccaccccctagtatcctctttctgatgaataataatgtgggaggcctccctcctttccccatgggagagttaggcttcttggtgtcagagatccacaatagacacagtgatgactcatcttcagtgtgcatttggagag

SEQ ID NO: 429754 - DNA, 582 bp, Homo sapiens
agccatcacgtccagcctctccccagtttatggcctacctgggaagctagtrttgggaagcactgttttactcattgcctttagctctccaaacccttattggattctgaggctctggacttcacttctggtgtcccttaggcacaatgaccttcattttataaccttgaaatagagcaaaatggaaaaaacataggaatctattggacttggtattgcattttctagttacgtggcactggacaaatcacatgcaaaagaccttctgtctcctgccttccctgaatccctgttctagaaatggccttgctcctcttgtatctagaaggctgggagaacagtcaaatatacctgtgcttccacccctcatcccaggccacacatgattggtcaaagtggacacctgacccaaactaaaccaatcatatcccatctccaggcccttgaagcgattctgcctgactctggttgctctctggaaaggaggtggtataaatgcaggagcggttggctgtggacattttccaccatgcataccagaaaatagagccagtcagtcttcagtgagaaagaaaagtcagt

SEQ ID NO: 429755 - DNA, 622 bp, Homo sapiens
agggcagaacttggcttttagggcattttgaaatagaggttacttcacataagatggtgacactaaagcccgtgaaaatgaaattgctttctcaaaggcagagtattagaaatggtttggaataatataagtagggaatgtggtactaggtcaggcccattgtataaccagccaaaaatttggtttctgatcatgataacaaagctcagttggaagggtgtattgtagcttcaagccatgacaaaatcttctgattacagggatgggcttgcccatccttttagtatccttctgtctttgtttacctgagtatttaagctttatttctatttttggcctctacaatcatatttatttattcaacaaacatttaataagcttctatacctcactctagcagctggggggattcaaagatgaggagaacccaggccaggtactacagaggtttctaaagaaagaaagacatggaaacattaattatggtattgtacttagtaccataatagaagtatggtccctgcttagaaatgttaggaaaagttttctggagaaagtgacagggtaagaggragcttctcagccagacagaagcaatgtctgcaaaggtgaggttgtattt

SEQ ID NO: 429756 - DNA, 655 bp, Homo sapiens
tgctggtaacagcatagaaatagaatagaggatgaaggactgaagcttgaagatacatcccacatttagggagggagggagaaggcatggagtccgtatggtagaaaataagaaaagaagcaagagaaccatctaatgtatttatccaacaaatgcattctattcaccaccatttgttgtgtacctgacagatgccaaggccagttagacacgctattaaccatgagagtgtagtatcacagaagtcaagagaagaaaaagttttgagctgcagaaattcgtcagcagtttgaaattgtacagaaagagtgggaaacattcattatacttagtaaacagaaggtcattggtaactttttgaaaatgatagcttcagtagagtggcgggggtggccatggggatatgaaaagccacatgagagagaactgtggcatgagatgccgataagaagtggagacagcatgcggatcaccttttgtatgtttggcaatgaaaggaagaaaagaaatagaaaagtgattagtgaaggcagcacagtcaagcggaagattaattttccctgtctgcttcattattttcgttgacctaaaatattattctttttmtttcatatccttaatagcaagtcagcagttcatttcttaaacttactgc

SEQ ID NO: 429757 - DNA, 388 bp, Homo sapiens
atctcagcaccttgtgcttccctcatcagaacactggcccctctgtgtcatatttgcctatctgagtatctttctccctactgcacaatgacttcatgaaggtggggmagagtctgccttttcctccgttgtatacccaacacatagcacagttcctggcacataataagtgttcaaaatatcgctgaatgactgagtggatggatggatggtgggtggatgggtggtccatgactgatgttaagagaaagctttgattcagagcagttcaatggaggctcatcaatatgtaccagaccaaagagaatcagaaagtgctagtcattccacacccacccatggggtcagacatgctgaaaggacctctgccctgattcgagcttccaag

SEQ ID NO: 429758 - DNA, 626 bp, Homo sapiens
gacatgataattgctgtttagtctaattaactttgttaagtctttattggcaacagacttcctgaatgaaacttattaaatgtccttccctggaaaactcagttcctattcaaaggaaaagttgtagggtctgtctgtctgtctgcattgtttccagaaaaaggatattggccctgcagcagtcctgtgggccacggagatttgtcaaccttccttttggccctgcccagcttccttttctctagaactgcacgcatcccagctcaggggcacaggactcaccgtctcagccagtcctgagagccactgcactaggccacctctttttccaaaccacgtgacttgcagcccattagtcttgttctcctcttatggtttggggatcttcttgaatagggccattcagagtcctggagcgggcactaagccccctccaggggaagggaccatctgtgaaaatcrcctacaggtatgagttggcacacattatgtaccaagaggcatctggccccaagttgtgtaaaagcaggctatcgacctgaattatccaataaagagctgcttgatcggggcaggccctttgcaaaggtgatgccgacttcaatggctccaaaggtgtgcaaagt

SEQ ID NO: 429759 - DNA, 662 bp, Homo sapiens
tcacgcctgtaatcccagcactttgggacaccaaagcaggcagatcacttgaggccaggagttcaagaccaggctarccaacatggcaaaaccctatctctactaaaaatgcaaaaacaattagctgggtgtagtggcacacacctataatcccagctacttgggaggctgaggcttgaacctgggaggcagaggttgtagagagcgaagatcgtgccagtgcactccagcctgtgcaacacagtgagaccctgtttcaaaaaaaaaaaaaaaaacaactcaatctgaaaaacaaacaaaatagactgggggaaaaatgagcagagagcctcagggacttgtgagattataacaaaagatttaggccaggcacggtagctcacgcctgtaatcctagcactttgggaggccaaggcgggcagatcaccaggtcaagagatcaagacaatcctggccaacacggtgaaaccccatctctactaaaaatacaaaaaattagctgggcgtgtgcctgtagtcccagtttctggggaggctgaggcaggagaatcgctttgaacccgggaggcggatgttgcagtgagccaagatcgtgccactgcactccagcctggcaacagagcgagactctctctcaaaaaaaaaaaaaaaaaaaaaagatt

SEQ ID NO: 429760 - DNA, 566 bp, Homo sapiens
agtatggtacattcagatgggaagatggtagatttgaactaaagtaataagaataataaaaggtaacagagaagatgggatttgaagtgagctttgaagactgggtaagattcaaattgttaacgatcttccaggcaatgaaaaccatctggagttatgcatggattcatgattcagcaaggaaatgagcaaaactcaaatgcagtagacaaggagtaatgggacagaaggttagatgggcagaggccagattatgaagcaccttaaaaagggggtaaggggtttaaatttgattaatatctaacacttattgaarcttaaaatctgccaggcaatgttttaaacacttttaaaacattgacttaattctcatagctctctaaggaaggtggtattcttatctctatttttatataaggaaacttgcctccagtcacacagctaacaaattatggaacttgcctccagtcacacagttaacaaatggcagagccagaaactgaacctatgccgtttggatcccgaaacttaatttttaatcactatactatattgtcaaggaagca

SEQ ID NO: 429761 - DNA, 369 bp, Homo sapiens
cctacatgtgcctatagttcctccctgtggtaatgacatctctcagctcagtaagggccacttgcagtaggaatatgaccctaaccagaagactcagtggatccttatcaccttcatagaaaggtactcaccatccatgtcaacagccaagccaacatgctgttgctccaatacataaaaggcacttctgtagggctggcatgagtcagtcagttcaagacaacctgaaggagttgaakaacatctatccagtgagtcctgcaagacttcaggccctttctcatccagcagctccctgctgagcctggaaaagtgggaaaaagtaaagaataagccagggggaatcagaaaccacacagccccagctag

SEQ ID NO: 429762 - DNA, 566 bp, Homo sapiens
ttacaattgttaatttattcttattgatctatgacttggggcagtcttcaaactcttaatttgcctctaaattccttagggaaaaaattgaaagggaaaagggtgcctataatcccagcactttgggaggccgaggtaggcggactgcttgagcaggagtttgagaccagcctggccaacatggtgaaaccccatctctaccaaaaatacaaaaattacctaggcgtggtggagcacatctgtagtcccagctactcgggaggctgaggtgggagaatcacttgagcctgggatgcggaggtttcagtgagccaagtgacrctgcattccaacctggttgagagtgagaccctatgtggaaaaaaaaaaagagagagagaaaggaaaatgggtaagggtaaaagggaagtttacagagtagaggtgagagaagtgattaaaaggaccaagaaagggctttgttctgcattaagaactatgagtcttcatgttctaaatgtttgtcaggccagaggttaaagaaaagagaaatgcaatcagtgtcttgtctctgactggcaacaaag

SEQ ID NO: 429763 - DNA, 569 bp, Homo sapiens
acatttgaatcggttgtaaacatttaaaaatcagatttcactaacatctaccgttctggtgtctcttaaaaagcaatcatatttggtaacactgagtcacattctttcatggcattaatcagctggagctgaaggggctagacaggctctggtttgccagttctcaccactccctattgcattacactcacatgcttcgatcttttatatctgcctgactcctgtttagtgtttaggtttgtcttagtttgttacctctgctctaagtagagcttctcaaatatttcttctgcaggacccctaagatacaagagagtgaaccattttcccccaggactcccaaagcagtctaaagtagcctgtcataasccagaaatgtctttgaagtacctattttctttaaaaaatgcaaattttgatttacactgcataatatatttgtgttggttttagcataaaaatgatttatcttcccccaccaaatcttaaaagtaaaattaacactctggaagatgtgccatgtgtattctgtggctccaaatagtcttcaccatatcaccgtaggaata

SEQ ID NO: 429764 - DNA, 432 bp, Homo sapiens
gaaatctagctggggctgtgtggtttctgattccccctggcttgttctttactttttcccacttttccaggctcagcagggagctgctggatgagaaagagcctgaagtcttgcaggactcactggatagatgttattcaactccttcaggttgtsttgaactgtgtgactcatgccagccctacagaagtgccttttatgtattggagcaacagcatgttggcttggctgttgacatggatggtgagtacctttctatgaaggtgataaggatccactgagtcttctgtttagggtcatattcctactgcaagtggcccttactgagctgagagatgtcattgccacagggaggacctataggcacatgtaggttgagtgaaactctagttccacttggaagcccagacaagggatgggtcagtgagcaag

SEQ ID NO: 429765 - DNA, 555 bp, Homo sapiens
tattctaatgatcatcctctaaacattttatcatttattaatcctccctgcctgtgtctattattatattcatatctctacrctgcaaatttggggtctcaatttttactgtgcctttgtttttactagtgtctgctgttgcaaaaagaagacattctctgcctgagttttaatttttgtccaaagttaattttaatctatacaattaaaaccttttgcctatcactctggacttttggattgttttttacattcagtgttataatatttgattatggtgattggttttggtgggtactgatgcgaattaataaaaacatttcatttccatgtttattttctaatctcttccacattgtaggctatgtttaccatatgtagcagaatgtatttacatttcttggttctagtcatttgtattcttcgtgagtgtgagtgtgtgtgtgtgtgtgtctgtgtgtgtgtctgtgtgtgcctttggcatttaggaagggttgtatagctcatgttaaatattgcactaaaaatgtttttgatggttttcctccctttgga

SEQ ID NO: 429766 - DNA, 555 bp, Homo sapiens
tattctaatgatcatcctctaaacattttatcatttattaatcctccctgcctgtgtctattattatattcatatctctacactgcaaatttkgggtctcaatttttactgtgcctttgtttttactagtgtctgctgttgcaaaaagaagacattctctgcctgagttttaatttttgtccaaagttaattttaatctatacaattaaaaccttttgcctatcactctggacttttggattgttttttacattcagtgttataatatttgattatggtgattggttttggtgggtactgatgcgaattaataaaaacatttcatttccatgtttattttctaatctcttccacattgtaggctatgtttaccatatgtagcagaatgtatttacatttcttggttctagtcatttgtattcttcgtgagtgtgagtgtgtgtgtgtgtgtgtctgtgtgtgtgtctgtgtgtgcctttggcatttaggaagggttgtatagctcatgttaaatattgcactaaaaatgtttttgatggttttcctccctttgga

SEQ ID NO: 429767 - DNA, 498 bp, Homo sapiens
tatctctacactgcaaatttggggtctcaatttttactgtgcctttgtttttactagtgtctgctgttgcaaaaagaagacattctctgcctgagttttaatttttgtccaaagttaattttaatctatacaattaaaaccttttgcctatcactctggacttttggattgttttttacattcagtgttataatatttgattatgstgattggttttggtgggtactgatgcgaattaataaaaacatttcatttccatgtttattttctaatctcttccacattgtaggctatgtttaccatatgtagcagaatgtatttacatttcttggttctagtcatttgtattcttcgtgagtgtgagtgtgtgtgtgtgtgtgtctgtgtgtgtgtctgtgtgtgcctttggcatttaggaagggttgtatagctcatgttaaatattgcactaaaaatgtttttgatggttttcctccctttggactagacacacttcta

SEQ ID NO: 429768 - DNA, 545 bp, Homo sapiens
atattcctaaaaaatagtgtgtccccccaaaacaaaagcaatcttgaaatgcaagaagaaacattttctattccaaaggtctttaactgctctaagcagtacttggtagtcttcaatatataggctttcayatctctttttttcttcttttgtttctgcacaggatctcactctttcacccaggctggagtacagtggcacaatcacagctcactgcagcatggaattctcaggcctatgacatcctagggcctcatccactgattcctgggactacaggctcacaccaccaaacccgggtaatttttctgattttcagtagagatgagggctcactatgttgcctaggctagtttcaagcttctgagatcaagcaaccctcctgccacagccttccaaagtgctgggattcgaagccaagcctggctggctttcatgtcttttctatgtagtttatgtttctggatgccattaagagtctggctggctttcacatatttgctatgtcgtttatatttcttgatgttattgtaaatgtttattaa

SEQ ID NO: 429769 - DNA, 545 bp, Homo sapiens
atattcctaaaaaatagtgtgtccccccaaaacaaaagcaatcttgaaatgcaagaagaaacattttctattccaaaggtctttaactgctctaagcagtacttggtagtcttcaatatataggctttcatatctctttttttcttcttttgtttctgcacaggatctcactctttcacccaggctggagtacagtggcacaatcacagctcactgcagcatggaattctcaggcctatgacatcctagggcctcatccactgattcctgggactacaggctcacaccaccaaacccgggtaatttttctgattttcagtagagatgagggctcactatgttgcctaggctagtttcaagcttctgagatcaagcaaccctcctgccacagccttccaaagtgctgggattcgaagccaagcctggctggctttcatgtcttttctatgtagtttatgtttctggatgccattragagtctggctggctttcacatatttgctatgtcgtttatatttcttgatgttattgtaaatgtttattaa

SEQ ID NO: 429770 - DNA, 548 bp, Homo sapiens
agcatagtaattctgaaatataaatggaatagaatgaaaaaaaaatccaagatttttctaatttaactctttcctactctactagcaagaactttgacatatatcagaagaacagcactggatgcagtggctcatgcctataatcccagcactttggtaggccaaggcaggaggatcgcctgaaaccaggggttcaagaccagccttggcaacacagtgagacaccatctctttaaaaaaaagaagaattttttttaattagccaggcatggtggcatgtgcctgtaatcccagctactcaggaggctgaggcaggaggatcacttgagcccaggagtgtgaggctacagtgaggtatgaacataccactggactttaacctggatgagagtgagaccctgttatcaaaaaaaaaaaaaaaaaggagaacatgtagatgtcatctacatgacagctttctacttattyctaggaattacacctattttaactaaaacaaaatcaatgttgttaggtcagcaaaagacagggcttctaattagggtctc

SEQ ID NO: 429771 - DNA, 500 bp, Homo sapiens
taatactttcatcataacagccagaaaaggccagataaactaaacaatcatattttctaaaacatcagaaagctttactttaggtaaaaagtaatgtaaagaaactaaattccaaagaggaacaagttcttcctaggtgagcagagatgagtggccattttcttctttggggtcatctgtcatgtctggacataygtaggcagagatcaagtctaaaatagagagctcctactaggataaaaagaatcttcttgaaatgctcccttttagaatcctgagctactatattgagaggtctgactaccctgctgagagactgtgtagggagaaagagataccagccagctcccagatgtttcagctatcttatctgacacaccagacatgtgagtgaagctaccctggatttctagccccagttgggcattcagatacatgctactatatgattcaccccaggaaagacaagcggaagaaccactcagctgtgcccagccacg

SEQ ID NO: 429772 - DNA, 500 bp, Homo sapiens
taatactttcatcataacagccagaaaaggccagataaactaaacaatcatattttctaaaacatcagaaagctttactttaggtaaaaagtaatgtaaagaaactaaattccaaagaggaacaagttcttcctaggtgagcagagatgagtggccattttcttctttggggtcatctgtcatgtctggacatatgtaggcagagatcaagtctaaaatagagagctcctactaggataaaaagaatcttcttgaaatgctcccttttagaatcctgagctactatattgagaggtctgactaccctgctgagagactgtgtagggagaaagagataccagccagctcccagatgtttcagctatcttatctgacacaccagacatgtgagtgaagctaccctggatttctagccccagttgggcattcagatacatgctactatatgattcaccccaggaaagacaagcrgaagaaccactcagctgtgcccagccacg

SEQ ID NO: 429773 - DNA, 559 bp, Homo sapiens
gatactaatgttttgctggatatatatgttttgaatatatttttgcagtttgtaagtttatcttttattttccttaaggtatatttaatgaccagaagttcttaatttttatataatcaaaatctattaatcttttatggtccatagctttttgtgacttaagtagtatttttctagcccatggtccaaaaaatactcacctatgctttccactaagatacagaatagtttatttttattaacatgtatgaccttaacccctctagagttgattctttttaatttaatgaaggattcagctttatcttttcttcatctaatccataaagattataattttgaaatctctacatattgaacagtctcttcttattccactggtctaagttattgcctctgtcatatactgaagtttcataaaygcatgggcctatttctagactttttgctctatgctattgttcatgtgtgtgtgttcctttttgaattttatttttatttcttttactttggatcatggcttactgcatccttgactacttgagctcaagcagtgttc

SEQ ID NO: 429774 - DNA, 609 bp, Homo sapiens
atatatgcaaaatatctaagtattttgaccggtgttaaacactgaccatggattctcctggaacctttattcaactcagtttattcttttgtaaatcacagtcaccattcattccataaattgccagtgtacaattcaatgaatgtggacaatgtgaacacacatataacacaactcactcaagatttagagagtcccttgtgctcctttgtaggcaatctccaaccccatggcaattactgttctgatttttaacacctagatttgttctgcctttttctggactttatataaatggaataataaactatatggggatttttgctcaacattaatgttttttaagatttatccagttgttgcttatatcaataattcattctttttgttattgctaaatagcaacctattgtatgactattccacagttgttttttgtttttaatctattctcctgttgatagacattcagttttttccctgttttggctactatgaataaggctgctatgaaccttcttgttggmatatgattttatttcttttgggtaactatttagaagaggaatttctaggtaacaggatagacacatgtttataagaaactgc

SEQ ID NO: 429775 - DNA, 514 bp, Homo sapiens
  misc_feature (1)...(514): n = A,T,C or G
aaacatctcagatcatggcatctggacaatgagacacacctgctgcctgttgaccaactccccttgcttaccccttcgtaactccccactatgtaaaccctttattttagttagcttagacttgtctcccatctctcagctgacatcatctgtaataaagcctttgatccctggcaatacttgccatctctgtgaytggctttctttgcagcaagcaaccagatctaagccaatcccttggtgtttggcaacacgtttccctccccaatttttttgttttaatatttgtaaattatctattatgaatggaatggcccatttcttctggaatcatgctctagaaacacatgtaataaaaacttataacacacgtactcctcagagcaagcttatgggataggtagtactattatgccaattatgcccattttacaggaagaagactgacggacaatgagattaggtaaattnnnnnnnnnnnnnnnnnnnnnnnnnnnnnnnnnnnnnnnnnnnn

SEQ ID NO: 429776 - DNA, 514 bp, Homo sapiens
  misc_feature (1)...(514): n = A,T,C or G
aaacatctcagatcatggcatctggacaatgagacacacctgctgcctgttgaccaactccccttgcttaccccttcgtaactccccactatgtaaaccctttattttagttagcttagacttgtctcccatctctcagctgacatcatctgtaataaagcctttgatccctggcaatacttgccatctctgtgattggctttctttgcagcaagcaaccagatctaagccaatcccttggtgtttggcaacacgtttccctccccartttttttgttttaatatttgtaaattatctattatgaatggaatggcccatttcttctggaatcatgctctagaaacacatgtaataaaaacttataacacacgtactcctcagagcaagcttatgggataggtagtactattatgccaattatgcccattttacaggaagaagactgacggacaatgagattaggtaaattnnnnnnnnnnnnnnnnnnnnnnnnnnnnnnnnnnnnnnnnnnnn

SEQ ID NO: 429777 - DNA, 604 bp, Homo sapiens
tgtcctatttgtacctggattctgatattcatattcagtggctaaattagatgtattttagtttaattagtttaatatacccagtacataagacttagtggatagtcaataaaaattgtacttattcatttgatacattatgtctattttacatgtaagaaccttatgtggattcagttttcataaataaatattcagctactaatttataattcaagtttcttcagataatattctgctccattcagaagcatatctgtccaatatatcctccagataagtggtctaatgatataaatggaattgatgcattatattggtatatccaaacacagtgatccatattttgctgagtacaaaaggatcatatttggttgcatgtaatgatgaatgatgaactgaacaggcccagacctccttcccttgagggctttaatcsgtttcggtggtgagacttttgacgctgatgtttttttgcatgattcatccaaacttgttcttagtacaccacctttatgaaagaataatgttgagtgcttaagtttgcaaaatgcaaatacttcaagccagggccttggaaaacattcaacattgtctgactaat

SEQ ID NO: 429778 - DNA, 540 bp, Homo sapiens
gaattcatgaaggtggttatacataatcatcccacaggaaggagcaccacaaggagaggcacctcagagggggacagtggacttttgaccagttatatattccacctcagcaggtgttattctatttttcagattaggaaatgatttcaggaaagtaaagtaacctgtttaattcacaagcaaaaggtaataaatggtaaaaaccaggaatggaattcaggccagcttagctacaaagatccgacctcyagttcatctgactcccagtgctaccccgctgagtcttttaatgttgttttgtgtgcatcagagccctgtgatgtctttggacttcagattattttggcaaagagaagcctctgttctgaccctaattgttataaccaacaccatcaatgacagagccagtctctgaaagtgaccctttgcatttgaccctttcttcttgcttagcttatttccttgtctgtttcaaaagaagaaaaggttcttagctttccagagcagatcaaatagctcatggtgaatacacaaaaactg

SEQ ID NO: 429779 - DNA, 562 bp, Homo sapiens
gatgtgagtgattgtggccctttcatcagaagcaacataagccaggaaacaatgaaatgacatcttcaaagttctataagaaaaaaaccctgttaatttatagttctatatatggtgaaatttttattcaaaaatgaaggcaaattaagacattctgtgatggaagaaaaagagaggagaagggagaaaacctggggagaattcaaggcacaatatatggtggtggttttcaagaataagtgagatggagaggagtcagcctgggggacttcgtcaacatatatccttcccccaaagatggttatgcagtgatggcagtggtgaaaaatgatgttgtgaagccatgtgtatttcagaaatgtttcctttggttttcataacccagtggggaccactaatgtcagttgatttttaygtttataatcccccatttctcactttcatcagcactggaatgagctctgagaagggatggttctgtatctcccttcgttaaccactatctgattcgtagtatgtgctcagtaagtgtttgttgaattgacttaaaaagactattaat

SEQ ID NO: 429780 - DNA, 562 bp, Homo sapiens
gatgtgagtgattgtggccctttcatcagaagcaacataagccaggaaacaatgaaatgacatcttcaaagttctataagaaaaaaaccctgttaatttatagttctatatatggtgaaatttttattcaaaaatgaaggcaaattaagacattctgtgatggaagaaaaagagaggagaagggagaaaacctggggagaattcaaggcacaatatatggtggtggttttcaagaataagtgagatggagaggagtcagcctgggggacttcgtcaacatatatccttcccccaaagatggttatgcagtgatggcagtggtgaaaaatgatgttgtgaagccatgtgtatttcagaaatgtttcctttggttttcataacccagtggggaccactaatgtcagttgatttttacgtttataatcccccatttctcactttcatcagcactggaatgagctctgagaagggatggttctgtatctcccttcgttaaccactatctgattcrtagtatgtgctcagtaagtgtttgttgaattgacttaaaaagactattaat

SEQ ID NO: 429781 - DNA, 456 bp, Homo sapiens
gaacagaaatgtggcatctggatggagctaatacaggacagtggcttgcacatagtagtagatcctccaagcaatgttgttgattgattgacacagcaagcaagactgggagtcctaaaagaggcttggagacttggggtaggggaggatgatgtgggctgtaacagcagcttggtggagtgcaaagggcactggtcagagagtcaggaractacaggcaccattcctagctccaccactaacttgatgtgcatacctggtcagatcgctctccctctggagcctcagtttccccatctataaaaataaggattgggatcatttgtttccaaagtttctcccagcgctgcatcttacaatttccggggtgtgcatggtgcatgagagagaaagcaggagtcactgctagcgctccacctcctggaagcactttggctctgggctgcccaccccttt

SEQ ID NO: 429782 - DNA, 569 bp, Homo sapiens
gtgttgtgaagatttattgaattgattaatataaagttcttagaacagggcctggttcatggtaagtacgatgtgtgtcagctgttgttattattatcactgttactgtcattattcatcctrtacttaagcttgtcctgggtgtttgatagtccctgaattggttgtctgctctcacactcccagccagatgttgcatgcctttatctctgttctccaaacatcttttcactactctcttagagaactggccacattttgctttgaatagttctttgtatacatgactcactagttgccaaagtgtctgaaaggactttgcatgtactctgcagcttactggaaacatttagagcaggaagaggacaagcaggatcacgctgtaagcagggtaattcagagtctggggaacactctaagcaggaagggtgaccccctacctctggggaagagctggcagtcacagaccaagtcatgttggctggtatccctgccccacagggtttcaatgtcaggaaaagatatggaacgcagcaatgggagtgacagtggaattgcttcagctgact

SEQ ID NO: 429783 - DNA, 569 bp, Homo sapiens
gtgttgtgaagatttattgaattgattaatataaagttcttagaacagggcctggttcatggtaagtacgatgtgtgtcagctgttgttattattatcactgttactgtcattattcatcctgtacttaagcttgtcctgggtgtttgatagtccctgaattggttgtctgctctcayactcccagccagatgttgcatgcctttatctctgttctccaaacatcttttcactactctcttagagaactggccacattttgctttgaatagttctttgtatacatgactcactagttgccaaagtgtctgaaaggactttgcatgtactctgcagcttactggaaacatttagagcaggaagaggacaagcaggatcacgctgtaagcagggtaattcagagtctggggaacactctaagcaggaagggtgaccccctacctctggggaagagctggcagtcacagaccaagtcatgttggctggtatccctgccccacagggtttcaatgtcaggaaaagatatggaacgcagcaatgggagtgacagtggaattgcttcagctgact

SEQ ID NO: 429784 - DNA, 637 bp, Homo sapiens
gcattggaaacaccaaatcgggtatccttgggacagttatggttagagctgcttaaattctacacactggattttgctttggaggaatatgtcatatgtgtacggatacaagatattttaacaagagaaaataaaaactggcctaaaaggcgaatagccattgaaggtgagatgatatgttgtatttcatttggagaatattttttatgtgctactcattatctaattcagtgttaataatcctttggctttgtggcactatatatatatgtcactagattgtcattctttatttttaatttttttagagacagggtcttkccctgttgcccaggcagaagtgcagtgataggatcatggcttactgcaacctcaaactcatgggttcaagggatcctcagcttcctgagtagctaggactataggcttgtgctaccatgcccagctaattttttttattttttgtagagatgggggtctcactgtgttgctcaggctggtctggaactcttggccccaagtgatcctcctgcattggtctcccaaagtgctcggattataggcatgagccaccgtgcatggccttcattatttatttagattctttgtcaagtctattatagttttatagaattag

SEQ ID NO: 429785 - DNA, 606 bp, Homo sapiens
tgtctaagtcgcctgacccagataaatctactggaacagactgcaggtcaaatttagaaacagagagttcacatcagagtgtgtgcaccgacacatctgctacctcttgcaactgcaaagctacagaagatgcttctgaccttaatgatgatgataacctccccacccaggaattatattatgtgtttgataagtttattttaacctctggcaaggtaggatacagtttgtaaatgatctgtaagattttgtggttgttgtatgactatgtatattttttagattagaaatgtaaaaatagctatataaagtggtgacttgttttggaatgatattttggtatgtattttaccttttgtgtttttcatatagttgcctttaaataatgtatataaagcctcaaaaggtttcagcattctattaccagttgrtttcctttactttctcatatatgaaaggattcatctgatatttcatgaaaatcttagcaaaggtagcatgcattttaaatgttgcttattttgtatttttttccccaacaaaagccacattcaagcttatttttatacataaaatttttcttccccccccaaaataaaaggtttg

SEQ ID NO: 429786 - DNA, 495 bp, Homo sapiens
agttgaaaattatctttatacctgtatgtagtagctaggagcagaatgtgtttaagtgtgatcctgtttgggtaaatcctttaaggaaaatacatatatgctggtgtgtgcattaaaacatctcaaagaaatcacaagaagctattgactgtgtttgttatgcagatagaaacttaaatcgggggcatcgagtattctatttcagttattttctgtagtttgaatttgttaccacatgctagtatgtggtattcattcattcattcaagataagacctggctatgctcagaggagtaagacagagccctggcagaaaactccttacaacctagtaggggaaactgatccacacattatcagttaccatgtgtgtactgtaattggtcaasaacctaggttcaaatcctgacttggccatttcttagccatgtgatcttggacaagctatacctttctgtacctcaattttcacctgtaaaatgaggatagtagtt

SEQ ID NO: 429787 - DNA, 620 bp, Homo sapiens
aaaaggtcagaagtcaaataaattttgaaagctctcaggataaataataatactgttacagatataagttaacatttattacatgcttcccgtgtgcttgctttaaaatatttgttattattgctgttgctgttgttgtttttgagatggagtctcgctctgtcacccaggctgcagcgcaatggcgcgatctcggctcactgcaacctccgcctcccaggttcaagcaaatcacctgcctcggcctcccaagtagctgggactacaggcacctgccaccacacccagctaattttttaacagaaacctctcagrgcctttaacactctaacctgcattgaaaatctctaatattatgtgttggaataatattaaaaatctcacataagagaatattgatcatgcaaaaacataatactgaaatagataatgggaagtagactctgatgggtttcaatgataagtcattatgttatggtgaactagcttcagagctagactgtatgcctggtggctttccattcttcctgacatccccagctaatttcatttaaaaatacactctaacagactgtggcaattctcaggggaaaaggacagaaactggaaggtggaaacac

SEQ ID NO: 429788 - DNA, 572 bp, Homo sapiens
ggaaccacactccaccctttacaagctgcatggccgtgggggtgtctctgagtctctgagactctgagactcaatttccctatctgtacagaagagggtgtcacttcctctgatctcacacattgtcgtaaggactacccctagacggttaccagcaccccctgggctggttattgatccctcccaygcaccaggctctggtctcggggctttgcttgaatgatctcgtgggagccactcaacaagcttaggaagtgagactctccccaacccgtaagtcaggcactgagcttcctccagtaagaaagagcagaggcagggtgcaaacacagcagtctgatttcagggccctccacgccagccaaaacgctgctcttcttcctgcatagtctgtgagcaaatgctccatttatttcttattcctatctcttaaggccttcacagacacctcttcaggagacccaagactaaccttccaaatggctgcctcctgtagactatttggtcacaaagtcctgggcatcagagccacgattcttcttcttctagggaaagcagaaggcatatgggaa

SEQ ID NO: 429789 - DNA, 572 bp, Homo sapiens
ggaaccacactccaccctttacaagctgcatggccgtgggggtgtctctgagtctctgagactctgagactcaatttccctatctgtacagaagagggtgtcacttcctctgatctcacacattgtcgtaaggactacccctagacggttaccagcaccccctgggctggttattgatccctcccacgcaccaggctctggtctcggggctttgcttgratgatctcgtgggagccactcaacaagcttaggaagtgagactctccccaacccgtaagtcaggcactgagcttcctccagtaagaaagagcagaggcagggtgcaaacacagcagtctgatttcagggccctccacgccagccaaaacgctgctcttcttcctgcatagtctgtgagcaaatgctccatttatttcttattcctatctcttaaggccttcacagacacctcttcaggagacccaagactaaccttccaaatggctgcctcctgtagactatttggtcacaaagtcctgggcatcagagccacgattcttcttcttctagggaaagcagaaggcatatgggaa

SEQ ID NO: 429790 - DNA, 572 bp, Homo sapiens
ggaaccacactccaccctttacaagctgcatggccgtgggggtgtctctgagtctctgagactctgagactcaatttccctatctgtacagaagagggtgtcacttcctctgatctcacacattgtcgtaaggactacccctagacggttaccagcaccccctgggctggttattgatccctcccacgcaccaggctctggtctcggggctttgcttgaatgatctcgtgggagccactcaacaagcttaggaagtgagactctccccaacccgtaagtcaggcactgagcttcctccagtaagaaagagcagaggcagggtgcaaacacagcagtctgatttcagggccctccacrccagccaaaacgctgctcttcttcctgcatagtctgtgagcaaatgctccatttatttcttattcctatctcttaaggccttcacagacacctcttcaggagacccaagactaaccttccaaatggctgcctcctgtagactatttggtcacaaagtcctgggcatcagagccacgattcttcttcttctagggaaagcagaaggcatatgggaa

SEQ ID NO: 429791 - DNA, 565 bp, Homo sapiens
ctcaggatatggatatacacacacttgtggggtgtgtgtgtgtatgtgtgtgtttgatcaaactaaatttagctaatataccttaagataatttttccccctggggcaccgagttaacgctaggatcaaatttccttttgcttygtcagctaccatatcctatttcaggattcccccctgtctttttggagtccccaagtctgggttgcgcctttgtccacagcatggagtcagtccccagcgccagagctcagctctggtctcctggacccctgcctgggaggaggcagcgcggtgcgcaccccctcactgggtcccacctgccccacccaggaccccacccgctggcagggcgctgccctatttgaattccccgaaaatatcctgccatgcacccctttgtattaggagctattcgctacttgatttggactgtctggcgttgggcgtgggggtggggggatggtagagattgtgtgggacgtgcggttcgagtcttgcctgggcttgggcggcagggagaggaaggactggtaggggctcgaaggacagccagggagggaaa

SEQ ID NO: 429792 - DNA, 565 bp, Homo sapiens
ctcaggatatggatatacacacacttgtggggtgtgtgtgtgtatgtgtgtgtttgatcaaactaaatttagctaatataccttaagataatttttccccctggggcaccgagttaacgctaggatcaaatttccttttgctttgtcagctaccatatcctatttcaggattcccccctgtctttttggagtccccaagtctgggttgcgcctttgtccacagcatggagtcagtccccagcgccagagctcagctctggtctcctggacccctgcctgggaggaggcagcgcggtgcgcaccccctcactgggtcccacctgccccacccaggaccccacccgctggcagggcgctgccctatttgaattccccgaaaatatcctgccatgcacccctttgtattaggagctattcgctacttgatttggactgtctggcgttgggcgtgggggtggggggatggtagagattgtgtgggacgkgcggttcgagtcttgcctgggcttgggcggcagggagaggaaggactggtaggggctcgaaggacagccagggagggaaa

SEQ ID NO: 429793 - DNA, 573 bp, Homo sapiens
cgaggaatggctgcgggcgaggccggggcttcccccgataaaggacttacccaccgtgcgggaaatggagccgctttcagacggggagtaatcagctcgcagacgyagcgcccgccacggctccccctccttcccccttccctatttacttttaaaaataaaagatgaaacaagcaaataccatctccccatcatctcagtctttctcttcccttcttacgtctttttaaacaaaaccacgaccaacgcaatatgcagaagcacatatacctatttttattttttagaggttgtctttgattcgctgtcaatagaaacctatggtatttgtaaatttcaggacagttgtagttgataaatttctggtgtcaagacttggggccaggagctgggagacaagatattagcttcaatttcataatctcttaatcacattacactttaagtgagaatgtgtaatttcacccatcaatgatttatttaagcatttgcagcacaattacttgtctcatacacaaacagtgactggagcattgtttgctagaaagacaccctgagatttgggaaacagat

SEQ ID NO: 429794 - DNA, 614 bp, Homo sapiens
attacactaccaagttgacacaccagtcagcgaagcacagtcgcttgggctggaaacaccaaagcccgcggcgcccgcggctgactcagcaaatcggaaaagcccccagcccacgcccacgccggtccaagccggacagctgatgcgcccctgcccctgccgcagtcacctgctaacaggccttcgaagtctcccttaataagatgtgatttgggagctgtctggcagaaaagcatctcacaagtaccatagaacctgtttcttggagagatgttttgttttttaatcaaaatggacacccagattcttgagtttgaactcttgttttacatattcacatttagaatagaaaaagctggtctttttgcatgttcatttctcccagcacctgtcacwtggttcctggttactttatggagccctcaggcaggagtcctcgggtttcctctttctccccctaagagtcaaggcggcaggggcgttttttaacttcctaggtggggatggggttagaggggaaggaggttagaggctggtgattggcctgggtgattgggcttgggacccagcgagaagagcgtgtccctaacctaggcccctcgcaatcgctgcca

SEQ ID NO: 429795 - DNA, 614 bp, Homo sapiens
attacactaccaagttgacacaccagtcagcgaagcacagtcgcttgggctggaaacaccaaagcccgcggcgcccgcggctgactcagcaaatcggaaaagcccccagcccacgcccacgccggtccaagccggacagctgatgcgcccctgcccctgccgcagtcacctgctaacaggccttcgaagtctcccttaataagatgtgatttgggagctgtctggcagaaaagcatctcacaagtaccatagaacctgtttcttggagagatgttttgttttttaatcaaaatggacacccagattcttgagtttgaactcttgttttacatattcacatttagaatagaaaaagctggtctttttgcatgttcatttctcccagcacctgtcacayggttcctggttactttatggagccctcaggcaggagtcctcgggtttcctctttctccccctaagagtcaaggcggcaggggcgttttttaacttcctaggtggggatggggttagaggggaaggaggttagaggctggtgattggcctgggtgattgggcttgggacccagcgagaagagcgtgtccctaacctaggcccctcgcaatcgctgcca

SEQ ID NO: 429796 - DNA, 614 bp, Homo sapiens
attacactaccaagttgacacaccagtcagcgaagcacagtcgcttgggctggaaacaccaaagcccgcggcgcccgcggctgactcagcaaatcggaaaagcccccagcccacgcccacgccggtccaagccggacagctgatgcgcccctgcccctgccgcagtcacctgctaacaggccttcgaagtctcccttaataagatgtgatttgggagctgtctggcagaaaagcatctcacaagtaccatagaacctgtttcttggagagatgttttgttttttaatcaaaatggacacccagattcttgagtttgaactcttgttttacatattcacatttagaatagaaaaagctggtctttttgcatgttcatttctcccagcacctgtcacatggttcctggttactttatggagccctcaggcaggagtcctcgggtwtcctctttctccccctaagagtcaaggcggcaggggcgttttttaacttcctaggtggggatggggttagaggggaaggaggttagaggctggtgattggcctgggtgattgggcttgggacccagcgagaagagcgtgtccctaacctaggcccctcgcaatcgctgcca

SEQ ID NO: 429797 - DNA, 570 bp, Homo sapiens
cccaaattttttgtcagaaagcttttttttttttttaattacaattttttttagagacagggttgcccaagctggagtacagtggcacgatcatgactcactgcagccgtgaactcctgggctcaagcaatcctatggcctcagcctcccgagtagctgggatcaaaggtgtgaaccgctgcaccagccttttttccccctttcttttttcttgttttacagaaagattttcctagagattttctaaagcagctctgcgaatgattttcctagagtcaagtctggtatactggtctgagttgtttattcagcagagaagataacaatataatttctaacttyaacaaggcagaagcagatttaacttgatgtgcttcttgaatagtaggctttgggcatggagaatgagcaaacaactgcaacagaactggaaaacaggagaacatggttttaaggagatggagcttatcggaaggtgtattttatataaatatataatcttttagatttatcaatattttaatatcttacatcataaatatgtgagatcagttagggtatgtggaaata

SEQ ID NO: 429798 - DNA, 537 bp, Homo sapiens
gtgtgttgatgagtgaggaaattcatcccactctgtacttatgatttgtatgtatttctatatgaatattacactttagtaaaaagtttactcaaaatgcctacatagacatttgttttgttttgttttgagatagggtctcactctgtcgcccaatggagtgcagtggcactatcagagctcactgcagcctcaacctctctgggctmaggtgatccctcctatctcagcctcccaaggagctgggactacaggtgcctgccaccacatctggctaatttttgtattttttgtagagataggttttgccatattgcccaggctggtctctaactcctgggctcgagcaatctttccacctcggcctcccaaagtgcatggattatagacatgagccaccatgcccagtgctatctagaaatttcaagattatttcattggcaattgaatctctataaaaacacaagcaacttcaaaacttatatatattttctttaatgagggtggtgatggatggaattctagcaatgaagagaa

SEQ ID NO: 429799 - DNA, 542 bp, Homo sapiens
aatatgattttacctcttttgattggcttacttattgaaaggagatttgtttttgtttcatatgcatagttttggcctcattttagctttagtaaaaactttttcatctagcttctgaaactcttacccttaggacatcatcaattctgatgctgaacatttcaaagagagtgagaaggttagtgatataatgctgcaaaaactgaagagcctccatcttaaaaagaaaactttagataaagaggtaytatatttattcttcttctaaaaattttattatttttagtgaaaaaatagttaaaaggtagtgaagaagtaactcttaaagttggaatcattttaaaaattattttgggggaccagattagttttactgtgcccctcactaaagagataaaatgttcaacatttgacttgttttattgtttgtctgtatgggaaaatctcattcacctacaaaaaatttagtatgataaattttttcatttttgcacggcactactgattcctgaagggttgtttattttgactttcctatagtg

SEQ ID NO: 429800 - DNA, 596 bp, Homo sapiens
gagacggggtcttgctccgttgtccaggctggcatgcagtggcgctgcagcctcagtctccccaggctcaggccatcttcccacctcatcctcccaagtagctgggactacagatacacaccaccaagcccagctagtttttgtactttttggtcgcccaggctggtcttgaactcctggactcaagcgatccgcccacctcagtctcccaaactactgagattgcaggtgtgagccaccacaccctggccaaaawtaggatttttaaaggcgccccagtgagctgccagggaagagaaacactgtgagtgccttcatgggaactctccaaaactcctacaatattttgtgagcccagtgtgtcacctctatagtgatttccctttttttcccatgcaactttcccttaagattgtattacttctcatcttccataaaaatatcactcagttttatttctcagtaggcatttattgagcacctaagatttgcacaaacacaaaacccattcttaaacttcctttcacagtaaattatctaaattatctttcttgggctctttctccaccaatgctgttttctaattgtataagcat

SEQ ID NO: 429801 - DNA, 596 bp, Homo sapiens
gagacggggtcttgctccgttgtccaggctggcatgcagtggcgctgcagcctcagtctccccaggctcaggccatcttcccacctcatcctcccaagtagctgggactacagatacacaccaccaagcccagctagtttttgtactttttggtcgcccaggctggtcttgaactcctggactcaagcgatccgcccacctcagtctcccaaactactgagattgcaggtgtgagccaccacaccctggccaaaaataggatttttaaaggygccccagtgagctgccagggaagagaaacactgtgagtgccttcatgggaactctccaaaactcctacaatattttgtgagcccagtgtgtcacctctatagtgatttccctttttttcccatgcaactttcccttaagattgtattacttctcatcttccataaaaatatcactcagttttatttctcagtaggcatttattgagcacctaagatttgcacaaacacaaaacccattcttaaacttcctttcacagtaaattatctaaattatctttcttgggctctttctccaccaatgctgttttctaattgtataagcat

SEQ ID NO: 429802 - DNA, 596 bp, Homo sapiens
gagacggggtcttgctccgttgtccaggctggcatgcagtggcgctgcagcctcagtctccccaggctcaggccatcttcccacctcatcctcccaagtagctgggactacagatacacaccaccaagcccagctagtttttgtactttttggtcgcccaggctggtcttgaactcctggactcaagcgatccgcccacctcagtctcccaaactactgagattgcaggtgtgagccaccacaccctggccaaaaataggatttttaaaggcgccccagtgagctgccagggaagagaaacactgtgagtgccttcatgggaactctccaaaactcctacaatattttgtgagcccagtgtgtcacctctatagtgatttccctttttttcccatgcaactttcccttaagattgtattacttctcatcttccataaaaatatcactcagttttatttctcagtagrcatttattgagcacctaagatttgcacaaacacaaaacccattcttaaacttcctttcacagtaaattatctaaattatctttcttgggctctttctccaccaatgctgttttctaattgtataagcat

SEQ ID NO: 429803 - DNA, 596 bp, Homo sapiens
gagacggggtcttgctccgttgtccaggctggcatgcagtggcgctgcagcctcagtctccccaggctcaggccatcttcccacctcatcctcccaagtagctgggactacagatacacaccaccaagcccagctagtttttgtactttttggtcgcccaggctggtcttgaactcctggactcaagcgatccgcccacctcagtctcccaaactactgagattgcaggtgtgagccaccacaccctggccaaaaataggatttttaaaggcgccccagtgagctgccagggaagagaaacactgtgagtgccttcatgggaactctccaaaactcctacaatattttgtgagcccagtgtgtcacctctatagtgatttccctttttttcccatgcaactttcccttaagattgtattacttctcatcttccataaaaatatcactcagttttatttctcagtaggcatttattgagcacctargatttgcacaaacacaaaacccattcttaaacttcctttcacagtaaattatctaaattatctttcttgggctctttctccaccaatgctgttttctaattgtataagcat

SEQ ID NO: 429804 - DNA, 584 bp, Homo sapiens
tccaacctcgtgtaaatgtcttgttagcattgcttttaaaggtgcataatatttcctggtggcatttgattttttaaaaaggctctgaaagtgacaaggtacagatcctggagcttttttttttttyttgagacagggttttgccgtgttgtccagactggtctcaaactcctgagctcaagcgataccaccgaagtgctggaactacaggcatgagccaccacacccagccggttctggagctttccatgcgagtgatccactcctgttctagaacttttcacatcaatggcaaatagcattcgctatggatgggaaacaggaaggggtgaggcagtggcaatcactgagtggcaggagttacaaccaccaccaaatggtgtttaggaaaacaatccagccctgcggggtgcagacaattccttgtagaatcttcccagcaatccttccttagacctcaatgaagggtgggttgcaaacgtcagaaacaggagagtttcctccttaaactttgagaaattcaccagccattcatacttaggaaactctaagaaaaccggcatacttctactttctttaaccag

SEQ ID NO: 429805 - DNA, 506 bp, Homo sapiens
ttttcatagaataattctatttttaaacactggtatttaaaagaacccagacatggccaggtgcggtggctcacacttataatcccaggactttgggaggctgggaygggtggatcacttgaggccaggagtttgagaccagcccgggtaacatggcaaaaccctatctctaccaaaaatataaaaataagctggctgtggtggaacgcaactgtgggcccagctactcaagaggctgaggcatgagaattgcttgaaccctggaggcagaggttgcactcagtcaagattgtgccactgcaccttagcctgggcaacagagcaagactctgtctggaaaaaaaaaaaaaaaaacccagatacttctcaataacattcattaggatggctactagcaaaatccaaaacaaagcaaacagaaaataacaagtgttggtgaggatatgaaaaaattggaactaaaacagtatagtgattcctcaaaaaattaaagatagaattagcac

SEQ ID NO: 429806 - DNA, 506 bp, Homo sapiens
ttttcatagaataattctatttttaaacactggtatttaaaagaacccagacatggccaggtgcggtggctcacacttataatcccaggactttgggaggctgggacgggtggatcacttgaggccaggagtttgagaccagcccgggtaacatggcaaaaccctatctctaccaaaaatataaaaataagctggctgtggtggaacgcaactgtgggcccagctactcaagaggctgaggcatgagaattgcttgaaccckggaggcagaggttgcactcagtcaagattgtgccactgcaccttagcctgggcaacagagcaagactctgtctggaaaaaaaaaaaaaaaaacccagatacttctcaataacattcattaggatggctactagcaaaatccaaaacaaagcaaacagaaaataacaagtgttggtgaggatatgaaaaaattggaactaaaacagtatagtgattcctcaaaaaattaaagatagaattagcac

SEQ ID NO: 429807 - DNA, 574 bp, Homo sapiens
ctcgcttagtatggattgcccccttcctttccacaccagcaccaggctaaccctctgaaaagttccctyctcatgccattctcctcctcatgaatcttctttggctcccactatccacaggtaagatacacactccacagcctggcaggccactccctccacagccgaatcccaatactcaatcccaggtgccttcctgcctctgtgctttggttcctgccctctcccactgcagtgccctcctctcttctccatgcacggttagattcacctcttgctctccatgacacccttccatgtcaccaaagcccatagttcatttaaaaaaaattcatcccgccatctatccatttatccttcccttcattcaacaaatgttttccttttactgagtacttatgagtcaagcattgtgctagattctgtggaagcaaaaataagtaagtcatacttcccatcctggagggatttagtctaatagaataaacactagctaccatttagtttgcacatattatacattagctatagtacaaagcatttaatatattttgtcataaattatcttcacaat

SEQ ID NO: 429808 - DNA, 574 bp, Homo sapiens
ctcgcttagtatggattgcccccttcctttccacaccagcaccaggctaaccctctgaaaagttcccttctcatgccattctcctcctcatgaatcttcwttggctcccactatccacaggtaagatacacactccacagcctggcaggccactccctccacagccgaatcccaatactcaatcccaggtgccttcctgcctctgtgctttggttcctgccctctcccactgcagtgccctcctctcttctccatgcacggttagattcacctcttgctctccatgacacccttccatgtcaccaaagcccatagttcatttaaaaaaaattcatcccgccatctatccatttatccttcccttcattcaacaaatgttttccttttactgagtacttatgagtcaagcattgtgctagattctgtggaagcaaaaataagtaagtcatacttcccatcctggagggatttagtctaatagaataaacactagctaccatttagtttgcacatattatacattagctatagtacaaagcatttaatatattttgtcataaattatcttcacaat

SEQ ID NO: 429809 - DNA, 574 bp, Homo sapiens
ctcgcttagtatggattgcccccttcctttccacaccagcaccaggctaaccctctgaaaagttcccttctcatgccattctcctcctcatgaatcttctttggctcccactatccacaggtaagatacacactccrcagcctggcaggccactccctccacagccgaatcccaatactcaatcccaggtgccttcctgcctctgtgctttggttcctgccctctcccactgcagtgccctcctctcttctccatgcacggttagattcacctcttgctctccatgacacccttccatgtcaccaaagcccatagttcatttaaaaaaaattcatcccgccatctatccatttatccttcccttcattcaacaaatgttttccttttactgagtacttatgagtcaagcattgtgctagattctgtggaagcaaaaataagtaagtcatacttcccatcctggagggatttagtctaatagaataaacactagctaccatttagtttgcacatattatacattagctatagtacaaagcatttaatatattttgtcataaattatcttcacaat

SEQ ID NO: 429810 - DNA, 532 bp, Homo sapiens
aactgaaggaaattttgccattgaagtgattggtaaagtggtgtaatggacaagagggaagaacctttaaaggctatgggtcctaaaacataggtttggaataaaggtgagcctagggttacatgagctggccaggtactgagtgaacctggagcctgtatccaccgaggctggcctcggggctgagtccacaggtccttccctgatgactatggctgtggagctcaccttgttcttggacaagcctgaaacctgggggtcagcttggtgttggggggatccagagcccwggaacactggggccagcctagctctagagaaactctggaaaccgagtgtgattattgggcctagcctgagtctgtggggcttgaactagcactagggctactgggcaggcctggaggggcagtgagctgagacttgatgggctggcctagagccagaggctgtcagatccggcctggtgccagagcagacttggaagctcagtcttcaggtactggtctgaagtctgaggccatgggggcct

SEQ ID NO: 429811 - DNA, 578 bp, Homo sapiens
ctatgaggtgaaagacaagaacatataagtaaacagggactgaggtagagaatatactcagaatatttacttcatttcagtcaaaaagtattgattaaaatgtgcaagacacaattctacttattttgttttacytgtgctgattttctctgtcccatgtcgggccttttcaaatattgtggaagatgtatttgtctttgagtacattttttcaagtttcagtctacatatggttgtcaataatttcataagagtgctaagaggttgttaagagctcactgtaaagtgaaaaaattactttaaaagtaggaggaaaaatattttcagaaataaggacacaaatgtagttgcctctatttaatggtcctatatattataaaaggttttacaaaatgataaacatatagtacatatgtttaaaaatccagttaaatgaataaatgacttggctattaataagttcaccttgcatggctattgttaggaaaaataaattaatacaggcaaaaggctgaacaaatgctagctattaaaatcattattatgaagaaaacctatcagtgtttattgaaatctgt

SEQ ID NO: 429812 - DNA, 564 bp, Homo sapiens
atgatggtattaataaaatgttttataatgtcaattctactttaaataacccagctccccgactttaatgctggccccttgacccctctagcaataatattcatattacctggtggaataaggactccaaagaaaagcaaaatacagaaaaagagaaggatcttcattgtaaatgatttcttggtataaaacagtgtacagatcatctgtctgactcagctgttgttgaaacaagaaaaaaaaacccttacatttaaagaattcttctgcatagttttgactactgaagcttattaagagtgagaacatttctatgcttggtgcatagtgccatattcaaagagatagtgactagaaaaagctgcattgtcacacaaaagttacatctgctgatttctcttgcagtcagtttcttwaagaaactttaacagttacaagaatatgggtataaattgctaagtgaccaagatccgaaatagtcctgcagcaattcacttgataccccaggagtactagttttatataattccattcactattttaatggccccagtattaacaatg

SEQ ID NO: 429813 - DNA, 610 bp, Homo sapiens
aagctatctgccctgggtaattattttgagagcctgaatatctgtataaacacttacttttgccataatgttacaaaattcccttagcagtttatattttccatattcagttatatttattaccttatgccatgacagccttatcatatcaggaagttatccaccatgatgattgcaaacaaactgacatgtccaaaatgaaagaaaaataaataaatattgttatgtcattagcaggaagtgaaaaactttcaggttctaagcrcagtctggccaaactatattcagccaagaattattcactgctttgtatgctgctgctgtcataacctctggactttatcatgccctcctctctcctgccttaaagatgcccctctattaagatgtacaaataggagatatatatatatatatatatatatatataatatattttagtttattccttcttctgtcaacttctcaaaaatgcttgactagtctttcttgttcaaccctttcacttcttctgaactcttccttcagttttgaccaaatcaaactgatcgaatttatttttggataaagtttcttacttcaggaatttctttctgacctactgtgttcc

SEQ ID NO: 429814 - DNA, 528 bp, Homo sapiens
atttaggcttaaaaccgatacaatctcactattgccagtttccaatgatcataaaaattctcaaggactgcctatatatgctcaccgattacgatcactgctcactgactgcagcctcgacatcctcccaggcgcaattctcccacctcagtcccctgagcagctgggactacaagtttgtgccmccatgaccaactaatttttttttttttttttttttttttttttgtagagacagggatctccttatgctgccaaggctggtcttgaacttcctaaactcaagtaatctatctgccttggcctcccaaagtgctaggattacagggaggccacctttcaataatctaccacatagaggatagtaaaatagagcttaaaatatcatagggtaaaataaaaagaaaaacagaaaaactcatctgtttacaaaactatttacacatatttcttaagaaagatttagaataacagataactttggacttaaagcatagcttagctattgctatgactactaagaaacta

SEQ ID NO: 429815 - DNA, 435 bp, Homo sapiens
gcaggctagtaacacgtgtcagggaagtttcagaaaagcacagtagtgaaatgttttggatctaagagtcattttgacctggtttaatccagctctattacttaatagctgtgtggtcccaggcctctttgtgcttcagtttccttatttttaaaatgctgataaaactattagtacttaattcatataattgattcaagtattaaatgtattagtgattgcaaagcacttagaacatttcatggcatttagtatagccccaataaatgtctgcaattattatgcaaatatttattcatgargcttggggctggacctcaccaccttttcataacaagcttactgggcctgggctggtgggtagagggaaataaatgaactaatggagatattagaattgaaaaagttctgtcattccaaataatagaatagagt

SEQ ID NO: 429816 - DNA, 537 bp, Homo sapiens
caaaacttaggagtaatggcaaaatagcatgataattggtgttaaatagatcattgatagaagatttctatcacagtagctcatctctctccaactggattccttttttccttactcccaaatgatgccaattatctaaaaatttgaataataatttgttatgtttcatttgtcagcttattaactcagttcatcatctctttttcaacccctttatcacatagttatcttacattcagcaatacatttaattataatattattatagcccatgaaggtatttatcaatgactattactaagtgaaatctaaatactaatttggcttttacagattctttaaatagaattttgtgttttctgtcctcttcttagcttctcagagaaagtacatttttttctcatctttgtactaatgcaaattactctatcaatatatatggcttttccatgaggtttgggagaaagtttagggtcttactttgccygtactccttctgatcacatttccgccacttctcttagagtttggctttgc

SEQ ID NO: 429817 - DNA, 562 bp, Homo sapiens
ccaaatagtagccctacaatggcctgtaagtattcgagtaaaagaaagaatcagatgtatcttactttaaatcaaaagctagaaatgattaagctttattatgagaaagacatgttgaaagccaagctaggccaaaagctaggtctcctttgccaaacaattagccaagctgtaaacacgaaggaaacattctttaaggaaattgaaagtgaacacactttcaatgaacacacaaatgataaaaaagcgaaacaatcttattgctgatgtggagaaaatttgagaggtctggatcaaagatcaaaccagccacaacattaccttaagccaaagtctattccctagcaaggccccaactgtcttcaattctatgaaggctaagagaggagatggagttgcagaagaaaatcctgaagctagcagaggttggttcatgaggtttaaggaaaggagccatcttcattaaaagtacaaggtgaagcagcragtgctgaggcagaagctgcagaaagttatccagaacatctagctaagatcattgatgaaggtagctgcacaaaga

SEQ ID NO: 429818 - DNA, 600 bp, Homo sapiens
tgagccacctgtagaatttataaaggacgttcctttaaaaaatgaatatactttaaactgctcacataaatagtttctaacacatatatcagaattagcaagttaaggctatccctgtaatagtccacttttgacaaaatcacttgtgaaataaaaaaaagaaaaagaaaaaactctacttgctgagttcctgcaaaagatamtgtttaacttgtcagattgattttttaatcaaaattcaaaataatggaataaaaatttaacagcttaaaggtcaaagttagttaatgcatatcttcaaatttgcaactgatttacttataagtaaaaacatccacaaagtttaattgattttccacctcgtacactgagaaatagtattttgtacctcttgaataattcacaagtttgaatcctaaggcatacatatatatgtgtgtgtgtgtatatatgtgtgtgtgtgtgtgtgtgtatatatttatatatatgctgtatttatgcctaattattctggctacaaaggtcaaaaggacaaagtggccacaagttataatgggttggagaatttggatggaatgtggatctaaattactgtgttac

SEQ ID NO: 429819 - DNA, 471 bp, Homo sapiens
acagctttactttcattagatttaggccgtaaatctgctggtaattgcccaatttgattgttaagcatagttctctgtcaccagtgaagagctggagcagaagtagaaaatgttcaagtattttcttcttctagggaaacagttcattatattaatattaattttttctatgtttattttttcaacagaaggtcatacatatgctattggagagttcacagctagcccctcactactcaaattgtgggtgttattgccagactgcggagatgcacaagaattgacttgagaagcaaggagattattcatgytcctgcacactctgttatctctgggagctcttaatcaatgcagggtgagagccagttagcatgactgaggttagggtaaacgggctgttcagggaaagataaattaaaatgtgattattattcaaattggaatatagagaacataatccatgatggaaga

SEQ ID NO: 429820 - DNA, 579 bp, Homo sapiens
ctgtctcattaaataatgattgaccaatcagattctcattcacagcaattcaaactgtaaggtctagaaagaggtcaaaattcatttagtggcagagtttgaatgtaggtgatggtaaaccaaagccatttacaagcaggcaccaaggagggaataacttatgagtcataaaggagaatggcaagcagtcataagaagacagaagaaaaataagacaaggcagagggaggcaaatgggaagaaagatatcagtttccaattttcaatttctcacatccagtctctttagttctagctaatctttgcttcttgaccacagatactckttagattataagttacctttttcaaagggtatttaataaatggcactccttctgtcacagtttttattggatccaaagatggtaggtaccaaccagtgccacaatccaaagctggggagagactggactttcaaagaggtattcaaaatctgattttagtccttagcacctcacatacgtgagtgtgttgaagttgaagagaggaatttttttgagaaagggagaggattatcaacgtattggaaggtctttc

SEQ ID NO: 429821 - DNA, 555 bp, Homo sapiens
aaaagatgaatatagattagagtcacctcctattgtcaagctcactgtttctataatcatagtaatgaacttgatatctcaaaactgatttttttaattaggagaaggactaatctaagattcatatgtttgccttacagatttcatatttgtaagcaatgaaagaagcaaaatatttcagagattatgatatgctatccttccacatcaaattcacattccacaaatttcaagttcctrtgaacattgaatgataggattcaattgagccactctcttgggtaaaacccctatcttctaaaattcactcagagaggtcatattctggcttaaatttcaaaacatgtggcatttgctatttttccctagtctagaaaagagagctcctcgaggttaacaaatatttataaagtgttttatctgttaagatattctgccttaaactaggtactgggctcccctgatagagacttgtcatgatgtccagtgccccaacagaaacatgtttgtttgtttgtttgtttgtttgtttcattttaccatgaaaagccaggc

SEQ ID NO: 429822 - DNA, 578 bp, Homo sapiens
aaaaagaagaatagtacaaataaagggaacaaaaaaatagattatcatcaggtctttgtggggctgtggtgctttaggcaacatatatatatatatatatatatattatgcatatatatatgcagtaatatatttgagttactaaaggaaaggaaatgcaacaagaattttacatctaacaaatctgtccttgaagcataaagggcacaaactgctatctayatgtaaggattcaatgaatgagattcatgttcctcaggctgtactagaaaacaagtgttagacaaacaacagaactagagagacactgatagaaggactggggttagcattcaatatgtagctacttacaaaatgagaccaaatgaaggtttagaaattggagagaatattatgtcatcaccatatgctctgataaagaagaaatggtacaaaagtaaacatgaggagagcagggaagggagggcattagtaaaaaatgtacaaaactctttttggcaattgtatggaagatgatagtattactataattattcttaggttgttccatacataatgtgaaataaagaaaattagta

SEQ ID NO: 429823 - DNA, 578 bp, Homo sapiens
aaaaagaagaatagtacaaataaagggaacaaaaaaatagattatcatcaggtctttgtggggctgtggtgctttaggcaacatatatatatatatatatatatattatgcatatatatatgcagtaatatatttgagttactaaaggaaaggaaatgcaacaagaattttacatctaacaaatctgtccttgaagcataaagggcacaaactgctatctacatgtaaggattcaatgaatgagattcatgttcctcaggctgtactagaaaacaagtgttagacaaacaacagaactagagagacactgatagaaggactggggttagcattcaatatgtagctacttacaaaatgagaccaaatgaaggtttagaaattggagagaatattatgtcatcaccatatgctctgataaagaagaaatggtacaaaagtaaacatgaggagagcagggaagggagggcattagtaaaaaatgtacaaaactctttttggcaattgtrtggaagatgatagtattactataattattcttaggttgttccatacataatgtgaaataaagaaaattagta

SEQ ID NO: 429824 - DNA, 628 bp, Homo sapiens
gtcagtgtaattttctgtgtctgtatgtattttatgataaaaatatttttaagtgttacctgttaaagggggtttaaataaagtcgtgttaaatgttttgaggtttaaagtaggtataataaagtaataaccctgatattttgcgtaactcactacctgagtgaaacaatttcaaaagagttctacaaatgtttgagtaatgctaccattgttcaaataaaggtataccttaagtatatcttaatatactttcagcatatataatatattgtaagcataatcttatatatgcttatgtatacttaatataccctagtagtgatttttaagataaaagctttcrtttaagtgaataatttccagtacattttaaatttcattgtacttgaattacttatgtatacatttgtgattgcggggatatcaagttggtgaggaattgtgcaatatcactcatccacttcctttactcagagtagaattatacggaaattttttcaaagcagtaatttgatttttttctttccctttcctcatctccctcatctttctttttcctgagtcatctcttcttcctttatactctattaaagtaccaggaagctaagaaagttaaagctttacagac

SEQ ID NO: 429825 - DNA, 541 bp, Homo sapiens
cttgcaactcctggtatctgtgattctatgaaaccaagttaagcaaactttataatatccattgttagctgattcccatgtcatataacagaaaattcatctcgatttccttgtgcctaatctaaatttggtgataattaaaaatccatctcctctcgatctgycctttgcagaggtgtggaacagctagtttgtcacaatcttgcataatacttttctgttacgatgagaggagcaaaagcagtagggaaggatgagggaagctcttgaaggaaatgtctggtaaggaatgtggacatgctaaggcttcatctcatataaaatatttaagtaggagacttgacctcaacaagcaataggaaaaaaatccacaaagatttattttcctcgcctcgcccgatgaatgtttaaatgacatctagagagatgtaggtaatatataagtaataagtttttaactagtacatttacaaggcatgtggaaagaatattaggtttctccctttatctgtgaaaaatcagaaaatgtttttgcctatct

SEQ ID NO: 429826 - DNA, 514 bp, Homo sapiens
cctcaccaatggcaaaaagcagaggagaggtaaaaatagaacagctgaacatcactctaaactagtttgtargagaatataatgttactcatgaattacacaatcagtgagacagacagtgtcaaatggggtaactacatcttccaaaagtgttggaaattcatacatgtaaccaaaccaatacaattcccaagcagaaaatgccccttttacttatggaatttgcaaaaccatggaaattaaataatttacacctacaattcttggcccttaaaaagcaactcgattctttggaaatgctttgttctttttctattaataaaatacaaattgtaatggccttggagtcaaactttataagagatgagaatctagacatttattaaactcgttgccaaatcactccatgattctaaataattaatcattgaagttacacaagaggaagtaaatctcagtagttaagaccacaggcttcaaggctgaattgtttgagttcagatcctggctcaca

SEQ ID NO: 429827 - DNA, 584 bp, Homo sapiens
aattcatacatgtaaccaaaccaatacaattcccaagcagaaaatgccccttttacttatggaatttgcaaaaccatggaaattaaataatttacacctacaattcttggcccttaaaaagcaactcgattctttggaaatgctttgttctttttctattaataaaatacaaattgtaatggccttggagtcaaactttataagagatgagaatctagamatttattaaactcgttgccaaatcactccatgattctaaataattaatcattgaagttacacaagaggaagtaaatctcagtagttaagaccacaggcttcaaggctgaattgtttgagttcagatcctggctcacaagtttttgtcaacttaaacaagctgcttagtttctttctatatctctttcctcatcaataaaagtgaaacaaggataataatttatcaaaatcatagatttattaaggggattagaagcatcaacacaaagtgacacataagtgtttcatacatgctgcagctattgctgtttgtattgttattgtaatcatatcagtcatgataggctacattaaggtatgtaata

SEQ ID NO: 429828 - DNA, 584 bp, Homo sapiens
aattcatacatgtaaccaaaccaatacaattcccaagcagaaaatgccccttttacttatggaatttgcaaaaccatggaaattaaataatttacacctacaattcttggcccttaaaaagcaactcgattctttggaaatgctttgttctttttctattaataaaatacaaattgtaatggccttggagtcaaactttataagagatgagaatctagacatttattaaactcgttgccaaatcactccatgattctaaataattaatcattgaagttacacaagaggaagtaaatctcagtagttaagaccacaggcttcaaggctgaattgtttgagttcagatcctggctcacaagtttttgtcaacttaaacaagctgcttagtttctttctatatctctttcctcatcaataaaagtgaaacaaggataataatttatcaaaatcatagatttattaaggggattagaagcatcaacacaaagtgacacataagtgtttcatacatgctgcagctattgctgtttgtattgttattgtaatcatatcartcatgataggctacattaaggtatgtaata

SEQ ID NO: 429829 - DNA, 580 bp, Homo sapiens
gtgcatcttatggtataattggggagaaatccagattgtatatttctatttacaaaatcattttatttgtttctttttgttttttagggagaaagagacaaaaatagagaaagttgagtgagaatgagattggggttgtgattaagggattgtgattttttaagggagaaagagacaaaaatgaagaaagttgggtgagaatgagattggtgttgtgattaagggaaaaaagaggaggtacagagaaaatttttaagaatagagaattgacctgaaatgtgtgaattaaatagtaaggtggatgagccttcatatttctacttaattgaatcagaatttaggagtttgagattttttaaaaaaagttttatctttcttcttacaatgttagrtaatcacaggtggtaattgtatagtttagagctacagggaaggatttctggagaggtaagttctttgtaaaagagggtggttaggctttatgatgttcagctgagaaatgcctatgagggagacttttctaggccaagaggtggatgttgggaatacaagtaaagggtatgatgctgagaagagagat

SEQ ID NO: 429830 - DNA, 590 bp, Homo sapiens
gtgttaactcctactctggctttatattttcttatcaatcatgaaagaatgggtgagggatttgtagctggggtcacaagaagacatgtccaggagagcaaaactgcaactaaaatttgcacattataagaaacacaaaatttgacacaatacaaaaataactttgtaatagtcaaagctgtaagaaaagatatgktttttttttagcttaaagatggactctcactagaagtttcttatttagaattgaatatatttagggggtttgaggacattggtttgattggttatgtgatctattccaagtcaatttttttaagtttatattttaaattgtaccaagtcaaaatttttttattttatattttaaattgtaccctggccgattcgttttcagaagtcatttgttttgtagccttttttttttgtatacacatcaaattcttgaccaaaggacagatttaatattttcacatatgaaaacaaataaattatgccactgtttcctgctattaattattgcttggtcttctcaaaggccaggccttttggcctaggcagtctgtctgcagttccaacagctgacacct

SEQ ID NO: 429831 - DNA, 590 bp, Homo sapiens
gtgttaactcctactctggctttatattttcttatcaatcatgaaagaatgggtgagggatttgtagctggggtcacaagaagacatgtccaggagagcaaaactgcaactaaaatttgcacattataagaaacacaaaatttgacacaatacaaaaataactttgtaatagtcaaagctgtaagaaaagatatgttttttttttagcttaaagatggactctcactagaagtttcttatttagaattgaatatatttagggggtttgaggacattggtttgattggttatgtgatctwttccaagtcaatttttttaagtttatattttaaattgtaccaagtcaaaatttttttattttatattttaaattgtaccctggccgattcgttttcagaagtcatttgttttgtagccttttttttttgtatacacatcaaattcttgaccaaaggacagatttaatattttcacatatgaaaacaaataaattatgccactgtttcctgctattaattattgcttggtcttctcaaaggccaggccttttggcctaggcagtctgtctgcagttccaacagctgacacct

SEQ ID NO: 429832 - DNA, 625 bp, Homo sapiens
gaggttgacatgcaaattcaaggaatacaggaatctcatctggatagcatacaagatgaccatccccaaggcatatattcatcagactcaccaaggtcaacacaaaagaaaaaatcttaaaggcagctacagagagaggtgaagtckcatacagaggggacaccatcagactggcagcagacctcccagcaaaaaccttacaagccagaagagatgtgggccattttcagaaaccttaaagaaaagaaatttcgactaaaaatttcataccccaccaaacaaagcttcataagtaacggaaaaataaaactcttctcagataagcaaatgctgagagaattcatatcaactagaagagctttccaagatgtccttaagggaatgctaaacatgaaatcgaaagaatgatacctgctgacacaaaaactaacttaaacacatagcttacagacattataaagcaactacacaaccaagtctacataaaaattaactaacaacaagatgacaggttcaaaatctcacatatcaatactaaccctgaatgtaaattggctaaacacccctcttaaaagaaacagagaggtaagcagaataaaaaaacaagacccaaccatctaccatc

SEQ ID NO: 429833 - DNA, 496 bp, Homo sapiens
aaaatcctggatgcacactatctcccaagattgaatcagtaagaggttgaaaccaggaatgtaccaatatcaacttctgaaactgaataggtaacaaagaaactaccaaacaataaaagccttgggtcagatggattcacagctgaattctaccagacatacaaaaaagaacgggtaccaatcatattgaaactatttcaaaaaattgaggagtaggagatcctccctacctcattctgtgaagccagcatcaacytgataccaaaatctggcagagatagagtgaaaaaagaaaacttcaggccaatatcgctgatgaacatagacacaaaactcctcaacaaaatattaataaaccaagtccagcagcacatcaaaaagttaatataccacaatcaagtagtcattattcctgggatgcaaggctggttcaacctacataaattaataaatgtgattcaccatatatacagagttaaaagcaaaagccatatga

SEQ ID NO: 429834 - DNA, 546 bp, Homo sapiens
acttacctcccattgctcacagtgttcactttacctggaaacaaccagaatccaactttctctggcccagatttacctgagcttcatggaattagagatttaggctcagggtttataagtaatttaaaaacagatgcagccaggattttacyttaggtcttactgatttactgtgtgatccccaaatatctgagacaggtctcagtcattttagaaagtgtattttgccagggttaaggatgtacctgtgacatagcctcaggaggtcctgagaacatgtgcccaaggtggtcgggatacagcttacttttatacattttggggagacatgagtgccaatgtgacactcaaggaaatgctcattggaccattttgggttttgcatttttggattagggatgctgaaccagtgtaatgcaaatattccaaaattcgagaaaatttgaaatcctaaacacttccgatcccaagcattttggataacagatatttagcccgttactgtatcctagcataaattgtgagattcctagaaagcagtagtgc

SEQ ID NO: 429835 - DNA, 546 bp, Homo sapiens
acttacctcccattgctcacagtgttcactttacctggaaacaaccagaatccaactttctctggcccagatttacctgagcttcatggaattagagatttaggctcagggtttataagtaatttaaaaacagatgcagccaggattttaccttaggtcttactgatttactgtgtgatccccaaatatctgagacaggtctcagtcattttagaaagtgtattttgccagggttaaggatgtacctgtgacatagcctcaggaggtcctgagarcatgtgcccaaggtggtcgggatacagcttacttttatacattttggggagacatgagtgccaatgtgacactcaaggaaatgctcattggaccattttgggttttgcatttttggattagggatgctgaaccagtgtaatgcaaatattccaaaattcgagaaaatttgaaatcctaaacacttccgatcccaagcattttggataacagatatttagcccgttactgtatcctagcataaattgtgagattcctagaaagcagtagtgc

SEQ ID NO: 429836 - DNA, 577 bp, Homo sapiens
accttgtagaaacaaatgcaattcatttgttgaagaacatatttcgaacaaataactgaaagaattcccatggatgacatatcaaggaccataaattcaaaatcaaaattcactacatgtaccaggaatcaagtcatcaagaatgagagtgagcaggaccaacaaactgcagaatcagacctacagcctatacatacctgaataaataagtatctattaactatagtaatttatgtttttttaaaagagaaatgagaagtatatgtaggacaacaaaaatcttaccaaatgcttagtcatttttgaaaaagtactaaacagaaatagaaatgaaaaatataatagcatttaaaaagttaatggagaaaagttatcaatctgataaagaccatatatgaaaaactcacagctacyatccaacttaatggtgaaacactaaaaacttttcccctaagataagcattaacacaatgtccaattttgtcacttctattcaacacaatactgtaaattccaggcaaagcaattaggtaagaaaaagaaataggccaggcacagtggctcatacccgtaatcc

SEQ ID NO: 429837 - DNA, 447 bp, Homo sapiens
tcatattaacttaagatggttctttaggacactagttcaccatcttcttggtatgctggctctccaaataraagtcactttccttgcctcttgacatcttggctgtcatgtggcaagtggtaagagctttgaacttcgttacaattcattgtaaaacaacattctcaattaattggttatgaagcaaagtctacttaatattttatgagaatatttatggttcaacatatatatttgaaataggaagttagagctatcttaatcacacattctaatgagcccagtaagatgcattttttgtttcacactaattttgttgtgccatttttttcaaacctaacttttttccttctaagatgaacagagtttcactccaaattgcagatcaaacactaccttctccacggaagtcatgtactgactgtccatattatcaggcacgtaggt

SEQ ID NO: 429838 - DNA, 447 bp, Homo sapiens
tcatattaacttaagatggttctttaggacactagttcaccatcttcttggtatgctggctctccaaatagaagtcactttccttgcctcttgacatcttggctgtcatgtggcaagtggtaaragctttgaacttcgttacaattcattgtaaaacaacattctcaattaattggttatgaagcaaagtctacttaatattttatgagaatatttatggttcaacatatatatttgaaataggaagttagagctatcttaatcacacattctaatgagcccagtaagatgcattttttgtttcacactaattttgttgtgccatttttttcaaacctaacttttttccttctaagatgaacagagtttcactccaaattgcagatcaaacactaccttctccacggaagtcatgtactgactgtccatattatcaggcacgtaggt

SEQ ID NO: 429839 - DNA, 568 bp, Homo sapiens
caatgaaaaccacaggacttacgggaaaatggggttatggcacaatactcaaaaactcagtaacacatttaaaaaatatcataagtgttaaatggttaataaataaatactgcaatatatttggcactttatattgaaaaagacctgaattccctcgtggaagcagaagaggttgyagcttgtgagttgtgaagtgatggaaagaggattatctgaagtcagaagaaaagttgtagtactagatctgaataggtatcagtcacaactcacatggtgaactgagatagctggttaatgtctgagcgtgtgcttttggtgtcctcctgtatgacttggttcagttttctgtagtcacctcatgtttcttatggatgaagtcactcataagcaaaatgaaatctgagttatgctcaaattgttccctaatgtatcagttggattgggacacatttgcatttcagaataagtattatagcagaactgattgtaccatctagttagctttgcacattacttaactctcagagccttgattttctcttgtgtaacatagggatagtagtattga

SEQ ID NO: 429840 - DNA, 568 bp, Homo sapiens
caatgaaaaccacaggacttacgggaaaatggggttatggcacaatactcaaaaactcagtaacacatttaaaaaatatcataagtgttaaatggttaataaataaatactgcaatatatttggcactttatattgaaaaagacctgaattccctcgtggaagcagaagaggttgtagcttgtgagttgtgaagtgatggaaagaggattatctgaagtcagaagaaaagttgtagtactagatctgaataggtatcagtcacaactcacatggtgaactgagatagctggttaatgtctgagcgtgtgcttttggtgtcctcctgtatgrcttggttcagttttctgtagtcacctcatgtttcttatggatgaagtcactcataagcaaaatgaaatctgagttatgctcaaattgttccctaatgtatcagttggattgggacacatttgcatttcagaataagtattatagcagaactgattgtaccatctagttagctttgcacattacttaactctcagagccttgattttctcttgtgtaacatagggatagtagtattga

SEQ ID NO: 429841 - DNA, 595 bp, Homo sapiens
tcaggagaacagtctgtgaagctagactgaagactccttggttagatttctcgctcacctacttattcatttgatgaaattcggcaatttactaaacctctcagtgcctcagtttctttacctggtaaatgagaataataatagtatttgtttcatcaacttaytataatgagtaaataaactgttactggtaaagtgtctagaattttaggtggcatatggtaaataatagatgttacctattcttgttgttctcaattattatgaactaatgccctgctattaagttgcaaggacttttttcctataacttgctgttaagtttcaaggacttttttcctaccattgctctggagcatctttgcttataccattctctcctacttacttatgatgtgctgcttcttctcaattgaataaagaaaatcttaccacttaccagattcaggtgtgagttagtgatgaaaggaaatcaaggctaatctacttcacccaattttgatgctttataaggccaaccaccttttgtagtgattattaggcattgattgtatttatattgttgctacatgtattatgcacttaatatgtttag

SEQ ID NO: 429842 - DNA, 589 bp, Homo sapiens
gtttctcagcagtaaaaggaggggactagattagataattttaaagaaaccttttcagaaactttattttgaatcaaatatatctgattcaactataattcgtaaatcttaaagactgtcttcaagaatggggcaacactgttatgagaaaatcaaattgcacagagtaaactgtgggaaaatcatgaaattaagaaaaagaaaaacatgttaaaaatgagtaacagaacgaaataaataaataaaaataattagaggaaggaaaagaaagctatagtttatccctggccttatatgtggaaataatttctaagaaacatgtcattgttccttaaattwaaaaaaaaaggtggggggtgttgaacatattatcacggaattttacattattctttttcaattaaaagaatttaacaggcctaactttgagtctaaaatacttgtttttaaatttccaagccctgattaagaatagaggggaaggactgattaagtttctaacagaggggaaggactgattaagtttctaacagaggagaagggctgatttagaggggaagtgctgattaagtttctaacagaggggaag

SEQ ID NO: 429843 - DNA, 543 bp, Homo sapiens
ttactgtagctattatattatttagtaactgcaagaaaactgttccactgttaaaaaaaaacactaatttgtcaaaatatatggaaaacaagcaatcaacttcatgttcttatttaaattgtaaaagtacagttgaaaaattgtactggctgagcacagtgggctcaggcctgtaatcccagcactttgggaggccgaggcaggtgaattacttgaggtcaggcgttcaagaccagcctggccaatatggtgaaacccccccctctactaaaaatacaaaaattagctggrcatggtggtgcatgcctgtaatcccagctgcttggaaggctgaggcaggagaatcccttgaacccgggacgcggaggttgcagcaagctgagattgcagcactgcactccaggctaacagagactccatctcaaaaaaaaaaaaagaaagaaaaattatactatttttaaactgtacagcttaccaatttttaaaatattgaatattcatgtttaaaataataataaaaaaactgttataggttgaattgtg

SEQ ID NO: 429844 - DNA, 534 bp, Homo sapiens
ggagaagggaatgaacatgtgtattttagaagatagggaagtaggaattaggttaatgtgaaagagaatgttgggtgtggaagagatagaagtttactgaggtgtaatagcaacaggtaatgagttagaaaattacatrcaattaaactctaaacagtgttaaacaggtagagatgataggcaagaaaattgggtaaaattagtgtagaaggtattaaccaggaagaatttagtattgtgtggacagcaccagttttcaggaaaaggtagtggggttgtttgtttaaaatgttcacttatacaagagtactgttttgtgtaagatttaaataatgaaggagagcataagattggaaaattttcctaaagctatttgggaaaaataatgatttaaaaatgagatgaataatgaaattattattaaggatataaataaggtgtggctaataggttttatctttatatgcagctccccttggttgcttgaaatgtttgagaagaactgtgggagcgtatctaggctttagtaggaaa

SEQ ID NO: 429845 - DNA, 489 bp, Homo sapiens
agctggtttctgtagatgctcttcagctgctgatagcatctggcctttaggcaggctcaaaaaatttgaagtcaataatgctagattaagttgcatatggggtgttccatagtccctgtttccccctttgtgcttttgcaattgttgttttagggagagattcattcgttctacaatggcttgtccttgagaattatatgggatgccagtaatgtgtttaatattccgtatagagaaaaatgtagctagagctttgctagtatagcctggggcatcatctgttttaatagaagctgtaatgcctatcactgtaaaacactgcaaaaggtgatgtttaacacaggcagaagactctcctgattggcatgtagcccaaagtgagaaaaggtgtccacacatacaygtacacaagctagtctcccaaacgagggaacatgtgtgatgtccatttgccaaagagaattagattccagtcctcgaggattaact

SEQ ID NO: 429846 - DNA, 581 bp, Homo sapiens
ttccaccttctcaccatcctagtacgtgagaccctaaattgatttacttaaaaataaatgcgcgtgtgtgtttgtaaagtaaatcaatttagggtcttaggtactgggtacaatttaggtctcaggtacacacacacacatgtatatatcctgtaaatataaagttatcaaatacatatattacatttttctgtttctaaggagctctttccctaataatatttatattagaatctacaaatttaatgccacttgatcctcccagatttcaaaagagaattaatggtgacttttgwgtaaaaatgaagacatatttatgtacagtacagaatggagattgtccttatcagtaatttaaacttttcagttattagaattattcataagtgtttataaggtggggctattttatttaaaatgtggccttataataatgtttatactgatgcagaaaaattcattggaaacatatatatcatttccctttaatttgtaatttcaaatgttttatccatagttttagataaagcatttgtcacttgtatcattggctttctttccagtgttaattttaatttctt

SEQ ID NO: 429847 - DNA, 591 bp, Homo sapiens
agaattattcataagtgtttataaggtggggctattttatttaaaatgtggccttataataatgtttatactgatgcagaaaaattcattggaaacatatatatcatttccctttaatttgtaatttcaaatgttttatccatagttttagataaagcatttgtcacttgtatcattggctttctttccagtgttaattttaatttctttccattctctttttctcatctaatttctgtgtcatttttttcctaaatccgaaaaaattctcatgagaggtattttcatgttagacaggttaaggcagaattttgtaaactactggttcattcagctcttaaattttattaagaagcgttttgtatcttgttaaactatttctaggcattttaaggacttgggagtgttaaaattcataaaaatctgttgtaccatggaayagtttctgatcagcagagatctccagaaaagttgccacttaaatgaagaaaattatcagttggatataaaagtgggtaacttgatagctatagtttgtttacattttcaaagtttttaagtggaataattttaagttggcatgctataagg

SEQ ID NO: 429848 - DNA, 542 bp, Homo sapiens
ttaagtggaataattttaagttggcatgctataagggttgtgactaggtaaggaaaaaataagtttttaaaaattgcagcagttatttgaagataagcatttgttcagcccaataataatttagaacttcaggtcatgtgtgtatatatatatgtatttcttttttttcttttctttttttttttttttttgtgacagcgtctcgytctgtctcccaggcaggagtgcagtggtgcagtcttggctcactgcaacctctgcctcctgggttcaagatattttgctgcctcagcctcctgagtagctgggattgcaggcgcccaccaccatgcccagctgatttttgtagtattagtagagacagggtttcaccatgttggccaggctggtctcaaactcctaacctcagacaatctgcccacctcggcctcccaaagtgtatctttggttttattcaacaacatcaatgtattttaccaaaggattaaagaattttatcctttgtaactgatactcactccagacaataattgaatataatg

SEQ ID NO: 429849 - DNA, 472 bp, Homo sapiens
ttgtgaagcttttatgttttcctgtagatttttattagttttagctttaatgtttgtttctgatccattttgagttaatttttgtatatcatgtaaggaaagggttcaaatttattcttcggcatatgaatatccagttttctyggcattatttggtaaaaagtctgccctctttccattgaatgatttggtacccttgcaaatcattttgctgtgtgtgcaagcgtttattttggggcactctattctaatccattggtttgtatgtctgtctttaggccagtacctcattgttttgcctactgtagatgtgtagtaggcaatcaggaagtccaagacatcccccttgactgtttttatcccctgagattgctttggttatttagggtctcttgaaattccttataaattttaagatcagattttccatgtgcaaaatgttttgacttattaggttctttcaattcattga

SEQ ID NO: 429850 - DNA, 523 bp, Homo sapiens
ggtaattttaacaatattaattctttcaatccatgaacatgggatgttttccatttgttagtttcttcttcaatttttttcttcagtgttttgtagttttccttacagaggtctttcacctcctttgttgaatttattcttaggtatttgtgtgtgtgtgtgtgacgattgcaaatgggattgctttcttgatttctttctcagattgttcattattggtatatagaaatgctactgatttttgtatgttgattttgtatcctgcaccttctctgaatttatttatcagatctaagggttttttgtttgtttktttttttccttttttgggcagagcctttaggtttttctagatataaaatcatgtcttccgcaaagaggaaaaatttgacttcctcttttccagttcggacaccttttatttctttctcttgcctgattgctttgcctagaacttccagtactatgttgaacaagagtggtgaaagtgggcatttttgtcttgttccggttcttagaggaa

SEQ ID NO: 429851 - DNA, 623 bp, Homo sapiens
tgctgctggggagagtggggttgctttcaatagtagcagtcgtaggcagatggctgggaagtgtgcacttcggttccaggtggcggctgtgggtggcagagcctgaccttagggtgcttgtaagtgcacagtggcccctttgctggggatggtggagtcactcccagyggctcatgctttagttctggtggcagcaaacagcagcagcagcagctgcggatgggggatgtcactgggactccagggatgcggagatgcaggggtggttgggacccagaacaggatgtggtctgttgggggctgggctctcaaaatggcactgtgctgtagctgcttaggtctgggggtgatgtaagccccctctctggagcaatgctgtcatgccatctcaagacagctccctgttttagtctcagggctcatgagagtcaagaatctctcccatggctggaattgcagatgtccatggtgggaatgtggactgctgagggtcacccacttaccctttctgtgcactaggaggcctctctgggctcccagccaagtaggctgccttgcctccctctccttccttgccttaggtgtttcctgtcacttctctatggaattccagcattctctct

SEQ ID NO: 429852 - DNA, 623 bp, Homo sapiens
tgctgctggggagagtggggttgctttcaatagtagcagtcgtaggcagatggctgggaagtgtgcacttcggttccaggtggcggctgtgggtggcagagcctgaccttagggtgcttgtaagtgcacagtggcccctttgctggggatggtggagtcactcccagcggctcatgctttagttctggtggcagcaaacagcagcagcagcagctgcggatgggggatgtcactgggactccagggatgcggagatgcaggggtggttgggacccagaacaggatgtggtctgktgggggctgggctctcaaaatggcactgtgctgtagctgcttaggtctgggggtgatgtaagccccctctctggagcaatgctgtcatgccatctcaagacagctccctgttttagtctcagggctcatgagagtcaagaatctctcccatggctggaattgcagatgtccatggtgggaatgtggactgctgagggtcacccacttaccctttctgtgcactaggaggcctctctgggctcccagccaagtaggctgccttgcctccctctccttccttgccttaggtgtttcctgtcacttctctatggaattccagcattctctct

SEQ ID NO: 429853 - DNA, 571 bp, Homo sapiens
ctttgtgtatttttgctaataacattcattcaaagtctttgggcattcacgagcctccctcccctactcacacaaaragaggcattcttaaatgaggaggaagaaattaacttttccaggtgaatgcctggctttaaatcggctctttcctggaattctatctttaaatggtatatacgtgtataatgttgtatggaaaacatatttcattatgacagcagaaaaattagaagggtttgatgaaggataatgagagtgcaaatcctttaaaaaatataacagatatctcatttttaaaagtctgccattctacactaacagtatttttcatgccaaattttctcaatctgaagtttgttgtaattatcgtatgttggttacaagttctcctgtgaggattttcttatatttaaattttaagcatttattaaattacaaaaataatatatgctgtgagtcacaacaggggttgcctatggggagaggattgattggaaggagacacaagggaacttcattgccatgtggctcacccgggtgtagacatttgtaaaaactcactgaattgtac

SEQ ID NO: 429854 - DNA, 598 bp, Homo sapiens
actgatgtatgtctacatttatagatttagacatggagttatacagaatgaaagtttattcaaatagataaaaacatcccaaattgaagttccactaactagtaattggctattagtaattctacccaaaacaaattaataattcatttgggccaggcctggtggcttatggctctaatctcagcactttgggaggccaaggcaggaggatcccttgaggccaggagtttaagaccagcctgggcaacatagcaagaccccatctatacaagaagcttaaaaaaatagccaggcaggagaatggtgtgaacctgggaggcggagcttgcagtgagctgggatcacactactgcactccagcctgggcaacagagcgagattccatctcaaaaaaaaaaaaaaatacccaggtacggtggtgtgcacttatagtcccagcaacttgggaggctgaggtggaagcatcacttgggcccagaagtttgaggatgcagtgagctatgatcrtgccagtgctctccagcctgggtgacaagagtgagactctctccctaaagaaaagaaaaagaattcccttggaaggttttgcttttttaga

SEQ ID NO: 429855 - DNA, 565 bp, Homo sapiens
ttgctcctctcttggccatgccgtgggggctgttgtctctcttgggagctgcaagcatcatcaaagtrgatgagggctggccacagcaagaagtatggtctctgtcctatagttttctagtgttagggtgatgaggtctctatctattcacaagaagaaaaagagtcatcctaaaccattcccaaactatgttagaaatgaagaaaggggaagggaaatagcacttgctgagcacttcgtttaaatgtgccagtcattatgctgcatattttatatttaatcctcacacaaccctacaaagtagaaatgatgactctatttaaagacaaactgaaactcaaaagaacttcctcgaaatgatacagttagcacattatggatgcagaattcaaacccaggcctgtctagttcttaaatccgtgttcttcccatataccatgctgcctctcaaaaggaaacactgtttttgttttttttttaaggtacaaatatagtttgtgcatttggaagaagatgcggctcgggacccattctttttgttataggcttgtgctataaacatcca

SEQ ID NO: 429856 - DNA, 542 bp, Homo sapiens
atatctgtatccatttatctatcatatgtctacattaaaatccatgctttcacactgatgctttagtttcagtaacttcccatttaatttcttactccttattttgaaagtcagaaaactggctctcactatscacagtatatttatttatatgcttagtcctagaatacacataaagtcatttcagaattgctaatccacaactctgtgaaaaataaatctgctactaataatttattatttgttcacagttctttttgcctttagcgtgaggacatggtccaaatactgtattaagttgaaaaaagttactttggttagtctgtcctcccactcccttaattgtggtaatattattaatttgaaatatagttcagttcatttatttctgtttgtacaaaattttaggattttttcccatatttgtctgccaagaattctgaaggatctgaaattttaccctacttgcaagctaataaattatctttttattatccaaaaaaaaaaaatctttcaaaactgaatgggaaataaagactttt

SEQ ID NO: 429857 - DNA, 542 bp, Homo sapiens
atatctgtatccatttatctatcatatgtctacattaaaatccatgctttcacactgatgctttagtttcagtaacttcccatttaatttcttactccttattttgaaagtcagaaaactggctctcactatgcacagtatatttatttatatgcttagtcctagaatacacataaagtcatttcagaattgctaatccacaactctgtgaaaaataaatctgctactaataatttattatttgttcacagttctttttgcctttagcgtgaggacatggtccaaatactgtattaagttgaaaaaagttactttggttagwctgtcctcccactcccttaattgtggtaatattattaatttgaaatatagttcagttcatttatttctgtttgtacaaaattttaggattttttcccatatttgtctgccaagaattctgaaggatctgaaattttaccctacttgcaagctaataaattatctttttattatccaaaaaaaaaaaatctttcaaaactgaatgggaaataaagactttt

SEQ ID NO: 429858 - DNA, 583 bp, Homo sapiens
aacatctagaatcagttgacttttagacaaagtgagaaccctcaataatatgagtggacctcatccaaacagtgaaggcctaaaagcaaaaggattccctaaggattcccttaaaactgtaatgtagaaaccctacctgagtttccagcctgccagcgtgccctacagatttggattttccagccccacaaccacataagccagttccttagaatacatctctttgtataaatatatcctgttggtcctgtttctctggagaaccctgaatgatgcagtaggtgtggcagagaagtgacactggccctaatcagtgcmttctaataggaggtacataatgtcagtttgtctcggtactgaagatactgaccttgattacttggttatatagtctaagccgtacgtgttggaaattgaaactaataaagcaaatggcatctttactgtgaagttacacaaatgttctttttggtaaatactaagtaattttagagtggttttttttttttcagattgtgtacatctagagctctttgttaaaactttccttgctagttttggcatccattgattattttcaact

SEQ ID NO: 429859 - DNA, 566 bp, Homo sapiens
aagcacatactgagcaacaacatttacaagtcacatatctgatcaataacttgtattcataatatataaagaactctcacaactcagtaaaaagaaaacaaacaactcaataataaatggaaaaaatwcctgaacagacacttcatcagagttatagggatggtaaacaagcatgtaataggtgttcaacttttttttaattgtagaaatgcaaactaaagacaaaatgggatactgctatgcacctactagaatgctagaataaaaaaattgataataaaaagctttgccaaggatgtggagcaactaaaactcttacgtagttgtgatgagaataaaacttattgcagccacttaggaaactgttctgtcattttttctaaagttaatgcactcttaatatatgatgctgcaattgcacacatttctagatatttatccaaatgcagtgaaaaccaatgttcacacaaaaactggtatatgaatggttagatgagtgttgtccataattgccatgaagtggaaatcgtcaatgtatcattcaacttagaaatggataaacaaac

SEQ ID NO: 429860 - DNA, 517 bp, Homo sapiens
cagggccaaggcgatggtgctaaactattcatgaggaatccacccccatgagccaatcacctcccaccaggccccacctccaacactggggattacaattcaacatgagatttgagtggggtggcgacaagtatccaaagtctatcatttatgtaacctgaagagggattctgaaaaccctgaatttgtagccatggcgggctgaagggtgggtgatttagggatatgtaagacttgtagcttgtatcttaagtgggaacagtcatgtaagattgagcccttaatttgtggggatctgcattactctgattagtawcagaattgaattgcatagcaggacgccccccatgacggttataaaattagtgttggaatgtagtaccacttattctataaattacctgtctgacatcatggtgccatcacctggaaaatttaagtaaccttatggctctgaaattctttgactttcttagatatagtcaaagctaagtcttttaggttatttatttattta

SEQ ID NO: 429861 - DNA, 517 bp, Homo sapiens
cagggccaaggcgatggtgctaaactattcatgaggaatccacccccatgagccaatcacctcccaccaggccccacctccaacactggggattacaattcaacatgagatttgagtggggtggcgacaagtatccaaagtctatcatttatgtaacctgaagagggattctgaaaaccctgaatttgtagccatggcgggctgaagggtgggtgatttagggatatgtaagacttgtagcttgtatcttaagtgggaacagtcatgtaagattgagcccttaatttgtggggatctgcattactctgattagtaacagaattgaattgcatagcaggacgccccccatgacrgttataaaattagtgttggaatgtagtaccacttattctataaattacctgtctgacatcatggtgccatcacctggaaaatttaagtaaccttatggctctgaaattctttgactttcttagatatagtcaaagctaagtcttttaggttatttatttattta

SEQ ID NO: 429862 - DNA, 517 bp, Homo sapiens
cagggccaaggcgatggtgctaaactattcatgaggaatccacccccatgagccaatcacctcccaccaggccccacctccaacactggggattacaattcaacatgagatttgagtggggtggcgacaagtatccaaagtctatcatttatgtaacctgaagagggattctgaaaaccctgaatttgtagccatggcgggctgaagggtgggtgatttagggatatgtaagacttgtagcttgtatcttaagtgggaacagtcatgtaagattgagcccttaatttgtggggatctgcattactctgattagtaacagaattgaattgcatagcaggacgccccccatgacggttataaaattagtgttggaatgtagtaccacttattctataaattacctgtctgrcatcatggtgccatcacctggaaaatttaagtaaccttatggctctgaaattctttgactttcttagatatagtcaaagctaagtcttttaggttatttatttattta

SEQ ID NO: 429863 - DNA, 327 bp, Homo sapiens
agatgagattttggactttcagctgatgttgtaatgggatgagactttggtggactgttatcaattaggatttcaccagaacaaaccagtaggagactgtgtgtgtgtgtctgtgtgtgtgtgtctgtgtgtgtaataatatgtattatatgtatgtaaatatatgtaatacatatgtcatatatgtaattgatagtaggtaggtagatagctagctagctagatacatacatacatacatacatacatasatagatagatagatagatagatagatagatagacagacagacagacagacagacagacatgttgggaacaggcccc

SEQ ID NO: 429864 - DNA, 327 bp, Homo sapiens
agatgagattttggactttcagctgatgttgtaatgggatgagactttggtggactgttatcaattaggatttcaccagaacaaaccagtaggagactgtgtgtgtgtgtctgtgtgtgtgtgtctgtgtgtgtaataatatgtattatatgtatgtaaatatatgtaatacatatgtcatatatgtaattgatagtaggtaggtagatagctagctagctagatacatacatacatacatacatacatacatagatagatagatagatagatagatagatagayagacagacagacagacagacagacatgttgggaacaggcccc

SEQ ID NO: 429865 - DNA, 577 bp, Homo sapiens
tttcattcataattagcccttcaatgccatttcttacaagctgatactgggcctaatccctgcaattcctgctttaccagcaagtcctggtagaaccttctgagaattttcatattccagggttcttcttgaaatattccaccactagcctgaaggcaagtgtaagctgcatgaagaagtgtcccaaatgcccacgccccctattcctgctacgctgccttctctctctcagacctcacttacggcctcatgaagagttccctacaatcractgactaaggaagaaagaactcaggcctggttccagatggttctgcatgatctgaaggcaccctctagaaacttggtcatctatagcacatcagcctcttcctgagatattcttaaggacagcggtgcagaaacgtcctgccacagggcagaaatttaagcagtgcacctggccatttgtctcaaagaagaaatagtcagactaagaccaaattggctatagccactgctgagtgcccaatatgccaacactagagactaacactaagtccccaagctgtcacagttcactcgggtcatcagccag

SEQ ID NO: 429866 - DNA, 588 bp, Homo sapiens
cacactcttctcaaactcgtcagatgggagccctcagaagttggctaactcagatatcagaattgtcctcagaatgctcaccttgacctcatcttgtgactcaccgatatccagggctggctatgcaaaactgtgcctagcgagaagccaacrgaaagtgaggaggacaaacaatacctccttgaacagccaggtaaccaagaagaggagaagacattgagacagctgagaagccagagtctctctcatgagaacaatgccccaaattggacacaggatgtgtctaatgagagctccactgccaccagcactgagcactagaagctgcggtgacaccactttctacccaggcactggacgctgaatgccacaactagcataccactgttgtgaggaaaaatagaaaaatatatatctagaatttccaaaatttctagttggtggtgatttctgctactcacataggcacagtaacatgagaattgtgacagaatcatgcatcacttaatgacggagatacatttccagaaatgtgtcattaggcaattttgtcattatgtgaccatcagagatgatacttatacatac

SEQ ID NO: 429867 - DNA, 598 bp, Homo sapiens
gcttgtgtgggcccgttttgtttttttgttattcttgttttttaaaggcaaaataatcccaagtaaagttttgtctctctgtccacattgacctgaatttgatttgaaggtgaacgagtgtggacttcattctacaaactgctgctgaggtctctctagaggagcagggaagagggtctttatgacattttgaataggaaggctgatggctgcagcataatgttcgcaagatgctactgtttctgacttccggtctgcgtgactcctttctttctcttccaatgtgtgaaatggtttcctatgtctaggatgttttgtgtgagggagaaaggtgggaataaaagtttaccatatctgagaggaaagagagagagagtcatttgtgaaggtaggaagtaaagagagatggtttagtggtcactgaaaggtggctggatctcccaacatgtggccacactgtctgtctctggggtcttgggtcatgtcaggtaccggctggatcccggcagaggtagctgcagggagggaggttttctctttgctgctagtgctgcccawagtggagccttatgtctctctctctgctccacttgtgctg

SEQ ID NO: 429868 - DNA, 613 bp, Homo sapiens
tggcagcgattgcgaggggcctaggttagggacacgctcttctcgctgggtcccaagcccaatcacccaggccaatcaccagcctctaacctccttcccctctaaccccatccccacctaggaagttaaaaaacgcccctgccgccttgactcttagggggagaaagaggaaacccgaggactcctgcctgagggctccataaagtaaccaggaaccgagtgacaggtgctgggagaaatgaacatgcaraaagaccagctttttctattctaaatgtgaatatgtaaaacaagagttcaaactcaagaatctgggtgtccattttgattaaaaaacaaaacatctctccaagaaacaggttctatggtacttgtgagatgcttttctgccagacagctcccaaatcacatcttattaagggagacttcgaaggcctgttagcaggtgactgcggcaggggcaggggcgcatcagctgtccggcttggaccggcgtgggcgtgggctgggggcttttccgatttgctgagtcagccgcgggcgccgcgggctttggtgtttccagcccaagcgactgtgcttcgctgactggtgtgtcaacttggtagtgtaa

SEQ ID NO: 429869 - DNA, 600 bp, Homo sapiens
aaagggggaagcagaggaagagagagggttaagaaaaggagcctgtggctttaagaccacaaaatgctgtcatacctgtcagctgcagcaaagttaagctctcatggaaaccatgcataattttttttatttcaagtctatacttttaaaaaacttaattaatccagctttgttcttaacctatttaaacktaacgcaaggctgatgaccacagatgatttttttctttgtgggagaaagtagctctcctgcctgacatggaattattgtgaatttacttttggctgacaaaaggaatggggagacatcatctctttcagagggtggtaaaatgtatatgttaagcaggatttggggaaaccagggcaaatttgatctgactgtgcagtctaacataacctgagttgtaaagaaatgtacattaaatttggaattttgataaatgaatattcctagcaagtgaataaaatgtattcaattaactaaaaccctgtgcacttctgaactgaagtggaatcgactgtaattgatttatttgaaaccagaggttaaggactgaattagctaagtacaactgggtatttcaagccactgacttct

SEQ ID NO: 429870 - DNA, 638 bp, Homo sapiens
aaaaaaaagggtgacaatatcatgatcttcaaaatgtccacctaccgaataaaaataactaattctctgcatttggaaaccattgtttattatgaccttgtaatgttctaacccactatttcctttctgtctttctcaggatgcaaggattatattgggttcaggttttccaacataacaagcatctgtaaatccagatatgaatgaatggtatttaataagattgttttcgttttaaaatgagtatttatgtgtcrttggaggcagagcagcaatgtatggctgtttatgaatgctattgtgcctgaggttaggatcccccacacaatctgagatgcagccaagaaaaacagccctgatagacaatgcttcacttcacctgctacaatgctgtgtgcatttcatttctgtcaagagtatgtacagttagggttcattcgcctcattattttgttacatctacgttacagttaaccagtctctctaggaaataataaataaccgctttaaaaaacaattgccgcgttgcgttctgagaatacactttccatttgaattcttttttaaacccaccattgttatgaattctctggcttcggaaaatagaattcagactccaccaactcgcgttcgtttgt

SEQ ID NO: 429871 - DNA, 672 bp, Homo sapiens
gtggcgattgcacaacattgtgaatgtgctaaatgccacgaaaytgtatactttaaaatggttaattgttatgttatgtgatcttcatctcaattgaaaacaaaaagaggaaaaggagaaagggactttccgcattctaagttcttaagaaagtcctttctcagtgaaaggatgactaaggtgttatgcataggtcagttgagtgctgagtgggcagggggcggggtggagaaaagccacaggcacaagtagaatataggaggatgaggtgtagaaagtgctgcagtggggacctttccccatactgagttagggtcccactaattcagcaaatgctcttctgcagctctccacactgcaattgactccagcatgcatactatacccacttctcgtgaattatctcttttcccaaaggggtgcccattccctgaaggctagaccttcagctctttcctgtggcacaacctcccccaaggctttatcctatcctgaggccaatccattcgagcctctggtgcaagcaaaacacaatattcgtccttgaggatacaaagataccttcagcaaaatccttgtcctccagtaggaccaagtctatgtggtctggattcccgtgatctccctgagctcatccactgcagatgcactggcatctttgctatgccttct

SEQ ID NO: 429872 - DNA, 524 bp, Homo sapiens
aattactgaagctctctgaacctcatttcgccatctgtaaaatggggatgtggttatcttccccactacatggctctcgtgagaatccgcggagatcacatttgtaaacacttctctcgctatgcctggcactttgttggggcccaataaaataaaaatccatggactctcagaggctccggtactcaaatgagcctcctggatccacgtctctttgattagccatctgcaagctggcatttctgagcgagggacttttcaaaacaggctgctcaagtttcttggccaataataggcgccgggttctgtgcggtgrgaacgagtaccaccaaccccagcaggagaccaagcagaaatcaccatgggagtgcaagctaagaaagggcaaaagaagaaagagaagggcagaaaaacaaaacaaaatgaaaccactcaggcagcgacttacagtcttaaagagagaattcccggaagggagacaaggcagtttctttttctgtgtgacaataaaaaacggtaaacaa

SEQ ID NO: 429873 - DNA, 563 bp, Homo sapiens
ctcaggtctaatactttacttcatttagaaagtgttcctgaaccccctaatctgccagttatgttctactccaggttcccatagtacctctaggcccctcccagggtacttgtcacagggcctccttactctctacccctttgggctccatgtgggcagtggtgataatggtcttgtttactgtcatctctccagtgccttgcacagggtggtacttctaaatatttgtaggagggttgttggaagtgattcttaatctgatttattaaaggaaaatattaaaattaaaaaaaatttatttgggtttgaatgataactgtatcgccccatttgcagaaagagttatactgtccggatctcttaagatcaattaaacagagcctttgttgtcayttctatatacaacttgactgtcaagtcagtaacaacatattattttgactcatagaattctttttggtgatatacctcactgtgaatttaaaattcaaactgcatttttgttaatgtggtcacactttatagaatctcttgcttaaaaattaaataattgtaacattatg

SEQ ID NO: 429874 - DNA, 563 bp, Homo sapiens
ctcaggtctaatactttacttcatttagaaagtgttcctgaaccccctaatctgccagttatgttctactccaggttcccatagtacctctaggcccctcccagggtacttgtcacagggcctccttactctctacccctttgggctccatgtgggcagtggtgataatggtcttgtttactgtcatctctccagtgccttgcacagggtggtacttctaaatatttgtaggagggttgttggaagtgattcttaatctgatttattaaaggaaaatattaaaattaaaaaaaatttatttgggtttgaatgataactgtatcgccccatttgcagaaagagttatactgtccggatctcttaagatcaattaaacagagcctttgttgtcatttctatatacaacttgactgtcaagtcagtaacaacatattattttgactcatagaattctttttggtgatatacctcactgtgaatttaaaattcawactgcatttttgttaatgtggtcacactttatagaatctcttgcttaaaaattaaataattgtaacattatg

SEQ ID NO: 429875 - DNA, 574 bp, Homo sapiens
attgtcccctttgacaagagttacaataatttgtggagaaaatggcacctctgttttttagcattttctatatactacaaatgtatttccttatttgtatacaaggaatgtcaatttatctaaattgactgtcaaccaaagtcatttctttattgacttccactactaaatgagagttagattccaaaagatctgtggtatgcatgaggaaaattttaaatttaaaaaaaatttttttttaagattccaaaagatagggcttgggaagtagcctcaacattggtattactggattaccttcagtctgggagcccaagtgcctggatgtctcagtggagaggctcaggacttagagcaggagttagacactgaagcccttccctctggagaagccacacgtgacttctttgtcgattgctttagtgaatgcttccccagtggytgacagagaactttgcctccattttccatgctcttcagggctcctccagcctctctcacttcttccttgtttgaggaggaaatggtacgcttccagtccaccatgctcagtcatacggcttaaaggagaggg

SEQ ID NO: 429876 - DNA, 574 bp, Homo sapiens
attgtcccctttgacaagagttacaataatttgtggagaaaatggcacctctgttttttagcattttctatatactacaaatgtatttccttatttgtatacaaggaatgtcaatttatctaaattgactgtcaaccaaagtcatttctttattgacttccactactaaatgagagttagattccaaaagatctgtggtatgcatgaggaaaattttaaatttaaaaaaaatttttttttaagattccaaaagatagggcttgggaagtagcctcaacattggtattactggattaccttcagtctgggagcccaagtgcctggatgtctcagtggagaggctcaggacttagagcaggagttagacactgaagcccttccctctggagaagccacacgtgacttctttgtcgattgctttagtgaatgcttccccagtggckgacagagaactttgcctccattttccatgctcttcagggctcctccagcctctctcacttcttccttgtttgaggaggaaatggtacgcttccagtccaccatgctcagtcatacggcttaaaggagaggg

SEQ ID NO: 429877 - DNA, 531 bp, Homo sapiens
acacattaagtgctcaatgcattttaggcattataattacttttattaaaaacctaagaatgtctgtgatctttgcaatctaaaagagcttcataatttttcctagtataacacataaataggagggacaaatatatgtgaaaccaggcaaacttacattgtacacaagctctttatcaatatatacatttaaaaatatacacaactatttggtatccaaaagatggaggaagaaaggaagagtagaaaggtcctctccaggtgtaaggcaatgtggggtaatctttagctatgsaggttcatacactagctttcataaaatcttagttgtgccaaggtactgctgtgtagtgggggtttgttcgagggatttgaggttgatctgggaaaaagacaggaccacagaggcagttaacacacaacaagctttaatgagtggtgctttgtacagggttgcatgggagggcatccagaggcttagggtgaggaggtcaccatgcagaaggggaggaggacaaaggaactcccaag

SEQ ID NO: 429878 - DNA, 563 bp, Homo sapiens
ctcaggtctaatactttacttcatttagaaagtgttcctgaaccccctaatctgccagttatgttctactccaggttcccatagtamctctaggcccctcccagggtacttgtcacagggcctccttactctctacccctttgggctccatgtgggcagtggtgataatggtcttgtttactgtcatctctccagtgccttgcacagggtggtacttctaaatatttgtaggagggttgttggaagtgattcttaatctgatttattaaaggaaaatattaaaattaaaaaaaatttatttgggtttgaatgataactgtatcgccccatttgcagaaagagttatactgtccggatctcttaagatcaattaaacagagcctttgttgtcatttctatatacaacttgactgtcaagtcagtaacaacatattattttgactcatagaattctttttggtgatatacctcactgtgaatttaaaattcaaactgcatttttgttaatgtggtcacactttatagaatctcttgcttaaaaattaaataattgtaacattatg

SEQ ID NO: 429879 - DNA, 563 bp, Homo sapiens
ctcaggtctaatactttacttcatttagaaagtgttcctgaaccccctaatctgccagttatgttctactccaggttcccatagtacctctaggcccctcccagggtacttgtcacagggcctccttactctctacccctttgggctccatgtgggcagtggtgataatggtcttgtttactgtcatctctccagtgccttgcacagggtggtacttctaaatatttgtaggagggttgttggaagtgattcttaatctgatttattaaaggaaaatattaaaattaaaaaaaawttatttgggtttgaatgataactgtatcgccccatttgcagaaagagttatactgtccggatctcttaagatcaattaaacagagcctttgttgtcatttctatatacaacttgactgtcaagtcagtaacaacatattattttgactcatagaattctttttggtgatatacctcactgtgaatttaaaattcaaactgcatttttgttaatgtggtcacactttatagaatctcttgcttaaaaattaaataattgtaacattatg

SEQ ID NO: 429880 - DNA, 442 bp, Homo sapiens
tctctgctgcatttaacatcttgaccacttccatttcagtgataccacctctgttggtttctcttctacctttctggtcatatcccagttccctttttagcctcttcctcgatccagtcttaaatgcctgtgttcagcagcctctttgcttctcagtttacccctcttcctagttaatctcagtctcttctatggtttcttctaccccatgtacaccgatgcccagttgagtcccctttctccatttgtctaatgaacagaccattagatagattatctacacttaatttggaccctgagctagtttctytgctgaggtccaagtttttttttttttcagtgtagatctttgtgatgagctgccttttgaacagccctgcttggatgtctcaaccatctctcaagttcaacgtgtccaaacttatcttcccaacaaactcca

SEQ ID NO: 429881 - DNA, 515 bp, Homo sapiens
aaaatatccaaaaaaaggactggggtcaggagacctgtatttgcagcctcaagctcacaatacayattatcatttcaattctagttcttgctgcacaaggcatagcccacaaggccctctctattctagtcccatctatccccaagtttttggtcatctgacacatcgagaagctcaccagtctttggacatatcagacatcttctgagcttcatgccttagctcaggtcggacactctctccttcctcctctctgctttccttcaacagcttctgccctgagttcatttctgagtgaattatttgctcctacatctgtgcttacatatggcttaatttagtacttgaatatcatgtttggttagttgagtacctatgttatgtggttctcacccccccaaaggatgatgatttgcctacttttttttttccagaaattagcatagtgtctgactcataattgtgtccattcaaacctgttctttgcttccatggcatagaatcatcaccttaaa

SEQ ID NO: 429882 - DNA, 686 bp, Homo sapiens
caggaacaacacacttgcagtgagccgagattatgccactgcactccaaattgggcgacagagcgagactacgtttcaaaaaaaaaaagaaaaaaagaaaagaaatccactgactgtgcacccagggttgttaccatgagattcattttcatcatgggtgaaggcaggtacacatctaaggctcagtgctacctgtttcaggtcattgcaatggcaattcctgttttccaaacaaacacagttttgtacctaacttcccaaaatgtgatgtaaggaaagttatcatgatgagcttttctgcaaattaaaataaaataaaataggctggttrcagtggttcacacctgtaattccagcactttgggaagccaaggtgagaggatcacttgaggccaggagtttgagaccagtctgggcaacatagcaagacctcacctctcaaaaagaaaaaaaaaaagccatgtacaataaaataattagaaccaaaaaaaaaaagaactttaaaaagtggtaaatattatatgcccccttctaaagattcctacaacgtattagcacatatggactctgaggagtcttcaataagatttaacatagtttaatctagaattttctaaaagtatttgatataatagaaaacccccttatacatacagcacctattaatacaccagaaacagtgtttt

SEQ ID NO: 429883 - DNA, 556 bp, Homo sapiens
gaacacagtaagaataacagaattgacaaggtcccattgctatgatggtttaatgcctatgatacacagcctaaataaagatataatattgccaccaaaactatatattaataggtttcaaacatgaattagcatttaactaaaaacatgagaatgcttccctcttggaaaaaaagaaagctaaattcatcaaattttaaatttataaaacagatggatgattagcattcaaaatgattcaacattggatgtcaacrttgattttttttttgaccggcaattgcccttaggaaagtcagtttatgaaatttcacttctcactagtttttcagcacacatccattgtattagatgtggaaaacatagtttaaaaactgtcatcccaaaaattgtttgaaaagtttctatgatagataggttaacaaactctgttggatagatgagctattctgctatgtcatgaaaaggtagaactttctgataaggctatttcaaaaaaagtaaatatatcccaaagattgatgtatgagtgaggattgctttggctgcaatcatc

SEQ ID NO: 429884 - DNA, 594 bp, Homo sapiens
aaatacagtctcagtgacttctctcctactcaaacagagcactgttttgaattctgagttttataatttagaaagaatgggctcatgcctttaatctcagcactttgggaggctgaggtaggtggatcgcttgagctcaagagttcraaaccagcctgggcaacacagcaaaaccccatctctacaaaaaatacaaaaattagctggccgtggtggcatgcctgtagtcccagctacttgggaggctgaggcaggagaatcacttgaactctggaggcagagattgcagtgagccaagattgtggcactgcactccagcctggtaacagagcgagactctgtctcaaacaacaacaacaaaaaattagtcaggcatggtggagtgcacctgtggtcccagctactcgagaggctcaggtgggagaatcaccttagtctgggaggtcaaggctgcagtaagccaagatcacaccactgcgctccatcttgggtgacagagtgagaccctgtctcaaaaaaaaagaaagaaagaaaggatgcagcaaattaagagcacactcagaggacatgacaggacagcaaagaaaccattgg

SEQ ID NO: 429885 - DNA, 594 bp, Homo sapiens
aaatacagtctcagtgacttctctcctactcaaacagagcactgttttgaattctgagttttataatttagaaagaatgggctcatgcctttaatctcagcactttgggaggctgaggtaggtggatcgcttgagctcaagagttcgaaaccagcctgggcaacacagcaaaaccccatctctacaaaaaatacraaaattagctggccgtggtggcatgcctgtagtcccagctacttgggaggctgaggcaggagaatcacttgaactctggaggcagagattgcagtgagccaagattgtggcactgcactccagcctggtaacagagcgagactctgtctcaaacaacaacaacaaaaaattagtcaggcatggtggagtgcacctgtggtcccagctactcgagaggctcaggtgggagaatcaccttagtctgggaggtcaaggctgcagtaagccaagatcacaccactgcgctccatcttgggtgacagagtgagaccctgtctcaaaaaaaaagaaagaaagaaaggatgcagcaaattaagagcacactcagaggacatgacaggacagcaaagaaaccattgg

SEQ ID NO: 429886 - DNA, 599 bp, Homo sapiens
tttctaataagtagaactaacaagaaaaaaaagctgccttgcgaagtagcaaagttcccaacactaggaatgttcaacagggtcatgaagaatatctgttggggacactacagaacagcttcctatattttgaatgagaaatagataagatcccttcctaattcaaatgtctatgactttcagctgaatgcagtaccaagtgcattcatagtttataatattaatgtaccactgccctctagtgtataacctaagaagataaaatcactgattaaaaaaaaggaaaaaaatgtttgcacaagcwtcatgcaaaattatttttattgacaaaaagttatctcaccaatcattgagtagaaccttcttattttcaggtgagaaaactagaggacagaaagtgatacaattagcccaaagtcacagggctacacagcacagagctgggataagaatctcactctctaactctcaggtcagggttcttcctgacatgtcacattcctgaggctgcagcatagatccagttatccttggatagcatcacttgtctgagccaaaactctttggttctaaccacgtaactggacaagtttctctca

SEQ ID NO: 429887 - DNA, 624 bp, Homo sapiens
ttctttcttagtggtatataaaataatggtacaacttacaaccgatggcttcttagattccataaaacacagtttttttgtgtatccagtatatttcaggttgctattttaggccctagggatatgtgaataagaaatgtaaagtttttcttttgtgaagcttgcattgtgatagaggaagacagataataaacaaattaacaaatatrtgatacactgatgccaggtatggtgacacagactgaataggaactagatttaggcctagatcccaatctactgtgcaggaaaataaaaaataatgagaagtgaagtttttaaaaatcagatttcacgtacgagaaatagcaatttggaaggaatttacacatattttgggtatttcatctcctctgctagacagtgagctccttgaaaactttttataaagggcaatttacttaattttactacaaaagctgaaaaatatagtatggattggacccttgatctcaagggtcaggaaactttttctgtatagagccagagagtcaataatttcagctttgcacatcatatgctcaatgacacaactactcacctctgccattgtaacacaaaagcaacatggataaatacatagat

SEQ ID NO: 429888 - DNA, 624 bp, Homo sapiens
ttctttcttagtggtatataaaataatggtacaacttacaaccgatggcttcttagattccataaaacacagtttttttgtgtatccagtatatttcaggttgctattttaggccctagggatatgtgaataagaaatgtaaagtttttcttttgtgaagcttgcattgtgatagaggaagacagataataaacaaattaacaaatatatgatacacygatgccaggtatggtgacacagactgaataggaactagatttaggcctagatcccaatctactgtgcaggaaaataaaaaataatgagaagtgaagtttttaaaaatcagatttcacgtacgagaaatagcaatttggaaggaatttacacatattttgggtatttcatctcctctgctagacagtgagctccttgaaaactttttataaagggcaatttacttaattttactacaaaagctgaaaaatatagtatggattggacccttgatctcaagggtcaggaaactttttctgtatagagccagagagtcaataatttcagctttgcacatcatatgctcaatgacacaactactcacctctgccattgtaacacaaaagcaacatggataaatacatagat

SEQ ID NO: 429889 - DNA, 608 bp, Homo sapiens
aaaatgaaagaaattttgctggtgaccctcatcttttttttttttgcttggagacggagtctcactctttttcacccaggccggagtgcagtggcgctgtctgcaaactccgcctgccggttcacgccattctcctgcctcagcctcccgagtagcttggactataggcgcccggctaattttttgtatttttrgtagaaatggggtttcaccgtgttagccaggatggtctcgatctcctgacctcgtgatccgcctgcctcggcctcccaaagtgctgggattacaggcttgagccaccgcgcccggctaccctcatctttctgaatgggttaagagacagcacagtccatagctaaccagtacaccttatgatttcaatacattgaaatgatttcagttgccaaggatgtctggcttgttattctttgaatcattgataaagggaggaaagtagtaccatagcagattaatgtgggagcttatctcagggaggtagaaaaatcgaccctgtacatgtaggatgcacaccatactgcaaaacataggacatgaatgtgtatctatttagatatccctgttgatattttcaaatgttatttttatta

SEQ ID NO: 429890 - DNA, 586 bp, Homo sapiens
ggatctaaccaaaaatgtaaccaaacacctggtgaaccagacgactcatattgtctcttccaactctgagagtctatgaattgtatgcaatggaatctactcagaaacaggtgtctcctagacccctttcaagggtatcagattccgatgtaccaaagtcacaggcattcttcatataaggtgttctcacctattatgatggacatggcaaaaagggtcacagtgttaagacaaagctactatgtacctacccaagaacaaatcacaggagtgggcagggaatataygtatatttttaaaaacgtactatatagttcctcattctctatcactaaattatgccctacctaaagtttttttttctaagaaaaaataaagcattataatcaatagccaatgaaactggattccagccatgtaggttgaagcacaagctctaaagtctcctctacatcttgagccagtcattaacctctctagctacagtgctctcatttataaaatgggacaatatcacctgtctaagctgctctcagggaaaatggagagtcccccattcactttgaaaagtgaaaagaggtatgca

SEQ ID NO: 429891 - DNA, 538 bp, Homo sapiens
gaactattcaggatctatgatattttctgaggtaactgggtaatagaatatcaaattgctgctatctcggacctattgttaaaggatgatgctttgcctatgtaataggatatatcctaagtggggatgtgtatatttcaggaactttaattcacaagtatatattgatatctgatgtgtgtatagtacatctgttggttatgtacattttaatttacatgttgtgtagaacatagatgagaactctgggaaaacttgggaatggcaaccaaccaaaatcatttttaatcatttattagaaatttctcaatattgtgtctttttcttttgaaactctaaacacttcagaaaaaaamactatcagtgtagttcgttagtataattatagatttacatatatttgaatagttaatttgctttgttttacacgtagcccactgcctcattataggtaaaaggcatttataactgctcaggggattacgagaactcaactgaaactgaatttttgtaacaagaatgttaatagtggcaaagt

SEQ ID NO: 429892 - DNA, 593 bp, Homo sapiens
gacctgcctttgcctctcattggctagaatcatgtcacatgtccaagacttagtttcatggaattgtgggaaagaatatctctagaatattcagattttatagtgataggtcttcataaggaaggttcaagggggttgggagagatgttgaatagacgctctacagagttggctagagtagtcaatttcctttttggatagagtcaaaatctgtctcttagttactccactaatgctcttagttaagctctgtaagccattcctaaggaataaggacttctaatgaaggaaatgtgtagaaagctgtaaagttttcctcctttttctttttctacactcctttgcatggacctttatgtgctgtcataatagtgaaaaatacggaagktcagtgttttctctggctcaaactctttccttgctttcaacagactgtgccatagctgcactgcgccatagctgcactgcttactaaggtcctttctttatagtaattcatcaaaacctataatttctcctttatttatttgtctgtgcttcccttttgtcaccccagatacctgaaataataagctggtagaaacaagtcggaa

SEQ ID NO: 429893 - DNA, 593 bp, Homo sapiens
gacctgcctttgcctctcattggctagaatcatgtcacatgtccaagacttagtttcatggaattgtgggaaagaatatctctagaatattcagattttatagtgataggtcttcataaggaaggttcaagggggttgggagagatgttgaatagacgctctacagagttggctagagtagtcaatttcctttttggatagagtcaaaatctgtctcttagttactccactaatgctcttagttaagctctgtaagccattcctaaggaataaggacttctaatgaaggaaatgtgtagaaagctgtaaagttttcctcctttttctttttctacactcctttgcatggacctttatgtgctgtcataatagtgaaaaatacggaaggtcagtgttttctctggctcaaactctttccttgctttcaacrgactgtgccatagctgcactgcgccatagctgcactgcttactaaggtcctttctttatagtaattcatcaaaacctataatttctcctttatttatttgtctgtgcttcccttttgtcaccccagatacctgaaataataagctggtagaaacaagtcggaa

SEQ ID NO: 429894 - DNA, 523 bp, Homo sapiens
tgaggattgtaacaagttgctgctctatacctgctcacaaaacctgttactctatacttgaccaataaatcaaacatttactgattccttattatatactaagcattgtgccaggtttttgtggaggctgaaaaaatacgagatatgctytctgcactttaggtgcttataattgagcttcagggagaatataaatgaaaaaaaaagggggaaagtccatcattacaggatggcatgtaatttagtgctaaatggtgtgctgcagaccatgagagaaaaactgaatggtcagaagagtccgaggaactcagacctgcctcatggtctgtgaaggaacatctgtgttggaaaccagagagaggaatgaggaagcaccagaggtctgtttatctgaaaaaactctactgagtaacctgtaacccttgggttttatctgaacttctttgtggtgtggattaaactcagggctcaagacaacccatgcactatagcaccgactgaaggtcttggtaaataacttaat

SEQ ID NO: 429895 - DNA, 523 bp, Homo sapiens
tgaggattgtaacaagttgctgctctatacctgctcacaaaacctgttactctatacttgaccaataaatcaaacatttactgattccttattatatactaagcattgtgccaggtttttgtggaggctgaaaaaatacgagatatgctctctgcactttaggtgcttataattgagcttcagggagaatataaatgaaaaaaaaagggggaaagtccatcattacaggatggcatgtaatttagtgctaaatggtgtgctgcagaccatgagagaaaaactgaatggtcagaagagtccgaggaactcagacctgcctcatggtctgtgaaggaacatctgtgttggaaaccagagagaggaatgaggaagcaccagaggtctgtttatctgaaaaaactctactgagtaacctgtaacccttgggttttatytgaacttctttgtggtgtggattaaactcagggctcaagacaacccatgcactatagcaccgactgaaggtcttggtaaataacttaat

SEQ ID NO: 429896 - DNA, 570 bp, Homo sapiens
cagctgccttcttgctgtgtgctcacatgacctcttctttgagagaactctggtctctttccttcctataagggcactgatcccatcatggggattctaccctcatgaccacatttaaacctcccaaaaaaccccacttcaaaatatcaatacrttggggacatcaacatatgaattttggagggacacaaacattcagtccataacacttggtatgctcaagttgtatgatggaaaggagaaagggagaagcttaccagagggtccacttcctcagtgaactttgctacagagaaagtgcatcctagctactctatccttatcatttgatgtgctcagttctttcaagggcacactgatttcagcatcttcatcacagttgaaatcaaggctctgaatgttaaattggaaggctgctgtgcaccaatttttgtgtttagtattaaggcctcttgaatgcatgcttttgagaaatgtatactgctctgtgcaaatcatacaatttatccatcagcttccatcattaatttaacatatgggtagcagagaagccactactcactcagttct

SEQ ID NO: 429897 - DNA, 570 bp, Homo sapiens
cagctgccttcttgctgtgtgctcacatgacctcttctttgagagaactctggtctctttccttcctataagggcactgatcccatcatggggattctaccctcatgaccacatttaaacctcccaaaaaaccccacttcaaaatatcaatacgttggggrcatcaacatatgaattttggagggacacaaacattcagtccataacacttggtatgctcaagttgtatgatggaaaggagaaagggagaagcttaccagagggtccacttcctcagtgaactttgctacagagaaagtgcatcctagctactctatccttatcatttgatgtgctcagttctttcaagggcacactgatttcagcatcttcatcacagttgaaatcaaggctctgaatgttaaattggaaggctgctgtgcaccaatttttgtgtttagtattaaggcctcttgaatgcatgcttttgagaaatgtatactgctctgtgcaaatcatacaatttatccatcagcttccatcattaatttaacatatgggtagcagagaagccactactcactcagttct

SEQ ID NO: 429898 - DNA, 570 bp, Homo sapiens
cagctgccttcttgctgtgtgctcacatgacctcttctttgagagaactctggtctctttccttcctataagggcactgatcccatcatggggattctaccctcatgaccacatttaaacctcccaaaaaaccccacttcaaaatatcaatacgttggggacatcaacatatgaattttggagggacacaaacattcagtccataacacttggtatgctcaagttgtatgatggaaaggagaaagggagaagcttaccagagggtccacttcctcagtgaactttgctacagagaaagtgcatcctagctactctatccttatcatttgatgtgctcagttctttcaagggcacactgatttcagcatcttcatcacmgttgaaatcaaggctctgaatgttaaattggaaggctgctgtgcaccaatttttgtgtttagtattaaggcctcttgaatgcatgcttttgagaaatgtatactgctctgtgcaaatcatacaatttatccatcagcttccatcattaatttaacatatgggtagcagagaagccactactcactcagttct

SEQ ID NO: 429899 - DNA, 580 bp, Homo sapiens
gcaggcaccttgctcagtgtctgccctgggagggtagtccccttcctctcacaggacctctcacctggtagaggtcatgaagtgctcttggcaagtatttttgattgtttgaggcaagactcaggtggtgttaaatgaaactggcccagggacattccctaatggctcagtgctcagccacttcacttttgggccacagatcagccttttctggctgccccttggaastgctgattccctcaggctgctacttcaggtcttagggctagcccttctttcagggagtctctaacacttgcccagcatgtactctgttcacatagcgttctaactactcgtctacatggcatccaatggtttttggccccaatcttacatcttaaacacacacacacacacacacacacacacacacacacacacacagacacacatacacacacacacacacgcttttttataaattttaatttttttgtttttgagagacagggtctcgctctgtcacccaagctggagtgctgtggcgtgatcacagtgtttgccaccatgcctggctaatttttaaattttttgtaga

SEQ ID NO: 429900 - DNA, 580 bp, Homo sapiens
gcaggcaccttgctcagtgtctgccctgggagggtagtccccttcctctcacaggacctctcacctggtagaggtcatgaagtgctcttggcaagtatttttgattgtttgaggcaagactcaggtggtgttaaatgaaactggcccagggacattccctaatggctcagtgctcagccacttcacttttgggccacagatcagccttttctggctgccccttggaactgctgattccctcaggctgctacttcaggtcttagggctagcccttctttcagggagtctctaacacttgcccagcatgtactctgttcacatagcgttctaactactsgtctacatggcatccaatggtttttggccccaatcttacatcttaaacacacacacacacacacacacacacacacacacacacacacagacacacatacacacacacacacacgcttttttataaattttaatttttttgtttttgagagacagggtctcgctctgtcacccaagctggagtgctgtggcgtgatcacagtgtttgccaccatgcctggctaatttttaaattttttgtaga

SEQ ID NO: 429901 - DNA, 580 bp, Homo sapiens
gcaggcaccttgctcagtgtctgccctgggagggtagtccccttcctctcacaggacctctcacctggtagaggtcatgaagtgctcttggcaagtatttttgattgtttgaggcaagactcaggtggtgttaaatgaaactggcccagggacattccctaatggctcagtgctcagccacttcacttttgggccacagatcagccttttctggctgccccttggaactgctgattccctcaggctgctacttcaggtcttagggctagcccttctttcagggagtctctaacacttgcccagcatgtactctgttcacatagcgttctaactactcgtctacatggcatccaatggtttttggccccaatcttacatcttaaacacacacacacacacacacacacacacacacacacasacacagacacacatacacacacacacacacgcttttttataaattttaatttttttgtttttgagagacagggtctcgctctgtcacccaagctggagtgctgtggcgtgatcacagtgtttgccaccatgcctggctaatttttaaattttttgtaga

SEQ ID NO: 429902 - DNA, 558 bp, Homo sapiens
atccacacacacaattgtgtgcaaaatgatctggcatcatgcagtacattggatgaggctgtgcactcctgaaccatctaagtccatggttgcacattaaaatgtcatgttgagctttagaaaatactttgccctgtcccttcccagagagtctgctctaattgatcagaagtgaatcctagacactgaagttttaaaaaagatctcaggtgattcctagtgtgcaggtagatttgagaaaaatcgaccaaattgtaattttaaggtgagttgcatccaagtgatttttactcatttctaagtttatttcaattatagagactgaagggtaatctggaaggtattgtcagcaaaagtaattcccaagataggtttataaaacatcaaaagtttatactccaaactatacaacattttaaagcaatatgtgtcagggacatgaagatatgaataaagcattcaacctagagtttcattttgattcagaccagcactgtawtgaaagtttaatttccttatctgtcaaatagagctaatcatggtatctgcccaacctca

SEQ ID NO: 429903 - DNA, 586 bp, Homo sapiens
tagttatgtagtttcttttagtgtttttttccctctttgtagactgtgtgatgcttaagtactttattgtctgctcagtttgatttttttaacacctcccatctctcattagtctactgaaacagttttatttattacagctgatagttaactcaagtgcatggtgtttcccacaataataaaagttcgtttgatgtcttttttggcacaatggtggagaatggcagaaaaaccactcctgctaggacagagaatatacaacagaatcaaaagcaaactcagcatatgtaatgctgatggtgccagttgggaaaaccaagggttttaaattgagattttgaaatctgaargcaatcattaaggtcagatgtggtctttaggtctcatggcagttttatttcccagaatgtttctgtttcccagtaatagtcagaatacagaagtagaaaatagttttaaatagcatttcttgcctcgcataatttacatgaacatgcagagtctcaagatcacatagctgtggggctttgcttcagtaatcaattctactttttgtaagtagattgcagtttaagtctttgaattt

SEQ ID NO: 429904 - DNA, 586 bp, Homo sapiens
tagttatgtagtttcttttagtgtttttttccctctttgtagactgtgtgatgcttaagtactttattgtctgctcagtttgatttttttaacacctcccatctctcattagtctactgaaacagttttatttattacagctgatagttaactcaagtgcatggtgtttcccacaataataaaagttcgtttgatgtcttttttggcacaatggtggagaatggcagaaaaaccactcctgctaggacagagaatatacaacagaatcaaaagcaaactcagcatatgtaatgctgatggtgccagttgggaaaaccaagggttttaaattgagattttgaaatctgaaggcaatcattaaggtcagatgtggtctttaggtctcatggcagttttatttcccagaatgtttctgtttcccagtaatagtcagaatacagaagtagaaaatagttttaaatagcatttcttgcctcgcataatttacatgaacatgcagagtctcaagatcacatagytgtggggctttgcttcagtaatcaattctactttttgtaagtagattgcagtttaagtctttgaattt

SEQ ID NO: 429905 - DNA, 620 bp, Homo sapiens
tagtctactgaaacagttttatttattacagctgatagttaactcaagtgcatggtgtttcccacaataataaaagttcgtttgatgtcttttttggcacaatggtggagaatggcagaaaaaccactcctgctaggacagagaatatacaacagaatcaaaagcaaactcagcatatgtaatgctgatggtgccagttgggaaaaccaagggttttaaattgagattttgaaatctgaaggcaatcattaaggtcagatgtggtctttaggtctcatggcagttttatttcccagaatgtttctgtttcccagtaatagtcagaatacagaagtagaaaatagttttaaatagcatttcttgcctcgcataatttacatgaacatgcagagtctcaagatcacatagctgtggggctttgcttcagtaatcaattctactttttgtaagtarattgcagtttaagtctttgaatttgtctatctctgatgtaaatatgtcagagttaaccacttctaaatcatgtatagtaatataaaattttgaaggcactattatttaggggctgacttacagggccctggtttctcttttactagatttctgaactttttcccatc

SEQ ID NO: 429906 - DNA, 474 bp, Homo sapiens
aattaaacatagctaaagaagcagtttcaggactgagccctgggacactawaggttttagaagaggtggatctggcaaaggagattgacaaaggatggccagaaatatgaatccagaaggtgggtgaagacagtgtttaaggaggagagtgtccactgggtccgaagctactgacagatgaggagagatatggtctgagagttgataacagaggtctttggtgatcttgacaagtgggttttagtggaatgacagagaagtgccagcttggagagggttcagggtactatgagaagaaaaatgggtgcagtgaatatattaactctttcaaggagtgttttttgttttgttttgttttgttttttcttgaaaggaacttatgatccagcagaaagggatgatacaggagagggaggggggaggtaattgcagaagccaaatccttgagagtgtgaggggaacggatttcagtgc

SEQ ID NO: 429907 - DNA, 540 bp, Homo sapiens
taaaaccacgtgagcctctattaaatctaagggtggaaatagcaagtcacctggggcagctttttgttttctgtttgttcatttttagaaaaagtaatttaaactgcttctgccttgaattttaaaatgttggggtratgggcacccccttctctggaaagagcatgtaacaagacctatgtactggaggtagacacaaaagatgtctctccccatgttgctcagctctgtggatggggtgagaaaatctgcagaaagaaatctgaagtcttctgaggattttttgggaacctcaacctgagctccctgagattcacaatggaacatctgtgaagaacaactagagtagccattcccaaggtccattgacaagaaaggggagtcccagagagaagatttcctggaaagaaagggcatgaagcccctttctggtgagtatggagtgaggctggagacccttctgtgtcatttcagaccttcctaaaaatagataccaaggcaggattagagatggaagagatttgtcagaagaaatgttcc

SEQ ID NO: 429908 - DNA, 540 bp, Homo sapiens
taaaaccacgtgagcctctattaaatctaagggtggaaatagcaagtcacctggggcagctttttgttttctgtttgttcatttttagaaaaagtaatttaaactgcttctgccttgaattttaaaatgttggggtgatgggcacccccttctctggaaagagcatgtaacaagacctatgtactggaggtagacacaaaagatgtctctccccatgttgctcagctctgtggatggggtgagaaaatctgcagaaagaaatctgaagtcttctgaggattttttgggaaccycaacctgagctccctgagattcacaatggaacatctgtgaagaacaactagagtagccattcccaaggtccattgacaagaaaggggagtcccagagagaagatttcctggaaagaaagggcatgaagcccctttctggtgagtatggagtgaggctggagacccttctgtgtcatttcagaccttcctaaaaatagataccaaggcaggattagagatggaagagatttgtcagaagaaatgttcc

SEQ ID NO: 429909 - DNA, 586 bp, Homo sapiens
gcagtggccccacaagacaacacacaaaagtcacagccaggattctccaaagtccaagctgttcttaagtctcacctgggctctccttgtagttgatgatctactgtgaaccaccccaaaaccgagtggcttcacacaattttgcatgggttttctgggcttccctaggcatttctaatctagggtctccccagcctccaaagtcacacagcatcacttctaacacatggctcgcctgatccaggttcaaaagtagggaaccacacagggcatggacaccaggaggcatggctcactggatacccagccatcataaagataggccactgtagcttggagggcagytggaccagagacacaaattttgagttttgactgtttttactcacaatacttctgacatcaaatgcgtgggtttttcttccactcaacggccagttctcttattctccagccacccaaccagatgtttgtaaactaaaaatcctaagctccacaccaattgaatggaccccctcttggccaaggggaccccagagaaaccttaaaaaatggagttcctggtcatgatgggaagggcagttgg

SEQ ID NO: 429910 - DNA, 586 bp, Homo sapiens
gcagtggccccacaagacaacacacaaaagtcacagccaggattctccaaagtccaagctgttcttaagtctcacctgggctctccttgtagttgatgatctactgtgaaccaccccaaaaccgagtggcttcacacaattttgcatgggttttctgggcttccctaggcatttctaatctagggtctccccagcctccaaagtcacacagcatcacttctaacacatggctcgcctgatccaggttcaaaagtagggaaccacacagggcatggacaccaggaggcatggctcactggatacccagccatcataaagataggccactgtagcttggagggcagctggaccagagacacaaattttgagttttgactgtttttactcacaatacttctgacatcaaatgcgtgggtttttcttccactcaacggccagttctcttattctccagccacccaaccagatgtttgtaaackaaaaatcctaagctccacaccaattgaatggaccccctcttggccaaggggaccccagagaaaccttaaaaaatggagttcctggtcatgatgggaagggcagttgg

SEQ ID NO: 429911 - DNA, 566 bp, Homo sapiens
ttgtcacacactcatacacttggatatattctacttgtttctctctctctctcttttttttttttgtaatgctggtcacagcccatgaaattgatttcactacacaccaatgaatgggttcttatcttgctgttcaagtcatcatctttgagcatctcccctccctagggctttgtaagagtgaatatgagtagccaactgttctgtgtgcttggtggaggaacaagggcagaggtgaggtgcagagatgaggatgagagagtgtagcgagggtgtagctccctgagtggagacgactagctcttataaaggcatcagcccatgaagacttgattggccatgggctgccccaagaaaaggggagactggcattctgctgccagcctgagggtcacagctttgtaggcacattgtagggaatttcccaaagcatggaggaggacctcactcccttcattcttcctctcttcctcactccytgtattagtctgttctcacggtgctaataaagacatatctgagactgagtaatttataaagaaaagaggtttaattgactcacagtt

SEQ ID NO: 429912 - DNA, 353 bp, Homo sapiens
acctggcagcgtggcactcaccagcttcatccaggactcctcgggtagacagtggggcaggtggggcagtccagggagttgggcttacccactcaccagctgtgtgactctggacaactgayaagtggcagagcctagggtcatctaccaggcagagttcttatttgcaggttacagagaatgactcaggtggatatgaggagaaacagaatttattaaaggatagcacatagcaaaggcaattgaccaggaatagcatctgaaattccactgagaagctggttccagaggatgccactggcaccccggaaaggtcctggtccctgtggtttgcacagcagatagggccagat

SEQ ID NO: 429913 - DNA, 581 bp, Homo sapiens
tgccacccccacagctgggcagagccttgagatggacactccctgcaaaccctgcccagcctagagctgagcacggggctttggggccccccaatggctctgctcagtcattcttcagggccagggaccaccttctggagcctgagccagaacctgagcctcccttcaggctcttctctcagccacaccaccaccccccgccygcttctcaccgcccagcccacatcaagccctaattctaccctttttattccatgtaagagcttgcccaaaaggagctctcgcccctagcaacagaaaaaggcttctgttcttagaaatacagcagccatttgtccatgcctggagaccctcttgttctgccctagtacatcgccttcccagctgtggccagaaattggcttttcttccatttctacttccttgctgaagccatcttctccacctgtctggtgttcattgcaccaggcatcctgctattgctattctatactggggttctggagcagcaggagtgtggccccaaggcaggaacgcctcccattgccttgatgacattcagcaaatcactcttgccctgg

SEQ ID NO: 429914 - DNA, 581 bp, Homo sapiens
tgccacccccacagctgggcagagccttgagatggacactccctgcaaaccctgcccagcctagagctgagcacggggctttggggccccccaatggctctgctcagtcattcttcagggccagggaccaccttctggagcctgagccagaacctgagcctcccttcaggctcttctctcagccacaccaccaccccccgcctgcttctcaccgcccagcccacatcaagccctaattctaccctttttattccatgtaagagcttgcccaaaaggagctctcgcccctagcaacagaaaaaggcttctgttcttagaaatacagcagccatttgtccatgcctggagaccctcttgttctgccctagtacatcgccttcccagctgtggccagaaattggcttttcttccatttctacttccttgctgaagccaycttctccacctgtctggtgttcattgcaccaggcatcctgctattgctattctatactggggttctggagcagcaggagtgtggccccaaggcaggaacgcctcccattgccttgatgacattcagcaaatcactcttgccctgg

SEQ ID NO: 429915 - DNA, 447 bp, Homo sapiens
ggccctcagaatgaaggagacgcaggcaccgtgggagcccagggcccctttccattgcaccagtgctccatcctcccacatctcccaaagatcagccctcctcagtgaccccgggagcccaggaagatcaaggatcgagactgtcgccctggacctrcctgctgtgtagctctgggtgcaagtcaaagatcaagctgaagtaaaggtatgctcactcagggttcaagggcttattattagtaacaataattccctacatatgtaaaatctcacaccggacatacgctttttacatcatcttgtggcagaccaggtttcactaacactggcctccatcacaactgtttgagtactgactgcgtggtgaaatattaaaagataaaaaagtcagtgcccttatacaaaggctggaatgaaacaaaaagcccatcaagagttttgccgtgg

SEQ ID NO: 429916 - DNA, 582 bp, Homo sapiens
ttgtaattttgagttggtctggcaataatttccaggccttctacctaaaaccggttacagaaataaaaacttcttcctccccagttcacctgcatctcgttattgggccatgagaaatagcagcccgaccctcagtttgrtccaggaacaatctcaccagggcttgccatcagcccaggacaattgacaaggtaagtactttatctccattttacagccgaggaaggtttgaagaggttaggaggcttggagaccacagctccagtggtgggatagagggtagtgggctacagttgagaaacggggaccgtcgttgctcctcaacccacttttctcaagaccttcataggtctttttcagctccctgcacacccagaacaggagcatttaagagaagtgttgcttttcatttgttcttaagacactgctctcgggcaccagatacaccaaccgagcgattctcagaacccctagcatgggccacaaaccaaacacgcagagccgcagcgaggacagagggtgccgcgtggcccttcctgacattctttcatctgcacactgtaccgtcaactcattttctgc

SEQ ID NO: 429917 - DNA, 586 bp, Homo sapiens
ggcttccctatctcagtgtgcctaaagaaatggacaggggccaggcgcagtggttcatgtctgaaatcccagcccattgggaggctgaggccagtgaatcacctgaggtcaggatttcgatatcagcctggccaacatggtgaaaccccgtctctactaaaaatgcaaaaattagctgggcatggtggcgggcgcctgtaatcccagttacttgggaggctgaagcaggagaatcgcttgaacccgggaggcagaggctgcggtgagccgagatggcgcgaytgcactccagcctgggcgacaatagcgaaactccgtctcaaaaaaagaaaacaaaagaaaggacaggaatgtgctcattgaggctccgtttccatcttctgtatgtgaagttcggtcattatccaggaagctcccccttctgtgcctattatgtgctccttctgtgaggtgcttatctgtgttttacagcctgatcttctaggatgctctttgttagaagccaagtgatttctttgaactgcttgagcttagaaagggagcaatttctgaggtgctttttgttcggaggaaagttttttgacgg

SEQ ID NO: 429918 - DNA, 586 bp, Homo sapiens
ggcttccctatctcagtgtgcctaaagaaatggacaggggccaggcgcagtggttcatgtctgaaatcccagcccattgggaggctgaggccagtgaatcacctgaggtcaggatttcgatatcagcctggccaacatggtgaaaccccgtctctactaaaaatgcaaaaattagctgggcatggtggcgggcgcctgtaatcccagttacttgggaggctgaagcaggagaatcgcttgaacccgggaggcagaggctgcggtgagccgagatggcgcgactgcactccagcctgggcgacaatagcgaaactccgtctcaaaaaaagaaaacaaaaraaaggacaggaatgtgctcattgaggctccgtttccatcttctgtatgtgaagttcggtcattatccaggaagctcccccttctgtgcctattatgtgctccttctgtgaggtgcttatctgtgttttacagcctgatcttctaggatgctctttgttagaagccaagtgatttctttgaactgcttgagcttagaaagggagcaatttctgaggtgctttttgttcggaggaaagttttttgacgg

SEQ ID NO: 429919 - DNA, 586 bp, Homo sapiens
ggcttccctatctcagtgtgcctaaagaaatggacaggggccaggcgcagtggttcatgtctgaaatcccagcccattgggaggctgaggccagtgaatcacctgaggtcaggatttcgatatcagcctggccaacatggtgaaaccccgtctctactaaaaatgcaaaaattagctgggcatggtggcgggcgcctgtaatcccagttacttgggaggctgaagcaggagaatcgcttgaacccgggaggcagaggctgcggtgagccgagatggcgcgactgcactccagcctgggcgacaatagcgaaactccgtctcaaaaaaagaaaacaaaagaaaggacaggaatgtgctcattgaggctccgtttccatcttctgtatgtgaagttcggtcattatccaggaagctcccccttctgtgcctattatgtgctccttctgtgaggtgcttatctgtgttttacagcctgatcttctaggatgctctttkttagaagccaagtgatttctttgaactgcttgagcttagaaagggagcaatttctgaggtgctttttgttcggaggaaagttttttgacgg

SEQ ID NO: 429920 - DNA, 555 bp, Homo sapiens
catttgtcaatttctgtttttgttgcaattgtttttagtgtcttcttcatgaaatctttgccaggccctatgtccacattggtatttcttaggttatattccaggatttttacagttttagtacttatatttaaatctttcatccatattgaattattttacatatatggggagaagtaggggttcagtttcattcttctgcatatggttggccagatattccagcactaattttcgaatagggagtctttcccacattgcccatttctattgaagattagatggcggtaggtgtgcaggttgatttctgggctctctattattttatttactaaataaaataatcatgaatgtaatattttcatattaaataattaaaaatttctacaacaggcactgtggttcatgtctgtaatcccagagcattgggaggccaaggtggtagcattgctcgagaccaagatttgaagaccatcctgggcaacataggaagaccctacctctacctaaaaataaaacartttgccagtcctggtggcatgtgcctgtagtccc

SEQ ID NO: 429921 - DNA, 464 bp, Homo sapiens
gcattgcacaaaacagataaacaaaataarttacccataatgatactaaaaagcactactgatagttatcatgtatcatccaaatctcttttctaggtacatataaaagataccctatgaaaaaagagttttacctagaatacatgttatctattatcacttaactcaaatgtgatagagctcccattgcagaaaggtaattctcttgaagcaacccaacaagattttccattctggagtgttgattagattctggagtgttgattaaattattctatagtcataaaacctgctgtgtcaccaaatttgcaatcaaggtagaaactccaccaaaattattccataataaaaaaaaatctcataagcctctgccccccattgggtcaaagaacaacctttaatttgaatactagattaacaaggcagaattagttatagcaaaagcatagtagatgttgctaata

SEQ ID NO: 429922 - DNA, 497 bp, Homo sapiens
aattgtgtaaataagtgaatatctcatgccaccaagaaagcctgttaattaaaaataaaaaaaaaacttaagagtactgtattargctgttctgcattgctataaagatatacctgaggctgagtaatttatacagaaaagagtttaattggctcacgattctgcagacagtacaagaagcatgctgctggcatctgcttctggtgagggtctcaggaagcttccactcatggcagaaggtggaggagaagcaggcacttcacatggcaagagccagagggagagagacgaaggaggtgctacacacttttaaaaaccaggtctagagataactcactcgctattcctaggacagcaccaagccattcgggaaggatccacccccatgacccaaacacctcccaccaggccccacctccaacattgggattatatttcaacatgagatttgaaggggacagatatccaaacagcagatgtgccaaaaacttgtgtag

SEQ ID NO: 429923 - DNA, 401 bp, Homo sapiens
gctatcttcacctttttgagtggaaaacgttcttgtaactcttcaagttgaaagtcaagtggctctcaaggtagccctcggtgttgaaatcaagtcttcagaaaagggacagccagggagacagcgtggatggggtttcttaggccaggtcaggaaatggtatctaccccttcggcatgcattgtattgggtgggaaggactcagggccatgggccactcytaatggcaagggggcctgggaaacagctcagccatggagaaacatggattttgatgatcccttagcagtctctgctccataatgagatatgagatgatggatgaaccctgaaccttattccccactttcaataaaaagatactattctggacaatataggctgtaggaagccttatagtt

SEQ ID NO: 429924 - DNA, 587 bp, Homo sapiens
aacaggaagtagacttctccccggaggtttccaaaccattcacttaaatctgagggcctcacagcactcacaccagcttcctcctgtggtccctcctgtggtcccagctggctctggcctgccgcccatccaacagtctgcaaaaaatccgtaaagcagagaagagattcacttcactccgtgtgagagcagtaacattctgatcacttaacaacggatgcgtccagttgttcccactttctcctaggagctctctcatccattgagttgttccctaacttcactgacagtattacacgaaatcactctgctcagaaccccagagctgcacagcctccaccaacaatttaagtctctttaaagtatccaaastcaacactgtctccttggtgacacaggagattctgctttggttgagctctgccaggactggctacataatctggggaaggtacacagtgcaaaatgaccctcattggcaaagtatcagtgagtttgagacagcatcagcagaccattccacgcaggcctgtgaggccggccctcaactccagcctcccactccccgcactgactgtcccttgctc

SEQ ID NO: 429925 - DNA, 564 bp, Homo sapiens
actctgtgggattggctcactcacttactgtggtttgactcgacacattctgtargtttctgagctttttgtggcatggctttcttactgcaggaaacctctgttgcctacgtgaggttgtgttctgcagagatattatgtttgattctgttcaatgcctgtggatctccacaagccagggatcatttttgttaattttttggcttgcacattcccggatcagtcaggtagaaaacattctaacccttaggaaagctgcagtgatgaatcctcggggcagagtgctttactggattttacatgcacagtgctgctctcgctggtcatcattggtgctgctgtggctctttgttagtttcttgggtggaagaggcacctcagcaaaaaagctttgaaaacaagatttgaaataactttattttgagcaaaagcttttcctggttttcttgctctgttgttgctatggcacgtggtgcctgccagttacagctaaacagtcagttttgccgtttctaggcagaaaaatgctcaaatcccaagtaaatgtccaggcatcccaggagg

SEQ ID NO: 429926 - DNA, 323 bp, Homo sapiens
tcgaataagagaaaaccaataaacttgtccaatctacaagtgcttctatgaaaaggtaggttaaactagaaaccattctccacctctttgagactgtgactaacagcctggaacggtacaaatccactggatgaagacaggaaagaatctcaggcttctggctccctcccccatattaccccagagaaacaatggaagaaagaaggaaacatttggcyctcagactacacaacagcaaccctggttgcaagataacaatggagtattctttctaaaatatgaaggaaaagaacttcagcctagaattttatatccagtcaaat

SEQ ID NO: 429927 - DNA, 524 bp, Homo sapiens
gcagaatccagtccttggacctgtgggactgaggtctcagcttccctgcaggctgtcagctgcagcccttccctaactcccagaggcccctctccagtcttgctcatggcccccacatctcagagccagcaacagtgcatggaatccttctcatgcttagaatctctctgacattagacgcatatttcttggctccagcctgagaaaattctctgctttttagagctcatgtaatggcactgggcccactcagagaatccagtaaaatctctctattttaaggtcaactgatgagtagctttaattatgactgtgcagagcctagactagcggtacytagactctcagtgcccagactagtggtacctagactcacagtacctagactagcggtgcctagacgaggagcagctggtttctctaggccctcaccccttattatctccatccccttcttccttgtcccctttcctttcccatttccattcccactttcatatgcattccttctttgcttaaaatac

SEQ ID NO: 429928 - DNA, 524 bp, Homo sapiens
gcagaatccagtccttggacctgtgggactgaggtctcagcttccctgcaggctgtcagctgcagcccttccctaactcccagaggcccctctccagtcttgctcatggcccccacatctcagagccagcaacagtgcatggaatccttctcatgcttagaatctctctgacattagacgcatatttcttggctccagcctgagaaaattctctgctttttagagctcatgtaatggcactgggcccactcagagaatccagtaaaatctctctattttaaggtcaactgatgagtagctttaattatgactgtgcagagcctagactagcggtacctagactctcagtgcccagactagtggtacytagactcacagtacctagactagcggtgcctagacgaggagcagctggtttctctaggccctcaccccttattatctccatccccttcttccttgtcccctttcctttcccatttccattcccactttcatatgcattccttctttgcttaaaatac

SEQ ID NO: 429929 - DNA, 524 bp, Homo sapiens
gcagaatccagtccttggacctgtgggactgaggtctcagcttccctgcaggctgtcagctgcagcccttccctaactcccagaggcccctctccagtcttgctcatggcccccacatctcagagccagcaacagtgcatggaatccttctcatgcttagaatctctctgacattagacgcatatttcttggctccagcctgagaaaattctctgctttttagagctcatgtaatggcactgggcccactcagagaatccagtaaaatctctctattttaaggtcaactgatgagtagctttaattatgactgtgcagagcctagactagcggtacctagactctcagtgcccagactagtggtacctagactcacagtacctagactagcggtgcytagacgaggagcagctggtttctctaggccctcaccccttattatctccatccccttcttccttgtcccctttcctttcccatttccattcccactttcatatgcattccttctttgcttaaaatac

SEQ ID NO: 429930 - DNA, 524 bp, Homo sapiens
gcagaatccagtccttggacctgtgggactgaggtctcagcttccctgcaggctgtcagctgcagcccttccctaactcccagaggcccctctccagtcttgctcatggcccccacatctcagagccagcaacagtgcatggaatccttctcatgcttagaatctctctgacattagacgcatatttcttggctccagcctgagaaaattctctgctttttagagctcatgtaatggcactgggcccactcagagaatccagtaaaatctctctattttaaggtcaactgatgagtagctttaattatgactgtgcagagcctagactagcggtacctagactctcagtgcccagactagtggtacctagactcacagtacctagactagcggtgcctagacgaggagcagctggtttctctaggccctcacccyttattatctccatccccttcttccttgtcccctttcctttcccatttccattcccactttcatatgcattccttctttgcttaaaatac

SEQ ID NO: 429931 - DNA, 610 bp, Homo sapiens
aatctgtggggctccgacagtgtgggccccgcgaggacccccatcctccttgccctggggccgctacaggagggcgccgggacgcactaggtcctgagtgtccagggtccggcaggggcgtcaggttgtcgcctcccggatcccgccgctcgcggtccagggctcctggtttctacgctgggctggggacccggagcatgcatgtcgtggggcggagaaaaccttgggatggttggaaatgaaggatgggagggagaaccagagaaagggagaggaaggaagcagggagggccagagaacaaagagaaacctccgccaggaaaaygggaagaggatgacacaggaacagccctacactccaccaactctcagtctcctgctctctgccttgtaaggaacgcaggccccaccccctccagcctcacagtgtttggggtcacccattctagcggggtgaggcgtcgccttgtgggtgcggttggcatttccctgaggtctgtggacactgagcaccttttcctgggctcactgccatttgcattcttcttctgatgccagtgggcaaggggaggtccctaaacgccggttggaccgcgaccccagccggtgc

SEQ ID NO: 429932 - DNA, 610 bp, Homo sapiens
aatctgtggggctccgacagtgtgggccccgcgaggacccccatcctccttgccctggggccgctacaggagggcgccgggacgcactaggtcctgagtgtccagggtccggcaggggcgtcaggttgtcgcctcccggatcccgccgctcgcggtccagggctcctggtttctacgctgggctggggacccggagcatgcatgtcgtggggcggagaaaaccttgggatggttggaaatgaaggatgggagggagaaccagagaaagggagaggaaggaagcagggagggccagagaacaaagagaaacctccgccaggaaaacgggaagaggatgacacaggmacagccctacactccaccaactctcagtctcctgctctctgccttgtaaggaacgcaggccccaccccctccagcctcacagtgtttggggtcacccattctagcggggtgaggcgtcgccttgtgggtgcggttggcatttccctgaggtctgtggacactgagcaccttttcctgggctcactgccatttgcattcttcttctgatgccagtgggcaaggggaggtccctaaacgccggttggaccgcgaccccagccggtgc

SEQ ID NO: 429933 - DNA, 550 bp, Homo sapiens
catggctagccagttatcccagcaccatttattgaattaggactctttcctcattgctttttttgttgattttgttgaaagttaaaaggtgtgaaggtttctttctgagctstctattctgttccactgatctaagtgtctattttggtaccagtaccattctgttttgatcactgtagccttatattatagtttgaagtcaggctatgtggtgtctctggctttgttctttttgcttatgattgttttggctatttgggctcttttttaactccaaagaacttttagattagatttgtctaattttgtggaaaatgacattggtattgatagagatagtgttgcatctataaattgcttttggaagtatggccattttagctatattgattctccaacccatgagcatgaaatatttttccatgtatttgttttgtctctgatttttttcagccatgttttgtagattctctttttccacacaaagtctggcagaatcactcatttattactccatatcatggaggaaaaatgaaataacattaattct

SEQ ID NO: 429934 - DNA, 550 bp, Homo sapiens
catggctagccagttatcccagcaccatttattgaattaggactctttcctcattgctttttttgttgattttgttgaaagttaaaaggtgtgaaggtttctttctgagctgtctattctgttccactgatctaagtgtctattttggtaccagtaccattctgttttgatcacygtagccttatattatagtttgaagtcaggctatgtggtgtctctggctttgttctttttgcttatgattgttttggctatttgggctcttttttaactccaaagaacttttagattagatttgtctaattttgtggaaaatgacattggtattgatagagatagtgttgcatctataaattgcttttggaagtatggccattttagctatattgattctccaacccatgagcatgaaatatttttccatgtatttgttttgtctctgatttttttcagccatgttttgtagattctctttttccacacaaagtctggcagaatcactcatttattactccatatcatggaggaaaaatgaaataacattaattct

SEQ ID NO: 429935 - DNA, 514 bp, Homo sapiens
acttttcctttcctctctgtggtctgtttctaraaatccatcaaagccacctccaatggcaatgaacaagcttttcaaacactcagctattggttttgttgagttctccaatgtttttctcttctctacttcatttatttacacttttaatttctattctttgtttattttgagtagatggcttcttttttgagtttcttcaagtgaaatattaggttctcaatttgagattactcctttgtttcttttatctttctcaatatattcacactgacagcaatacatttccctctaaggactgctttagctacttctcataagttataatatgctgtgtttttgttttaattcaccttaaagtattttctgattttccttgtcattttcttcttgatcatttcatttttaaagagtgttttggaaaatatttttgtcttaaagaccatattgcctgatattattaatttcaggccgggcactgtggctcacacctgtaatcccagcactttgagag

SEQ ID NO: 429936 - DNA, 514 bp, Homo sapiens
acttttcctttcctctctgtggtctgtttctagaaatccatcaaagccacctccaatggcaatgaacaagcttttcaaacactcagctattggttttgttgagttctccaatgtttttctcttctctacttcatttatttacacttttaatttctattctttgtttattttgagtagatggcttcttttttgagtttcttcaagtgaaatattaggttctcaatttgagattactcctttgtttcttttatctttctcaatatattcacactgacagcaatrcatttccctctaaggactgctttagctacttctcataagttataatatgctgtgtttttgttttaattcaccttaaagtattttctgattttccttgtcattttcttcttgatcatttcatttttaaagagtgttttggaaaatatttttgtcttaaagaccatattgcctgatattattaatttcaggccgggcactgtggctcacacctgtaatcccagcactttgagag

SEQ ID NO: 429937 - DNA, 514 bp, Homo sapiens
acttttcctttcctctctgtggtctgtttctagaaatccatcaaagccacctccaatggcaatgaacaagcttttcaaacactcagctattggttttgttgagttctccaatgtttttctcttctctacttcatttatttacacttttaatttctattctttgtttattttgagtagatggcttcttttttgagtttcttcaagtgaaatattaggttctcaatttgagattactcctttgtttcttttatctttctcaatatattcacactgacagcaatacatttccctctaaggactgctttmgctacttctcataagttataatatgctgtgtttttgttttaattcaccttaaagtattttctgattttccttgtcattttcttcttgatcatttcatttttaaagagtgttttggaaaatatttttgtcttaaagaccatattgcctgatattattaatttcaggccgggcactgtggctcacacctgtaatcccagcactttgagag

SEQ ID NO: 429938 - DNA, 523 bp, Homo sapiens
cctgaaactgctgcctaaaattttctattcttttgtgaccactttgtgtctcactttggagaaatatctattcaaatcctttgcatatatttaaattgggttattttgctttataatgttgagttgcaagagttctttatgtattcagcatagcagccccttaccagatataggattttcaaacattttctaaatttttaaagtgttttaaccttctaaatggaagtctttttgaagtacagaggttttacattarcatgaaatgaaattaagctaccttttattttgccatttgcactactggcatacagtacttaagaagcattagccaaatccggggtcacaaaaatttactgctctactttcttctgagactgtcatagtttcatgtcttaggtgaacacctgccattcatctagagctagtttttgtgtgtgctgtaaggaaggggtcagcctcattcttctgcatgtggcatccagttgtcccagcaccattcactgcagtgtaggatgcacctgtc

SEQ ID NO: 429939 - DNA, 582 bp, Homo sapiens
cctgtcctgggccattttaaacttaccactggatattcaattctccactcgaacrtcaggcagttgctctttgaggaaatccaccatgtctcttagtgtttcagtctgttcttcccaggcttttgtgacattgactttcttccccagagaagcaaaggctttgggcttatggctaacacagtcatagtgaagaaaggccttttatccacctgatcttgaacttcacaccatcgtggttcaggtctgaacttaggagtgacgatgaagtcatagcaaaggcagtgtgtgtgtatggaagaaaaacacaggagggggatggtgtggctgggagtggaacctgagacccctcctcccccttatggtgactgcaagtgaaggcctttgaggggctgggctggcagagcaagacgtgccccagctaggactgtcatgtcaactagttaaagactagagtgtctcctttgctagagtacaaggcgaggaaggtccctgcagccatgaaaccacatgtcctcccaaaacatatcccacctgggctctgcccacatcggtcagcacatgaccttgtcatgtcagcagcca

SEQ ID NO: 429940 - DNA, 544 bp, Homo sapiens
caagtgaatgaaagagacagttgtgggagtgaatggggctcagaggaaaaccccaggtgcagaaggggagctggcgtggaggttataacccccagaggcctgaaggaggcagcaggaaaatcctagctgaagaataaggcaagacaaaaaaagaaaaggcattcaaataggaaaagaacaagccaaagcacctccctttgccatgatgtgattccatacatagaaaacccgaaagacggcyggtcatggtggctcacacctgtaatctcagcgctttgggaggccaaagtgggtggatcacgaggtcaggagtttgagaccagcctggccaatattgtgaaaccccatctctactaaaaatacaaataaattagcagggcgtggtggcgggcaactgtaattccagctacgtgggagactgagacaggagaattgcttgaacccaggaggtggaggtttggagtgagccgagatcgcaccactgcactccagcccgggcaacagtgcaagactccatctcaaaaaaaaaaaaaaaaagaaaacc

SEQ ID NO: 429941 - DNA, 544 bp, Homo sapiens
caagtgaatgaaagagacagttgtgggagtgaatggggctcagaggaaaaccccaggtgcagaaggggagctggcgtggaggttataacccccagaggcctgaaggaggcagcaggaaaatcctagctgaagaataaggcaagacaaaaaaagaaaaggcattcaaataggaaaagaacaagccaaagcacctccctttgccatgatgtgattccatacatagaaaacccgaaagacggctggkcatggtggctcacacctgtaatctcagcgctttgggaggccaaagtgggtggatcacgaggtcaggagtttgagaccagcctggccaatattgtgaaaccccatctctactaaaaatacaaataaattagcagggcgtggtggcgggcaactgtaattccagctacgtgggagactgagacaggagaattgcttgaacccaggaggtggaggtttggagtgagccgagatcgcaccactgcactccagcccgggcaacagtgcaagactccatctcaaaaaaaaaaaaaaaaagaaaacc

SEQ ID NO: 429942 - DNA, 515 bp, Homo sapiens
ggataccaaatcaatgtacacaatcagtagcattcttatgcaccaacaacattctagctgagaatgaaagcaagaacacgatcttatttacaacagccacaaggaaagtgcagtacctagtagttcatctacctgaagagatgaaagatctttacaagagaactacaaaacactgctgaaaaaaatcagaggcaacacaaataaatggaaaaaatatttcatgctctttgattggargaatcaatatagctaaaatggccacacttcccaaaacaatttatatatgcaaagctatctctattaaaataccaatattatttttcacagaattagaaaaatctattctaaaatttgtttagagccaaaaaaaaaagaaagaaagaaagaaaaaaagaaaggaagctcgaactgtcaaaatcctaagcaaaaaggacaaagccagaggcatcacattgtcagacttcaaactatactataagactacagtgaccaacacagaccaacactggtacaaa

SEQ ID NO: 429943 - DNA, 557 bp, Homo sapiens
gccactaaaaaacaaaatggagccaggtgcacatctgtagtcccagttacttgggacactaaagcaaaaggattgaatgagcccaggagtttgaggctgcagtgcactatgatcatgcctgtgaatagccatcatactccagcctgggaaatacagcgagaccctgtttytaaaaagaaaaaaaaaaaaaaaggaaatgatattggttagtttaagatctgagctctatcaataaaattgtcaaacacagatttcttttggtgcctgatcctaacactatcctgtttgctaccctttctaacacccaatatttcatcgacatcaatttatgttttgcctttttgcagtaatccccttcataagaaatctcaatacatgcttgccttcacctgcgaaaacccacaatatacctagaccattatgcccccaaaatttaccgagacccctacctctttcttgcatacattaaatgtccagttgagggacttaaaattcctaggagacaccactttagtccaatatgtagatgacctcctcctatgttctgacatttatga

SEQ ID NO: 429944 - DNA, 576 bp, Homo sapiens
gtcattatagcacatacaggagtttggactcctgatatgagttaacaacctgacccagtccctcagtagctgggtgacactgagctcttcattcttgaatctcagtctcatctcaaaatttgggaactaacaataccttctgtaaatcaaagtggagctcacaggggtctcaggaagagcctgcaggtccatggtttccaggacaatcctagttccttgtaatttcaggatattcataaggaggaactcatagattaatttatttacatcctgactacaaaaagtggaaaaaacaccataacatgaaccctccataacattgatgagacatgagacatttaaagtttggacattccctgggtatttgacgatattatggaatgattactaattactttaggtgttataacgacactgtagttatgctgaaaggggttcttgtctttcagagctccatattgaaatacttayggatccaatgacgtgtgactggccaggcgctgataattgttgaagctggatgctgtgtacaggaggggtcactacgcccttccacttgtgtataggcttgaaatt

SEQ ID NO: 429945 - DNA, 648 bp, Homo sapiens
tccttggttcagaggtccctagcctgtttgacttcttcccaccacctttcagttttcttttttttcagacggagtctcgttctgtcgcccagactggagtgcagtggcgcgatctcagctcactgtaacctctgcctcctgggttcacgcgattctcctgcctcaacctcccaagtagctgggattacaggcgcacaccamcatgcccggctaattttttttttgtatttttagtagagatggggtttcactatgttggtcagactggtctcgaactcctgacctcgttatccacccgcctcagcctcccaaagtgctgggattacaggcgtgagccaccgtgcccagcccagttttcttatgtgtattttacatacaatgttcagaggtatttgtttgcatttagccagaagaatagtacatgtattttatcttcttggaagcagaaaccctgttagccctatcttattttttaacagatattttgtttgtaaatcaggaagacgcttcaattttataaaatgcttttttagtctctattggtgtgttttcctgtttgtatctattaatacagggcttatataagcagttttacctaaaacttgtgtggtggatgttatatagttgtctacccatgtcccaaggcat

SEQ ID NO: 429946 - DNA, 580 bp, Homo sapiens
gctttgtcgaagatcagatggttgtatgtgtgtgacctaacttccgggctctctgtctgtaccatggtctatgtgcctgtttttggtaccagtgtaccatcccattcttgttactgtaaccctgtagtatcatttgaagttgggtaacatgatgcctccagctttgttctttttgcttaagattgccctggcaatttgggcaattttttggttccatatgaattttaaaatagttttgtgaaaaatgtccttggtagtttgataggaataacattgaatctgtaaattgctttggacagtgtggcaattttaatgatattgattcttcctatccatgatcatgaaatgtttttctatttgtatcatctctgatttctttcagcagtgttttgtaattcttcttgtagacatctttcaccttcctggttaggtgtattcctagatattttaatctttttgtggaatttttgaatgggatttcattcttgatttggctcttggkttggctgttgctggtatattgaaatgctagtgatttttgtgcattgattttgtatcattaaactttgttgaaattttt

SEQ ID NO: 429947 - DNA, 617 bp, Homo sapiens
ttaggtcctagtcttttgtcagatatatggtttgtgaatattttctcatagtcttttcaccttttttgcatgtcctgattttaatgaggtatagtttatagtttcccttttataaatggtgcttttgcgctattcatgggatttcagataaggcttagtggacctgtcctttttgtcctggagaccagctttcttggaggtttgtgaattggggtcagatcttaatcactatgtgccaagcatactccaaacattacttcatttaatcctcccaagaagcctatgagatagatgccattttatacgtgaagaaactgaggcaagaatgactcagggcctggcccaaggtcccagaggtaagaactaggaggtggaagaactgggacacaaatctggtctgtttctgcctccagagcacctgtctatgtggtcatttcaagttcccagcaggctacataaaattctggtatacaatgtgtttataactccaacttcagacatgatgatacattaggaaccttcttgttaccaggtcaagaaacaacagggacagcaatgtactcaaaggcagaatgctctctgcccartctttcatcttcagaatccaaacactactg

SEQ ID NO: 429948 - DNA, 631 bp, Homo sapiens
gtcctaatgcttgcattctatctaggagaaattactatcaaagcattacagaaagcattattggctcctgtcttcacccctggatttatatcctactcccaccgtcaaaccttatgcgttagtgaaggtggattaatcaccttctcctaaacmtacattgggctttccctcctccaagcctttttacatattctccactctgctaatattttgccaccacatttccagcaattaccatataccttaatatctaatgccttccttaagacccaaatgaaatccttcttctttagtggaggatttctccatcatccctgctgtacatgatgtcttccctgtctgtatttataaagtactagttaccactcatgactctgactatacatgcactactttctgtcctggttattccatactcttattgcttcacctgaaagacagtagagtccctgaaggtagggtctacttctgacatgtctgcatgtacctcacacatgtatcagtgccttgaatatagcaggcataaaatgtgctcagtgggagaatggcttccctagactgttcatttacttaacaactacttgggtagtagttacaatgcaccaggcaatgctcccttagacagtagcta

SEQ ID NO: 429949 - DNA, 587 bp, Homo sapiens
aggcaaaggatagactaccaaacctgaacaaatttaaaatagtgggagacaaaaataaagttgcttttgtaattacaaatacataaacatactcacataaataaataaaacaggagagataataacagccaaataaaaratttaacagaaattgtgaagacagtttacggctggaggagagggaatggagggctcagagggcactatagcccaagcatctgcagagggggacaaagagcagtaggtaaattagtcaccctgtagaacatagagtgacccagaatttgaaggcatggaatacagttgaaaacaggagtaaggcacagagttcaaaatagaaaaggacggttaaaagtcaaataatggacccctcaggtatcttcccccaacttcagatggctgctggtagacaatcccacctatgcacaaagaacttccaatctcattcttatatataaacaaatagcttacaatcatcagaattttcagaaaaattttcaatgctaaagagaaagaataacataaacaacagaaatgaagggattctgaggaaacaggcaatgcaggtggcagaagaaaactttcaa

SEQ ID NO: 429950 - DNA, 595 bp, Homo sapiens
aagagggagaccaatggtctagctgaaagttcagacagggagaatgaattttttcttacttagctttttattcgattcagtctttccacagattggatgaggtccatccacactggggaaggcgatctgctttattcactctatgattcaaatgttgctctcatccagaaacaccctcacagacacacagagaaataatatttaaccaaagatctgggcagcccatggcctagttaagttgacacataaaattaaccatgttctgtggtgcaaaatttttaattttgatgaagtccaacttgtcaacggttccttatacagattgttcttttgrtattatgtctaagagtcttcacctagccctatttcccaaatatattctcatatgttttctgtaaagttttagagttttatgtttatatttatatccatgatctattttgtcttaattcttgtatatgatgtgaggtttaggggaggtttgtttttttgccccatggttgtccaattatgccagcatcattggttgcaaaaattatctttccttcattgaattgcttttcattctttgtcaaaaatcaattgaactgggcaa

SEQ ID NO: 429951 - DNA, 550 bp, Homo sapiens
aacttcagctgcattaagtggtgacctgtaacatagcaagaaatgttttcattttcttccaaactgcgtgttaatgtatggttttcattgggaaataaagaccagcagataactaagaaaattaggggaagaatgtactataaaaattctatatgattggatttctctaaatrtagtttggttatctaaaaagaactttaccttaattgaatacagtatttatagggagtttctgttctagcacatagagggtttgagtaccattttgatctattgttagccttccctagcacgtccatttctcatatttagagtttctggaatggttttaactgaaattatagcatttctctgcccatgaaaaaagcaacatgtttaacacagaggtgctgtgaatttaagttagactaagtccccatgatgaaccctaagataatatgattcacttccacttcaaggcatatatttattgccaaaggaaattcacataaactaaaacatatgcataaatttttgcaggggagggaaccctgaaccaggagtcaggaac

SEQ ID NO: 429952 - DNA, 530 bp, Homo sapiens
atactcattataatatgattatgttaatattagatacagcagtcctcaagtaagtgttaccagaggaaaagatatctcatgatagcaaaagaggtgcttgattaagaaaacagtagattctaaatgtatagaccttttattacagccattcaaggtaaataaagcaaagtttaacacatataaaaagaaataaactcaaatacaattgtatttagagattytaatatttcttcccaataattgaaaggatagataaaatatactagtatgaatatgagagatttaaataacattgtgactataataatctattatatattttgaaactccacactcaaaaaaggcagaacatacattcttttcaaatgcaaataagatgctttttaaggtagataatatgctaggtcatggaatacatctcaataaatgtcaaatgactgaaatcatagagtatgtgttctgaccacagtgaaacttctaaaattgtacatatttagggtgtataacatgctgttttgagacacataata

SEQ ID NO: 429953 - DNA, 648 bp, Homo sapiens
ttcacttggcagaatgtcctacagtttcatccatgttgtcacaaatggcaggatctccttgtttaagtctgaataatatttttgtgtgtgtgagtgtgtgtatacacctgtgcatctcacaaattctttatccattcattcattgaccaacacctaagttgctgccatatcttggcagttgtgaataatgctgcaatgaacatggtagtatggttatctctaagaggtactgattacttttcctatgggtgtatacccagaagaggaattgctggggtcatattgtagctctatttttaattttttaaggaagtgttttccataatggttacaccaatttacattcacaccaacagagtaaaggttcccctttttcccacacacttgccaatacttgttgccycatgtctttctgataatagccattctaacaggtgtgaggtgatatcccattgtggttgtgatttgcatttccctgatgattagtaatctcgagcatttttatatgcctgtttactgtttctattttctatttggagaaatgtctacttaggttctttgctaatttttaaatcttttcttgtgtcttttgctatttggttgtttgtgtttcttttatattttggatattaaccctttattagctat

SEQ ID NO: 429954 - DNA, 607 bp, Homo sapiens
ctttctcataacaagactgtgtgttatcattattgagcacatggtatattctagccaattaacttacatctaatctttgtaaccaaaggactttcgttctttgttaatttcaactgtctggcatcaacaatcttccgtttttgcttgtatcactccaaaatagcataatgtactacctctcctaaagtacattaacaaaagcttcctcctctcttcccactttatacccatccagtcttttctccttaatctgatgaagttgctcaagacaagtgttcatgtcaagatcattgatgacttcataccgtcagatccacaagagacattctcattttagctgaacggcattcatcaacacctgrtataattgattactcacttctcaaaatatccctcctatcaccacatcctacttgttttttctcttatttttctggacaattatgttaaatcttcattataatttctccatctttatatgacctctatatggcataatggggtagttatctggattttaggattaggtccacagtctatttttctgcttttttttcctgagagatactgtctcctgtactgtgtcaaaaccttcatatggatgtgg

SEQ ID NO: 429955 - DNA, 336 bp, Homo sapiens
gttataggttttgtaagtgcaaaaagtgtacaatagaaaggcaataaatagttttatgaagagaagtgacatgactagaattaaatcttatgttttctactgtggctgctttgcagaaaatgcatttaagtttgtagggatttaaataggcatggaaaatgaggactgcaaaaggttaatagtaagacaaattatcagcctrttataggagacactagtactttagtctagagtaatgctagcagaaatggaaagaaatgaatagatttgatataattttggtgataaattttatgttacttgccgaggaaaatactatatttcaaaaagaggtac

SEQ ID NO: 429956 - DNA, 336 bp, Homo sapiens
gttataggttttgtaagtgcaaaaagtgtacaatagaaaggcaataaatagttttatgaagagaagtgacatgactagaattaaatcttatgttttctactgtggctgctttgcagaaaatgcatttaagtttgtagggatttaaataggcatggaaaatgaggactgcaaaaggttaatagtaagacaaattatcagcctattataggagacactagtactttagtctagagtaatgctagcagaaatggaaagaaatgaatagatttgatataattttggtgataaawtttatgttacttgccgaggaaaatactatatttcaaaaagaggtac

SEQ ID NO: 429957 - DNA, 572 bp, Homo sapiens
tagtaggtgcatatatttgtgggatacatgagatgtttcaataaaggcatgcaatgtgaaataaacagatcatggagaaaggagtatccattccctcaggcatttatcccttaagtacaaacaatccaattacaattctttagttattttaaaatgtacaataaagttattattgaatataaacaccccattgtgtgatgaaacagtatgtcatattcattctttctaatcttttttgtatgcattaaccattcccacctcctgaccagccccctattatcctttccagcctctggtaaacatccttctactctctatgtccatgagctcaattgctttgatttttagatcccacaaataaatgagwgcatgcagtgtttgtctttctgtgcctggcttatttcactcaacataatgaacttcagttccatccatgttgctggaaacaacaggatctcattctttttaatggctgaatagcactccttgtgtatatgtcccacattaaaatatgtatatttgtctgttaatgaacacttggtttgcttccaaatcttagctactgtgaacag

SEQ ID NO: 429958 - DNA, 620 bp, Homo sapiens
tgtagtctcatgtaaatgtgcttaaataatgtattttctatagggttctgagaaattcaaaagaaaatttctgtggcaggcttacagagttatatatagaataataaaggccggaaaagaaacttcacaaaatagaaacatacaaaagatgtgtgttttagtactgttatatagatatgctctgacttactaaaacaaagctggcttattccaaggaaatcatgttcagtcatagaagcttcctgctgtatattttttggtgtgtatttcatactttaaactgctttgttttcattttttacattgcattttaaagkcacttaaatatctttataacttttttaaagctaaagagtcatttgttaaaatgctatagaaatacagtgaaatattagtctgagaggctttggatattacaatatagtctattccctgctagataccacagcaaattaaaaataaacatgccctggttattgtccattaacatcatgtaatctagaggttaaatccatcattagaaaatcaatcagccttataaattgtcagatattaaaatatccacttgaaattcttttgttttcaacttttattttaggctcaggggtacaggtgcagat

SEQ ID NO: 429959 - DNA, 563 bp, Homo sapiens
tttagtactgttatatagatatgctctgacttactaaaacaaagctggcttattccaaggaaatcatgttcagtcatagaagcttcctgctgtatattttttggtgtgtatttcatactttaaactgctttgttttcattttttacattgcattttaaaggcacttaaatatctttataacttttttaaagctaaagagtcatttgttaaaatgctatagaaatacagtgaaatattagtctgagaggctttggatattacaatatagtctattccctgctagataccacagcaaattaaaaataaacatgccctggttattgtccattaacatcatgtaatctagaggttaaatccatcattagaaaatcaatcagccttataaattgtcagatattaaaatatccacttgaaattcttttgttttcaacttttattttaggctcaggggtacaggtgcagatttgttacatggaagtatggtgtgatcctcaggtttgaggtatgaatgattccgtcacccyagtagtgaccataatagccaacagggagttttcaaccct

SEQ ID NO: 429960 - DNA, 596 bp, Homo sapiens
tgtgaaaatctggatcggtattctaattctgggcacattacaatcagctracaaccccctatcagcttagttccaacagtttcccagttcatgaaaagacttctaatttagtttactcagaataactttacttattttgctttattcttgtggaatatattgctgttgtgctctttgtgtgggaatacagaacaagcttactgaatgttttcttaactaaacagttattaatcttccagatatcacctcttgtcgaaactcaagagtcatgaatggcccttgccgtactgacgctttctgaccgagcacttctctaccctgaatgcaagagaccctcatagttaggcaggaatatcatcacccctatacagcctgaagaagttgcagaagatggatctttgtcactctgccacccttaggtttcagcattctcttataaaagaaagggtagatatgtgagaggcatgtgaaccagagagactccatcttaagtaggagctgggtaaaatgaggctgaaacctactgggctgcattcccagacggttaaggcattctaagccacaggatgagataggaggtcagcacaaaatacagg

SEQ ID NO: 429961 - DNA, 596 bp, Homo sapiens
tgtgaaaatctggatcggtattctaattctgggcacattacaatcagctgacaaccccctatcagcttagttccaacagtttcccagttcatgaaaagmcttctaatttagtttactcagaataactttacttattttgctttattcttgtggaatatattgctgttgtgctctttgtgtgggaatacagaacaagcttactgaatgttttcttaactaaacagttattaatcttccagatatcacctcttgtcgaaactcaagagtcatgaatggcccttgccgtactgacgctttctgaccgagcacttctctaccctgaatgcaagagaccctcatagttaggcaggaatatcatcacccctatacagcctgaagaagttgcagaagatggatctttgtcactctgccacccttaggtttcagcattctcttataaaagaaagggtagatatgtgagaggcatgtgaaccagagagactccatcttaagtaggagctgggtaaaatgaggctgaaacctactgggctgcattcccagacggttaaggcattctaagccacaggatgagataggaggtcagcacaaaatacagg

SEQ ID NO: 429962 - DNA, 596 bp, Homo sapiens
tgtgaaaatctggatcggtattctaattctgggcacattacaatcagctgacaaccccctatcagcttagttccaacagtttcccagttcatgaaaagacttctaatttagtttactcagaataactttacttattttgctttattcttgtggaatatattgctgttgtgytctttgtgtgggaatacagaacaagcttactgaatgttttcttaactaaacagttattaatcttccagatatcacctcttgtcgaaactcaagagtcatgaatggcccttgccgtactgacgctttctgaccgagcacttctctaccctgaatgcaagagaccctcatagttaggcaggaatatcatcacccctatacagcctgaagaagttgcagaagatggatctttgtcactctgccacccttaggtttcagcattctcttataaaagaaagggtagatatgtgagaggcatgtgaaccagagagactccatcttaagtaggagctgggtaaaatgaggctgaaacctactgggctgcattcccagacggttaaggcattctaagccacaggatgagataggaggtcagcacaaaatacagg

SEQ ID NO: 429963 - DNA, 596 bp, Homo sapiens
tgtgaaaatctggatcggtattctaattctgggcacattacaatcagctgacaaccccctatcagcttagttccaacagtttcccagttcatgaaaagacttctaatttagtttactcagaataactttacttattttgctttattcttgtggaatatattgctgttgtgctctttgtgtgggaatacagaacaagcttactgaatgttttcttaactaaacagttattaatcttccagatatcacctcttgtcgaaactcaagagtcatgaatggcccttgccgtactgacgctttctgaccgagcacttctctaccctgaatgcaagagaccctcatagttaggcaggaatatcatcacccctatacagcctgaagaagttgcagaagatggatctttgtcrctctgccacccttaggtttcagcattctcttataaaagaaagggtagatatgtgagaggcatgtgaaccagagagactccatcttaagtaggagctgggtaaaatgaggctgaaacctactgggctgcattcccagacggttaaggcattctaagccacaggatgagataggaggtcagcacaaaatacagg

SEQ ID NO: 429964 - DNA, 545 bp, Homo sapiens
aacaaaactaataaaataaaatgtcaagatgttggatgtagaagctgttcattttcaatttatgtttaaaagtaaatggaatgcttcaactttgatatgatgaacacatagtcactcttttaagttaatggtgctacaacttttagtaactcaaccagttaatttccaaatttttctttttaaaattaasaaattatatatttaaaatctaatcaattgccattagctgcactctttaacagtgaaaagctgacagtagacaaaatctttacacggaattttaacataaagctgtttatgaggtttaatatggttattaaagaaaaaaggctcctggctaacacggtgaaaccccgtctctactaaaaatacaaaaaattagccgggcgtggtggcgggcgcctgtagtcccagctattctggcggctgaggcaggagaatgacatgaacccaggaggcggagcttgcagtgagctgagatggcgccactgcactccagcctgggcgacagagcgagactctgtctcaaaaaaaaaaaaaaaaaa

SEQ ID NO: 429965 - DNA, 352 bp, Homo sapiens
cccagttacaggtaagcatgataattagggcagaataagaggtgtaccttccaatgacccatctttaggactgttggccaaatataactgctgagccacttaatgtagattccataactgttgtaataaggctgccatarctactttcatactattgaatgtggcacctttaagcccctcaatgcttttatgtctagtgatcctggctaattgactaggatgaagcttctttacttggtttaatcatgcaacaaacatttatcaagcatgttcatgattagaaactgtgggtgagttaaacatataatacttttgacatgtgccctccagaaatttttattctgattgtgca

SEQ ID NO: 429966 - DNA, 571 bp, Homo sapiens
aattttaaaattatttttctcaaaatagtatactatttattattaaatattctataccttttattgtcaaatttaagcaatacaaaaaaagccaagaagttcaagtcatgccaaaacaagacctagagaaaatcattgtaacatagttgatccctgccctyacagaaaacacaattcctgaaatttatctatacctattgtatttctatcgatagtcatagatacgtttcacattaataaggtgctcatttttctgttgtttccctgctcactaggcgcctgactctctagtcttcctttgtctccaatactatactaacttctacggtcactagtaacttattcgtacattttaaagtaactataagagtataattgtaacacaaaggataaatacttgagggaatgggtaccccattctctatgatgtggttattatgcattgcatgcttgtatcaaaacatctcatgtaacccataaatatatataccaactctgtactcacaaaaattaaaaatttcaaaaaattatctttgcattgaaatcctacagagacacccctgcatcgccc

SEQ ID NO: 429967 - DNA, 571 bp, Homo sapiens
aattttaaaattatttttctcaaaatagtatactatttattattaaatattctataccttttattgtcaaatttaagcaatacaaaaaaagccaagaagttcaagtcatgccaaaacaagacctagagaaaatcattgtaacatagttgatccctgcccttacagaaaacacaattcctgaaatttatctatacctattgtatttctatcgatagtcatagatacgtttcacattaataaggtgctcatttttctgttgtttccctgctcactaggcgcctgactctctagtcttcctttgtctccaatactatactaacttctacggtcactagtaacttattcgtacattttaaartaactataagagtataattgtaacacaaaggataaatacttgagggaatgggtaccccattctctatgatgtggttattatgcattgcatgcttgtatcaaaacatctcatgtaacccataaatatatataccaactctgtactcacaaaaattaaaaatttcaaaaaattatctttgcattgaaatcctacagagacacccctgcatcgccc

SEQ ID NO: 429968 - DNA, 595 bp, Homo sapiens
aagtcacatggtttgaattgacacttaaaatatatccaaatttcagcatttgtcatcaactagtttgtatagtgaacaggaaatatacagcccctgtgctgacaaggttgtgaataacagaccagaccatgtaataacaggtttatttataaccaagctattatatggaaagaggtagctctataacaagtattccagaattcattgacaaggggaaaagctgtaggacaagccaggtgacaaaggcattgcattagtaatggagtaaaaacttaaaatttggaaatacttgacagcgtgtgatggcccactcagaataatttgtgcaatctattttccagtaaaggagacccatttgcatacagcttcctgctttgaaatttcacacaaccaagctggttaggtaagacacacttttttggtgtggagtcatggatgtgactgaagaggctgccaaggtcactcttctgggagactctcattgtttgattgattgtttgatkgatttattcattcaatcgacagacattaattagaaacctattctgtacctctcaacagtgtgtcaatgcttaagaaccatgattttaaattt

SEQ ID NO: 429969 - DNA, 630 bp, Homo sapiens
tggtattgcattgtggttttgatttatatttccatgatcattagtgatgttgagcattttttcatacatttgttggccatttggatatcttcttttgagaattatctattcatgtccttagcccagtttttgatggaattgttggttttttcttgctgatttgtttgtgttcattgtagattctgggtattattccttcrtcagatgtattgattgtgaagattttctcccactctgtgggttgtctgtttactctgctgtttcttttgccatataaaagctctttagttaaattatttcctagctatttatctttgtttttattgaatttgcttttgggttcttggtcataaaatccttgcctaagccaatgtctataagggttttttcaatgttatcttctagaatttttatagtttcaggtcttaaagtccttaatccattttttgctagtttttgtataaagcgagagatgagaatccagtttcattctcctacatgtggccagacaattatcccagcaccatttgttgaaaagggtgtcctttccccactttatgtttttgtttgctttgtcgaagatcagttgactgtaagtacttgggtttatttctgcattctctattctgt

SEQ ID NO: 429970 - DNA, 630 bp, Homo sapiens
tggtattgcattgtggttttgatttatatttccatgatcattagtgatgttgagcattttttcatacatttgttggccatttggatatcttcttttgagaattatctattcatgtccttagcccagtttttgatggaattgttggttttttcttgctgatttgtttgtgttcattgtagattctgggtattattccttcatcagatgtattgawtgtgaagattttctcccactctgtgggttgtctgtttactctgctgtttcttttgccatataaaagctctttagttaaattatttcctagctatttatctttgtttttattgaatttgcttttgggttcttggtcataaaatccttgcctaagccaatgtctataagggttttttcaatgttatcttctagaatttttatagtttcaggtcttaaagtccttaatccattttttgctagtttttgtataaagcgagagatgagaatccagtttcattctcctacatgtggccagacaattatcccagcaccatttgttgaaaagggtgtcctttccccactttatgtttttgtttgctttgtcgaagatcagttgactgtaagtacttgggtttatttctgcattctctattctgt

SEQ ID NO: 429971 - DNA, 468 bp, Homo sapiens
ctgttctattgatacatgtgcctatttttacaccagtaccatgctgttttggtgactatcgccttatagtrcagtttgaaatcatgtaaagtgatacttccagatttattatttttgcttagtcttggtttggctatgtgggctcttttttggttccatatgaattttagaatttttttttctaattctgtgaagaatgatggtggtattttgatgggaatttcactgaatttgtagattgcttttggccctatgtttctttttttaattgttactttaagttcagggacacatgtgcaggtttgttatataggtaaaattgtgtcatggggatttgttgttcagattatttcatcacaaagggattaagcccagtactccttatttttcctgatcctctttctcttcccaccctccaccgtccaataggccccagtgcgcattgttcaccttatctgtccatgtgtt

SEQ ID NO: 429972 - DNA, 558 bp, Homo sapiens
agaaggctagtgcccaaaataataaaggcaagtatgtggcagctagggagtttacagagtgtcattcccaatttgtttgagtgcttaataatagaataatagttagtcttcaatattgaaaagacatgaaacactggtagatacatgatccacataacttcaaacccaaaccttgaaaagtatatgtttaacaatcaagttcacatatgggaaggactactgatactttggagaaatgagtagggtaagtagaagcatcactgccaatgtatgcccataatgctaaatataaagagatacaggacatggcatagaacaaggacaagggacaaaagaaatgagttaaaatcacccttttcacttagaagtagtcaacatccctgcagaaacgattttaaaatttttctctgctaataaaaaaaaaatccaaggagttgtcttagattgtccaatgaaatgctcagagcaggaaaaytgcaagccggaaggagaagtctgtggtttgcaaatgctcacctattgtctgtggcatttagtgttcggtacactggccaagtt

SEQ ID NO: 429973 - DNA, 548 bp, Homo sapiens
ctaattatcatacagttttgggrgccttgacaaatgcttataatcatgtaatcatcaccacaatcaacatagagaacaattttatcagctttcataattaccctgtgcccctttgtagtcaatttatcttgccacccctaattcctggcaactactgatctgtattattttctatagttttaccttttcaagaaagtcatacaactggaatctgcagcatgtgactacttaagtctgtttctatcacttagcaaaatgcatttcagttttatccatgttgttgctgtatcaattccacttgttccttttttgctgggaagtataccattgtatgcctatactatagtttatccattactcagttgagtggcatcttggttgtttcagtttgtgtgggtcttcatttgtaccctaagggagattcaccccttcctccgaaatgtaagccttttattctctggaaagatagagaagagtaattcaggtgaagctttgtacttttccagcaatagttgctgttccttcctcccaaaactgcaccacaagga

SEQ ID NO: 429974 - DNA, 548 bp, Homo sapiens
ctaattatcatacagttttgggggccttgacaaatgcttataatcatgtaatcatcaccacaatcaacatagagaacaattttatcagctttcataattaccctgtgcccctttgtagtcaatttatcttgccacccctaattcctggcaactactgatctgtattattttctatagttttaccttttcaagaaagtcatacaactggaatctgcagcatgtgactayttaagtctgtttctatcacttagcaaaatgcatttcagttttatccatgttgttgctgtatcaattccacttgttccttttttgctgggaagtataccattgtatgcctatactatagtttatccattactcagttgagtggcatcttggttgtttcagtttgtgtgggtcttcatttgtaccctaagggagattcaccccttcctccgaaatgtaagccttttattctctggaaagatagagaagagtaattcaggtgaagctttgtacttttccagcaatagttgctgttccttcctcccaaaactgcaccacaagga

SEQ ID NO: 429975 - DNA, 433 bp, Homo sapiens
ttggcctgtcttgctatgttggggaagttctcctggatggtactctgaaggatgatttccaacttggttccattcaycccatctctttcaggtaccccaatcagtcataagttcagtctttttacataattccatatttctcggaggttttgttcattcattttcattattttttctctattcttttctgcctgccttatttcagaaagatagtcttcaagctctgagattctttcctctgcttgatctattctgctattgatacttgtgattgcattgtgacgttctcatgttgtgtttttcagctccattgggttggttatattcctccctaagctggctattctggctatcagctcctgtattgttttatcatgattcttagcatctttgtatggggttacaacatgctcctttagctctgcaaagtttg

SEQ ID NO: 429976 - DNA, 569 bp, Homo sapiens
ttgcacggctcctgaggggatctcctgatcaatgggttgcaaagatctgtagaagcatggtttcccaggtrggggggtacaatcactcatcatttcccttgactggggatgtgtattcctttggctccatgccacttctggtgggctgtcccccagccctgcctacccccctagttttcttctttatctgtgggtcaagttgtttgcctagtcaatctcagtgcaagaatctctatatctcagttggaagtgctgaattccctcacacctttcattcctctctgtgagggctgtgcaccacagctgcttctaatcaactatcttggatccctgtccaaattgtacagatttgaccctgtcatttttttctttaaatcgttcagtgcccttagagacagccaccttatgctgtattccttgaattatttttacccatcagacaagtctgtcatggcaaaaacaaggagccctcctttgcttcaaacttgctttcaatcagttcttcaatcatggttatcacagggaatactttaattttctatttcataactgtcatgtgcacccagctg

SEQ ID NO: 429977 - DNA, 584 bp, Homo sapiens
caatgggctttaacttgtgaggtgctgtggaagtggggcctgcaaaataactctgcctggctccctggattcagcccccttcctagggatatgtacaaatatatttcctaccttaccaagaatcctggggccagagtatgtaaaactcctggatctctgtttgtgcctgagcgactactctgccaagacaccacatggctgtgtgtatcagacccaaggccctagttgcacggctcctgaggggatctcctgatcaatgggttgcaaagatctgtagaagcatggtttcccaggtgggggggtacaatcactcatcatttcccttgactggggrtgtgtattcctttggctccatgccacttctggtgggctgtcccccagccctgcctacccccctagttttcttctttatctgtgggtcaagttgtttgcctagtcaatctcagtgcaagaatctctatatctcagttggaagtgctgaattccctcacacctttcattcctctctgtgagggctgtgcaccacagctgcttctaatcaactatcttggatccctgtccaaattgtacagatttgaccctgt

SEQ ID NO: 429978 - DNA, 629 bp, Homo sapiens
ctgtttgtgcctgagcgactactctgccaagacaccacatggctgtgtgtatcagacccaaggccctagttgcacggctcctgaggggatctcctgatcaatgggttgcaaagatctgtagaagcatggtttcccaggtgggggggtacaatcactcatcatttcccttgactggggatgtgtattcctttggctccatgccacttctggtgggctgtcccccagccctgcctacccccctagttttcttctttatctgtgggtcaagttgtttgcctagtcaatctcagtgcaagaatctctatatctcagttggaagtgctgaattccctcacacctttcattcctctctgtgagggctgtgcaccacagctgcttctaatcaactatcttggatccctgtccaaattgtacagatttgaccctgtcatttttttctttaaatcgttcagtgcccttagagacagccaccttatgctgtattccttgaattatttttacccatcagacaagtctgtcatrgcaaaaacaaggagccctcctttgcttcaaacttgctttcaatcagttcttcaatcatggttatcacagggaatactttaattttctatttcataactgtcatgtgc

SEQ ID NO: 429979 - DNA, 629 bp, Homo sapiens
ctgtttgtgcctgagcgactactctgccaagacaccacatggctgtgtgtatcagacccaaggccctagttgcacggctcctgaggggatctcctgatcaatgggttgcaaagatctgtagaagcatggtttcccaggtgggggggtacaatcactcatcatttcccttgactggggatgtgtattcctttggctccatgccacttctggtgggctgtcccccagccctgcctacccccctagttttcttctttatctgtgggtcaagttgtttgcctagtcaatctcagtgcaagaatctctatatctcagttggaagtgctgaattccctcacacctttcattcctctctgtgagggctgtgcaccacagctgcttctaatcaactatcttggatccctgtccaaattgtacagatttgaccctgtcatttttttctttaaatcgttcagtgcccttagagacagccaccttatgctgtattccttgaattatttttacccatcagacaagtctgtcatggcaaaaacaaggagccctcctttgcttcaaacttgctttyaatcagttcttcaatcatggttatcacagggaatactttaattttctatttcataactgtcatgtgc

SEQ ID NO: 429980 - DNA, 629 bp, Homo sapiens
ctgtttgtgcctgagcgactactctgccaagacaccacatggctgtgtgtatcagacccaaggccctagttgcacggctcctgaggggatctcctgatcaatgggttgcaaagatctgtagaagcatggtttcccaggtgggggggtacaatcactcatcatttcccttgactggggatgtgtattcctttggctccatgccacttctggtgggctgtcccccagccctgcctacccccctagttttcttctttatctgtgggtcaagttgtttgcctagtcaatctcagtgcaagaatctctatatctcagttggaagtgctgaattccctcacacctttcattcctctctgtgagggctgtgcaccacagctgcttctaatcaactatcttggatccctgtccaaattgtacagatttgaccctgtcatttttttctttaaatcgttcagtgcccttagagacagccaccttatgctgtattccttgaattatttttacccatcagacaagtctgtcatggcaaaaacaaggagccctcctttgcttcaaacttgctttcaatcagttcttcaatcayggttatcacagggaatactttaattttctatttcataactgtcatgtgc

SEQ ID NO: 429981 - DNA, 437 bp, Homo sapiens
cacaacctgaaaaacataataggccccttatgaagaattaacactctctaaaatatcccagaaaagaaagaaaaagaaacatcatgcccctgaatattaataaataccacagttgtaagtttttacagaaagagttattctatttttcagattttgaacagcatttkaataggtccagaatattaagaagaaaagaaagtgaataatggaagcacaaactctgcacctaatattcgcaaagtttactaagtacttaaaggaactgtgtattccacatccattgaaactaatagatgcagcgtttttgcaggggtgaggggtatcattgatataaacaatggaacaatcaagcagaaatagaattactatcttaaaacataaatatgaatatattttccaatgactaaaggactgacgaacttggttatagttggagc

SEQ ID NO: 429982 - DNA, 437 bp, Homo sapiens
cacaacctgaaaaacataataggccccttatgaagaattaacactctctaaaatatcccagaaaagaaagaaaaagaaacatcatgcccctgaatattaataaataccacagttgtaagtttttacagaaagagttattctatttttcagattttgaacagcattttaataggtccagaatattaagaagaaaagaaagtgaataatggaagcacaaactctgcacctaatattcgcaaagtttactaagtacttaaaggaackgtgtattccacatccattgaaactaatagatgcagcgtttttgcaggggtgaggggtatcattgatataaacaatggaacaatcaagcagaaatagaattactatcttaaaacataaatatgaatatattttccaatgactaaaggactgacgaacttggttatagttggagc

SEQ ID NO: 429983 - DNA, 530 bp, Homo sapiens
tggcttactgcaacctctgcctccagggttcactccagggttcaagcaattatcttgcctcagcctccctgagtagctgggacaacagrcgtgtcccaccaagcccggctaatttttgtatttttagtagagatggggtttcaccatgttggccaggctagtctcaaactcctgatctcaagtgatctgctcgcctcagcctccccaagtgctgggattacagaagtgagccaccacgcctgctgtaatatactttttatcacttgtagatttttctattctggatatttcagataaaataaattatatgatttttcgtgactagctttttccacttagcataaagttttcaaagttcatctatttgttgcatagatcaggactttattcctttttatgtatggccagccaagtaacattttgttgtatgggtataccacattttgctcattctgtcatttgagggacttttggattgttttcactttgggctattataaataatcctgctatgaacattcataacatgt

SEQ ID NO: 429984 - DNA, 586 bp, Homo sapiens
atgggttggttccaagtctttgctattgtgaacagtgctgcagtaaacatacgtgtgcatgtgtctttgcagtagaatgatttataatcctttgggtatatacccagtgatgggattgctgggtcaaatggtatttctagttctagatccttgaagaattgccacactgttttccaaaatggttgaactaatttacactcccaccaacagtgtaaaaccattcctatttctccacatcctctccagcatctgttgtttcctgacttttaatattttttaaaaaattttctgtgaaattttcatattgatagtgcagaaggcacatgtatttcagtgacaaatttgctttatccaaaaaattatatatatgagaaaagaatgaaaatgaaatatttatttaaaactgcttttgtatttttagagaaacaattcatttgtccattagtaatgaaaattatagctgcattgtattgtttaaaattttaattggctaataattattacaagcttaggttgtcttagacgaaagggtttccataatggcattgtgatggttaatastgattgtcaacttgattggtttgag

SEQ ID NO: 429985 - DNA, 541 bp, Homo sapiens
atgctggggcataaagcaaattttactaggtggtttaaacaacaaatatttatttctcacagttctgtagsctgggaagctcaagaccaaggtgccaacagacttgatgtctgttaaatccctatctctgactcacaaaatggctaccttcttgatgtatcctcacatggccgtgacagagataatctctctcctgtatcctcttaaaagggtactagtcccattcataagggctccattctcatgacctaattacctccccaaagtcccactgctcaatcctataacaatggagattagggcttccatatatgaattttgggggcacaaaaatcagtcagtgcatagcacctgacattaaaaatttgtctcttgcctacctctttaggcttatattcaaccactttagtgctccatttcccccaataatgtctgacataaaataatcacatatcactttttataaatttttttattgagatataaggtacctcataaaattctgccaatgtcatttccaatttaagaattttagtgaaat

SEQ ID NO: 429986 - DNA, 519 bp, Homo sapiens
ataatttttaaaaattgatcacaatctgtgggatagtagtaagcagcctaatatacataatattggagtctcataatgagaagtatgagagagaataagcagactctctttaaatataagtatcattttcttctccaaatttgagggaaaatattagctcacctatccaagaactcagagcttatcaattaggttaaatatccataataaccaaacagttgaaaaccaacagtaaaaagaaaagactacaaacaaacaaacaaaaagcatccagagaaaaagacagattaaataccagcgacaaccaacaygaattttaggtagctcctcattaaaacaaagaaagacaggaaataataaaaaaattttaaattgctgaaagaaaaaaatatattttaaattcttaatccagtgaaaatatactttacaagtaaaagcaaatagaaaaatatttatattttttaaaaaggtaagagaatgtgtatcaagcttacctgggctatataaaatgctgaaaga

SEQ ID NO: 429987 - DNA, 563 bp, Homo sapiens
taaatatccataataaccaaacagttgaaaaccaacagtaaaaagaaaagactacaaacaaacaaacaaaaagcatccagagaaaaagacagattaaataccagcgacaaccaacatgaattttaggtagctcctcattaaaacaaagaaagacaggaaataataaaaaaattttaaattgctgaaagaaaaaaatatattttaaattcttaatccagtgaaaatatactttacaagtaaaagcaaatagaaaaatatttatattttttaaaaaggtaagagaatgtgtatcaagcttacctgggctatataaaatgctgaaagaaattcttsaagctaaagcaaaaaagtaacagatagaaaatggtatctcactgcaaggttacggagtgaaaaattgtaagatttgtgcaaatataaagaagtaccattcactcttaagaatttccgtgcctttttgctaaggattgtcttggttatacaggctcttttttggttccatatgaaatttaaagtagttttttctaattctgtgaggaaagtcagtggtagcttgaggggga

SEQ ID NO: 429988 - DNA, 563 bp, Homo sapiens
taaatatccataataaccaaacagttgaaaaccaacagtaaaaagaaaagactacaaacaaacaaacaaaaagcatccagagaaaaagacagattaaataccagcgacaaccaacatgaattttaggtagctcctcattaaaacaaagaaagacaggaaataataaaaaaattttaaattgctgaaagaaaaaaatatattttaaattcttaatccagtgaaaatatactttacaagtaaaagcaaatagaaaaatatttatattttttaaaaaggtaagagaatgtgtatcaagcttacctgggctatataaaatgctgaaagaaattcttgaagctaaagcaaaaaagtaacagatagaaaatggtatctcaytgcaaggttacggagtgaaaaattgtaagatttgtgcaaatataaagaagtaccattcactcttaagaatttccgtgcctttttgctaaggattgtcttggttatacaggctcttttttggttccatatgaaatttaaagtagttttttctaattctgtgaggaaagtcagtggtagcttgaggggga

SEQ ID NO: 429989 - DNA, 564 bp, Homo sapiens
ctgcatacaaggggatataattcagcctttaactaatttttgtatcagggtaataatactagcctctttcagcwctttggatttattactccactgttttccagactccactgtctttgatgagaaatctgctgttaactttattgttttccctgtatatgatgtgtcagtatttttttttttttttgctattttcaaaattttatctttgtcattgacattggactgcttgataataatgtagctagtttgaatccttctgtgcttattctgagattctttgagcttcaagattatatgttcctcaaatgtgggaagattttaggactctcccctaatctgtgtgttcacatgtactccatatgtcatggattttttgggtggtttgattctgctctggtctctgccagacatgtatatagtttctggtcaaactgatagaattggagaagttatcaggtcctctattcttatctaatttcctggaattcccttttataacctacctagtccaatggaccgttgcttaccttaagcaggctacaaactcagggtggcagatct

SEQ ID NO: 429990 - DNA, 615 bp, Homo sapiens
aacagcttctgtgtgtggcctgaaggacacttttattttctatagctgcagggctgagaatgcttaaaatctaacaaagaatctcagtatgtatcagatgaattacaatgaatgtttaacttctagcttcaaagggtatttattgttaaagtgagggcattgattagaaaagaataggatcttgtaaattgaaatgtggacatgtgggaaaatcctgttaaggctggggacattgggaccctaaattctgatgtcttctttgctggtggaagaagcttcccaagtcccagtaaaagtagcctcctcatccccggtagtagcagcttctctaacccctctcwacttgcagctgaaaggattagccctgcattgcatagggacactgtaatgtcctcctaagaggcaattgtaatgcaagacaatgctgattgtcctcaggaaccacccacactacccctctttgattgtaagcctgtaattagactcaagtttcagcaggattcaaaagttaaaatacatagtatgacccatgaggaggtgcatactctaccctccaaaaatataactacttgagttttctgatatatactggcagaagtccagggaacatgtgta

SEQ ID NO: 429991 - DNA, 557 bp, Homo sapiens
ttaagagtacgggataatggataagggtatgggataatgaatcagcatccaacacttggtcttgtttctcctataaccaggatttgtggggctaagaatcaaggggtagaaataggagtgagaccacttacaattccctctggtgacccactagccaattttttcttcctgtttgcacaatcttttttttttttttttttttttgagatggagtctcgctctgtggcccaggctggagtacagtggtgcaacctttgctcactgcaagctccgcctcccaggctcaggccattctcctgcctcagccycctgagtagtggagactacaggcgcccgccaccatgcccggctaattttttgtatttttagtagagaaggggtttcaccgtgttagctaggatggtctcaatctcctgacctcgtaatctgcccacgtcagcctctcaaagtgctaggattacaggcgtgagccaccgagcccagcctgcacagtcttatactttgctggcctagaggttttactttcaaagggagaaacacttccaccaggagtcgca

SEQ ID NO: 429992 - DNA, 530 bp, Homo sapiens
atactcattataatatgattatgttaataktagatacagcagtcctcaagtaagtgttaccagaggaaaagatatctcatgatagcaaaagaggtgcttgattaagaaaacagtagattctaaatgtatagaccttttattacagccattcaaggtaaataaagcaaagtttaacacatataaaaagaaataaactcaaatacaattgtatttagagattttaatatttcttcccaataattgaaaggatagataaaatatactagtatgaatatgagagatttaaataacattgtgactataataatctattatatattttgaaactccacactcaaaaaaggcagaacatacattcttttcaaatgcaaataagatgctttttaaggtagataatatgctaggtcatggaatacatctcaataaatgtcaaatgactgaaatcatagagtatgtgttctgaccacagtgaaacttctaaaattgtacatatttagggtgtataacatgctgttttgagacacataata

SEQ ID NO: 429993 - DNA, 530 bp, Homo sapiens
atactcattataatatgattatgttaatattagatacagcagtcctcaagtaagtgttaccagaggaaaagatayctcatgatagcaaaagaggtgcttgattaagaaaacagtagattctaaatgtatagaccttttattacagccattcaaggtaaataaagcaaagtttaacacatataaaaagaaataaactcaaatacaattgtatttagagattttaatatttcttcccaataattgaaaggatagataaaatatactagtatgaatatgagagatttaaataacattgtgactataataatctattatatattttgaaactccacactcaaaaaaggcagaacatacattcttttcaaatgcaaataagatgctttttaaggtagataatatgctaggtcatggaatacatctcaataaatgtcaaatgactgaaatcatagagtatgtgttctgaccacagtgaaacttctaaaattgtacatatttagggtgtataacatgctgttttgagacacataata

SEQ ID NO: 429994 - DNA, 585 bp, Homo sapiens
atttttatctatatttccagctaggtttattgagtgagtgtcaaactaaaatgtatttgttcacatgtattcaggtcaaaaatgtacaaaaacaacaacaaagaaaaaacactgttctaaatggctatctagtaatattctgccaattcactagactttaaagattggttgaaatccatgtgctatctcaaatttcttttgttgttggcttgaagctgctctccaaccttatgccctactatcagtactactcaaaatacacacaaaacacatgaagacgtatrgttccaggctttctcctgtttcctgacttcacaggtgctattccacttgataaggtgcttctctcctcactgcattctcatgaatcctaatcctccttgaagcctatgttcaacacctcttcctccagcatgcctttccaaacatgcctcttcctcctctccttccccaactttgccacctcaatgcaatgtaagttcccattccctacacccacagagcttcagtggcatctctcaaggcacatgacactgtggttatttgcctttcagtcagtctcccccaaagagaccatgaattcct

SEQ ID NO: 429995 - DNA, 585 bp, Homo sapiens
atttttatctatatttccagctaggtttattgagtgagtgtcaaactaaaatgtatttgttcacatgtattcaggtcaaaaatgtacaaaaacaacaacaaagaaaaaacactgttctaaatggctatctagtaatattctgccaattcactagactttaaagattggttgaaatccatgtgctatctcaaatttcttttgttgttggcttgaagctgctctccaaccttatgccctactatcagtactactcaaaatacacacaaaacacatgaagacgtatagttccaggctttctcctgtttcctgacttcacaggtgctattccacttgataaggtgcttctctcctcactgcattctcatgaatcctaatcctccttgaagcctatgttcaacacctcttcctccagcatgcctttccaaacatgcctcttcctcctctccttccccaactttrccacctcaatgcaatgtaagttcccattccctacacccacagagcttcagtggcatctctcaaggcacatgacactgtggttatttgcctttcagtcagtctcccccaaagagaccatgaattcct

SEQ ID NO: 429996 - DNA, 577 bp, Homo sapiens
aactcaagtttgtgagtgacagagcatttacgtcatgccctcaaaagactgcatgtgcacacactgttgcttggcttgtaaarcaacatgagaagaggcttctgctgggttttaattaaaaaggttctcattgttgtcactagcaatgacttgaccatgactctatgagcagaagccagcctctgtgtacaaatgcaggagaaagaagatggccttaacctagttaaataaggagagaaagcttcttcccagtttctttctgaagcttcccaatcaccctgggttccagccaggattctggggaggagggaactggtggaagcttgaggtctgggcagatcagtaaagctggccctctagcatcaaaaaatgtgcactaggatagtcaggcctttctttttttatgatgaaaatgtcaagtttgtaacgtgccgtgtccatgctagcatacaggaagacaggcacaatggaaactgcctatggacatgctttgctgaaacgtcaatgtttcaacaaagtggcatacaggaaggaaaaagtatcaattcacaattgccccagtgagcatgtcctagtt

SEQ ID NO: 429997 - DNA, 635 bp, Homo sapiens
aagacctccagctttactaacgtgagaatcaaccaaagatacaaagatacaagaaattcactatttccatccccttgacactatctgaggtttcacgaagaatattccacagaccactttggtcaaaatcgccagggatgcttaataaatgttcaacctcttggacccttcaccagacttaccraatcataaatctctctagtaagaagtgtatagggatctgcacttttagtaaattctccggtgaatgttatacactaaagggtaaaagccactatctgagctggggaggaagatcagcaggatcagctgaggccattgctgaactctaagaaatgccttcctattgttgcagggacaagcctcctgatgagctagaaccagggtccttcctgttaccttcaaactctgaataaaaagctgtgcactctctgatttctaagggcccaaccagtcccatgtgtatgattttcagaaggctacgtcaccactccgaggatctattttcccatctgtgttgctagattcaggaactctgtatataaccattctagctaccatttttagtccttacaatattaataataatttactaatgacaaaaaaaaattgtaaacacttactgtatgacagaa

SEQ ID NO: 429998 - DNA, 522 bp, Homo sapiens
ctatgtttttgattgcctggagactcatttacmtacatatttaatgatgacctactatgggcaagacattaccaagatattacagaagataataaattaaagatataatagtagtctgtactcaaatgtgaaatatgaaacagacttactctgtttgatccataacatcaacatcagcctttttgaccccatggccaaatcaaatttgtaaaaccaattttttggaccaatgtgaaattatcaacattttctagttctaggaaaggttatttaacaaaacagacactgcaatcaccgttaccagaattttgtaagggaaaggacattttaaccaccaacaagaaacagtcagggcataacatcaaaataaaatattactcttcaaattttgacaccaaattttagaccagcacttaagagccatcagcctgccagagttggccaaaggtggatgacacagaaaggtacgtacatgaaaaaaaaacaattccaacaggcagagattgtaacaatagaatcgca

SEQ ID NO: 429999 - DNA, 576 bp, Homo sapiens
gtaaacaattatctgttgttacttcaccctgttattccccacatctcactgtccacccgcttcccaacatctctgcctctgcttcctagtttccctgcaaatattttctgcaagccccaatctgttttaccccatggccactttctcccaagctgttccttctgcctataatgctctcccgaccccattaccattcccaaacctaataaaccttttattttttttaagacatttttaargacactttttggttcacagcaaaataaaacacagagctatcccatatacatttatccagtcatatgcatagcatcccccattatcaacatgccctattagaaatgtacatttactacaatccatgaacctacaccgatgtatcattatcacccaaagtccatagtttacattaggggtcaccctttgtgttgtacattttatgggtttggacaaatggataatgacatgtatttaccattatagcatcatacagaatacatacaccaccctaaaaatcctccatgttccatctacttatctcccctgccccattctcccttgataactactgatctt

SEQ ID NO: 430000 - DNA, 573 bp, Homo sapiens
gatattttgaaccttatgctttttaaaattggtaattcacaaaaatttgatgttgataaatgtcataagtgccatttattgagtacttactatatgtgaggcatgttgcgaagtgctttgtacatgcgacattcattctcaacagcataactagaaggaaggtactgttgttgtcagctctgtttaaaaatgatacacccggccgggcacggtggctcacgcctgtaatcccagcactttgggaggccaaggtgggcgaatcacaaggtcaggagattgagaccatcctggctaacatggtaaaaccccatctctaataaaaacacaaaaaaattagccgggcgtggtggtgggtgcctgtagtcccagctactcgggaagctgaggcaggagaatggtgtgaacctggraggcggagcttgcagtgagctgagatcgcaccactgcactccagcctgggcgacagagcaagactccgtctcaaaaaaaaaaaaaaaaagatacaccctatcttcatcccaccttctaatgtacaaatgtgctttcctaatatcattcttaaggaccacagag

SEQ ID NO: 430001 - DNA, 597 bp, Homo sapiens
catttataacatctcctggaatatgaaagatggatgcctttctcatttaggcatgtacaggatcaggattgagggcagagtctgcatgacagacttcattgcatgaagatttgcaatgactaacctatcccaagacaatagagatcaggcagcagtattcaaccttgtctttgggacaccaccaagctgctaatccacaatgccttcagctggtgkataaaggaatggcaattcaaggacagaacatacatacatacagaacatacacttgctgataacatacactgggcttagaacctgatgctctcacttattgtatatcttggggcaaatccttttacctctgacccacaatgttctcatctggaaaatggggagaatagttacaatttcagagtgttactgtaaaggttaaatgagatataacatgtgacaacatgcaaacacctaataaaataaatgagaataaggatgaagaggggaatcataagaaggaggttgataaacacagttcacacaagagcatccatcatgctgtcaatcatctactttcccatatgcacctgatgaataccctgtcttatacattagaaaacc

SEQ ID NO: 430002 - DNA, 560 bp, Homo sapiens
gcttaaccatttcatcagttatcagctcaaatcttacttcttccaggaagcttttagtgaaatacctagattaggtcagatactacaactgtgtactcccatttccctctttattttgcaaccaaaaaccttatcatattgtaatataatttatttcttataattatttatttcttatacttactctattttcctgctagactgtaagtactctgaggcagaaactgtgtccattttcccccatccatttcaacaccagtctctagttcagattctggtgaatagtgaggcatatcatatttattggatgaataaatctttttggaaagtgaatgggaatgtcaataatatttcttctttacatttttctccccaaatctagatttgtcaactcaactgcacactggacatgtccgcttggatgtcttacttctcaagtatattgtgtataaacctgtacttctgactacccctttcattgtcagytaaatctgtcttatctactgccctccctatctcagctaatggaagattcatatttccagttgctcaagtcaaaa

SEQ ID NO: 430003 - DNA, 640 bp, Homo sapiens
ctacccctttcattgtcagttaaatctgtcttatctactgccctccctatctcagctaatggaagattcatatttccagttgctcaagtcaaaaccttttactcttccttgattccccttgtttcctcacacttcaagtctaatccattaggaaaccctaattttactccttaaaaatacaaacccagaatctggccacctcttctctcctctcttgctactcccctarttcaagctactgtccttaatctcctggattaccagaatagcctcctgtataatcttactgcttttaagcgtgcctgtccacgttcaactctcaacacggggtgatctttgtaaacataagtcaggttgtctgactcatttaactaaatgccctgcaaatggcttccatttatttcatagcaaaacccaacatctttacagtagtcagtgaggtccagcatggtcagtcccttgttttctccccaacattacccgctattactccttgcccctccctcaccactctctagttatcaggtttcctggtgtctcctctgcttggaaagctctttcaccaagtgccaacctagctcactcccctacctcctccaggtgtttactcaaatgtcatcttctccatgagtccaaccct

SEQ ID NO: 430004 - DNA, 640 bp, Homo sapiens
ctacccctttcattgtcagttaaatctgtcttatctactgccctccctatctcagctaatggaagattcatatttccagttgctcaagtcaaaaccttttactcttccttgattccccttgtttcctcacacttcaagtctaatccattaggaaaccctaattttactccttaaaaatacaaacccagaatctggccacctcttctctcctctcttgctactcccctaattcaagctactgtccttaatctcctggattaccagaatagcctcctgtataatcttactgcttttaagcgtgcctgtccacgttcaactctcaacacggggtgatctttgtaaacataagtcaggttgtctgactcatttaactaaatgccctgcaaatggcttccatttatttcatagcaaaacccaacatctttacagtagtcagtgaggtccagcatggtcagtcccttgttttctccccracattacccgctattactccttgcccctccctcaccactctctagttatcaggtttcctggtgtctcctctgcttggaaagctctttcaccaagtgccaacctagctcactcccctacctcctccaggtgtttactcaaatgtcatcttctccatgagtccaaccct

SEQ ID NO: 430005 - DNA, 449 bp, Homo sapiens
cagagacatatggatagaaggatgatttaggggcaaagtaagaaaatattccaacaaagctcttcaaatatgacataggctggtttgtgcggtaatgaacttgctatcactaaaagtactaaaactgagactgaatggtcatgtattattggcattacaaaaaggactcgtcattcctgaaaacagaaaagtttggtyattgagaaaccttcagaggttttctttgatccagtgactcatgacaccttcataccatcaatttcaaagagctcataataactcccagctattcctagcacctattgaacaacccgatgttgccaaccattcataatagttaccattaactcagtggtccagtgaaaagagcagagatgacgtaagaaggaagacagtttcaaattctagctgtgatggttgtgtgaccttgatcaaggagtctaaccaac

SEQ ID NO: 430006 - DNA, 540 bp, Homo sapiens
accgacagcagtttaagtcaattactgccacattctgtcatgggttccacactcacagccccttttcaaattgtagatctccctcagtactgaaacactctctctctctgtctccctctctctcgctcttgctctctctctctccctctccacctctctgccttctctcaatatccccctaactccaggggagccatggagaggcatatttaggragagactctctgggggcttccccgcctgaaatggggaaagaaagacgaatctgtcttaggaaagtgccccatccatctccttccatatcatccacagccgccccagatgaaatttcctctgagaccctttgcaactgtgatggatgagcaagtccccgaggacgctttctcctttcccctgagggggatccatgcaaacttgccagatcctccccaaaaccaacagaagccggaggggctctgttgattgcaaacggggatgcagggtaaatccctatcccagactttccaagccccagataaggagcccaccgctgacttcccc

SEQ ID NO: 430007 - DNA, 609 bp, Homo sapiens
ggcgtgtagggtgttgtgtctatgcgcacgagcatccaaagggaccgcgcatacgcgcaaacccggaatcctggtgcccttaagcgtgactgtactgtgtgtgtcgcgagtacctgagtgtttctggggcggcaggtgtytccacggccgcgtggatccatcgagtgtgggttttgtctcgggagttgcccgtgtgggtccgtttgtgtctgcgcgtctctctgtgagtgtttgacactgtttgtttctctcggtgtgtaggcgagagcccacgtaacctcccagaatgaagcaagagcttctctacgtaggcaggatgtaggagggagaagctgaggggacacgaagttctctggagaccaccagaggcggggaaggggcgagggtacagggactaagacatgaaaataaaaagcaaaatactctgcaatcagcctgaatgcaggctggggctgctaacatagggcctcttcctgaagcagaaaataaagccctcgtatgataattcccacacagcgcacatttggtatgtttgtttactttgcttcccttctgatttaaaccaaatcagcaatgcagatccctagtcccctgaagattaggcaagaa

SEQ ID NO: 430008 - DNA, 609 bp, Homo sapiens
ggcgtgtagggtgttgtgtctatgcgcacgagcatccaaagggaccgcgcatacgcgcaaacccggaatcctggtgcccttaagcgtgactgtactgtgtgtgtcgcgagtacctgagtgtttctggggcggcaggtgtttccacggccgcgtggatccatcgagtgtgggttttgtctcgggagktgcccgtgtgggtccgtttgtgtctgcgcgtctctctgtgagtgtttgacactgtttgtttctctcggtgtgtaggcgagagcccacgtaacctcccagaatgaagcaagagcttctctacgtaggcaggatgtaggagggagaagctgaggggacacgaagttctctggagaccaccagaggcggggaaggggcgagggtacagggactaagacatgaaaataaaaagcaaaatactctgcaatcagcctgaatgcaggctggggctgctaacatagggcctcttcctgaagcagaaaataaagccctcgtatgataattcccacacagcgcacatttggtatgtttgtttactttgcttcccttctgatttaaaccaaatcagcaatgcagatccctagtcccctgaagattaggcaagaa

SEQ ID NO: 430009 - DNA, 609 bp, Homo sapiens
ggcgtgtagggtgttgtgtctatgcgcacgagcatccaaagggaccgcgcatacgcgcaaacccggaatcctggtgcccttaagcgtgactgtactgtgtgtgtcgcgagtacctgagtgtttctggggcggcaggtgtttccacggccgcgtggatccatcgagtgtgggttttgtctcgggagttgcccgtgtgggtccgtttgtgtctgcgcgtctctctgtgagtgtttgacactgtttgtttctctcggtgtgtaggcgagagcccacgtaacctcccagaatgaagcaagagcttctctacgtaggcaggatgtaggagkgagaagctgaggggacacgaagttctctggagaccaccagaggcggggaaggggcgagggtacagggactaagacatgaaaataaaaagcaaaatactctgcaatcagcctgaatgcaggctggggctgctaacatagggcctcttcctgaagcagaaaataaagccctcgtatgataattcccacacagcgcacatttggtatgtttgtttactttgcttcccttctgatttaaaccaaatcagcaatgcagatccctagtcccctgaagattaggcaagaa

SEQ ID NO: 430010 - DNA, 558 bp, Homo sapiens
tttgctggacccattattaaaaagtactcctaaaatcaaaatagtgataatgggcatatttagctggtaggattcaaacctggagttctgaaaatgacctttgccactgcaatgaagaagtccgactgggaaggaaggaaacatggaatggatccagaggtttctgaagtcttcaacacatacttaactctacaaaccaatygctttcctttctattttaaacaatttggtttgggtttctgtcacttgccaccaaatgtatcttaaagcattataaatcagagtgacagagttttagatacagaactttgaaacatttgattcagagagaccaaaagtagagaaatgaaattggagccaagtgaatttctattaattcaattctacctctagtaagccctgtgccctacacaagtcaagtctgtttgtccctctgggccatgtattcttaacctatgtggtaggcagaattctgatatgacacctaatgccccctggccatgtagaattccttctactttgagtgtgggtagaacttgtgtatataataagatatca

SEQ ID NO: 430011 - DNA, 407 bp, Homo sapiens
ggtggatgaatggacaggatgatctggagacacctcacaggggaaccgtgcrtgggcaggtgccctggcgaaatccccatggttaataatatagctgagttgagttctaaaggagtggaagtttaccaaactaagagtttagatagggacacagttttcagttaatacatccattaggtgatgtttgttttcaaatattaaattactcatccttctaatttattcacactgaactttccccaaatagcctgagttcatgttattttatttctctcttgtgcacagagcattgggaagtacctgaggagatcagagttctcaacttggctctgtacttgttttactttgagccctggtaaatcagtgtagatctcatctctgtacctcagttttcttaccaataaaat

SEQ ID NO: 430012 - DNA, 488 bp, Homo sapiens
gaacctgcctgaccccccaagtgcttctccacttagggcagtgccgtcctgacatcccccgccccagactcaaaccaggcccttcaggagctaagtgggctgagcagctggaagcaaagcaaaaggcacattttctctccagggaagctctgcacagcagcaaggagccctatttacaaataaaaccttttcttggctccactgcccacatagccaagcccctttattccatttcaatatgcctaattccactgaaagtgcattggcaataaacagaattaatcagtcctggatgcccaagtgagtgtaggcaggtgttagcatatccaaggggccctggaagggaaagtacaataaacagcaggaatataaaatgctttactgcggaggggattgaagatagaaaggactttactgaaggygggcattttatgagcaaataaagcctttgattgcctgcaactgagaggcaaactaaagtgagtgga

SEQ ID NO: 430013 - DNA, 596 bp, Homo sapiens
tataatacccagtgtcggcatggctggagaaaaatgaagagcatcaactgctgttaaacgctggtgggagggaatatacaaaacaaattccgtcccaggggcagtctggcaacagttaatcagaagctttaaaattgcgcctctcccccgagccaatgccacctctagaaagacagcccaaggaattattagaaatgtgcttaaagatgaatgtgcagggatgtctaaagcagcaatatggataatattaaaaaacaaactgtctaacaagaagaaattagttaaataaatcatgtacctcttcactacgatatattatgcaatcattaaaaaatcacastgtagaaacatttatcaaggtgggaacacagtcatcatacatcgcttggtgtaacgaataggctagataacgatgctcagaatggcagctttgggaagaattcccaatacaaatgcatacacagatgcacacagggtactctaattgtcaatagtgattatttctggcaggtgagtgggtacaattattactgacttggggagggtcttttggcgtttttctgaagttttcaagttttaaaaattaagtccaggct

SEQ ID NO: 430014 - DNA, 511 bp, Homo sapiens
tccacccttgccctggaggccgggatcccctaagccaagagaaaagcggtgcagctccagcagctgcaacttcctggctgggctggtccggctgcctggactgtcccrgagagtctgtgactggcccgtccagaaggaaagcggcctcccgggccctcctccgttccaatcccttacctctctcgggctccaccaccgtcctgccgacccagtttcaggggacctgcctgtgaattctttgttccaaacccagggagccccctgtctccattgcgccctggcccacctccaggccgttctgccagcccaagctgctgctcacagaccagcatcgctccccacctctccccgcccctgccgtggttgaggccgcctcgcctcggcaggaagcgcccagcctgatttcctacaagtgtttgtcagaaggagggggtttgtctgcgtgcagagcaagagctggaggagcttaaccccttgcaagccctccgcagtcagcgctgcccaggaaagg

SEQ ID NO: 430015 - DNA, 576 bp, Homo sapiens
tgggaaataaatcaccttccggctccttgggaaagacgttcatcatcaatgtcaattcatcagctatctgagcatcgcagatgtaactgcagatcagtcttgccacaagcmaatcgcttagacaattacagctaccatttctttttggttgcttatcatgtgccaggcactgggctagggattttatatgcattagctcatgttgtcttgacaatatagtacctaggatataggtggtactattattatcattattatcaaaaactggaatctacaggagcttgggaagcactgctcctctatagtctctacgaaggaagcaagagccaactctgaggcttaggacttgtggacccgcccaggagtgagaggtggctactgcacctcagggataggcactcccgagggcatggctcattagaaaaaacccatccacaaaaggggctggtggggaggcaaagcccagttatctgagctggacctcagcaaggacaaggaaattgtcatcctaccttctgctgaaaaagcctggggatttttgaagccccaaagcaaccaggtgctggagaggttgct

SEQ ID NO: 430016 - DNA, 576 bp, Homo sapiens
tgggaaataaatcaccttccggctccttgggaaagacgttcatcatcaatgtcaattcatcagctatctgagcatcgcagatgtaactgcagatcagtcttgccacaagccaatcgcttagacaattacagctaccatttctttttggttgcttatcatgtgccaggcactgggctagggattttatatgcattagctcatgttgtcttgacaatatagtacctaggatayaggtggtactattattatcattattatcaaaaactggaatctacaggagcttgggaagcactgctcctctatagtctctacgaaggaagcaagagccaactctgaggcttaggacttgtggacccgcccaggagtgagaggtggctactgcacctcagggataggcactcccgagggcatggctcattagaaaaaacccatccacaaaaggggctggtggggaggcaaagcccagttatctgagctggacctcagcaaggacaaggaaattgtcatcctaccttctgctgaaaaagcctggggatttttgaagccccaaagcaaccaggtgctggagaggttgct

SEQ ID NO: 430017 - DNA, 576 bp, Homo sapiens
tgggaaataaatcaccttccggctccttgggaaagacgttcatcatcaatgtcaattcatcagctatctgagcatcgcagatgtaactgcagatcagtcttgccacaagccaatcgcttagacaattacagctaccatttctttttggttgcttatcatgtgccaggcactgggctagggattttatatgcattagctcatgttgtcttgacaatatagtacctaggatataggtggtactattattatcattattatcaaaaactggaatctacaggagcttgggaagcactgctcctctatagtctctacgaaggaagcaagagccaactctgaggcttaggacttgtggacccgcccaggagtgagaggtggctactgcaccycagggataggcactcccgagggcatggctcattagaaaaaacccatccacaaaaggggctggtggggaggcaaagcccagttatctgagctggacctcagcaaggacaaggaaattgtcatcctaccttctgctgaaaaagcctggggatttttgaagccccaaagcaaccaggtgctggagaggttgct

SEQ ID NO: 430018 - DNA, 549 bp, Homo sapiens
ttttttgttgttgtatgtattggctagagacttcaggataatgtcgaataatattaatgataatattgactttaatggtgtattagtcatgtctcttattttctgaattcgatgctttgacatccagggctttgttgtccrtggagggactgcccctctcaggataagctaattcctggacgtaagcaacttgcctgcatgtatgtcttcatatataaaccaaccaatccagagctcataccccattctttatcctttctttatcaccctctattcttctttatctatctttatccttctttatcactctcatgtcccaggccactatccgcctgccctaattgcctcagggccaggtagcagacaactagggacagcctctcctccccaagataccatgaaattattcaaactagccaatcctaagactggttgccctgccttgcttgttccttcctgtggaaagtacagtaaagagtcttgctcgtgctttcccccgtcccctctacctcctgactgaccttgatgtttccctgttttgcctcttgt

SEQ ID NO: 430019 - DNA, 549 bp, Homo sapiens
ttttttgttgttgtatgtattggctagagacttcaggataatgtcgaataatattaatgataatattgactttaatggtgtattagtcatgtctcttattttctgaattcgatgctttgacatccagggctttgttgtccgtggagggactgcccctctcaggataagctaattcctggacgtaagcaacttgcctgcatgtatgtcttcatatataaaccaaccaatccagagctcataccccrttctttatcctttctttatcaccctctattcttctttatctatctttatccttctttatcactctcatgtcccaggccactatccgcctgccctaattgcctcagggccaggtagcagacaactagggacagcctctcctccccaagataccatgaaattattcaaactagccaatcctaagactggttgccctgccttgcttgttccttcctgtggaaagtacagtaaagagtcttgctcgtgctttcccccgtcccctctacctcctgactgaccttgatgtttccctgttttgcctcttgt

SEQ ID NO: 430020 - DNA, 549 bp, Homo sapiens
ttttttgttgttgtatgtattggctagagacttcaggataatgtcgaataatattaatgataatattgactttaatggtgtattagtcatgtctcttattttctgaattcgatgctttgacatccagggctttgttgtccgtggagggactgcccctctcaggataagctaattcctggacgtaagcaacttgcctgcatgtatgtcttcatatataaaccaaccaatccagagctcataccccattctttatcctttctttatcaccctctattcttctttatctatctttatccttctttatcactctcatgtcccaggccactatccgcctgccctaattgcctcagggccaggtagcagacaactagggacagcctctcctccccaagataccaygaaattattcaaactagccaatcctaagactggttgccctgccttgcttgttccttcctgtggaaagtacagtaaagagtcttgctcgtgctttcccccgtcccctctacctcctgactgaccttgatgtttccctgttttgcctcttgt

SEQ ID NO: 430021 - DNA, 526 bp, Homo sapiens
gtttgatcagcaactacaattgatctccatggtttttggacagtcttaaatatgtcattctgtagttttccwagtggctgactaaatacctaggcagttggtaatagcctgatagtcagtaaaaatataacaaggttttcaaggggaatattggccagatctgtgagaatgtccttgagttttgcccgtggaacaaagcaaccacacccattttcagttctgtatcatgggcactggagtttacagcccactaggcaccacagcgtctcagcttagttgaatcatcagtgaaacaggcccaggcatttagggaacctctgtgaatcaagggcctcactgagctagcagatttggtttaggtggcagaatgtaagatcagactttctcaaagggagaagctgctgctttttcatgtaaagctgagatgccctaggggccagactggctgcattcttgaatattaccagttccatgtgatgacagaggcttgttgggcctttcccaccttattagtcattgcatttga

SEQ ID NO: 430022 - DNA, 575 bp, Homo sapiens
ggcctgggcataggaaagcaaactccaggcaggaggaaggagccccaggctgtggatgcctctgggggaattttgggtcagcaacggccagaggagctcctgaacttaagcagtatctgccacctccctacctttgggtgtcttctggtgtccaatgtgctgctgtcaggtccctcgctggctcccaaattcgactgggcagcctccaaagcagtggagttggtgctactgctatctccactttgtggatctcagagctgcaggatggcttctcccaccacacccttagctggccccatttgtggttggcattgtgggacagcgtgttcagggcaactctgctcctgtatattgcgggctgcgtctgygctgtctgcacactcatagacgtcagagccacaggctggctctgcacaacccttgtgccggccctgactggggctggctttggtgcacatgcgacagttcaatgtggtccccatggggcactcttgctcttcttgggcagcttgggcctttggttgcccccaagtgtgcagagctcaacacctatcgtctcttgctggcaaaagcat

SEQ ID NO: 430023 - DNA, 575 bp, Homo sapiens
ggcctgggcataggaaagcaaactccaggcaggaggaaggagccccaggctgtggatgcctctgggggaattttgggtcagcaacggccagaggagctcctgaacttaagcagtatctgccacctccctacctttgggtgtcttctggtgtccaatgtgctgctgtcaggtccctcgctggctcccaaattcgactgggcagcctccaaagcagtggagttggtgctactgctatctccactttgtggatctcagagctgcaggatggcttctcccaccacacccttagctggccccatttgtggttggcattgtgggacagcgtgttcagggcaactctgctcctgtatattgcgggctgcgtctgcgctgtctgcacactcatagacgtcagagccacaggctggctctgcacaacccttgtgccggccctgactggggctggctttggtgcacatgcgacagttcaatgtggtccccatggggcactcytgctcttcttgggcagcttgggcctttggttgcccccaagtgtgcagagctcaacacctatcgtctcttgctggcaaaagcat

SEQ ID NO: 430024 - DNA, 463 bp, Homo sapiens
tggggaggttctgcatcacactgaataaataaagtgtcagctactcataccaggacaactttccctttstacacataccaaatctctctcttttttttgagacagggtctccctctgttgcccaggctggagtgcagtggcataattacagctcactgcagcctcgacctccccggttgaagcaatcctctcacttcatgtccccagtagctgggaccacaggcacatgccaccatgcctggctgttttgtactttttgtagagacagggttttgccatgttgcccaggctgatcttgaactcctgaactcaagcaatccacctgtcttggcctaaagtgctgatattacaggcatgagccaccatgcccggcccacataccaaattgttaggaaagaaaactgctttccagagaattgttttagaatcaaatccattacattagttggtgctttaaaccacc

SEQ ID NO: 430025 - DNA, 534 bp, Homo sapiens
actttttccccccctttttttgccaacgtaaagtggctaaaagccaaggtaagagccattacttatcatttgatccacagtatttcctctgtattgatagaggctgcagagccactaaaatttgaaaactcttcttatgtctgtctgcttttccctgtaggatttatgtagattatttaatactcaagttcagttcaaataagcaacatttagcttggctgtgttaatatatcaatgatatattgacatctgtgtttatataggaacattaattttgctaacatttattgctttgctcatttttcgatagttgccttgctttcattgacttacaattaggaggtttcccagacatcatatgtgactttgttactgaattgttaggatgaagatgatttttcagatgcgtatttgagcaaattgacaagtaagatctatagttygtgttcatgcacacatttcaaaaattttaggaaacccagtgtttgaatgcagataagtttgatctcagtgaacatgtttaacaataaaata

SEQ ID NO: 430026 - DNA, 534 bp, Homo sapiens
actttttccccccctttttttgccaacgtaaagtggctaaaagccaaggtaagagccattacttatcatttgatccacagtatttcctctgtattgatagaggctgcagagccactaaaatttgaaaactcttcttatgtctgtctgcttttccctgtaggatttatgtagattatttaatactcaagttcagttcaaataagcaacatttagcttggctgtgttaatatatcaatgatatattgacatctgtgtttatataggaacattaattttgctaacatttattgctttgctcatttttcgatagttgccttgctttcattgacttacaattaggaggtttcccagacatcatatgtgactttgttactgaattgttaggatgaagatgatttttcagatgcgtatttgagcaaattgacaagtaagatctatagtttrtgttcatgcacacatttcaaaaattttaggaaacccagtgtttgaatgcagataagtttgatctcagtgaacatgtttaacaataaaata

SEQ ID NO: 430027 - DNA, 496 bp, Homo sapiens
tattcttttttcctatctagcactaytctcactgtaccacagtggctcctgggcaaatgttaggataaaagcacaatggaagtatctctgcatatgtgaagatctagagatgaaaattctactattgtcctaatagaagtaatactggagacaatttaagccattaagattgtggcttggaattcagataaactgaatatacatgtcacagccacaaaagttagtagtgttatttataccagtcataccaatagtctgtgacaggaatgtcatatccaatcagcaaaagcaaaaagacctacacagttatagacccacatgtaatagtatcatttcatccagatgaaattagagagagagaaagagatgctgtagaaataaataacccataatttctttaagcatgaatatttggggggaattttttaaatggaaatcttataaaaacacactgctatggtctgacagtattcatccccctaaaactcctatgttg

SEQ ID NO: 430028 - DNA, 543 bp, Homo sapiens
ttagtgcccacagctaaggagtctgggctttatttaatagttctgagatatgaaggaggaatggagcagattaattggcacatgtgtggtagcggggcgggttggaggttccagagggtcatttgaatttaatggctgtaaacaggggaataacatgatcttatttttggttttaagggaggaaggaatacacaggtggagcacgagggatttttagggctgggaactattctggatgatgctgtgatggtggatacattccattatgcctttgtcaaaacccacagaatgtayaacacaaagaagtaagcttggacttaggtaatgtatcagtacaggttcactggttgtaaagtatgtccctatgctaatgcaagatgttaataacaggggaaacttgggggttgggggaggctgagggactgtaagagaactccttattttccaatcatttttctgtgaacctaaacctattctaaaacaaatctatgaataattcttaaaagatgattctactatgcagccataaaaaagaatgaaacg

SEQ ID NO: 430029 - DNA, 543 bp, Homo sapiens
ttagtgcccacagctaaggagtctgggctttatttaatagttctgagatatgaaggaggaatggagcagattaattggcacatgtgtggtagcggggcgggttggaggttccagagggtcatttgaatttaatggctgtaaacaggggaataacatgatcttatttttggttttaagggaggaaggaatacacaggtggagcacgagggatttttagggctgggaactattctggatgatgctgtgatggtggatacattccattatgcctttgtcaaaacccacagaatgtacracacaaagaagtaagcttggacttaggtaatgtatcagtacaggttcactggttgtaaagtatgtccctatgctaatgcaagatgttaataacaggggaaacttgggggttgggggaggctgagggactgtaagagaactccttattttccaatcatttttctgtgaacctaaacctattctaaaacaaatctatgaataattcttaaaagatgattctactatgcagccataaaaaagaatgaaacg

SEQ ID NO: 430030 - DNA, 535 bp, Homo sapiens
aggggcttagggatagtagcagcgcatttcactccaaggactctcaaatcctaactactggttttcaccctgcccctgcaatgctgggtaaaagctccaactggcttatgtataccccatctgcttctggactcatccaagaccttgcaaagtgccacttctctgccctctgctactcaaaagcacaagacggcatctcagaaaaatgcatttcttcaggcaatctacattcatttaatagacttaccttctgactttatgtgcatgaagtatacgacaaggtatgaatataaaatgcaataagatacaggccctgtccccagccctacttgcccatccccgacaaagggacaaagggtgtgtacatgccaggctgagatcacagacctcaaatcaataaatgcaatcaattkttatgggccattggtgaaggtgagcatttgctgattactttggtgactcacaggagagatttttaaggatacaagatgagagataaagagaagaaaagagggagggcttcccagaggaagga

SEQ ID NO: 430031 - DNA, 475 bp, Homo sapiens
gcctgccaagtgtaataaagggctgcccaggtgccaagagtccagcaaccataaaacagccatcctcaaaatgagatgactctcagaacccttccacaacagccagcgatacacagtttgaaaactgagagtctttgaatgactaagaatttggccctgagtttattcataaacctcaatagccaagaaagatttacatgaaatcatcagagttaaaaaatcccacactctgcccaacatattcagcttctcattcatttccttttcgcctttcacttttcagtttcatcaatcatgtgtgtcttgcctctgaagtcgtaatttaccttgaaagccactggagcaggcmccactcatgtgactgcaggaccacagggctgagggcatccttgagaactcaacttgaatgtgtggcagacttcccatcaccaagccatccctatggacccagggtgaggctatctctgccaccaac

SEQ ID NO: 430032 - DNA, 524 bp, Homo sapiens
ggagtgggagttaactctaaggaggcatgaggaaatctggtgatggaaaaattctgtcaagattgaggttttggttacactggtatatgcacctttgtctaaactcatccaaattaatgctgaaataccgtgcattcagcaagttcagattttactttaaaatattggatatccttctgttatgattattttgccagtctgatacttacatatatttttctatgttttgacatgttaaggaagcatccatatagtcagaaatttatgtttaatcttgttttcttttcttttttttttaacactgtgatgacagagggagaaagagagaatgcaagaaagagatttggttcagttttaaccaaaaaagcaatcatgcgatgtgaattattttaytatttattctattttttgctccagtgtgtgacatggacagtctttaaagtcagcactaataagacagccttttaaatttgcatattacagattaaaatatgatggcaccttctcttaaagatcacttcctg

SEQ ID NO: 430033 - DNA, 581 bp, Homo sapiens
tcaggcctgcttaattatgattaattgccacatggataatcagatacagtttcaaaaggttggaaatgacactccaaggacaccagggaagatacaacrtatgcctttgttcgcaggaagaaatggcaggtcccttcctcagccccataaccttttcttattttaacaattccaaacagaattaataccatcagtatatcgttcccactccggggaattgaacttcaactgtacaatttctgcagctgtcagggttttccaacctcctgtcaataatgcaatgttggggtgtccctctgctggaatgaaagcagtttcaagtttctgctttatgtctgtgctttctgggtggtgggacatgatgagaaagtacaaaaaaaataataacagcagtaaaaagcttccactcttgacttaactggatcaaatgtaatagacttcagtcttttcttctgatttcctctgcttgttttagaaaacactgtgaaagtacaggagattttgtcttgccaactcttccctccatttaaaatccctttggctaagtcaaggatcacagtgtgtcatttccagtctagcag

SEQ ID NO: 430034 - DNA, 581 bp, Homo sapiens
tcaggcctgcttaattatgattaattgccacatggataatcagatacagtttcaaaaggttggaaatgacactccaaggacaccagggaagatacaacgtatgcctttgttcrcaggaagaaatggcaggtcccttcctcagccccataaccttttcttattttaacaattccaaacagaattaataccatcagtatatcgttcccactccggggaattgaacttcaactgtacaatttctgcagctgtcagggttttccaacctcctgtcaataatgcaatgttggggtgtccctctgctggaatgaaagcagtttcaagtttctgctttatgtctgtgctttctgggtggtgggacatgatgagaaagtacaaaaaaaataataacagcagtaaaaagcttccactcttgacttaactggatcaaatgtaatagacttcagtcttttcttctgatttcctctgcttgttttagaaaacactgtgaaagtacaggagattttgtcttgccaactcttccctccatttaaaatccctttggctaagtcaaggatcacagtgtgtcatttccagtctagcag

SEQ ID NO: 430035 - DNA, 598 bp, Homo sapiens
tgttcccctcattgcattccagagggcctctcagccagttaatgtttgcactgggaggtccaaatatccagcaatcagcactgaacttttctctttttgttgagaattgcaggtttcaaatgcaatctctggctttaaagaaaaacttacaggtgaacacaaaagcactaatttacattttattcacaaacaataatatttgcagcagtttcaccatgtgtgctcataaaagagttttagaagacgtctggctttttttttttaagactttatggtggctggaattggtttaccaatttaagggcagtcatttyatttatttatttattttttaaaatcctaaatagcataaaagtattttatgctagactgtgaacagttcatacattctgcatggttaatacatgtactcacatgggaaacagccatcagaaatagataaactaatttgaaccagtttcaagcacatagcatttaattaaatcacatcttcagaatggattttaaaggttgggattttcagagcacaggggccgcacacagcatcttggccgtggtcctggaacgctctgccaagatggccacaactcacgggcct

SEQ ID NO: 430036 - DNA, 609 bp, Homo sapiens
attttgttgaggtggcagctaagagccagggttccagccccgacactttctttcattgccttgggaccttgaacaggtggcttcctgtcctttacataagctgggccctgagactcccccaggaggaaacacgggctcctgcctgctgtgagtcacggggccctgcaaactcaaatgagacgttcagggaaaggcctggaatctgaaaagcgctgcagagatgaagggattattgagattgttgagataaaactctcctgatttttgcacgggtgccctgtaaagctgtttcctgaaacatgccagtttaccctgtgccccagttttgcctgttttagccccgatatgagtgttccccaggcaaaggcatcctttcctacgatttcagctctgcagggctgttcatgccactttgtgtgtcatggaagcrtggtggagggcagacaagccacagcatgggaagcatctgcccggccttgctatgaatgccagcctcctgcctgggctttcctcctagcaccagctcctgctgctgagggctggagagagaatccctaagctgtccctgcccacctgcctggctgacgctgtgggtgtctgacagcctgg

SEQ ID NO: 430037 - DNA, 603 bp, Homo sapiens
agtggggcatagaaaactcagctggctgactgctactgtatgccaataaatgtgtgcccagatctgtctgcaaagccttgccccgcaagagagtggctccgtgtgggttgggagctggaggacaggcatcagactattaaggggggcaacatgggtggtgaagaaatggaggaagggaagtgagcatctgaaccccaaaacgctgcagagaaggcaggagagaaaccaatgggacctcaaaggggcttctaggctgttgtgagctgaactgtgtcctccctaaattcatgtgttgaggtcctaatgcccagtaccaccaagtgtgattgcatttggaaatatggtctttcaaaggataattagattaaaatgaggacattaaggtgggcccggatccaatatggctggtgtcctgaggagaagaggaaatctggacacagacactgttgaagaaaaaattaactgagacacttgttcaattggtaaggccaactttattcayggggccatgttgaggggtacaaggaccatgggaaggaggtcttgcagcacatgagcatgagtgactccactcaggtctttttttgtggtgggggtggacag

SEQ ID NO: 430038 - DNA, 460 bp, Homo sapiens
ttttaggaattttgtttactttgatgacagcagagtccccccacccccattttaatagaattgggagcatcttcatggtggtaattggagaagtaattattaagaaaactgccttcaaggcccttttccacctcaatttttcaaggaagcaccaaataccagcttcagacctttaacccaagagcttcacacaagcacartgaggacagaactgtctgtgaagggtttgatttgttccccagagagaaaaatccacactcttcttcagcacatttgccaggaaggcaggcgggggtctgtcactactcaagagctgagcttggggccaccccctgcggcagcccccaccaagcttagtgtccttgttgtacaatagggctctgtccccatggggctctcagaaagaccaaattacagtgcctggttcagagtagatatttaataggagttagtgctttct

SEQ ID NO: 430039 - DNA, 624 bp, Homo sapiens
cctatttttacgaaagtagtctataaattayttttagagtaaaaaggaaatggttaatttagtctaagggattgtttttgttttttaaagccctacttaagtcgaataatagaaaacaaagaatgtatggactcagtttccttcaatttatgaattgagtttaaaaaactctacaagagtcttgacatcattcattgcttccttttccagtacatttcttattataaaactcatttttgttaatacacaattacataaaaataggaagtaacacagaaccagatagaaactatgaaaaaacaggactcttttcttcgtttgagtaaaatcaaagcaaagtgcctgtcacatagaagacactgatgcctgttcacatggatgaatgtcgtcaagagccactagcattagggccaacaatggctgttttgtgtttactgatctttattttcacccaccgcttccccatatgaagaagcccactcatggtagtgagcggggtgattcagaaagagttcccaccgtgaaacgctctcattcatggtgctcttgaaggtcaaggaaaacacagctttttgaaaagggcttggctgttaagtcaccatatagggattttggggggatgtg

SEQ ID NO: 430040 - DNA, 624 bp, Homo sapiens
cctatttttacgaaagtagtctataaattacttttagagtaaaaaggaaatggttaatttagtctaagggattgtttttgttttttaaagccctacttaagtcgaataatagaaaacaaagaatgtatggactcagtttccttcaatttatgaattgagtttaaaaaactctacaagagtcttgacatcattcattgcttccttttccagtacatttcttattataaaactcatttttgttaatacacaattacataaaaataggaagtaacacagaaccagatagaaactatgaaaaarcaggactcttttcttcgtttgagtaaaatcaaagcaaagtgcctgtcacatagaagacactgatgcctgttcacatggatgaatgtcgtcaagagccactagcattagggccaacaatggctgttttgtgtttactgatctttattttcacccaccgcttccccatatgaagaagcccactcatggtagtgagcggggtgattcagaaagagttcccaccgtgaaacgctctcattcatggtgctcttgaaggtcaaggaaaacacagctttttgaaaagggcttggctgttaagtcaccatatagggattttggggggatgtg

SEQ ID NO: 430041 - DNA, 500 bp, Homo sapiens
ggctgaaacacacacccctgctgcctcccttaccccattcaccacattgcaggcaacaagaaggagagaagaaagaaggagagaccatctgcagcccttcagggagctcagacctaggagmtccccaggccagggctgtgatatcctctttggggctctgcagttcctggtatctccaagcttccagatgccaccatgtttcctggtgctcacagtggaagtgacctgtggtacgcctggtccagccacagcctcacagggagctggcacctgtgctggttcctggagctgcccaccacactgcagtagccagcgtgcttggctgtgcacaatggccggaccctgtgcttgctcgttcatgcaccccttgctgcttcacacctggattgcccttggcaggtgcaggatccaggccagtagcatgagctgagcgcagcttgccaggctgagtgggcagaaagagcccagcaggcctaagaaaaattcaggcaaaggtgcca

SEQ ID NO: 430042 - DNA, 500 bp, Homo sapiens
ggctgaaacacacacccctgctgcctcccttaccccattcaccacattgcaggcaacaagaaggagagaagaaagaaggagagaccatctgcagcccttcagggagctcagacctaggagatccccaggccagggctgtgatatcctctttggggmtctgcagttcctggtatctccaagcttccagatgccaccatgtttcctggtgctcacagtggaagtgacctgtggtacgcctggtccagccacagcctcacagggagctggcacctgtgctggttcctggagctgcccaccacactgcagtagccagcgtgcttggctgtgcacaatggccggaccctgtgcttgctcgttcatgcaccccttgctgcttcacacctggattgcccttggcaggtgcaggatccaggccagtagcatgagctgagcgcagcttgccaggctgagtgggcagaaagagcccagcaggcctaagaaaaattcaggcaaaggtgcca

SEQ ID NO: 430043 - DNA, 500 bp, Homo sapiens
ggctgaaacacacacccctgctgcctcccttaccccattcaccacattgcaggcaacaagaaggagagaagaaagaaggagagaccatctgcagcccttcagggagctcagacctaggagatccccaggccagggctgtgatatcctctttggggctctgcagttcctggtatctccaagcttccagatgccaccatgtttcctggtgctcayagtggaagtgacctgtggtacgcctggtccagccacagcctcacagggagctggcacctgtgctggttcctggagctgcccaccacactgcagtagccagcgtgcttggctgtgcacaatggccggaccctgtgcttgctcgttcatgcaccccttgctgcttcacacctggattgcccttggcaggtgcaggatccaggccagtagcatgagctgagcgcagcttgccaggctgagtgggcagaaagagcccagcaggcctaagaaaaattcaggcaaaggtgcca

SEQ ID NO: 430044 - DNA, 500 bp, Homo sapiens
ggctgaaacacacacccctgctgcctcccttaccccattcaccacattgcaggcaacaagaaggagagaagaaagaaggagagaccatctgcagcccttcagggagctcagacctaggagatccccaggccagggctgtgatatcctctttggggctctgcagttcctggtatctccaagcttccagatgccaccatgtttcctggtgctcacagtggaagtgacctgtggtacgcctggtccagccacagcctcacagggagctggcacctgtgctggttcctggagctgcccaccacactgcagtagccagcgtgcttggctgtgcacaatggccggaccctgtgcttgctcgttcatgcaccccttgctgcttcacacctggattgcccttggcaggtgcaggatccaggccagtagcatgagctgagcgcagcytgccaggctgagtgggcagaaagagcccagcaggcctaagaaaaattcaggcaaaggtgcca

SEQ ID NO: 430045 - DNA, 405 bp, Homo sapiens
accctgtcttattctagcaataagtaatattcatccataaatatatgactaattgaagataatttcaatttcattcatctcattaagagatgtattttcaatgcaattctattttatacacaataataacattaaaatttgtgatatattttggctgtttttatcaatcttgaatttataataataataataacttcatctagaggagagcttttaacatatggaggttagagtcacagaaaattaagttttttaaaatttcaattggtataaawtttttattggagcaaagtatgtgtgagagggtgattaataaaagattttcaagcataaaacataataaattaccataaaattatgtaaagaaagtgaggtgaaaatatgagtttaaggtgtgatatgatt

SEQ ID NO: 430046 - DNA, 405 bp, Homo sapiens
accctgtcttattctagcaataagtaatattcatccataaatatatgactaattgaagataatttcaatttcattcatctcattaagagatgtattttcaatgcaattctattttatacacaataataacattaaaatttgtgatatattttggctgtttttatcaatcttgaatttataataataataataacttcatctagaggagagcttttaacatatggaggttagagtcacagaaaattaagttttttaaaatttcaattggtataaattttttattggagcaaagtatgtgtgagagggtgattaataaaagattttcaagyataaaacataataaattaccataaaattatgtaaagaaagtgaggtgaaaatatgagtttaaggtgtgatatgatt

SEQ ID NO: 430047 - DNA, 543 bp, Homo sapiens
aactatcaccacatctaaataatgaacatatccattattctttaaagtttccaattcacacattaatggttgttargttttcaaatgagttgatccatttatcatcataaactgtcctttttctatctctgataatattctttgttttaaagtctattttacatgatattagtaaaaccagtcgagtttttaatgcttaatatttgtatcatttttctttttcaatcaatccatccatctgctctcacattatgtgcctttaagtttaatgtgggtttttttggtagataacatatagttgtgtcttgcacttatatccattctgacaacgtgtactttttaattggtgtttagtcctttaacatttattataattattgataaattggatttagatctattgttttactatttgttttctgtttgttctttctttttttgttattcatctattcctctttcttgccttcttttggattagctgattaattttgttatgttttcttttgaaaccccacctcagagccttccacctcagacacc

SEQ ID NO: 430048 - DNA, 595 bp, Homo sapiens
acctctgtgcttgaggaaaggggagggaagaataggaaggattttgtcttgtggttttagtgcccagttcagctgcagtagaatacagcagtaggtagattccaaaggttctccactctaaatcctggctctcaggaagcatctccagacctgcccagggctggaggcaacttgccactctgaaggtaaggacaaacctggttagatttgccacttgctgatttgagagccctaaggtcttgactgaatacagacggtagccaggcagtggtcactgtgggtcttgggaaagaccaagtgctgttatggcctcaggtctgacagagcacagtcccagtggtggtggccacaggagtgcttgtgtcatccctcccccagctgcaggcagctcaaggcagagatagaaaatcttttcktttgtgggaaagtaagggaagagaacttgagtccctgcctagcaatccagggaattctcctgaatattacccaagaccaccaaggtggtacctctatgagtctgcaagagccacagcattactgggtttggggtgtcccccaaagcaaatatagctgcaataaccaaatatttagatca

SEQ ID NO: 430049 - DNA, 532 bp, Homo sapiens
aggatgattcaacatatgcaaataaattgatttgatccattaatcatcaatagaatgaagggcaaacatcatataatcatttcagttgatgctgaaaaagtcactgataaaatgcaacattcyttaatgataaaaactctcaaaaaactgtgtatggaagcaacaaacctcaacacaataaaagccatatataacagacccacagctagcatcatactgaatggagaaaaagctgaaatcctttcctctaagatctggagcaagagaagagtgcccattttcatcactgttattcaacatagtactgaaagtcctagctaaagcaatcagaaaaaagaaggaaataaggagcatccaaattctaaaggaagaaatctaattatctttctatgcaaatgctacgattttatatttggaaaaacccagaaattttgccaaaaaactattagaagtgataaacaaattcagtaaagttgtaggatacaaaaccaaccaacaaaaatcagtagcaacccctgcctttttttgtttt

SEQ ID NO: 430050 - DNA, 359 bp, Homo sapiens
ctgtgcgcggggcactatgggtgttgtagtttttgcagggtggtagcagtttgttcttttaagaggaaatcttcgcgactagttgagtcacgaagatttttgagaaaatcatttgagaaaaagttgcttgcacgggggaatcgagtgtggactagctacgtgggtgtggcttaattctgctgtttctcttttggatgagacattgaatgaagtgtgagcagggactggaaacccgacagcatttctagggtcactttctgccttgccttcgttaacgctcagttcctcccacatctttggcttccctctataawacctacagattccctttattatttcatactagctccgactagtct

SEQ ID NO: 430051 - DNA, 546 bp, Homo sapiens
attcttaaggcccccttccctttgttctgacccaagctatttcttttgtatatcatgttaaagtcatattttagtctagctctcaaaaacaccatggttgtattttcaaagaacttccagaatctgcttattatctctttcaaagcatgaaatatgcaataaaaccaatactatttttcatttaaaaaatatgtagagtaatagttgaaagtggagagtgataatggatgaatgaaagttgaccagaacccaggagtttgagaccagcctgagcaaaatggtgaaaccccatctatacaaaaaatacaaaaactagccagacatggtggtgactggacctgtggtcccagctactcgggaggctgaggtgggaggatcgcttgagtctgggaggtcaagactgcagagagagccataatyatgctactgcactccagccttggcgacagagtgagatactgtctccaaaaaaaaaaaaaaaaagagaaagaaggaaggaaggaagttggaaatttggctatacctcattttggttttcttcctttg

SEQ ID NO: 430052 - DNA, 546 bp, Homo sapiens
attcttaaggcccccttccctttgttctgacccaagctatttcttttgtatatcatgttaaagtcatattttagtctagctctcaaaaacaccatggttgtattttcaaagaacttccagaatctgcttattatctctttcaaagcatgaaatatgcaataaaaccaatactatttttcatttaaaaaatatgtagagtaatagttgaaagtggagagtgataatggatgaatgaaagttgaccagaacccaggagtttgagaccagcctgagcaaaatggtgaaaccccatctatacaaaaaatacaaaaactagccagacatggtggtgactggacctgtggtcccagctactcgggaggctgaggtgggaggatcgcttgagtctgggaggtcaagactgcagagagagccataatcatgctactgcactccagccttggcracagagtgagatactgtctccaaaaaaaaaaaaaaaaagagaaagaaggaaggaaggaagttggaaatttggctatacctcattttggttttcttcctttg

SEQ ID NO: 430053 - DNA, 623 bp, Homo sapiens
taaattgttcagcaacaggaagacagtgaaagatagacggcaactcaccaagaagaatatgtcagtgatttcccctaagatgtgattgttccacagaagcattcttcaggggagtgggtctgtgcaggcagtaagtgggaagatcttcacttagtgtgccgtccttcctcagcttcaagagaatccacttgaaggagaagtcccatatattatgtccaatgctgtgaagcatcttttggtgccttcatttcatccaacaccaaaatcctcaatgktgaagaaatctataaatgtagtattgaccttgagaaaaagttgagcacaactgcgccctcatgcagcactggagaaacctatacatgtaaagaaggacagttttcatttgactctcagagctgattgtatattggcaaacatatttttctgccattgcttagggataagaaatctaacagaaacatcaaataaaatactgaagagagaaaaaaaacacttttttttttaaggccttctagaaggggcaattgagcatactccacatatgttggctagtttaccaggaaaaaataaaaggagccaatttgagcagtggactctaggtgacagttctgtttgggctgatg

SEQ ID NO: 430054 - DNA, 548 bp, Homo sapiens
tggtggcatgcgcctgtagtcccagctactcaggaggctgaggcagaagaatctcttgaacctgggaggcggaggttgcagtgagtggagattgtgccactgcactccagcctggatgtcaagagcaagactccatctcaaaaaaaaaaaaaktattaatgaggtgtcttacattactttatatatgtaagttttcaaaatctgctatgtattctacacttacaacacatgtcaatgcaggctagccatattcctggtgccaatggctgccatatttgataatgcagatctgaagaaagttgtacaagtggctaatggctatgatattgagtagtgcaaatctaaagaaagttgaagtttgtagtggaaaaagggatagtgtaagtggtttggcactaaggttgtgaatcatgtaaagatgttgcatatcttttaatgtgctgccaaagtaggaagcatgaattgtgcttgtgaaaggaaaatatcttggaccccaaaatcactaagggaaactccagctggaagctgcttagggcaaacccgcctcc

SEQ ID NO: 430055 - DNA, 542 bp, Homo sapiens
aactgggcttatttgacatattaaattatatgggaagcattgtcaaataataaaagtaatgccaaattttctttgagccctatttgcatagatatgttattgatgtgtttcagaaactgtataaagtttatagaaatctaatagtcctagtataactctaacagttataattctagttattatcttaaaatgttttatgcaacagaaataaccaaaacactttgtcaattgaatcattattataatgaactgtcatcatatctttaaccatggacatatcaggtcttgtcattyacaggtggttaattgtttactctgatactttcctaactataagcctaaagtgtttcatcttcatggagattaatgaaaaatactctaacaagtacaggtttctgataacttcaagatcataccattggactgggcaagaactcccagaactttagtggagcaagtgactggttcacaaaactaacccaatatcaggcagaacaagaattaattaaataccaaggaaatgacctggcggattttcctac

SEQ ID NO: 430056 - DNA, 620 bp, Homo sapiens
tcatacccataatcccagcactttgggaggctgaagcaggaagattgcttgaggccaggagttcaagatcagcctgcagcctgagcaaacatataactaattctcttctaatcttagccagcttgatcacacataaaattcctttcacaagattcatcttccacaaaccttctacaactttttcattcattcactttttgtcctatacttttactcctctcattttagaacaacaaaccattctagtttaaaacaagatactgagagctcatctctacaaaaacaaaaaaaattagtcaggcatggtagcatgacctgtagtcccagctactctggtggctgaggtgggagtattgcctgatcctgagcccaggatttcagtgctgcagtgagttacaattgtgccactacactcaagcctgggcagcagaaccaaacccccatgtctaaaaaaaaaaggacaaaagaaaaagaaagaraaaaagaagttattagaaaatgtgttccctttatggggcatccctggaaaaatatccagcaacagaggaacccactttactgatcaaattataagtcagtcaaataagatatttcaaacacgatggtattaggtacggcta

SEQ ID NO: 430057 - DNA, 489 bp, Homo sapiens
ctctgttgtacattgcctccttgctggcttggatctttctgtttggtcttgctcactcctgccttccaaaaagctctgcctggaattacccatggtactcacaggccaaagaggtcaataactgaaattagaaccaacctcaaaacagatgaagatcagttattttctgtggaggaaaggttccaataaagttcctgggggctcactgttggcagcagtggggtactagttgtatggagtttgaaaccaatctgttcaagttggggaaaaatcttgmatttggagccagtgagacctccagggttgcagacactttctaaaacatttttgtttaactaaacacttaatgaaacatcttatagccttagatctcctttatgcccctattgggcattgtatgtggtgttgaacaaaactgaatgttgcacttgtcttttctctgattttactactatctgacacttacttaaaaaggtagctaatattgct

SEQ ID NO: 430058 - DNA, 566 bp, Homo sapiens
tgacatgctcaatgcggaagaagtcgaaaggctctcagggagcaaggagctgggagggagtgtcaggcagaatcagaaggacctgtgctggttrgaagaaagacatctgaggagcagtgaccaggccaagacttgaccagggaccactagaccaggagcctccgggacacatggctttcaatgtagggaagagctgtattgtgggggaccttgtcctcctgtgctgaatctcctccaaacctgttgacatgtgaggaccctgttccttgaggtttgctggaattttcaatagtacagggggtgtcctccaaagaacttgtgggtttatcctcaaggtatccatgtcctttatccctttttaggagtgcaaaagtggctcctcactgaaaggccggcagtccccaggtatgtaggtttgggtgggggcacgtgtgtgcacagtgacatctgtgttagcgaatgggcatatgtgtggactcggctgtgcctggatgggaatttgtgggtgggggcctgtgcaggaatggagttgctgctgaggctgagtggggcttgggaacacctgt

SEQ ID NO: 430059 - DNA, 566 bp, Homo sapiens
tgacatgctcaatgcggaagaagtcgaaaggctctcagggagcaaggagctgggagggagtgtcaggcagaatcagaaggacctgtgctggttggaagaaagacatctgaggagcagtgaccaggccaagacttgaccagggaccactagaccaggagcctccgggacacatggctttcaatgtagggaagagctgtattgtgggggaccttgtcctcctgtgctgaatctcctccaaacctgttgacatgtgaggaccctgttccttgaggtttgctggaattttcaatagtacagggggtgtcctccaaagaacttgtgggtttatcctcaaggtatccatgtcctttatccctttttaggagtgcaaaagtggctcctcactgaaaggccggcagtccccaggtatgtaggtttgggtgggggcacrtgtgtgcacagtgacatctgtgttagcgaatgggcatatgtgtggactcggctgtgcctggatgggaatttgtgggtgggggcctgtgcaggaatggagttgctgctgaggctgagtggggcttgggaacacctgt

SEQ ID NO: 430060 - DNA, 602 bp, Homo sapiens
ttttgatgggattatttgttttctttcttgctgatttgtttgcattccttgtagattctgggtattagtcctttgtcagctgcataatctatgaatattttctcccactttgtgggttgtctgtttactctgctgattatttcttttgttgtgcagaagctttttggcttaattatatcccttctatttattattgtttttgttgcatttgattttagcttcttagtcatgaattctttgcttaagccgatgtctgattttatcttttagagtttttctgattttatcttatagagtttttatgttttcaggtcttctatttaagtctttgatccgtcttgagttgatttttgtataaggtgagagatgaggatccaattttattcttctacatgtggcttgccagttatcttagcaccatttcttcaataggatgtcctttccctactttgtgrttttgtatgctttgtcaaagatcagttggtagtaagtatttggctttatttctgggttctctattctgcgccattggtctacatgcctatttttatactgataccatgcttttttggtaactatagttatagtattgtagtgtaatt

SEQ ID NO: 430061 - DNA, 534 bp, Homo sapiens
cacaaaaccagcaagtttttattagtgattttcaaaggggagggagtgtacgaatagggtgtgggtcacagagatcacatgcttcacaaggcaataaaatatcacaaggcaaatgggggcagagtgagatcacaggacaggggtgaaattaaaattgctattgaagtttcatgtcccactgggcatgcactgtcattgataacatcttatcaggagacagggtttgagagcagatgaccggtctgactaaaatttactcgtcaggaatttcctcatcctaataggcctgggagcgctacaagagaccagtgcttatttcattccttatctgcaatagtataagacagacattcctagagcagccattttagagatctccccctaggaacacattctctttctcagggctgttccttgctgagaaaaagaattcagcgatatttctcctatttgcttttctaagaagagaaatatggctctgttycgcttggctcccaggcagtcagacctaatggttatctctcttgttccctg

SEQ ID NO: 430062 - DNA, 609 bp, Homo sapiens
accagatcattagtcattggagaaatacaaatcaaatccaaaatgagatactacttcattcccactaggatcattatagtaaaayacattgggtaacaacaaggttataaaataaaaccatcacttattgctggagggaatgtaaaatgattcagccacattggaaaacagtttgaatgtttctcaaaatgatagtaatagagctaccatatgacccagaatttccactcctaggtaaagcatctaaaaaaattgtaaacgtgttcacacaaaacatggcattatttgtaatagccaagaacagaaaaataactgaaattgttcatcaactaatatacagataaagaaaacatggtataaccatacaactgaatatttgatttttcttattttcttccatcaatttacttcgtgttttatttgttgttctttttctagtttagctaggatcaaggttagattactgatttgagatctttccttttaatatatgcatttttggctataaattttcctctaggtaatgctttcaacacatctcataagttttggtatgttgtgcttttaggatttttcactttaaagtattttctgattccattgtgattt

SEQ ID NO: 430063 - DNA, 609 bp, Homo sapiens
accagatcattagtcattggagaaatacaaatcaaatccaaaatgagatactacttcattcccactaggatcattatagtaaaacacattgggtaacaacaaggttataaaataaaaccatcacttattgctggagggaatgtaaaatgattcagccacattggaaaacagtttgaatgtttctcaaaatgatagtaatagagctaccatatgacccagaatttccactcctaggtaaagcatctaaaaaaattgtaaacgtgttcacacaaaacatggcattatttgtaatagccaagaacagaaaaataactgaaattgttcatcaactaatatacagataaagaaaacatggtataaccatacaactgaatatttgatttttcttattttcttccatcaatttacttcgtgttttatttgtkgttctttttctagtttagctaggatcaaggttagattactgatttgagatctttccttttaatatatgcatttttggctataaattttcctctaggtaatgctttcaacacatctcataagttttggtatgttgtgcttttaggatttttcactttaaagtattttctgattccattgtgattt

SEQ ID NO: 430064 - DNA, 477 bp, Homo sapiens
gaaaaacaaaatctgctcacagtctattctggaggtcacataaccaaatgaagctcatacccaatgcagctctgagaaggtagaagcaccaggctgaaatgaggaaatcaaaaatttctcactgggaaagaaccatacccccaccatcccagaatgataacttcacagtggcagaacaaattccaccacgagttgaagttaaaggtcatagtctccagacaaatgttagtagatcaatgtctttctggtgagactaatattaaaaagagattttctgttgaccctccatgattcagacccaggtctctttggcagcgctaaggattgagttctttgaacttrattttattgagataactgttttaggagcttcgaattaggttgttttctaaagtcagggggtctatggtcagtgctgacatggtctgtgtgacctattaaatctctagaatattttaaatagtaagacacaatacc

SEQ ID NO: 430065 - DNA, 576 bp, Homo sapiens
ataactgttttaggagcttcgaattaggttgttttctaaagtcagggggtctatggtcagtgctgacatggtctgtgtgacctattaaatctctagaatattttaaatagtaagacacaatacctattggttaaacttgggataatttgagcataaaaagaatttgattttacttaatatagttaaaaaataactaaaattaaaaaaaattaaatattggtagtaaccagctataatacattaaaatttaaaataatttatgaaataattattctcaaaacaaaggagcaggggaaatctccttttcacagaaracaacagatgaccaatatagaatgaatgctgatgttggaaaatcatcactctgcaatcccatagtaataattgatccaggattaccaatggatgttaaaaccagagggtaagaggttactgggcaacaggagatcctcatggtctcaatgcatcattaccctggttctaattaattaaaagggaaatgtacctttacaatggagagctctggcaggatcactcttaatcaattgatcaaatgtagcatcactaggtagttgg

SEQ ID NO: 430066 - DNA, 567 bp, Homo sapiens
taacaggtgcatagggagggtcagagaatggcacaggaggaccctccccagctggcccagggactccaggcctcaggatttggggtgtgggagtggtcagggaggggtgagttgtttaattttcatgtcttattattagagaagaccttgaagggaatcaacttcttgtacttttctcatgcttgggccctccacagcatccctgctgagacatcagccagcctatgctggaatgcctctggggccagggagctcagcacctcacctggcctgaaatcaccgaaagttagagctggaagggactcttgagaccctcaggccctgctcatgctcatgtttcctgtcacccttcttgcactctgaaagtgacctccctgtcactcttacccttaaggagagtcttccccctgtacttattagccaaactgcctccttcaggtgtcaccttcaatagctaaaccgtggggcaaggcagtgtgggagctyctccactctcctcactatcatttgcaaattccttcactgagtatgtgttcttatttagtatgaattcatattcagtgccta

SEQ ID NO: 430067 - DNA, 554 bp, Homo sapiens
tttaaacgtgggtaaaggatatgtgctcacctttttaacattgagccccatcagagccttcttgttgcacactgaactcaagtgcagccacagttctaactaatggccaataggtgtcactaggtcccctggctgtgccaggctggaaccagagtagccaggagagctgactgccctgtctctttggggccctgacagggaacggggcaaaaggaggcagcagctggaggccagtggcttgccagcagcagagctggcattcggcacacagctgcagttctcagggcatgggcagctccagatggcatcaccacagggaaaatgtcccgatggaggcggttcacagaaggctgggccgggccaacctgcattaggagggcagagactgtgagaaagcaaaggaagccagtcatgagaaaacagaaactgaagcagagagcagtacttgcatcaagcgagagtgtctgagcccaccttccctagatccaycacgtgccaactttgtgactgcagcaagctgcttagcccaggtgaactgagcacctgggagtggg

SEQ ID NO: 430068 - DNA, 565 bp, Homo sapiens
attactatccaaaatatataaggagttcaaacaacccaacaataagaaaacaaagaatctgattaaaaagtaggcaaaggatccgaatagacatttctcagaagacatatgaatggccaacgagtatatgaaaaaatgctcaaagtcactaatcatcagggaaatgcaaatcaacaccagtgagctatcacccgacacctcttagaatggctattatcaaaaagatgaaagacagcaagtgttggtgaggatgtggaagaacagaacccaagtacactcttggtggggatggaaattagtacagtcattagggaaaatagcatggagggtcctcaaaaaattaaaaacagaactaccgtatgatccagcaatcctgcttctgggtatatawccaaaggaagtgaaatcagtatgttgaagagatagctgcacttccgtgtttattacagcactattcccaatagctgagatacggaatcaacctaagtgtgcatcaaataatggacggataaagaaaatgtagtatctatacactgtggaatacaatttagccattagaaagaag

SEQ ID NO: 430069 - DNA, 565 bp, Homo sapiens
attactatccaaaatatataaggagttcaaacaacccaacaataagaaaacaaagaatctgattaaaaagtaggcaaaggatccgaatagacatttctcagaagacatatgaatggccaacgagtatatgaaaaaatgctcaaagtcactaatcatcagggaaatgcaaatcaacaccagtgagctatcacccgacacctcttagaatggctattatcaaaaagatgaaagacagcaagtgttggtgaggatgtggaagaacagaacccaagtacactcttggtggggatggaaattagtacagtcattagggaaaatagcatggagggtcctcaaaaaattaaaaacagaactaccgtatgatccagcaatcctgcttctgggtatataaccaaaggaagtgaaatyagtatgttgaagagatagctgcacttccgtgtttattacagcactattcccaatagctgagatacggaatcaacctaagtgtgcatcaaataatggacggataaagaaaatgtagtatctatacactgtggaatacaatttagccattagaaagaag

SEQ ID NO: 430070 - DNA, 565 bp, Homo sapiens
attactatccaaaatatataaggagttcaaacaacccaacaataagaaaacaaagaatctgattaaaaagtaggcaaaggatccgaatagacatttctcagaagacatatgaatggccaacgagtatatgaaaaaatgctcaaagtcactaatcatcagggaaatgcaaatcaacaccagtgagctatcacccgacacctcttagaatggctattatcaaaaagatgaaagacagcaagtgttggtgaggatgtggaagaacagaacccaagtacactcttggtggggatggaaattagtacagtcattagggaaaatagcatggagggtcctcaaaaaattaaaaacagaactaccgtatgatccagcaatcctgcttctgggtatataaccaaaggaagtgaaatcagtatgttgaagagatagctgcacttcsgtgtttattacagcactattcccaatagctgagatacggaatcaacctaagtgtgcatcaaataatggacggataaagaaaatgtagtatctatacactgtggaatacaatttagccattagaaagaag

SEQ ID NO: 430071 - DNA, 565 bp, Homo sapiens
attactatccaaaatatataaggagttcaaacaacccaacaataagaaaacaaagaatctgattaaaaagtaggcaaaggatccgaatagacatttctcagaagacatatgaatggccaacgagtatatgaaaaaatgctcaaagtcactaatcatcagggaaatgcaaatcaacaccagtgagctatcacccgacacctcttagaatggctattatcaaaaagatgaaagacagcaagtgttggtgaggatgtggaagaacagaacccaagtacactcttggtggggatggaaattagtacagtcattagggaaaatagcatggagggtcctcaaaaaattaaaaacagaactaccgtatgatccagcaatcctgcttctgggtatataaccaaaggaagtgaaatcagtatgttgaagagatagctgcacttccgtgtttattacagcactattcccaatagctgagatacggaatcaacctaagtgtgcatcaaataatgracggataaagaaaatgtagtatctatacactgtggaatacaatttagccattagaaagaag

SEQ ID NO: 430072 - DNA, 482 bp, Homo sapiens
ataggtttaattgacttacagctccacattgctgaagaggcctcagtaaacttataatcacagcagaaatcaaaggagaagcaggcaccttctttacagggtggtaggatggagtgagtgcaagcaggggaaatgccagatgcttataaaaccatcagatctcatgagactcattactattacaagaaaaacatggaggaaactgcctctatgattcaattacctccacctggtccyacccttgacacacagggattacggggattacaattcaagatagattttgagtagggacacagagcaaaactatatcagtgagactttcctacctcactacctcagtgtgcacaggaggaccagagatggagggaaaaagaactgaaaaagtgataacaaaaagtatgtatttcggtaatttttcttaagcctgagtaaaccagttgaaactactccaaccttttccatgaagtaaagcacacatt

SEQ ID NO: 430073 - DNA, 551 bp, Homo sapiens
ctctgtcttcttttcagaggctaagcacagaggaagcggggtggcctatggctgctcggctaagacccggttaagatcccagtgcttccgtgagaccttgggcaagcctgaaccargtctgggtcccctcttcggcaaaactgcatttacactcccatcccgcattagtttgttgggagggtttaaagaagagcgtgtatttatcaagcactcgacacaatgtcagatgcggagtcagcgctccataaatgttggctgtcatttttgttctaacgtaagagaaagctggatgatcccatctgggtttcagccccgttttccctcttcactcctccggtgggtcagtgggagctctgccgaccgcctggctgcggccactcactgctgggactgcgcagcctgcccgctcccagcagctggcggagccgcaggacccccgcgccgcccgggccgccgccgttagggttggctcaagcctctcggcccagtccgccagttttacagcccgaactcaaagagggcttttaacttttcattcagcagcagcgtag

SEQ ID NO: 430074 - DNA, 494 bp, Homo sapiens
agacagctgaagacagaaaaaaaaaatgctgcttgttttgtggttactaaattacctaggtatattctaataaatgtcctttaagccagaggtctctcacccttgatttcagtaattgacatttgaattctttgtgcaggactggtctatctcccaatctatccccacagcccacacttggagcacaaggaaagtttggaccaccagccccacaatgctgcagtacgggcagaactacaaaactacagttttgtcgtaagccttccttggggttcccagattgcatttaaagctggtggcctgggaaaaataacctcatattgtgatgtctgtctgtaactccttaaagccctaagtcaccacagaaaataccactgctctgaactacwggttactataagttgctcatgccaccagaaagttttgtggcaagtcctaaaaatgcaaattatcctttggaatctttagattgacaagatctaatcaaatttgtt

SEQ ID NO: 430075 - DNA, 578 bp, Homo sapiens
aatttcaagtaactgggtattccaactgaaggttggcagcatcagaaggtgtaggatgtgttatgtttaatataggcaggaacgaaggcctttactgagcatgcactgtaatgctagggtctgacgatatagaaatatattgaaaacagttcttgccattgaggagctcttaatctagagggatagataggtgtaaactgtcattarggtgatgacttcacaaggtagagaagaaaggttataaaggagagtgtgtaactctgacataaggaagagaaaaagatactttgcaaaggaggtgaaacttgaattatgtcctgagaaagaaggaggagtttgctaagtggatgatgggagaagctaggagtgctacaggcaccagcgttcccttgttaaacaatctaaatgtgacaggcaccaggcaaatacatttttgcttcccctttccaaatggattttggctgtgggagggaatgacttaatgtcttcttttccaatatactagcagatggttaaatatttacagttagacttggattctaattcagctatataattagctgtatgaccttagtaag

SEQ ID NO: 430076 - DNA, 627 bp, Homo sapiens
aaactactgagacttcttgggtattattgagacctcttaagcatgttgtgattacaaaatgaactggtgacttattttctttagctactcctgtagtttcccaatttgttaaaagctggccttgtaccctgcctcatatactctgctttcctatcacataaatgtgaacytctgaatattttgtgcaaaagtaggatagaaatgaggtagaagaaactcatttttgtgatataaataaggctttcaaatgaatcagaggtgcaattaaaaaataaaagttgggctctttttaaaacttgtttttatgtggtaaaaatatacaaagaaaagtaagcctcacttcctccctcctttaaactggggattattacaatgggaatataacagtaccaggagtttttcatctgaaataatcaaactgcttattccttactaaatctgcaataagaatacaaatttgaccaagaatgctaggataagaacatattttttggaggaagacgtttatattacagtactttatagttttttagatcatggtttctcagccttggcactttgagattttgggctggagaatttcttgttgtgggaggctgttctgtgcattgtagggtgttttgcagc

SEQ ID NO: 430077 - DNA, 561 bp, Homo sapiens
ataatatatatttttaactttcataaaaatgtgttgtctattggcagcagatggctaacgttgctttttcgcttctagtgtccacttttccaggaaatgactcccatctgcagcaagagaagtgctgactgttaatgtgtacactaggcacttctcttagctcagtgccattctgacaatttcacagtacatatattgtgaatttggttggaagtgtatgttagtcagattgttttctttctggagtttcaggcttttggaaataaaaagtttgtgtgtttctaaaactgaaattgaattcttctaggttggctagtgaaaaaggagaggagaattcttggttaagtgtggttcctggacaaacagcatcagcatcattcgggaacttgttaaaaatgcaaattctcaggcccaaccttgctsgttagaaaattctgagtgcaggggccagaaatctgtgctttatcatgctgtccaggtaattctgatgcctgctaaaatttgggtaccaatgggttaaggtttagttttatcgcttgtaaaggacagcgtggtattgta

SEQ ID NO: 430078 - DNA, 479 bp, Homo sapiens
atgattataaaaaatgctttattggtgaatctgatcatctgatttgctcttttagttgagaacatcctgcccgaaggaccaaggctgaggcccagcttagctcttcagctcaaccctcccttttgtrttcttttccaacccctcctttccaagcactctgcccaatcagctctggctctctagaaggatccttcatatcttctttgatttgcacattcttccagaaggttctttcaccctcttaatgagagagcgcctttaggagttcaccagtagtaaggttattttttcaacaatgaaaagtgaaagctggggggaaagattgtatttagaatttacaaaaagttttttcttggtagaaatggagtctctatttacatttaaagctaagactttttaaaaaaccttttaaatggctctccacactaatttacatttaaagctaagattttttaaaaaacgttttaaatgctgttcac

SEQ ID NO: 430079 - DNA, 412 bp, Homo sapiens
ggaaaatgtgacataataaactatagttagttatctaagaatctgatacttttacatagctgtgcacattatagaactagaatatataatgcttttggtatgtatctaaaagttttacttcttggccatattgtcaggtcacttgtgtaccaagagtgcatgattgccaccctactttaccaatgtcacagtcacaaaaattataattgaaacaagaataatctgctttygctcaaagaaaatctgctgttcctcagtggagcaggctctttgcattctttgtttttcccacagatgccagcatttctgattttgtcattgcatttgctcctcaagaaacagcagctaacaccacactatctttgttgttttctgcattatcttaatgtgtcctgctagtgagaagctggga

SEQ ID NO: 430080 - DNA, 603 bp, Homo sapiens
tatatacacttgggtacatatatatggtttgttgtatatatgggatatacatgtatatatgatagatacattatatatagtatatatggatagagtatatattacacattatatattaaccatctataatgtktgtgtgtgtatatatacatatttataggcatttttatcttcaacattacccagggtagtagtatttcatatatatacatatacagacacacagataaactatatttgcacatgcaaacacacacacacacacacacacacacacactgatgcatatatacagtttagaatgtttctcacagagagtaaattctcagtaggtgtttgatagctaggaaatatcaagggttcaatatgtagctaaggatataactctattagcaaaacaactagacattgccatagccagccaagcaacacaattagcttatcaaatactatagattttgccataattggtccacatgccaatgtctgccaatggagttcattcattagccatgagcaatccaaaccaagagaatgaagactaatggaacaaacaaatcatttgtattttctataagctttttaaaacagtggtaatggcaa

SEQ ID NO: 430081 - DNA, 562 bp, Homo sapiens
cattgtggtttcctaaatgaccttcccagaaaactccacgtctttccaccctacttcctcagcacagctgtctctaagaccatgggatatggtaaagctgcctatataatagtttagacaacatgtagaatgctttcttgctccagacttcacccaagctgagggacttctgtgctgcttggtaaattagttggcgaagtaacccaagtgtgatatatgctgcctccatgacttgaagaggcataccgtgtattgtcttttcctcttggtggtgacagatgtatagtcacrtaggaaatataccacatctggtcagctacaaatagacaaattgtttgagtctactatcatcttccaagattggatttttttaaaggaccagaccagttaattaaatgtggatatgatgaagataacttctgaatcttttagctcactaacattggtaatggtctctgccagttctctcattatgttatatggctttttatttactatcttgacttggttgggcaaaggggtcagtttcagaggcttcagcctggccttccccagtagggtg

SEQ ID NO: 430082 - DNA, 496 bp, Homo sapiens
attgtgtcctgggtctaatctttagcttttcctgccctttggctaaaagatgagagcctcattatataatgccaagatatcctctggctttcactctgctttaaattggttaatctccctcatcctaacttcaatgcattgatagccctcagtaacaatcatctgatcttataattctgcatccctggaacctctcaaatgcccaggatatttcacatgcccatgcatgtcttacactaatatcccactgcagttaaccactggraaaagtgtgtctaatacaccacaaccttccgggggttactacttgtttatctagtgggaatagtatggtccttgctagcaggctggcagatgatccagctccaaaatctttttgatagcttattccctatgactagtcctgacactaagtatgttctgtggatttcctaggaaacaaatgctgagatggagatttgcattcagacagtttattggggcatgctttcagaaa

SEQ ID NO: 430083 - DNA, 568 bp, Homo sapiens
aaatgtatgctgcatagacgatccagagtattaatcataaaaatctctcttcctcttctatcaccttttacccttcctttgcaaacctatgtaagcttcatatgtctatgctgtgagtttgaactttgaaatttggaatgagtacttcataatgaaaaggaaagaagagccaagttttcaacttaacattgagtacgwgcttacttgcaatgtaaaataactgataacagaagatggaggagtggagagaaaaataaaaggatccaacttcgatttaatgcagatattttcactcatgtaaagatgtgcttaactcacatatgaccattctttgatttaaaaacaaacaaaataaaacaaaaacgttcaaactttcagtggaagctctcaaacaaatgggttttccttattcactacaagcagagttggccctcttatacaatgtaaagtgaaaggccattctcttcccacccatacttgaagaatggatctaggcaacacagcatagcatctactatggcataaaagcaacaagcaagatcctgcaataaagacagcaaatgaattc

SEQ ID NO: 430084 - DNA, 554 bp, Homo sapiens
taggctgtttataagaactagatctcttgggaactaatagagaactgactcactcccagaggaatcatgagggcattaatctactcatgaagttctcaccccatgactcaaacacctcttgctagtctctactttccaacaccaccacaatgcagatgacatttcaacatgagatttggtggggacaagccacagcagagggcatggaagctctgtacaatctccactcccatacctatggagctcttccatttggctgttcctgagttgtattctttataataaaccagtaataagtaaagcattttcctcagttctgtgagtcaacatagtaaattattaaattattaaacatgagcaggggttgtgtgaacttcctgaatrtaaagcccgttagtcagaaatactggtgataaccctgaatttatgactggtatttgaagtaagggcagtcttgtgggactgagcccttaatttttgggatctgatactgactccaggtagacagtgccagaattgaactgaattatgacacacctagctgatgtcagaga

SEQ ID NO: 430085 - DNA, 554 bp, Homo sapiens
taggctgtttataagaactagatctcttgggaactaatagagaactgactcactcccagaggaatcatgagggcattaatctactcatgaagttctcaccccatgactcaaacacctcttgctagtctctactttccaacaccaccacaatgcagatgacatttcaacatgagatttggtggggacaagccacagcagagggcatggaagctctgtacaatctccactcccatacctatggagctcttccatttggctgttcctgagttgtattctttataataaaccagtaataagtaaagcattttcctcagttctgtgagtcaacatagtaaattattaaattattaaacatgagcaggggttgtgtgaacttcctgaatgtaaagcccgttagtcagaaatactggtgataaccctgaatttatgactggtatttgaagtaagggcagtcttgtgggactgagcccttaatttttgggatctgatactgactccaggtagacagtgccrgaattgaactgaattatgacacacctagctgatgtcagaga

SEQ ID NO: 430086 - DNA, 599 bp, Homo sapiens
acaatttttagagaaggaagataaaggaaatctgatttaaagctatctcctcagtcagctcagcctaatgggtcctggcattctgggtggcactctcatgcatccasgaggggactggggttcaaggagcaatcagatttaagacaattggcattcagcctccgcgaggagcagggacagagggctctttgttgaatcaggcagccagagagtaccttgtgctgagcaagatctggattaagggcgtgcatgctcgcttgtcacaaatgttttattgtgtgtctgggcaagtcattctcacttgttaaggaacagccagggttttgttctgtatgggcctaaaataaaccagaaaaatcagagggccttagggtgggagggagcaggaggagtaagagttcaggtttatggtctatttctgtttggttagctctttggctttttgaataaaaaacttcccagggattttaaggtttaaagtcttcattatctctaattttaaagggtcatttatgctgataattcttaaatctcaactggaataagaaattcactcgttatctcaatataaatgtcatcttggtaaagtgcattacata

SEQ ID NO: 430087 - DNA, 650 bp, Homo sapiens
ttaagccccttgtccatttcataaggatttagcttagttaaaagaagataatgtcatttaaaatcccagttaattaggagcatgcaaattgcaacatatcacacaatttcagaagccaacaacagtgtgaagacaccattggctgtccctctgtgggggtgggcactccctcctgacacctcacctactctacaacacacggggtttccagcagatggatagaatggggaccccagagtcgatcagctcacatattatgtatacttcctttattacatctaattctttatttttagataaaaatgaatatcaacagaagttctgggtttgttttcctcacattcaacattagcaattaccrtcttgggccataaatgacctccaggtggccttaacatcaacacacccacagtctttagtccaatgccacatatctctctgcctagtccagtaaaatattcctgtttctcaacataatccagttactcttccaaaacaactcaacatttcaggtggtgttaaattacatattccagaactgcttgatacagattaaaagccacatgcagccaggaaaacacaagagatactatggcagatatgcatgaactttggtcaataagtctgaatttgatattttagtgccaaat

SEQ ID NO: 430088 - DNA, 546 bp, Homo sapiens
tctttaatcaaacttttaagataatgccactttttctctcgttgtacccatggctcactcgcatttaaagaatgagagggaactgtgagattttcgttctgatggccttgcgccttctaaactccatgaatggagaagcattttaacaataacttataagttattttgatgaaacttgaaagaaggctttttttttaggccccagaaagaagagagccctgtttttctgcttggactagtttttgttytatttttcagaccttaaaggaacacttaagtgtcagcattccagattataataataaaactgagagaataaagttattttttccaactggggcatggggtaccatttacttcatagcgatatatatcactgtgtaataggaatattctataagtaaaatgtctgttttgatattttctgtcaactagaaaaaatgaaataaaatgattgagagttttgatgtataaaattacaaaatgactttattgtttaattgcacatttcatataagcacctaggtacggtctttttatatatca

SEQ ID NO: 430089 - DNA, 546 bp, Homo sapiens
tctttaatcaaacttttaagataatgccactttttctctcgttgtacccatggctcactcgcatttaaagaatgagagggaactgtgagattttcgttctgatggccttgcgccttctaaactccatgaatggagaagcattttaacaataacttataagttattttgatgaaacttgaaagaaggctttttttttaggccccagaaagaagagagccctgtttttctgcttggactagtttttgttctatttttcagaccttaaaggaacacttaagtgtcagcattccagattataataataaaactgagagaataaagttattttttccaactgkggcatggggtaccatttacttcatagcgatatatatcactgtgtaataggaatattctataagtaaaatgtctgttttgatattttctgtcaactagaaaaaatgaaataaaatgattgagagttttgatgtataaaattacaaaatgactttattgtttaattgcacatttcatataagcacctaggtacggtctttttatatatca

SEQ ID NO: 430090 - DNA, 586 bp, Homo sapiens
ggcccattcatgaatattttctaaagaaaagcattgacagaataagccatgtcttattcyagtataaatattttgataggtttaatattcaaatatcatgaactatgactatattattgacaatatgactaaatatgactatattatttagaatctgtgttaagcatttattcaaaccttgggcatagtgaaaaatattcagaaagcatcctagagaagtagacagcattggttaaattcattcaacctgatcactaggctgaactcacatctgggagtgagtctcaagttggaaacaggtagcaagcatctgaagagaggtttggactttgaaacaggaggggatgagaattttagaagtatttagccacctctactttacaaatgcaacaccaactaaatcagaaacaactggattcagcaacaatttcaggcttcttagttatgtggctttcaagcctgggtatggaaggaacaaacaaggagaagaagtagggaattaccacagctgaagactgtagggctcagccctaggcacatcctaaaacacctctgtccatctgcagcacctcagaagtgggggacc

SEQ ID NO: 430091 - DNA, 590 bp, Homo sapiens
gactaaatatgactatattatttagaatctgtgttaagcatttattcaaaccttgggcatagtgaaaaatattcagaaagcatcctagagaagtagacagcattggttaaattcattcaacctgatcactaggctgaactcacatctgggagtgagtctcaagttggaaacaggtagcaagcatctgaagagaggtttggactttgaaacaggaggggatgagaattttagaagtatttagccacctctactttacaaatgcaacaccaactaaatcagaaacaactggattcagcaacaatttcaggcttcttagttatgtggctttcaagcctgggtatggaaggaacaaacaaggagaagaagtagggaattaccacagctgaagactgtagggctcagccctaggcacatcctaaaacacctctgtccatctgcagcacctcagaagtgggggayctgtttagaaatgtgtgcatctctcaactaaggagtgtgcagggaaatcagggaagtcaagcatacctactcaccaaatgggatcgtacaaggatattcgcggagtggtctacgtcaactttttgccacag

SEQ ID NO: 430092 - DNA, 519 bp, Homo sapiens
actcaatattaaccatcatggcaatgtagcaagattaagagccatgggaatctgttattttctcatgcaacttacttaaatgccttcagtgactgttcagacccagtcttaaatataccccttcagctttatgatagaactctattatgtacacacagctttctggcttgatggatcacacaatgctcagttcactgtggcatctaaggctacagggaaacaggaatccaagggcaaatgttcastctactagtctagatgttgcttctcaaaagtaggataattatctacagaagatggcatggcttggttctacaatattaagtccatatagtgcttcagctataggtgctttacaaaagttccatacacatacctatctgccacagacatttcaagaatcattgagccagctgggtcatacagcccaagtttaagagcagcttacatagcaactcggacctgtgacaaagccttctcttgcttgaagtcccacttgaaactcgcattctttcctag

SEQ ID NO: 430093 - DNA, 519 bp, Homo sapiens
actcaatattaaccatcatggcaatgtagcaagattaagagccatgggaatctgttattttctcatgcaacttacttaaatgccttcagtgactgttcagacccagtcttaaatataccccttcagctttatgatagaactctattatgtacacacagctttctggcttgatggatcacacaatgctcagttcactgtggcatctaaggctacagggaaacaggaatccaagggcaaatgttcactctactagtctagatgttgcttctcaaaagtaggataattatctacagaagatggcatggcttggttctacaatattaagtccatatagtgcttcagctataggtgctttacaaaagttccatacacatacctatctgccacagacatttcaagaatcattgagccagctgggtcatacagcccaagtttaagagcagcttacatagcaaytcggacctgtgacaaagccttctcttgcttgaagtcccacttgaaactcgcattctttcctag

SEQ ID NO: 430094 - DNA, 564 bp, Homo sapiens
ttattaaataacttataaatgagggtctattgaatagttattggcctgaatgwctaaatgactgaaagggtactcttagaacctggatatttaggaagggtcaaagaaaatatcataataaacaaatctgggaacatattatcccaagaaacggaataggcaagccacatgtctgcattaagacaaggtaagagcaaattactaataaaggaatcataaaactgaatgctatttgtagctgaatcctagtgaatcttcacagttaatcagtgagaagacagccatgccccctcacagctattcaatcaggaatcccaagttaaataactagaagtctgaaccagtgtggcagtatagcatagaatacaggtaatttttttcaaaggttgtgcagaaagtcaaaggtaaaacaagaaattcagtttagcactccttagctacaatctaattttatatccttcaacatacattaccaagttcatgttctcctgtgaggttttgagttatttctatcctacacttctgtttctagcatttcattttgctagaattctataaccagtg

SEQ ID NO: 430095 - DNA, 564 bp, Homo sapiens
ttattaaataacttataaatgagggtctattgaatagttattggcctgaatgtctaaatgactgaaagggtactcttagaacctggatatttaggaagggtcaaagaaaatatcataataaacaaatctgggaacatattatcccaagaaacggaataggcaagccacatgtctrcattaagacaaggtaagagcaaattactaataaaggaatcataaaactgaatgctatttgtagctgaatcctagtgaatcttcacagttaatcagtgagaagacagccatgccccctcacagctattcaatcaggaatcccaagttaaataactagaagtctgaaccagtgtggcagtatagcatagaatacaggtaatttttttcaaaggttgtgcagaaagtcaaaggtaaaacaagaaattcagtttagcactccttagctacaatctaattttatatccttcaacatacattaccaagttcatgttctcctgtgaggttttgagttatttctatcctacacttctgtttctagcatttcattttgctagaattctataaccagtg

SEQ ID NO: 430096 - DNA, 532 bp, Homo sapiens
gtttgcttttctaaaaaaaggaatttgacaaaacaccctgaaaatacccatgaaactgttataaccctggacctctggttgattaactccaaaagccctcaagaattaatgtaccattcgtgtggaacaattttacaaagatagatgggtcatgcacaaatgatcctttatattaagctgctttttgactgccttatatgtttataattctctatagtttacaaaaggcctacatatacattgtttaatctctccaaaattcccatcagagaggcaacgaattattggtatacgtttttcaaaagaagagagattaygggaggttaaaagtctttgtaaagtggctcaatatctatctaaatgaatccaacaagaacctttctcatggtatggaaactatttttaaaaaatataactttacagattacaaatcaaaaagcatacatatttattttgctaggatttttgctaaacactgtaaataagaagcagtttaattcacctcaaatcaattatttgagaatcagtttgc

SEQ ID NO: 430097 - DNA, 538 bp, Homo sapiens
atgtactaaatgacagttgctgtgttattcagagtgagcttctcacttctctgcccagaaagcagtctcagagcaattttagaaatggatgatgagtcagaggaattccgatggtaaaaatataatctttcttttttattttttgcattaaggaagaaagaacggagaccatgaggcttggtactctattaataaaaatttgggtgatcattcttttctgtcatgcagccaactggatagacataggaaattatggcaaaggattgtaggtaacacagaaatttagttcaggggataatatacaaattgtatcaagcccatgaatttacagtaaactcttattatttgcccaggcaagttgtaggtattgtgtgtatgtatgcggaggtgtctatatgcgtagagttggtagctgaatacagtaaatcagtgggcacrtggatgtctgcaatattctgtaaatgaactctgctcaaataacccaggtaagctgggctgctttataatccactcagcatgctatcgcattaacaaagcc

SEQ ID NO: 430098 - DNA, 544 bp, Homo sapiens
tacacagatgccattgtgttaaaattgcctacagtgtttagtagagtaacatgctctacaggtttgttgcttagtagcctctaccatatagcctaaatgtgtagtaggctacaccatctaggtttatgtaagtacactctatcatattggcacaacaatgaaattgccccacgatgcatttctyagaatgtcttcttgtcctaagtgatgtatgacttgtgtgcatttagctctgcctatcttgctctttaatgaggacctgcttactctggttgggtcaatttactatgtttaaattatgtcatcattttaggggaacaggcgtatcaatagtcaatgagttttatttagacacgattgtaggctctctaggttgaacaaaacaggcaaggctatattgtagacaatggaatttgtaggcagataatactagcattatatagcctattatataatactatttttgggaaacatgaattttcggctaaatagtcaagtttgttttggggcaaaacaagttattaaggaaaaaactagtaagaag

SEQ ID NO: 430099 - DNA, 544 bp, Homo sapiens
tacacagatgccattgtgttaaaattgcctacagtgtttagtagagtaacatgctctacaggtttgttgcttagtagcctctaccatatagcctaaatgtgtagtaggctacaccatctaggtttatgtaagtacactctatcatattggcacaacaatgaaattgccccacgatgcatttcttagaatgtcttcttgtcctaagtgatgtatgacttgtgtgcatttagctctgcctatcttgctctttaatgaggacctgcttactctggttgggtcaatttactatktttaaattatgtcatcattttaggggaacaggcgtatcaatagtcaatgagttttatttagacacgattgtaggctctctaggttgaacaaaacaggcaaggctatattgtagacaatggaatttgtaggcagataatactagcattatatagcctattatataatactatttttgggaaacatgaattttcggctaaatagtcaagtttgttttggggcaaaacaagttattaaggaaaaaactagtaagaag

SEQ ID NO: 430100 - DNA, 573 bp, Homo sapiens
tggctttttaaagcactataaaatattagtctcagtttaaaaagaaaagatgtgtgcttacttagcattatattggctcatggtagacacaggctaaaagcaaatagaaatctttagcttaaggtataatacttggaaatgtttgctttcttattaagttagggaagctgacaatgggaattgaatgaataaatgcatttttatccttttaacttgatttcatatttgtctgcawaatttataataataacaaaagaaaatgtctaaagaactgaagatcaagtcaaacaaatatatattaagatggatattctgcgtctatgtgaactatgtcaaaatatgaaaatatataacacatttgtatagagagattatggctgtgttgtcacaaacattagaaacacatctatgaatgtgaaagaagtttcattttgctatcatattttataaaacatagttactcttttcataaaataaaaatactgtaatttaaaatttagtttttaatatatgaaataattcaagtttgtaaaagtatttggcattttatgtaaggaacttataaaaataaca

SEQ ID NO: 430101 - DNA, 612 bp, Homo sapiens
attacaccctaaactgcatttttgaaagtattattatagaatgaaccaaaatattatctgggtctagaacataaatattagygtagctatctgggttagagaagttaatagaatgtaggctgaaggtagagcaccctcttccaggacagctcacattgctggttccatttccatttgcttccatgtctcaacatgtctaattgaggattctgatgaatttatgttggtcatttgatgtctcaaaagatattttttcaagatatgataatagattgtcttcttctacatgatcttgcagcaaatcttgaacaactctatggaattaacagaacatctatgttcactccaccatgcataacacactcaggttatcttttatgtcaaatatatataccttttatgtaatgttccacaatgtggacagaatgatgagaaggctaacaatcctattataaaagaacttcttgtctagtggaagaaacactaatataaacatttagtcacaatacgaggtgcttggtattttattaaatacaacaataacagccttgcctctgggggtggagaacacttcctagagtaggggacatttgagatgttcttagagaatta

SEQ ID NO: 430102 - DNA, 612 bp, Homo sapiens
attacaccctaaactgcatttttgaaagtattattatagaatgaaccaaaatattatctgggtctagaacataaatattagcgtagctatctgggttagagaagttaatagaatgtaggctgaaggtagagcaccctcttccaggacagctcacattgctggttccatttccatttgcttccatgtctcaacatgtctaattgaggattctgatgaatttatgttggtcatttgatgtctcaaaagatattttttcaagatatgataatagattgtcttcttctacatgatcttgcagcaaatcttgaamaactctatggaattaacagaacatctatgttcactccaccatgcataacacactcaggttatcttttatgtcaaatatatataccttttatgtaatgttccacaatgtggacagaatgatgagaaggctaacaatcctattataaaagaacttcttgtctagtggaagaaacactaatataaacatttagtcacaatacgaggtgcttggtattttattaaatacaacaataacagccttgcctctgggggtggagaacacttcctagagtaggggacatttgagatgttcttagagaatta

SEQ ID NO: 430103 - DNA, 579 bp, Homo sapiens
acaatagcttactgtattaagctctaagactcttctttggttcctacaatttgagttgagttcgctttcaactttaaccttactgaggacagttgtatcttttgaataaaagctttgctaatcatttcattatcagaagaattctgttttggcttacatgtttttgttgttgttcttattatcttaatatgctattaacgtgatgttgctagtcaatttggtacttagcaattttataatattaagtttcttgacctaaattatcaaaattgtacatttccaytgcaaagaaaataaaaatctaaccatacagaaaagtcaaatacccaatcagcaaattttgttcatattaaatttaatcacattttaacctctctcatgtagactgtggcaaaagccttctgcccaggctccctgtctcctctcatgcccttaactttctaatctgcacacagcagccagagtgatctcattcaaatataagtcagatcatgccattttcatgctcaaaacattcccatggctttctattgcatttaaatggaatctaaagctcttcctattactgacaaatccctg

SEQ ID NO: 430104 - DNA, 531 bp, Homo sapiens
tcagcaaaagggctttgaccatgggactgcctgtctttaaagatacatcttgatcttgacatgcatcaaaatgcatatttggactttagaagagtgatgcctaaggtgattctaaatgatggaatggaagagggacaaaatgaaagattctttcattcttaaatagatggagtaygcatttgaatgcctagagggaaaatctgattgacagagaagatatatattgggacaggggttaaaggtgaacagagaggcttcagaattgtcaatgtagtcattgtcactaaagcattcagccaaaagaggccacaaagagatgtggaaaaaggaaaggaacctcatgggtcaaggacagactcttgtgaaagaagtaggaagatatggtaagagaaagaaagatgaatagaaagaagcagcatctgtaatgaatgctactgctcaatgagaatgagtgggattttcagggcaattgggagaatggatggattgacattagatgaaaatcaatggcttttaattaataccacccca

SEQ ID NO: 430105 - DNA, 516 bp, Homo sapiens
gatggttccaaatttatgacactttatattttttacctgttcctttggccacaatggtgtcccttgttttttacctgcttcccccacacgtatctaatatagaatgttggacctgggaataaacaacactttcattcagaaaggggaggaatgggagacrgcacttagcagttctgaaatccctcagggtagacattgtgaaggcctcatcaggaggtggtgacaggccttgatcaggtctgattccgtattgtaacagctcctctccttcagttggtctccatgcccccaggtccaccttctgagaatgtcttcttgctgttatactcactggttacattggaagtggctgtttgaaaatatgtccttggaggctgaccagtgtttgcagcctggtttctcataattcatataggtctgttgtatgtagatataaagtaataagaggtaggagaataattgtggccacaataaaaatatcaaagacagttaaaataacagaaagcagtggtttcc

SEQ ID NO: 430106 - DNA, 613 bp, Homo sapiens
aacaaaaccagaacaaaccagtagtaagtaaataataaaatggcagacttaagtgcttacatatcaataattactaaatgtaaattatctaatagaccaatcaaaaaagatacattggcaaagtggatagaaaagcacagttcaactgtagtgattacaagaaacttattttaaatttagcaacatgggtagaaaggtaaaagtgggcaaaatcatgcaaatattaatatttaaatagcatgaaaggctatattaatatagcaaagaaactagagacaaagagygatattacataataataaagggattaacccactaggaagacatagcaagcctaaatgcatatgtaccaactaacagagtttcaacacatatgaaacaaaaattgatagaactgaaaggagaaataagcacaaacatactagatttccatagcctcccccagaaattgatagaacaactaagaagaaaattagcaaggacataggatatcctaaaaacactgtctatcaataggatctaagtgacacatacaggttgagtaccctttatccaaaatgcttgggacaagatctgtttcagattttgatatttctggatttttaaaatacct

SEQ ID NO: 430107 - DNA, 541 bp, Homo sapiens
tattagtatttttaaacctttaaagtttaagactaaatttcttctaagaacaaaagccacttttctcatgctgaaattttcaaagataatcatgtgcttaatttatgaactgttttcacttctaattaaaaatgcaggcagtttagagtgtcaaacatattttattaaatatttggaagctattttattgaaattagagcatcttaaactcaaatggcttcaaatactagctttctgaggaaaactacaagttagcattaaaatatttctaagaaagagaaatttctattttcatttggcctaatatcttaacagcaggcagttaaagatcattacaaatagattttttctctccagaagcagggtagtattggacatcccctggttactttttctttcctttcttttttttctgtgtgtcaggagctggggtcatcttttctgtctccagcttcatggctgcttcctgagcagccagagtttccagctttaggygctcagcttccagcaatttgtttctgtactcttcccggatgtcgaa

SEQ ID NO: 430108 - DNA, 619 bp, Homo sapiens
aagttgctacagttttcccttttgtcagagaagtgctgcaaagggatgggctgaagggaagaatgccaatgacttaggattcaaagaagctgaaggtaccctcacaagagtggttctcaaactttagcctgtgtcagaatcacctgaagggcttaccatagaacagatttctgggcaccaaccctaaagtttctgatttgctaggtctgtgatagggcctcaaaatgtacatttttcacaagtttccagatggtgctaaggcagctgatccaaggatcacactttgagaaccactggtttacttttagaagagtataattacctttccccaacatgaaggacatgagcyttatgcttttttaacctcttctaacaattaaatatggaagtggtgaggggaaaatatttaaataatttatttattatttaaaataatatttattgaatctttactgtgtttccttctcttttaagtctcaagcatcccagcagggtatattcagagaagttatataatttactcaagtctcccaactgataagagttgaatctgtattctcaaatacaagttcaaagaacctgttagtccctttcaaaactggagtctcatgtaaatcac

SEQ ID NO: 430109 - DNA, 616 bp, Homo sapiens
acagttatacttgataaatataaacagaaaagtctttttatatatataaataatatacatataacatgtatttaataatgtttggtttcctcaaagaccttgaattggctacaccatgcattgtgccaaataaagaacaacagtataatattaattagagttaaaggaatagtgttataatactgctaataaaattcaatgagacttgaaaccaaatatttttgagaatgacaaatttatatttgtttttacaaatagattacaacttcaaagatccaggccagcaacmcaaaactgtaacatattggcaaaaggaatttaaaatcacaacaccagtaattatacatgaaggcaggtgacatcactaagtactatctgctcaaggttctctagccttctattttcttaagtgaccatgaaccatctcagtaagcagtttttaccaaaacttaggttttaaaatatactaaaggtggcactgttgcctcatgttaaccagaggccaaggtttctaaacatttataatagaaatatcctaagttgtacatagccattatttcaagccttattctttcttatcatgggttataaagacatgaatttttgaaaaaaaccc

SEQ ID NO: 430110 - DNA, 607 bp, Homo sapiens
aattacatattgtatttttcatataaattaaatgttgagtwtaaataagtggggcaacattgacttcaggatgaatatcaaatttaacttaggtcaccagtgtactaataaaaaacaacaacagaaaacccttaaccaatttcttcttgatataaaattttatattttaaaagtaagctggctgagcatggtggctcatgcctgtaatcccagcaacttgggaaggccgagatgagtggattgcttgaggctaggaatttgagatcagcctcaccaaaatggttaaaccccatctctactgaaaatacaaaaattagccaggcatggtggcgcacgtctgtaatcccagctacttgggagggtgaggcacgagaatcccttcagcccaggaggaggaggttgcaaaaaaaccaaagtaagctaagtggataaattaaagacattagtaactgaatttttctatatatgtaatttttctatgtatggagtaactgatgtgtgaaatacatcatgcacttcaaatcagagcaggtagattttaagttgtatatataattgatacatagcagctgacatatagacatgctttaatcaaattgactaaata

SEQ ID NO: 430111 - DNA, 625 bp, Homo sapiens
gggagaaagcaattctagtcaatagcattgtactatgtgatgctatttttccctgaaaagcttaaaattttttcacaaatacctcttcatgattgcacatttttatgaatctcatttaaacattattcagaaacaggttttccttgtgagcaagatcttcaattgaattcagcaaggttgctctgtagttttccttttatgatttatgatgagattatttgttttctgtcatatggatctgggtttataatttataattgctataaacaacagtagcatgactattttgagcttaytgagacaggtataacacgctattataatacagaaatcagaattataaagagttacaggcaactcatgaaaaagcccacactgtccaaaacaaaaagcaaaacaaaacaaatcagaactggctgtcattctctgatccattgaaattcttaatcctcagaaatgtaatgtaaaatctaccagtcctataacttgaagaacaaagtggaaatgagaatagctttggtgaacacacaagctcatacaaaactgtgctgtttctttattctttgatttctataattgtgaatattttatttgcacttaaatctttagcataaaatatttaatt

SEQ ID NO: 430112 - DNA, 582 bp, Homo sapiens
gtaagcttcattttataagaaatttgtctattttatgtaggttcaacttactggaataagtttcctttttacctttttttcctcaatcagtcttgctctagggatatatcaactttaataatatttttagggaatcgacttttgactactgactatctgcctcttatttcaacatttcttcatgctcttaagtactttcctattgccacctttcttatttcaacatttcttcatgctcttaagtactttcctattgccacctttcattcaatgcagaacataacatgaatttggtcacctgcaattgataaataggaaaataatgtctctatataatgaggaaattatggtaggttttacatagtttttcctaggctagggatctggaacastgaatagactcagagtatcaagaaaaaacttcccagctttatgatgtcacaagaaagagctctgttcagctctattttaagacaattttaaataaatgtctgcatacagggatccccctgcagagaggaacaccctatctattatgaagcattgtcagcatagggctagttgtacttcctccagggccga

SEQ ID NO: 430113 - DNA, 573 bp, Homo sapiens
gtcttcaagacatttctcaaacacttgaaaacatttattatcattttaatgtttgcaccccgttgtgtctggagttggttccttccagtgggttcctggtctcgctgacttcaagaatgaagccacggaccttcgcagtgagtgttacagctcttaaagatggcatggacccaaggagtgagtggtagcaaggtttattgtgaagagcaaaagaacaaagcttccacaacatggaaggggacccaagcaggttgctgcttctggctgtggtggccagcttttattccattatttgtcccatcccatgttctgtttctgtcctatcagattgcccttttttcaatcctccccacgattggctacttttagactcctgatgaktggcgcattttacagagcgctgattggtgcattttacagagcactgattggtgcgttttacagagcactgattgttgtgttttacagagtgctgattggtgcattttacaatcctcttgtaagacagaaaagttctccaagtccccacttgacccaggaagtcaatctggcttcacctttcaatccccccac

SEQ ID NO: 430114 - DNA, 629 bp, Homo sapiens
tgtatcacccaatttatataacattgttgaaatgacaaaattttagaaatggagggcagattagtggttaccagggtttggaagaaggtgtgtagtttagtcataaaggtccacacaaggtaccctcgtcgtgttggaagtgcacagtatattgactgtggtggtggatacacaaacctacctagatgataaaattgtattgagctaaataaactcacacaaatgagttcaactaaaactatggaaatctgagtattatggaaggattgtatcaatgtcagtatcctggctgtgacattatactacagcagaatactgactggctctctccctgaggggcttgggctctattgagatttgccctgaccagctatgttttgcttgctttatcccttggtatgaattgaattatagcaagcacaargttgtcagcagtctccgctgctctcacaatgagaagttcaaggcacaaacaagagcttagcagggtgatgataaaccatgaggatgataaagaaacactttgaatggcgagattttccttaaaggctcaaaagaagcactgattgctccttgaattctcaacccacataccaagcatttgaaacacatcctcaattatttgaaat

SEQ ID NO: 430115 - DNA, 592 bp, Homo sapiens
ttagactgcactctatcaaagacttaattagactgcactctaccaaagagtgytgccactgggtaattcatgagtctatcttggtgttattttgcttccctttaacatccattaatttgccgatgagcgcctccctgtcttcggtctggcagtggacagaggcttgctgtcacattttcaggaacttcccacttcactactcggcctcatttacctgtgtccccagaaggcagatgtgtggaacgaattcagggtttccacattaaagcattcccgtgacccagtctcttcttcccttaaaaatgacaacaaagagcaacataagaaggaaacaagaattaataaatggtagctatatatgcgttagatggagaaaaaaatagattccatttgtcattttaaattatgatgcacaaaatgaaaaggcttactttaccttggagtccaaaacaagagaggcatctctatcaggcagcagcaggagtgtagaaacagagctagtgctagacccccaaatctatggtcccgtcaaatgaacatttattcagatttagtcaaatttacacatttattcaaattctcccactggcag

SEQ ID NO: 430116 - DNA, 592 bp, Homo sapiens
ttagactgcactctatcaaagacttaattagactgcactctaccaaagagtgctgccactgggtaattcatgagtctatcttggtgttattttgcttccctttaacatccattaatttgccgatgagcgcctccctgtcttcggtctggcagtggacagaggcttgctgtcacattttcaggaacttcccacttcactactcggcctcatttacctgtgtccccagaaggcagatgtgtggaacgaattcagggtttccacattaaagcattccygtgacccagtctcttcttcccttaaaaatgacaacaaagagcaacataagaaggaaacaagaattaataaatggtagctatatatgcgttagatggagaaaaaaatagattccatttgtcattttaaattatgatgcacaaaatgaaaaggcttactttaccttggagtccaaaacaagagaggcatctctatcaggcagcagcaggagtgtagaaacagagctagtgctagacccccaaatctatggtcccgtcaaatgaacatttattcagatttagtcaaatttacacatttattcaaattctcccactggcag

SEQ ID NO: 430117 - DNA, 534 bp, Homo sapiens
aactgaattaacatatccatcacctctcttggttacctttttataatttgtgatgagaatacttaagatctactttcttagaaaatttcaattatatattaactatagtcaccatggtacacattagacctctagaacttattcatcttataactgaaaaaaatgtgtaccctttaacagacatctcctcatttcctccagacccccagcattcctggcaaccacccttctgctttctgtttctgtaagtttgacttttttagattcaatgtatgaatgataccatacagtttttgtctttctgtttcttttacttagcatattttccaggttcatccatgtcatcaaatgtcagggttttcttcttttttaaggccgaataatagtctgttacatatatacaatgcattatatacatatatatggagagagagagcrtgcttgcacattttcttcattcattcattcatctcttttatgagggcactaatcccattcatgaggactgtaccttcatgacctaatttattcccc

SEQ ID NO: 430118 - DNA, 558 bp, Homo sapiens
ataggcctttataaagtacctattctttagcttcaaagagtatgtaatgtagttgaggagatgagaaatacacatgtgcatagataatagaaagcagtaaagagtgatgctaaataaatgatacatgaattaaaatgccatgygagagcataatcagatagcattcacctccccctgagataaggatgaaaggcttcttggacagtttcaattgtgttttaagggtagataggattggggcaattaaagtgagggaagaaaccctaccaatggtggaaaaggcatacaccggagaataaaagcagtagcaagatacaaagatgggtttggggtgcagtgagtacctgcactggctggaatggaggtgtttgggatatgtaggtcatagggctgccatacttagagacctctccgtgctgagactatctagcccacagcctctgctaaagaatccccagcccagcgtttttttggtgggggcagggagtggggtgtggacagggagataaaggatccaaaaggaacccaaactaattatgactaaggttatgctgtcca

SEQ ID NO: 430119 - DNA, 558 bp, Homo sapiens
ataggcctttataaagtacctattctttagcttcaaagagtatgtaatgtagttgaggagatgagaaatacacatgtgcatagataatagaaagcagtaaagagtgatgctaaataaatgatacatgaattaaaatgccatgcgagagcataatcagatagcattcacctccccctgagataaggatgaaaggcttcttggacagtttcaattgtgttttaagggtagataggattggggcaattaaagtgagggaagaaaccctaccaatggtggaaaaggcatacaccggagaataaaagcagtagcaagatacaaagatgggtttggggtgcagtgagtacctgcaytggctggaatggaggtgtttgggatatgtaggtcatagggctgccatacttagagacctctccgtgctgagactatctagcccacagcctctgctaaagaatccccagcccagcgtttttttggtgggggcagggagtggggtgtggacagggagataaaggatccaaaaggaacccaaactaattatgactaaggttatgctgtcca

SEQ ID NO: 430120 - DNA, 602 bp, Homo sapiens
gggtaaactatggttaggtaaactttgtgtggaaagtgggagccccatggaaagacagcagttccaggcaggtacagcaaccctgttctccttcttcatataaaatgcatttgactgtgccacacagcacatttgggttgagggagaatgttgcagggaatgcaattttttctttgtaagaaaaggtcaagagctagcatgcagagattacatcaacgataaatttttggattcacttgttatttgaaattctctaaaataaaacaaccacaaagaaacaccagcaatacctaaaatacatgcctcagcaagctgacaagcaccgccaccactgtggcaccaactcccttccaacccacaatgacaggccacaaacaggcacccagagtcccggcagctcagagatggagagatmatgtttccacaacaagtctggaaagaaggagaaaaactggagggtagacatcagtgatcagctgttttccaaaggtgactgagagtgacaagcgcttaaaagaacaccagtttttaatgctaatctgatttccagtctcacctaacacctcaggctatagtagaactatctttctttccaagtagcg

SEQ ID NO: 430121 - DNA, 507 bp, Homo sapiens
accttgggggcaaatgttctaagaaaagaaaatcatggtttttcattactaaatcagcactctgaaataaatgtctgttctataaccatatttattaagaaattaatattctgggcattgttttctccaagctactaatttcttcctcttaattctacaaaatatctaatatgtcacactatgggatgccccttggagaacaggacaacctcgcagagctgccagttattgcctttcctggcatttctacaacactctgcccttttggtgctttctgttttttcagagtctactttttttgagggcaatataactatacccaagatatatttaaataaccattaatgagtgcttatcatgatagaggaaaagtgaaaaagtctagcacaggaaaaaggaaggaagagkaagaggtaatcaacatgcaactagcacagactagcataacctgatatgatgctaggtattttacttataatttgaaataataatgcaataaaaatttac

SEQ ID NO: 430122 - DNA, 571 bp, Homo sapiens
aaaggggtggacaatccccagaattgagggttcctcctctttttagaccatatagggtaacttcctgatgttgccatggcatttgtaaactgtcaaggcgctggtgggagtgtcttttagcatgcaaatgcatcataattagcatataatgagcagtgcggacgaccagaggtcagtttcacttttgttgygattttggttttagtgggttttggccagtttctttaccaccactgttttatgaggaaggtctttgtgacctgtattttgtgctgacctcatatttcattctgtgacttagaatgcctaacttcctagaaatgcagccccgcaggtctcagccttattttacccagcccctattcaaaatggagttgctctggttcgaacacctctgacagaaccaagcaataatgtcaaaatgattgacaaaaaaatgggtagtggagttttcccggacctaggacattaagaagctagccagcaattctccccagcaatgaatacatttgaccaaaagaaattcacaaaggtcagggaaagaatgactaaaagttgtttgcctgggata

SEQ ID NO: 430123 - DNA, 707 bp, Homo sapiens
tagttttgatgtctattgataaaaagcttgcctgaaagttttgttgttgttgttgttgctttaatgggagattcttattattactcaaatcagtctccaaaaatatggaagcctagggtttttcaaggacagtttagcaggtaggaggccaaggactggggagtgctgattgtytgggctggagatgaaatcatagggagtcgaagctgtccacttgtgctgcgttggttcctgggtaggggccacaggactggttgacgggcctgggtggagctattcagtcatgagaaatacaaaaacctgaaaagactatgaaagtgatgttatttgcaggaataattggggacaaatatatttatatacccactagaggtatgtcaatgccagtttaacccagattcaccaacaatgaaaattattgaaataactgctaataatacataagaagagcatcttattttaatttgtattttttaattgttgtgttgagtatttgtacctatggttattgtttgtatttctttgtctaaatatagcttgcttgtgtcctttgtccattatttggccaaggttttaatatcttccttgttaatttataatcaaggatatcaacattttgttatattagtctcaagatatttcatagtttatttgccttggaatttttttggtgacactttaggacatgtagaaatttaatattttta

SEQ ID NO: 430124 - DNA, 707 bp, Homo sapiens
tagttttgatgtctattgataaaaagcttgcctgaaagttttgttgttgttgttgttgctttaatgggagattcttattattactcaaatcagtctccaaaaatatggaagcctagggtttttcaaggacagtttagcaggtaggaggccaaggactggggagtgctgattgtctgggctggagatgaaatcatagggagtcgaagctgtccacttgtgctgcgttggttcctgggtaggggccacaggactggttgacgggcctgggtggagctattcagtmatgagaaatacaaaaacctgaaaagactatgaaagtgatgttatttgcaggaataattggggacaaatatatttatatacccactagaggtatgtcaatgccagtttaacccagattcaccaacaatgaaaattattgaaataactgctaataatacataagaagagcatcttattttaatttgtattttttaattgttgtgttgagtatttgtacctatggttattgtttgtatttctttgtctaaatatagcttgcttgtgtcctttgtccattatttggccaaggttttaatatcttccttgttaatttataatcaaggatatcaacattttgttatattagtctcaagatatttcatagtttatttgccttggaatttttttggtgacactttaggacatgtagaaatttaatattttta

SEQ ID NO: 430125 - DNA, 679 bp, Homo sapiens
tgtgttaggagccctataatatctgctgtgtctctttgtgacattattatttgttagtataaaatgtctagctccattaattcattagggattggagaatgctgatattctaattctatcatttttgtttgttagctagaatattttgtttgttagtttgattgattgttagctagaatactttcataaagagagattcattgtcatctactttcggttatccattgatacaactcatataggaaaggggatacatgcttgattttcttccctttattgaccaattctctaaacaaaatttggttccttagcatcctccaatagtggcaatttgttttcttctttcttccccatagtatgttagtaaactcatggatttaagaatttttaatgtttcaatgtgttgccattattatcctcattgayactcaaattttcccttctttggccagtgggagcctcttcaggtatattcctgggtccttttgacactccaatagtctttgataacattattgctatctgtgttgacaagatgtttcaggaccaatttctaactttctggtcccagacctggaatcaaacatttatccaaagagccctggttcagtttagtgtaaaattatatttggagataaaaatatggtgttaggatactcattgctactgaagtcatcat

SEQ ID NO: 430126 - DNA, 565 bp, Homo sapiens
caaacattaacaatagagtcagactacttattattgagacccaatccaaatcccactgactttcctggtccttggtcatcattctttcttctgaattcccagcattcagcatttgccgcctcatcctattatttacccttctctatattcaactatggaaataaatttaattactttagtcatacctccaaggggtgaatccaagttttataggtcctgaygcttaaacattttggagtgtggcataaacactccacattttcataaagtctctctttatgacaaagaatataaaataggtaccaggctttgaaaggagatgtgcttgtgagagccctgaagctttagcttcgttagctttatgggaaatctgctctgctttcctgctgtgcactgaaaattaatttttttatagcagtaaagttgacttttattggttacagttctatgagtttttgcacatgcatacataggttcttgtaaccactatgactgacggtacagagcacgattcaacacaccaaagaaccccttgtatttccactctgtatccagattctcccaa

SEQ ID NO: 430127 - DNA, 565 bp, Homo sapiens
caaacattaacaatagagtcagactacttattattgagacccaatccaaatcccactgactttcctggtccttggtcatcattctttcttctgaattcccagcattcagcatttgccgcctcatcctattatttacccttctctatattcaactatggaaataaatttaattactttagtcatacctccaaggggtgaatccaagttttataggtcctgacgcttaaacattttggagtgtggcataaacactccacattttcataaagtctctctttatgacaaagaatataaaataggtaccaggctttgaaaggagatgtgcttgtgagagccctgaagctttagcttcgttagctttatgggaaatctgctctgctttcctgctgtgcactgaaaattaatttttttatagcagtaaagttgacttttattggttacagttctatgagttkttgcacatgcatacataggttcttgtaaccactatgactgacggtacagagcacgattcaacacaccaaagaaccccttgtatttccactctgtatccagattctcccaa

SEQ ID NO: 430128 - DNA, 537 bp, Homo sapiens
gaggccatgaggaaaaccccacctatctttcagtcttgtttttgagaagcacgaacacatacaatcacagtgagcgcacactctcagtagcagtggtgctgagtgtaaagaattgagagacatgtgataagctttagttgcagtaatgttcatcacaacaatcaacaatcaactggtctcctagagctcctgagaaaggacactagagaagcctcaatataacttcttaggtcatctggatccagagcagtggctttcgaatgttactgacagtggacacagtaagaaacacattttgcactgacgtccaatataaacacctaccccgccacactgtgaaacacaagtgtcacagaatatttaaacttattacatrccatttcttttcctattctattccattttatttaaaatgctgttcatgactcactaaagttgattttacaacccacaatctggaaaacacagtgacccaaaaaaaagcaggggtaaaacctctcaccattctatttcccaacgtcaccatcaccactacca

SEQ ID NO: 430129 - DNA, 559 bp, Homo sapiens
cagatccaagaatttgctccactggccttcccatgtgggatattagatgcaactggatttcaaatccgactgggcgcggtggctcatgcctgtaatcccagcactttgggaggctgaggtgggtggatcatttgagtcaggagttcaagaccagcctggccaacatggtgaaacactgtctctactaaaaatacaaaaattagcctggtgtggaggcatacacctgtagtcccagctactagggaggstgaggcaggagaattgcatgaacccaaaaggcagaggttgcactgagctgagatcatgccactgcactccagcctgggtgacagaacaagactccatctcaaaaaagaaaaaaaattaatggacaggccattaataaatacttaatgactaaatcatttgcttgatcatttcccaaatgaattatatctaaatagtttcctatttaatctctggttaaagaatcatcagtcccttccctttttcaatcataatccattccagtgatttgtaatcaaggaaaggagaggaaaaaaagacaaggaaaatgctt

SEQ ID NO: 430130 - DNA, 536 bp, Homo sapiens
tcttcatcccactgcagcccagctctgccctctttctactgacatggctcctgctaaggatgtgaacaccacctccttggccaaatccacatctatggtccatgaacccaactgacaactcttcttccttggcttctgagtctccccgtctcccgstgtccttcccaccgctggggctggtctttcccaggctgctcagagggccccttcatctgcctggcagcgatatcccgtccctcctgctctcctgcggtgtagacaccacctacccatcaagaggagaggccttactcctctcactgtgaatttgggttggctgttgggagttgcttgcaatgaatagactgtggccatacattctgaggtttggtaggcagaagcttcgcagcctctgcctcgctctctagatgtcccccaggaggctccctcccgggttccaggcaccaagccatgaggtgggcaggccataaagatgctccggttgatgctcccagctgacctcagctttggggtcatccccgctcagaagccagact

SEQ ID NO: 430131 - DNA, 536 bp, Homo sapiens
tcttcatcccactgcagcccagctctgccctctttctactgacatggctcctgctaaggatgtgaacaccacctccttggccaaatccacatctatggtccatgaacccaactgacaactcttcttccttggcttctgagtctccccgtctcccgctgtccttcccaccgctggggctggtctttcccaggctgctcagagggccccttcatctgcctggcagcgatatcccgtccctcctgctctcctgcggtgtagacaccacctacccatcaagaggagaggccttactcctctcactgtgaatttgggttggctgttgggagttgcttgcaatgaatagactgtggccatacattctgaggtttggtaggcagaagcttcgcagcctctgcctcgctctctagatgtcccccaggaggctccctcccgggttccaggcrccaagccatgaggtgggcaggccataaagatgctccggttgatgctcccagctgacctcagctttggggtcatccccgctcagaagccagact

SEQ ID NO: 430132 - DNA, 554 bp, Homo sapiens
catgaacctgcaggacacttggggtctgtttctgatgttcatctcagtggagctaccagagcatctgttgtcatataattaaacaaacaaacaaacaaacaaacaattatatatgttttgttcatagtttgtgggagcttctaaaccattggaatttcctgagtgttagaagtgccattggtagcccgggcgcagtggctcacacctgtaatccaagcactktgagaggccaaggcaggtggatcacttcaggcccggagtttgagaccagcctggccaacatggtgaaaccctgtctctactaaaaatacaaaatttgctgggcatggtggcagatgcctgtaatcccagctacttgggaggctgaggcaggagaatcacttgaacctgggaggtggaggttgcagtgagcgagactccatctcaaaaaaaaaaaagtgtctttggaacatagcggatccctgggatcacacctgagtatgtgccaatgagatgattcaggtgggctctaggatagttttaagatgggggccagccatgccagaaagaccagc

SEQ ID NO: 430133 - DNA, 506 bp, Homo sapiens
ctaagcacatggggcgggaggcggagggaatcctccagggagaccaaagtaagtacttcagtttccttgaaggcttgtgtgatgggaaggagtgctatggtaggcgtcaytacatattctgttcgttttaaattaaaaaaccatgggcacatattgccaaaaataaaaaagggaaggaaaaaggtatagttgggagatagatgaatacaagagaaattaaggacattaatggtttaagccttgaaaggctagaggtggaactataactggacaaggtggactagggttgtaaagtcctctaacccagcggacggggtgggggtgtgtgtgggttggggatgaaactgttccacttcagatcatcaggcattagattctcacagggagccggcaaacctcacatgtgcagttcacaatagggttcgcgtgcctatgagaatctgatgccactcgctaatctgacagcaggcagagctcaaggcgataatgctcactcgcccgccgct

SEQ ID NO: 430134 - DNA, 523 bp, Homo sapiens
ttaaagtctttcttaaaccacaaacaatagcatgagggatctgtgccttaaggacatgctcctgctgcagataactagccaaacccatccctttatttcagcccatcccttcatttcccataagggatacttttagttaatcaaatatctatagaaacaatgctaatgactggcttgctgttaataaatacgtgggtaaatctctgttcagggctctcagctctgaaggctgtgaracctctgatttcccactttacacctctatatttctgtgtgtgtctttaattcctctagcgctgctgggttagggtctcccctactgagctggtctcagcagtcaaagttcatacaaaaacttgcacagattgttcatagtggcattatttataataaccaaaaaatggaaaaaacccaaatgtccattaactgaagaatggataaaatgtggtacattgatatagtggaatatcattcgccaagaaaaggaatgtagtactgatgcatgaacctacaacacagataa

SEQ ID NO: 430135 - DNA, 523 bp, Homo sapiens
ttaaagtctttcttaaaccacaaacaatagcatgagggatctgtgccttaaggacatgctcctgctgcagataactagccaaacccatccctttatttcagcccatcccttcatttcccataagggatacttttagttaatcaaatatctatagaaacaatgctaatgactggcttgctgttaataaatacgtgggtaaatctctgttcagggctctcagctctgaaggctgtgaaacctctgatttcccactttacacctctatatttctgtgtgtgtctttaattcctctagcgctgctgggttagggtctcccctactgagctggtctcrgcagtcaaagttcatacaaaaacttgcacagattgttcatagtggcattatttataataaccaaaaaatggaaaaaacccaaatgtccattaactgaagaatggataaaatgtggtacattgatatagtggaatatcattcgccaagaaaaggaatgtagtactgatgcatgaacctacaacacagataa

SEQ ID NO: 430136 - DNA, 422 bp, Homo sapiens
cggctttctcttaaatttggtcaccttccatggacattgtgtatgtcatattggcattgatattaacttcttgattgtctataatacattttgataacttcaatatcctgacttatttaaatttgtgaggttgtttgggtttcrttttttatatttacagatgttaatttctagtttgacccatttttatcacaatatacaaactgttaacctttttaatataaaatttgtttaaaatgtttgcttgctagtttggccaacttttgcaaatatatgaaggaaaagaatagctatatggaaaggatttttaaaaaatttatatatggtcctttacaagtttatagacaaggttaaatatacaatgtgactgttcctgaaataagataatcattaaattaattgtaatagctaataagccaaca

SEQ ID NO: 430137 - DNA, 518 bp, Homo sapiens
agtggggtagaggtggaatgttctgttaatgacaccagggggctgaaatttccaagcctccagctgtacaggcattyttgattctggaaagtttctagatcttttctttagtagaactattactaagaagtttgcattaatataccatgcttacatgattttcttcctctttttttttttttttttttttgagatggagcttcgctcttgttccccaagctgaagtgcactggcatgatctcagctcaccgcaacctctgcctcctgggttcaagtgagtctcctgcctcagcctcccgagtagctgggattacaggcgcccgacaccacacctggctaatttttgtatttttagtagagacagggtttcaccatgttggccaggctggtctcgaactcctgacctcaagtgatctgcctgcctcggcctcccagagtgctgggattacaggcatcagccaccgcacctggcctttactctattttttatatagagacacaggaaatacaatttgcct

SEQ ID NO: 430138 - DNA, 467 bp, Homo sapiens
attaacctggttactaaggggctaatcatctaatctagttttcttaagaggtttgcttacattgtcttctcctctccttccgtctccatctcctttcatcccttctttgatgccttactccggcccccagtcatgtttactttcaaaatttactagtgacttctaagcttccagactaaatagccttttccaagtcttcactcagttgtgtctgaatggcttttaatagtcaaccacccatcagttctagtwctacccactttgggtttctgtgacacatgctttctcccctgcagctctactacccttctgatgaccacctcttctgtatttattggtttctgtctactaacagaatctatcttcggccttccatcctttgcactcactcctcatgtgagctcattcacccttatgattttttacctctgtagtactgactgcctaatttctaagctcaccccaac

SEQ ID NO: 430139 - DNA, 467 bp, Homo sapiens
attaacctggttactaaggggctaatcatctaatctagttttcttaagaggtttgcttacattgtcttctcctctccttccgtctccatctcctttcatcccttctttgatgccttactccggcccccagtcatgtttactttcaaaatttactagtgacttctaagcttccagactaaatagccttttccaagtcttcactcagttgtgtctgaatggcttttaatagtcaaccacccatcagttctagtaytacccactttgggtttctgtgacacatgctttctcccctgcagctctactacccttctgatgaccacctcttctgtatttattggtttctgtctactaacagaatctatcttcggccttccatcctttgcactcactcctcatgtgagctcattcacccttatgattttttacctctgtagtactgactgcctaatttctaagctcaccccaac

SEQ ID NO: 430140 - DNA, 582 bp, Homo sapiens
tcatctgccccttttctttcttcctcatctkcttatgccatacaggcaccaccactttcaaccattttagcagttgtttcaggcatttatctccttatttataaataatccatttattcatctatttattttgcttcttggttttaaatatgatcatttatttttctgtttaatttaataagcttagaacctgctctccccttgcacacccaagtacaaaatggttctatcacaatcataactgggaggcaaaaaaagtcaatgttttcactatatatatgtgtgtgtgggtgtgtatatatagtgaatataataaacataatatttcttgtagcttaatcttatggtgtgttatatttccatatagtgtgttatgacattttctttcttgttcaactttttgtttggtacaaattcataaacacctcattttaaatgcttacttttaaacccctaactaaatcagcctcacacttctcaaaataatattttacaatgtaagtaacacatcatttattagtaacttttttctttgtcggaaacatctctgaagactcctgcatcattgaatctggactaatt

SEQ ID NO: 430141 - DNA, 637 bp, Homo sapiens
tcacttcaggaagtctcaaggctcattttatgttatgatgtaaaaattctttagtggaggaagaagaaactgaattttcagaatggactctgtgaaaccctaggattctacctcattatctcaggggttattctttgtggagagcagcaggcaatgatgcctgagggaaattgagctggatcatcttttctgcgggctagaaaagaaggtatgaagartgccaggaggaagcgaggggccttctgaggtgagcacaggcctctagtctctctctccttttcccttttctgaggggatcaggggacctggacctggcaggggcccaagggaatctgccacgaggctgtgcatgaatttggaggtttggattgattctgcctggcacctggaaccttgtgagtactgagcatggaggactgcagaggggtgcacttgagaagatgcaagagggagaaaagggaacaactgcatctccactgcagcccatagtggagacacatgagcttgtgtcagtcccagaatgagctgtaaagtgagtagagagtggggactgtcttgtcccgttaccactgccagaggcctgtgctgtccgtggggcaagccgggatactctgactttgataggggaggaaacagg

SEQ ID NO: 430142 - DNA, 637 bp, Homo sapiens
tcacttcaggaagtctcaaggctcattttatgttatgatgtaaaaattctttagtggaggaagaagaaactgaattttcagaatggactctgtgaaaccctaggattctacctcattatctcaggggttattctttgtggagagcagcaggcaatgatgcctgagggaaattgagctggatcatcttttctgcgggctagaaaagaaggtatgaagagtgccaggaggaagcgaggggccttctgaggtgagcacaggcctctagtctctctctccttttcccttttctgaggggatcaggggacctggacctggcaggggcccaagggaatctgccacgaggctgtgcatgaatttggaggyttggattgattctgcctggcacctggaaccttgtgagtactgagcatggaggactgcagaggggtgcacttgagaagatgcaagagggagaaaagggaacaactgcatctccactgcagcccatagtggagacacatgagcttgtgtcagtcccagaatgagctgtaaagtgagtagagagtggggactgtcttgtcccgttaccactgccagaggcctgtgctgtccgtggggcaagccgggatactctgactttgataggggaggaaacagg

SEQ ID NO: 430143 - DNA, 637 bp, Homo sapiens
tcacttcaggaagtctcaaggctcattttatgttatgatgtaaaaattctttagtggaggaagaagaaactgaattttcagaatggactctgtgaaaccctaggattctacctcattatctcaggggttattctttgtggagagcagcaggcaatgatgcctgagggaaattgagctggatcatcttttctgcgggctagaaaagaaggtatgaagagtgccaggaggaagcgaggggccttctgaggtgagcacaggcctctagtctctctctccttttcccttttctgaggggatcaggggacctggacctggcaggggcccaagggaatctgccacgaggctgtgcatgaatttggaggtttggattgattctgcctggcacctggaaccttgtgagtactgagcatggaggactgcagaggggtgcacttgagaagatgcaagagggagaaaagggaacaactgcatctccactgcagcccatagtggaracacatgagcttgtgtcagtcccagaatgagctgtaaagtgagtagagagtggggactgtcttgtcccgttaccactgccagaggcctgtgctgtccgtggggcaagccgggatactctgactttgataggggaggaaacagg

SEQ ID NO: 430144 - DNA, 589 bp, Homo sapiens
atataggttacatgagatattttgatccaggcatccaatgcataataatcacatcagggtaaatagagtatcacctcaagcatttatcttttgtgtttcagacagtccaattatactcttagttacwtaaaaatgtacaattaaaatttttcttttttcttttttttaactatactcaccctgttgtgctagcaactactaggtcttatttattatttctaacttttttttttagccattaactatttccctatccccttgcccaccctgactacacttttcagcctgtggtgtccatccttctgctctttttagctaccacagagaagtgagaacatccagcagtggatttatgaattattagaaggtacctccatgggtacctgttctccaatccactgttgattccaggcaaaaatgctcttggaaaaagatcttgcatcaagtgtgaacttgaacatgttccttttgcaaggggtgcttttattatgtattttacttgacaatggaagtatttgctcctagcttaagggatctctctcttttggcaggttagaaaacaatttttttttttactttttgtttattt

SEQ ID NO: 430145 - DNA, 589 bp, Homo sapiens
atataggttacatgagatattttgatccaggcatccaatgcataataatcacatcagggtaaatagagtatcacctcaagcatttatcttttgtgtttcagacagtccaattatactcttagttacataaaaatgtacaattaaaatttttcttttttyttttttttaactatactcaccctgttgtgctagcaactactaggtcttatttattatttctaacttttttttttagccattaactatttccctatccccttgcccaccctgactacacttttcagcctgtggtgtccatccttctgctctttttagctaccacagagaagtgagaacatccagcagtggatttatgaattattagaaggtacctccatgggtacctgttctccaatccactgttgattccaggcaaaaatgctcttggaaaaagatcttgcatcaagtgtgaacttgaacatgttccttttgcaaggggtgcttttattatgtattttacttgacaatggaagtatttgctcctagcttaagggatctctctcttttggcaggttagaaaacaatttttttttttactttttgtttattt

SEQ ID NO: 430146 - DNA, 586 bp, Homo sapiens
atgagaattgtaaagcaccagaatgtcctgagacctctgaggtgacagaatcaaatcccttccccttgtaagagaagaaaagcttcctcctccttggagggagatcttataaaaatgtcatcagatatttgtccttcccaatattcaccctcttttcccctcaacataaacccctaatgctactacatactggcaggatttagaggaaaatgtgggagatakagctgagggatgttggacaaggaagatagaatataagtttggatagaagcaagtgtattaacataggagtacttttctatgattcaaggcttaatatcatacaaagcctttgtaactggtcataatacgctgctgggataggcttgacatggcaatgtcctagaataaaatatatggggatgctgaaactgtgttactgtattttgaggaaatggtcaaaaggcttatggaagtggaagtgttacaatatatttatgagagcctaagaacccccccacatgattctgttctccagaaggatccagaggacattaaagaatgcattatttattttcagatatgggaacagcagcataaaactata

SEQ ID NO: 430147 - DNA, 586 bp, Homo sapiens
atgagaattgtaaagcaccagaatgtcctgagacctctgaggtgacagaatcaaatcccttccccttgtaagagaagaaaagcttcctcctccttggagggagatcttataaaaatgtcatcagatatttgtccttcccaatattcaccctcttttcccctcaacataaacccctaatgctactacatactggcaggatttagaggaaaatgtgggagatagagctgagggatgttggacaaggaagatagaatataagtttggatagaagcaagtgtattaacataggagtacttttctatgattcaaggcttaatatcatacaaagcctttgtaactggtcataatacgctgctgggataggcttgacatggcaatgtcctagaataaaatatatggggatgctgaaactgtgttactgtattttgargaaatggtcaaaaggcttatggaagtggaagtgttacaatatatttatgagagcctaagaacccccccacatgattctgttctccagaaggatccagaggacattaaagaatgcattatttattttcagatatgggaacagcagcataaaactata

SEQ ID NO: 430148 - DNA, 474 bp, Homo sapiens
gccaaatctagcactggaaatgatgtacacattatgatatattgttcttaacattttctgaacattttctgtcaccaggtrctcttaaacacctatcataattcattttcataatgaaaagggaccaaattatgtcctatttttgttctaacatgatggcagttgtaggtcaggttccccaggaagcagactctaagagagagatgtgtgtgcagaaggttaaatggggattgctcttggagtcaacatctcttaggagtgaaggaagcaggacgggtctgtggagaagttgagttgaaatagagtcacagcaaagacctcagctgatcccacaggatgctctgggctttggaatccccacattgactagtttttggttgcaagctgatcccctaccagaggttctgaacttggtcagaggggcattcctccgcaaagagcaatcactgatgttctaccacctagattttgctt

SEQ ID NO: 430149 - DNA, 474 bp, Homo sapiens
gccaaatctagcactggaaatgatgtacacattatgatatattgttcttaacattttctgaacattttctgtcaccaggtactcttaaacacctatcataattcattttcataatgaaaagggaccaaattatgtcctatttttgttctaacatgatggcagttgtaggtcaggttccccaggaagcagactctaagagagagatgtgtgtgcagaaggttaaatggggattgctcttggagtcaacatctcttaggagtgaaggaagcaggacgggtctgtggagaagttgagttgaaatagagtcacagcaaagacctcagctgatcccacaggatgctctgggctttggaatccccacattgactagtttttggttgcaagctgatcccctaccagaggttctgaacttggtcagaggggcattcctycgcaaagagcaatcactgatgttctaccacctagattttgctt

SEQ ID NO: 430150 - DNA, 500 bp, Homo sapiens
catactacctaaagcaatctatagattcaatgcaattcctatcaaaataccaatgacattctttgcagaaatagaaaaaaaattctaaaatttatatggagccacaaaggatctagactagccaaatctgtacacactgaaaatttttwaaaaacttaggaatcagattaaactgacttcaaattacttcaaattgtaccacagagctatagtaacaaaaagagcatggtactggtatcaaagcagacacatagatcaatggaacagtatagagaacccagaaacaaattcatacatctatagtaaactcgttttcagcaaagatgccaaggccatgcattggggaaagatcaatctctttaataaatgattctgggaatactggatatctacatgcaaaagaataaaattggacctttatctctcaccatatacaaattcaaataaaaatagattaaatacttaaacctaagacctcatactatgaaactactacaaga

SEQ ID NO: 430151 - DNA, 508 bp, Homo sapiens
taccctctaaattaaatatcaaccctgcatgtattctttatgatgtccaaactaggttttacaaatacaagtcttaaaaaggccattcaacattaaggaatagtgatcactgacaaacattctattgattaacaattttaaaccctaaattccaatttgcttaaatataactcaaaaatgaatataagtgctaattatggcaaagctacttcaattgcagagtagtgcataatagaattgcaccaataagtacacayaagagaaaaaatggtttataccaaagctataaaattaaaatttaattaattgttttgtaccgttctaaaaactgctgatctaaagttaggcgttgaaatacattatattattattctttaaaaccaatcagagccaagtgaagtcaataaataaccaataatatcacagttttaataaaaatttctaacttttaaaaattttctattgtataatgagaatatatttaaatggattgtaaaataaaatttga

SEQ ID NO: 430152 - DNA, 507 bp, Homo sapiens
ctaagtatgtatcaagacaagaagaaaggagagaaccgggataaacagaaacaatttcagctttacttctgagacagctcrtaacataggccttctgtatggaatcacaacaggttcctgatactgaacttcaaaagtagacagactgatccacattgtcagtgtatttgtcagggttatctagagggacaggactattaggatagatgtatatttgaaagggagtttattaaggaatagtgactcacatgatcacaagatgaaatcccacagtaagccatctgcaagctgaggagcaaggaagccagtccaagtcccaaaacctcgaaagtcgggaagctgacaatgcagcctgcaatatgtgtccgacagcccgagagcccctggcaaactactggcgtaggtcccagagtccaaaagcttgaagattttggagtctgatgttcaagggcaggaagcatccagctcaggagaaagatggaggccaaaagacttagccactttagt

SEQ ID NO: 430153 - DNA, 573 bp, Homo sapiens
actgaacttgaagtttagaaataattgggtataacagtgtcataagacttaacacattcttttagtaagagttctaatgaaccagagagtattaagactgaaaagcaaatagcacaaagataggtcaggaaaacagtaaaatgtgatctgaactgcttgtgaggatctgtaatcataattaacagaaaagaaaacaattaaatgaaaatcttactcctctactttaggcagatttatcatcctgacataagtcaggtcaccaaaatgaaaaatacagatactcttctgcctaactccctgttaaaatgactttgttaaattacaatgtaaaaatatgtagttgacattgtataattcaagaaaacaattggtatgttgaaaaacaaatartatacaaacactttaaaaaacctttcatgaatttattgtattaaatatttactttagaattttctaaaattttgaactgcttttatccctcagtttgttttggggactttaattagagtgaccctttcctaagttgactattacctttattcttgcaattacggcttttcttcaccccagaaa

SEQ ID NO: 430154 - DNA, 499 bp, Homo sapiens
gaatatatgcattataaaattgacagtcttataggcaataatggttggctatttgtatttaaattataattttcaatatttatgtaaattgaaagatttactacttggtatcacacaagttaaaatcagagtaattgaaagatttactacttggtatcacamaagttaaaatcagagtaccttagcttgatggtagtttgcttagatgttatcttcataggacctaaaataacttttttctgaaggattttatacaaaatgataaaaacctgcatatgaattaccaaaaatgttgaatatgataatgttacggaaagtcttcaaagaaatattgaatgacaaacatcaattatctttaaatgaagaaactgacatttaaaaagtcattttcaagtaactccagggacagatgtgcttttcacatattcattcttttaaaactcataatagtagtacaacaggttaaatatgataaagaaaatcacaaatttggcagagt

SEQ ID NO: 430155 - DNA, 560 bp, Homo sapiens
catgaattttaaatcactgtaactaggctcaaacacaactttattaatcaaaataggaaccattacaatcaacacatttttgccaatgagaaataagtttgtttattcctgtagcatagaaattcatgctttgggatttgaagaattcttggaaagcattttctgcatcctgctggttgtggaaacattttccctgcaaaaagttgtygagatgtttgacgaagtggtggttggtgagaggtaaggtgaatatggtggatgagacaaaacttcatagcccaattcattcaacttttgaatggattcattcaacttttgaatgaattcattcaacaacttttgaattcaattcactcaacttctgaagtgttggttgtgtgatggccattgttgtgaagaattgagctctttctgttgacaaatgccggctacaggggttgcagtttttgttgcatctcatagattgctgagcatacttctcagatgtaatggttttgatgagattcagaaagctgtaatggatcagacctgcagcagaccaccaaacagtgaccatgaac

SEQ ID NO: 430156 - DNA, 580 bp, Homo sapiens
tatataacaaatgtatacaaattgagatgatcaagaaacaatcttcatttaagtatgaataaacaattacattcaattaatgaaataatgagaaagtcatggcattttgcaacttaagtaggtgacattaaaaaacaaaaaaaawttaagagctgaaagagctacagggaaattcaatctacaaaataataaaagattatattagtaaataatcttagtttttggctaagagaattgtgacaaagaagtgaattatcatagtttatgggtagaactaaagcctccagttaagtaccttgaattacattttaatgctatagccactgtaccctatggccatcatactgcattccatagggcccatatttctcttataactagatgttaataactcatcactaaaacagcaatgatctgtagctcattggaacttggatgaatctatcaaccatgaaaacaacctttttctcagcaacttcctgaagattataatgtatatggtattcctgttttgaagaacttgcaactaggctctacggatttaaaaatttcgaaaaatacaacaaaaataagtagtggt

SEQ ID NO: 430157 - DNA, 580 bp, Homo sapiens
tatataacaaatgtatacaaattgagatgatcaagaaacaatcttcatttaagtatgaataaacaattacattcaattaatgaaataatgagaaagtcatggcattttgcaacttaagtaggtgacattaaaaaacaaaaaaaatttaagagctgaaagagctacagggaaattcaatctacaaaataataaaagattatattagtaaataatcttagtttttggctaagagaattgtgacaaagaagtgaattatcatagtttatgggtagaactaaagcctccagttaagtaccttgaattacattttaatgctatagccactgtaccctatggccatcatactgcattccatagggcccatatttctcttatawctagatgttaataactcatcactaaaacagcaatgatctgtagctcattggaacttggatgaatctatcaaccatgaaaacaacctttttctcagcaacttcctgaagattataatgtatatggtattcctgttttgaagaacttgcaactaggctctacggatttaaaaatttcgaaaaatacaacaaaaataagtagtggt

SEQ ID NO: 430158 - DNA, 611 bp, Homo sapiens
agcacgtgattcatggtaacagatagagttgacttatacatgcggaatttcaggctaaagcatccaggtggagacattctgtatgacattcaaaatcagaattatgaataaaaattcaggactggagatttatacttgtaagttataaatgcaggaataatacacaaatctactgtggtagataagatctaaaaataaaagagaaggtactgaaaaggggctgaaaattaagggtttaattgacaaaagtggtaagactagagccagtaaaagacacacagaagaaagaccaaatgacaaaaggaaagcaaatatagtgtgattttaaagatcccaagaaggaatatcaaaagcaaaacaaaaaatggagttggggaagagaaagagaaagaaaataaagaaaggaagataataagattcaacaacttttaaggyatctggcaggtttcaagaagtgaaggctaaggaagaccagtttctacttgaagatcaaaagtaacactgaaattctgggtataacataacagttatatttagcattcaatttacatgtattagtgatcatatctagaaataaggaatgcatagtattaaaatgaacaaaaaatcca

SEQ ID NO: 430159 - DNA, 597 bp, Homo sapiens
caggtggtctcattgaccaactccaaccagaagacaacaaagcctgcctgatgcagaaaaaataaatttgttcttcagacaatatagtatttagagatagaacatgagagtgcaaagaatacctttctccccagatgtaagaattctctttataaatgcatttcccatattattcaaactttcttatttaagttattttgttttttattttatgatttgattatgatggacagagtgaaaatatacaatttatttcaygactaatcatgagaagtttattttcagatctgtttgacaggcattgaccgcacatcaaaatactaatataaaaaccagatattccctcatggatatagttttgaattgcatacaggactattgaattgggttatctgtggtatttttcaaattaaatatgaaagataaatatttatgtttctctgttagtatgtgtgtgcacatgcccgtgtgtgtgtgtttgcgtgcacacgtgcacacacatgtatttgaaaagccaaaggctggacagtggaagacatctctaattgtattgttttttagaaatttaaacttataaaaaatggggagttattttct

SEQ ID NO: 430160 - DNA, 621 bp, Homo sapiens
tccccaaattattcattatatgaaaagtgtttttgacacatctcagtattttccatttaatatatcatgaatcattacaattattattaaaataatgcrtgcattgtttcagccctctgattatggtatttctgttcttgaaagaattcaaatgtctaagactggataccttgttttgactatttgaaaaataaactaaagaaagtttcccatctctagtcatacttcttgtacatgacctggttatcacttatttccttcagagtgcccttatttattatttacattcaagataaataaaaactgataataccaacatactttttcatttttatttccagcactgaaaaatgggttatttaaaagaagttataaaaatgtaggaagtttaagaaaattataatgtcataatataagatgtaaataacactgaattttataagctttgatatttattttaaaatttttatttaaattattttctgacactagaaaatcctaagcctggttatatcatgctcatctagtaacaatttccaaagcatatttaatggattaaacagttattactcaacgacgaagggcaagggtaaataaatccttaggtaaaggaaaatattc

SEQ ID NO: 430161 - DNA, 516 bp, Homo sapiens
ttctgtagttggatagtcttaaagtgaaatctatttaaaatcaactatgcttaagtaaaaattaatctaacaattctgaaaacataaaaatgtttgaatttaatccttatttctaaaagtaatacrttgtcctcaaaaatgaatttatgattgtgagaatgaatacattttgaattgcaaaatgatagatgtttttctcttctagcttttgctttctttcattatatttagaattatcaagataacatcatttgagagggcagtttttctctcctggtgggttttatttaacatttcaaacagcatattgactgaaggtgcaaagtcagtttatgtctcaactctaccacttactagctgtgcaatctcagcaagttatttaaactctatttgcctaagtttcattaatagatatcataaatatggattttagcaatggatgatgtccaaaatgtactcattgtcacaactgcagctttctttgtgcctaggaaaattggattgcactttcctact

SEQ ID NO: 430162 - DNA, 460 bp, Homo sapiens
gactcttttcattcagctggagatgtcccttttcttatgtgaagatggaaacctgaacagttttgtattaaattgtrcgattctagatctttcttgagccttctgagtaagctgacttttcaaacagcactttagcaagggaaataaggcacagccttgttactgttcccactggccagtcatgaaaatttgggctacttatgtgatcgccactgacaccactgtggatgtgaccacgtttccactgggcaatgtaaaatattctgactctgactatcctataggccttctctgataccttcccaatggtagggtaaagggcaccacattatatccagacttgtgtagaagtctaagctcttcataatgtttccatggacaccatagagggagaagaaccttatttttagccattgcaaatggaagtcttgtctctctaatgggagctatctgacaatac

SEQ ID NO: 430163 - DNA, 525 bp, Homo sapiens
tatgaattcatgttgctctactcctttaatgagcacatttaataatttttccatgttgtctataggctcattttgtgcagtgttaatgtcattatcatcaccattagcataatcaccttgattgagaaaccttttaactatttcatcattggttaatgaatgaataactgaagcctcattgacgttaaaaactttttcaatatcctcttcttggagcatactaacaaacactaaatgtgtattttttgcatatgtaaggaggtcagacattattttaatcacttgacacaaagagtctttcagagcgaccatcttgttcctcattatcactgaacatagtttcaggattaacattgtaccgggcatacrtactgtgtccttaatcactgtgatccaagtgttggtttctcattatcactgaacatagtttcaggataaacattttaccaggcatacatactgtgcccttaatcattgtgatccaagtgttggtaacagtatatatggtatccttcatgctatatt

SEQ ID NO: 430164 - DNA, 538 bp, Homo sapiens
agatacactaaaagatgataaactacattttctgacaacataagaaacacatatagaagtagatacagaaaatgttgtcttattaaggaggttggtcaaatagtgaactacgttacagaagtggagagggagatcttatttcagttcatcagatgttttttaacatgtgaacaatcatgaagatactgaaatttttctagraacttactcttttctcaaagctctagtttcctctcttggccctctagtgaagcatggtaagcataggttctcacgactgctatgagagtaggaagtgagggcagagaattaaagaactgacaactccaactgttgtctagtatcttaagtaaccggaattctcacacactgctggtaggagtagaaaatggtacaaatgctttgaaaaatggtttaaattgccataaaattaagcatgcctctaccctataacccgccacttctactcttaggcattttacctatgagaaacaaaatcatatgcccacaaaaaaacttgtgcaagaatgtttataaa

SEQ ID NO: 430165 - DNA, 623 bp, Homo sapiens
ctggtagctattctttgcctcacatctggtagggaagcttatggaaatatccaatgttaatatcagactgaattaaaagctagttataggcatcttacttttgaattatttgatatttaagggttactcatatcatrgccctttctagataattaagagtaaacctcatgaacccattgctccagaagagggccatgggaagtagaaaaaatctgctcctatttttataagatttattagtaaccaaacaaagtgaaacacacacacacacacacacacacacacacaaatctagaataaaaaaggagagaagagatagtgtggttttggctgaaatactcaaagtataaaatgaccatgaaactgagaaggttggctttagatccctgatttttaagctgttctgtggcctaaaaatcgaacaatgttccaagaactgagtagaatctaggaaatggaaggaaactgaagcaggaagagtcagggaagacattcaaaggaataagtactgctatggtctgagtgtttgtgttcctctaaaattcatatgctgatattctaacccccaaggcaattgtattaggaggcagtgcatttgggagttattaggtcataggagaaaa

SEQ ID NO: 430166 - DNA, 623 bp, Homo sapiens
ctggtagctattctttgcctcacatctggtagggaagcttatggaaatatccaatgttaatatcagactgaattaaaagctagttataggcatcttacttttgaattatttgatatttaagggttactcatatcatagccctttctagataattaagagtaaacctcatgaacccattgctccagaagagggccatgggaagtagaaaaaatctgctcctatttttataagatttattagtaaccaaacaaagtgaaacacacacacacacacacacacacacacacaaatctagaataaaaaaggagagaagagatagtgtggttttggctgaaatactcaaagtataaaatgaccatgaaactgagaaggttggctttagatccctgatttttaagctgttctgtggcctaaaaatckaacaatgttccaagaactgagtagaatctaggaaatggaaggaaactgaagcaggaagagtcagggaagacattcaaaggaataagtactgctatggtctgagtgtttgtgttcctctaaaattcatatgctgatattctaacccccaaggcaattgtattaggaggcagtgcatttgggagttattaggtcataggagaaaa

SEQ ID NO: 430167 - DNA, 439 bp, Homo sapiens
tctcttagagctacaacctacgcacactattctctgtaagagagtagctctctgagacaaatatttttcaacttctcctgcctgcctccaatgaatgaataaacctagcagctggtgtttacacagcacttaccttcgagagaccacagagcaattttcagtggcagactctaatccttccccagcttctgggtagcaataagtattaatattgttccccwgaatatggaagattgagtcaaggaacttgcaacggcttgctgaataacacctgtcatttgatggttcactcattcactccatagttttttccaattatgcccttattattgtacaataaggtattttcacatatattaactctttttttaccaaatttgcttgataataagaataacctggagctcttgttaaacaaacaacttctatgatccctgtc

SEQ ID NO: 430168 - DNA, 563 bp, Homo sapiens
tcatagttattggcctatagccctcttaaaacatttatgatgtttaatcttgtgttagagcgacttttatacttttatcccaatatttactggataaaagcagtatgtctgtattacccttgtattcgtgcagcactgagttcaatgcttggagaagagtaggcattcaaagccattttaccaaccacctattatatgctttcaatatagcaggtattaatctagaccctagaaccccgatctgatttaaggaacgagaaaccttaaaatagggatctgtggagaaatcctagtttcagatgttagtggaagttaactattaacccaagatatttggaacaagttgatgactacattaagcagatagcttccacccagacccattggaataattagtctattaatggttagcaacatttttctataaagaaacaggtaataaatattttaggctttcagtcctttaagtctctaccaaaactattcaactcttgcaatgtaktgcaaaagcagccataaactatacataaacaaaatgagcatggctgtataccaataaaact

SEQ ID NO: 430169 - DNA, 580 bp, Homo sapiens
aatactccttatagacaatatataaatgaaattaaatgcccatgtaatgcaaggtgatacaggtactactgggatgcaacaatgactgtcatgatgacacctagagataatatatttacasttctattaagattgcatatatctcttttgaagtatctgagttctttttcctatgaggaaatgagcaccttcagtgccaactcaggaccaagactgcttgttctgtagtgctaatagctagactatttctagtttatgattcactggtaccctcaatgtacagtttcttaacaaagcatctgtatggatacaacctttcctatgaaaatgaatagtaattggtgaaacaaagcctaagggtaatgatcccattcatagaagctggaaaacttgaaaaggtcatcaaaagtgaattctctactatggctcttgtcctggatacacaactgaccttttaaaattccttcagctaagtaattatgaaaaataaactagccttagattttctcctggccaattagaggaaatcagtactatttcataatttatgttgaacctgaattaacagcttggtttaaat

SEQ ID NO: 430170 - DNA, 615 bp, Homo sapiens
cctgggcctccagccaccacctgccagagctattgagccagtagcaacttagcaactccttggatggagcctccaggggcaactgaaaacctctctgccactgcctctgcagtggaactgccacctcagactaatgaaggagcaaagaccctaygtgccttatccacacctccaacaagtggcagtcaacctaatcagaggaggccagtccacctcccgctggtcccacacccccatcacttctcatcaccagagagggcccctggcttgggcccacagcacagacctttcatcctgtgctgattctgctgagcaattgctgacctgcatctctctgggatggagcctcccaggagacaatcaaatgacccttgaccaaaaccactactaagatcccttcctctgctgcctccaagttggggaaggaacataaacaataagattgccccagagctgcagcaggcagctcaggagtgccaagtcacaatctacagccagcattcaaggggaagaggaacccatgctttcagagcattgagaggaaacatggctgcaactgtgaggaaacagggaagccacacaacaagcaagagtttaccaactgactaataagcc

SEQ ID NO: 430171 - DNA, 615 bp, Homo sapiens
cctgggcctccagccaccacctgccagagctattgagccagtagcaacttagcaactccttggatggagcctccaggggcaactgaaaacctctctgccactgcctctgcagtggaactgccacctcagactaatgaaggagcaaagaccctacgtgccttatccacacctccaacaagtgscagtcaacctaatcagaggaggccagtccacctcccgctggtcccacacccccatcacttctcatcaccagagagggcccctggcttgggcccacagcacagacctttcatcctgtgctgattctgctgagcaattgctgacctgcatctctctgggatggagcctcccaggagacaatcaaatgacccttgaccaaaaccactactaagatcccttcctctgctgcctccaagttggggaaggaacataaacaataagattgccccagagctgcagcaggcagctcaggagtgccaagtcacaatctacagccagcattcaaggggaagaggaacccatgctttcagagcattgagaggaaacatggctgcaactgtgaggaaacagggaagccacacaacaagcaagagtttaccaactgactaataagcc

SEQ ID NO: 430172 - DNA, 550 bp, Homo sapiens
tgccttatccacacctccaacaagtggcagtcaacctaatcagaggaggccagtccacctcccgctggtcccacacccccatcacttctcatcaccagagagggcccctggcttgggcccacagcacagacctttcatcctgtgctgattctgctgagcaattgctgacctgcatctctctgggatggagcctcccaggagacaatcaaatgacccttgaccaaaaccactactaagatcccttcctctgctgcctccaagttggggaaggaacataaacaataagattgccccagagctgcagcaggcagctcaggagtgccaagtcacaatctacagccagcattcaaggggaagaggaacccatgctttcagagcattgagaggaaacatggctgcaactgtgaggaaacagggaagccacacaacaagcaagagtttaccaactgactaataagcctacrtgccacctgctggatcatactgtaaaggtttatcaccaaaaacacctcactaacatacctctgccgaaaccagagacaagaaggta

SEQ ID NO: 430173 - DNA, 560 bp, Homo sapiens
ggggccagtatgctcaaagatggatagccacatctgcaagccatttggattaattattacacctgtgtcataaaacctgcattaataaagaggtgacaaggagactcatactgcagcttagacaggaccgtcactccttccaaattttccatccctatcactggcacgccaccatcttactctcctggcagaccacrttggagtattccaggtttcttcctctagcactcccatgactattgtgtatccttctaattcttcatctcaagtaccttttggagccatccttccctaccactttttagtcaatattctagtctgagccttctctaatcacatgacacctagaatattacaaaattacaaaatcatccctcttgccagctgcctgcgccttctgactgccctttacatagtagaaagggtcttatttctcaaacattttgatcaaattataatccaatgctttgactggtaagaatgtatctctcatctttgatctattaatgggctctcagaaatttacatagttttctgttgtctttacttaatcagatgca

SEQ ID NO: 430174 - DNA, 522 bp, Homo sapiens
tttttagtcaatattctagtctgagccttctctaatcacatgacacctagaatattacaaaattacaaaatcatccctcttgccagctgcctgcrccttctgactgccctttacatagtagaaagggtcttatttctcaaacattttgatcaaattataatccaatgctttgactggtaagaatgtatctctcatctttgatctattaatgggctctcagaaatttacatagttttctgttgtctttacttaatcagatgcaaattcttcatgctggtctttaaggctgtccactaatgtctcccagtattgttgttcttatttatgactgatctttgacctataattactttctattctagccaagcaaatctactttttctcatgtgcacaaatgtttgattcttggactggctgcttaaaaacctaactgcacaaaatacctctaaatattcttctcgttttctttctgccaagttgccctgaaaaattctttccaggagtcatccctgacacagcctt

SEQ ID NO: 430175 - DNA, 404 bp, Homo sapiens
tatttatgagaatttgacagctgtagaattatctagccttgaaatgaaaattatgtgagacactgatcctctattcagaaaaaaaatagaaaaatctagtcaattttgaatttttgtgtataagggcgaaaagggatatcagcaatatttaatcaactcccctcatcttataggtcatacatagaaaataaaagcaataacaagaagtacttattgaactcagattaggcacagtggaagaaraaagtaagagactttaaatatacatgtgaagaagtcactcagaacatagtatggagagttaggggtagaaaaatatcaaagacaggttaagagatatagagagtaaaatgaaaaaatcaggtttgcagctgataagcatttcagagggagagattatggag

SEQ ID NO: 430176 - DNA, 601 bp, Homo sapiens
tgaacaatgattgagagaaaacaaaagactggaaatacatttgttcatgatacagatattggagttagcagaggatgctaaaacaaccaatataaatatttaaaagaaaataaaggaaaagatgaaaaaaatgtagactctgaacaaaaaatgaaatttgaagaataatcaagtagacattctaaaactagaattataatatctgaaattaaaatcttggtagttggaattttacrgtacactggacacagcagaggagaggattattgaactcaaggactgatcaatagacaaaaattgaactacacagagaaaactagaaaagaacataagaaatatatgaagcagtgagatagtctactatgtatgcctaagatcacaggataagaagagagagagagagagagggagtaaaagcaatatttgaagagataatacttgagaatgctgaagagctgatgaaggacaccaactcgcaaatccaagaattcatgaaatcccaatgacagtaaatacaagtaaaagtactgtaggcataccagagtcacacaatgaaaactaaagacaaagaagaagtctcagaagcagccagcaatggaat

SEQ ID NO: 430177 - DNA, 608 bp, Homo sapiens
gctaataaacatatggaaggttgtgcaatctcattgttaatcaaggaagtacaaattataatgatgatgaaaccctacctcccaagtgattccataagtgttggtgagaatgtggagaaaaggaagttctatacataactaacggagatataaattttcaaagccatacgtcaatacataataaactgaaattatgcatatctacagctcagaacttacattggyatattggcaaaaactctctcatttgggcaccagaaagtatgtttgaagatactgctccatttcttgtaatacctgaaaattggaaacaatgtcaatgatcagaaatatacatatgttttagcatattcagagtgatcctacatcctgggacagtcttaatttatgcctattatattgatataattataccaagtttagtttcaaaagacatcttcattggataataaactatatatgcattctagatatattcatttactgaagttctaaatagttatataaatgattgaaataaatgtgttagtataatatgtgttaaccaaaaaaaaatctggaaaaaaacataatgataagtgaagaaagtcaagttgcaaatagatata

SEQ ID NO: 430178 - DNA, 608 bp, Homo sapiens
gctaataaacatatggaaggttgtgcaatctcattgttaatcaaggaagtacaaattataatgatgatgaaaccctacctcccaagtgattccataagtgttggtgagaatgtggagaaaaggaagttctatacataactaacggagatataaattttcaaagccatacgtcaatacataataaactgaaattatgcatatctacagctcagaacttacattggtatattggcaaaaactctctcatttgggcaccagaaagtatgtttgaagatactgctycatttcttgtaatacctgaaaattggaaacaatgtcaatgatcagaaatatacatatgttttagcatattcagagtgatcctacatcctgggacagtcttaatttatgcctattatattgatataattataccaagtttagtttcaaaagacatcttcattggataataaactatatatgcattctagatatattcatttactgaagttctaaatagttatataaatgattgaaataaatgtgttagtataatatgtgttaaccaaaaaaaaatctggaaaaaaacataatgataagtgaagaaagtcaagttgcaaatagatata

SEQ ID NO: 430179 - DNA, 588 bp, Homo sapiens
aaacaagttgttacttcctagatacaatgggggtacaggcattgggtaaatakagccattgcaaaagaaagaaattggccgaaacaaagggtttacaggtcccatgcaagtccaaaattcagcagggcagtaaaatcttaaagctcagccaggcacagtggctcacacctgtaatccccgcactttgggaggccaaggcgggcagatcatgaggtcaggagatcgagaccatcctggctaacacggtgaaaccctgtctctactaaaaataaaaaaaattagctgggtgtggtggcgggcacctgtagtcccagctactagggaggctgagacaggagaatggcatgaacccaggaggcagagcttgtagtgagccaagatcgtgccactgcactccagcctgggtgacagagcaagactctgtttcaaaacaaaacaaaacaaaacaaacaaacaaaaatcttaaagctccaaaacgatctcctttgactccatgtctcaaatccaggtctccctgatgcaagagatgggttcccatggtcttgtgcagctccacccctgtggctttgcagagtataccctcccttc

SEQ ID NO: 430180 - DNA, 588 bp, Homo sapiens
aaacaagttgttacttcctagatacaatgggggtacaggcattgggtaaatagagccattgcaaaagaaagaaattggccgaaacaaagggtttacaggtcccatgcaagtccaaaattcagcagggcagtaaaatcttaaagctcagccaggcacagtggctcacacctgtaatccccgcactttgggaggccaaggcgggcagatcatgaggtcaggagatcgagaccatcctggctaacacggtgaaaccctgtctctactaaaaataaaaaaaattagctgggtgtggtggcgggcacctgtagtcccagctactagggaggctgagacaggagaatggcatgaacccaggaggcagagcttgtagtgagccragatcgtgccactgcactccagcctgggtgacagagcaagactctgtttcaaaacaaaacaaaacaaaacaaacaaacaaaaatcttaaagctccaaaacgatctcctttgactccatgtctcaaatccaggtctccctgatgcaagagatgggttcccatggtcttgtgcagctccacccctgtggctttgcagagtataccctcccttc

SEQ ID NO: 430181 - DNA, 547 bp, Homo sapiens
ataaagtaaaaagcagggcatatttggagtcagttcttttttgtatgtgtggtagaattcagctgtgaatctttctggtcccagactyttcattgttggaagattttttttattactgagacaattttactattactggtttgcccagaatttccatttcactctgctgcaatcttgggagcttgtatgtttccaggaatttatccatttcctctaagttttctaggttttctagtttgtgtatgtagagatgctcatagtgatctctgatgatcttttgtatttctgtggtatcagttgaaaagtcacctttataatttctgattgtgcttatttgaattttctctcttttttcttcattaataaagatagcaatctatcaattttgtttatccttttaaataactaatttttaatttcattaatcctttgtatggtttttggtctcaatttcatggagttctactctactctttttttttctgctagctttgggtttggattgttcttgtttttctagtttcttgaggttccatgttaggttatt

SEQ ID NO: 430182 - DNA, 547 bp, Homo sapiens
ataaagtaaaaagcagggcatatttggagtcagttcttttttgtatgtgtggtagaattcagctgtgaatctttctggtcccagacttttcattgttggaagattttttttattactgagacaattttactattactggtttgcccagaatttccatttcactctgctgcaatcttgggagcttgtatgtttccaggaatttatccatttcctctaagttttctaggttttctagtttgtgtatgtagagatgctcatagtgatctctgatgatcttttgtatttctgtggtatcagttgaaaagtcacctttataatttctgattgtgcttatttgaattttctctcttttttcttcattaataaagatagcaatctatcaattttgtttatccttttaaataactaatttttaatttcattaatcctttgtatggtttytggtctcaatttcatggagttctactctactctttttttttctgctagctttgggtttggattgttcttgtttttctagtttcttgaggttccatgttaggttatt

SEQ ID NO: 430183 - DNA, 579 bp, Homo sapiens
gaaactccgtttcaaaaaaaaaaaaaaaaatctgcaaggaaatgaaggacaatttgatcagaatgttaggatgttaaaattaaatgagaacttagaaaccattgaattcagttcctatattttacaaataaaawacatgaagaccagataagagaaattatttgcaccaagtcacacaataatgtaatagcagtgtggcgattatgccctccatttcctatctctcaataatgaagtgaacattctgggctttggatgcaggtagacctgatttggagtcttagacctccatttaatagttatgtgacattttatttactcgtgtaaaataaaaatgtgatatttgtctcatagaattattgtgaaaatcagatggaatagtttatataaatagtacaatgtttagagcatagaaagtgcacataaaacattaggtaaaaatctattttaatgctccacctactctgtatattttgtttgcatattacctacctttctagtgcattttatcttgttcttacatttgtgaggcaaaataaggccatccaaaattatccctttatatcacttaatatggtt

SEQ ID NO: 430184 - DNA, 579 bp, Homo sapiens
gaaactccgtttcaaaaaaaaaaaaaaaaatctgcaaggaaatgaaggacaatttgatcagaatgttaggatgttaaaattaaatgagaacttagaaaccattgaattcagttcctatattttacaaataaaatacatgaagaccagataagagaaattatttgcaccaagtcacacaataatgtaatagcagtgtggcgattatgccctccatttcctayctctcaataatgaagtgaacattctgggctttggatgcaggtagacctgatttggagtcttagacctccatttaatagttatgtgacattttatttactcgtgtaaaataaaaatgtgatatttgtctcatagaattattgtgaaaatcagatggaatagtttatataaatagtacaatgtttagagcatagaaagtgcacataaaacattaggtaaaaatctattttaatgctccacctactctgtatattttgtttgcatattacctacctttctagtgcattttatcttgttcttacatttgtgaggcaaaataaggccatccaaaattatccctttatatcacttaatatggtt

SEQ ID NO: 430185 - DNA, 646 bp, Homo sapiens
tcaattccattctctatttgttatgagagcttagactctgaatccatactacttgtgcttaaatgccagttctactatttattaactgttagatcttcagcaaattacttaacctctctgtgccagttccctaatctagagaaaggggatagtagtagcatctccttcatagagttgttttgggaatgaaatcagtctatacatgcaaaacagaataaattctcattcatggtgacttcttaytaaagattggctattgatatatttttattgccatttttctattttcataaaaatctctttgatttgtgggtatcaatatctccagtgaagaaactgagaggttaaatgacttgcccaaagacacatataatatataatatgattaagctggtatttgactctagctctatataattacaagtctcatatggttttacgtccacaccagtaacacaggactgtttatcatatgcctattctgaaccacctacaatactaggagctttaaatatattttctagtgtattatttacaacagtacaatgcatcaaaattttctatttctgctttgcatataagataacagggaatcagagaggctaagtaattcctgtggctatacagtgagctgggatttaaacca

SEQ ID NO: 430186 - DNA, 561 bp, Homo sapiens
ctttaggctgaaagactgtcagacacacttaaaaaaattcttgacattcttggaggaggtagaactttaagtcattaaaataaaagtacttcttatttggattgctttctcacagggcagtagccaggaagactcccaaggaaatatgttacaagttgacggaagttaacytgagtccagccgaggctaagtttggatcatgaggcactgcccaaggaggctactctagtaaaagcattggtgaggtggcagaggactcaagactaactgaggaagtaggagatagctgccatcttaaaggctgccaaaggaaaggaagtactatggaatggcctcatggaatgaccccaatgtctgatgtcatctacatctgttagacccaatgccttcctgttgacctgctcaacattccctagtctctgggacatacgaaagtgtccagagactgtcaaggggtgttataccatagtccaaagaaagttaaaagataatttttttaaaaaaagtatagtggtgcaaaatcaagttttaataccaagaaaaggggatgaagaatgaggt

SEQ ID NO: 430187 - DNA, 534 bp, Homo sapiens
taaaagataatttttttaaaaaaagtatagtggtgcaaaatcaagttttaataccaagaaaaggggatgaagaatgaggtatgaaaggtgactctagtatagttcatttcagagtttttcattctttcaattagctattcattgagtaagtgcctgtacaaattactgtgccaggtaatgagacaaatscaaggaatagcaagacacatggatttctaataaaatctgaatgtcaaggagtgatgaaggtagtaggtagtatagaaattctaggaaaagaagtccctttgggcacttgtgtttagtgaaatagatagatgggtagaacttcgaagtgtttgagattatgttaaagagaagaggcaaggaggcaatctggaaaagggaagtaggcaagcaaagacagtgaggtagcaaagcataagatgttttggggggccagagtaagctgatgcaaagaagtggtggtagtttttaggagcctctgggattagggcccactgcctaggtcaaattccacttctcccattggtg

SEQ ID NO: 430188 - DNA, 548 bp, Homo sapiens
cattgtaaaagaaggagggagagtatgtgctgtcagtttgaatctaggaaggaaaaccaaagttgtgactgatgttttgagctttagtgactaagactagtatggtgctagaattaagagcagaaaaggaagggaaaaattgatttagggaagaagaggggcataattagttcaaaaggtaatgtgaaatttaagtgaaatgtagtctaggcagctggagatgcagaatgagaattcaggggagaggytggctggagatatgttgtcttctgagtaatggcagagagcaggttgatggatgacttctctgcaagcaaaaatgtgaaggtaagagcctaaccttaagtctgaaccttggggattgtgcagagacttggtgatttgggctttaaaagaatagcaatatattattctcctttgccatgagtatgctgttacagaactattagcaatgaggtatacatatatgtttttcatttactacttctttctttcttttgttcatttatgaacattcattacagcatttaaactatctaatgctcagt

SEQ ID NO: 430189 - DNA, 603 bp, Homo sapiens
atttcaacaagtgacagagaaggcataaaaggctagtaatatactacagagatggcgcgataaatattggggtgcttgcctagcaggcaaaatcttcgttggcccatgacaaccaaataaatgttccctcctaaggctgaccatcaactccagggaactgaaaggctgagtgccaaattgagactattccaacgggttagcaagacgatttccccagggaattgcagagataagggcttgaactcctgagatttggtggtggggcaggtgaagacagatttgacaacttgtagacgctctaatcagagtgggtcaattgaaagaaggctatggcaatgccaagcatggtgattagtgcatagtcgaggcttctggatgrttcaaatgtacgactcagaccttgaccttttagtagagttgccagatttcacaagtaaaaattcagggcacccagttaaatttgaatgtcaactaaagattgagtaattttgtactagtataagtatgtcctacctaacatttgcacacacttatactaaaaatttgctggttatctaaaattcaaattttactaagtgtcctgtgcttcatctactttctagg

SEQ ID NO: 430190 - DNA, 586 bp, Homo sapiens
cttagtaacagagcacagtctgacttcatcacccaatgccaccttactgaagggcttttccttccttaactggttgaggtcaatcatggacctcttatgccaacttttatctctccactgcctttgttcttgccaatatttcctttgtatggtattaccaatggaaaatcagcagctaaaggaatcagatgtttgtgcaaaaatatcaaatatcataaccctcccatggtaagcacccaaactcagtagctttctgtgatttgtgaatgatcctaagaggaccttgattttaaaatggagggaaaaaattaaacctataacacakatgttacaggaaaggggtccccatccagaccccaagaaagggtttttggatgttgcacaagaaagaactcagggtgagtccataaagtgaaagcaagtttaagaaagtaaaggaataaaagaatggctactccacagacagagcagccctgagggctgctgattgcccatttttatggttatttcttgatgatatgctaaacaagaggtggattattcatgcctcccctttttagaccatatagggtaaattcctggtgtt

SEQ ID NO: 430191 - DNA, 593 bp, Homo sapiens
tcttttcttttcttttcttttcttttcttttagtgtgactattaaagttacagccaaattagaacatgttctttctagctacatgtgttccccttttcccagagattttgataactcccttcactttcccttctagagaatgtggactattttgttttatttggccaatatacagttaaatgatgtagccctggcctgtagagcctaggccatttcacttacagatcagtgtaagtgttgaggttgagtgttgaggtgcctttatatataatctggatgcaagttctggttttcaaatgaatgatttgtgaatttttcttctaaccagtagcttgtcttttcactattttaacaggatctttagtgaagcaaaagttttaaatgttgattaactccaatttatcaattattaattttatatatcagcttttcatgttatatttaagaactctgtacataacttctggacatgaagattatcttccatgttttcttttaggttttacatttagctctatgaatcawcttgggttaatctccatataagataagaaatggaagacaaaggtttttttttttctatatagatgtgc

SEQ ID NO: 430192 - DNA, 614 bp, Homo sapiens
aaagttctagaagcacacagaagagtcattgtgacgttgcatcaggcaaaatcttagacacaaaaatcatgaatcagaagataaaaaaggcttcctcaagtaaaaataaatctgaaagacactgggaagaaaaaataattcacagcatggaaaataattgcaaattatacatctgataaaattatgtaaggggctcttaaaattcaataataaaataattcattaaaaataagcaaatgatttgaatagatgcttcactaaaattagatacagttarcaaataaacaaatgaaaaggtgatcaacattatttattaggcaatttcatattaaaaccacaattatatcccagtacctcctattgaatgctgaagtggatatagggcatctgaaagtttcatacactactagtggaaacgcaaaatagttcagccacttaggaaaacacttcggcagtttctaataaagttaaatataaactactatacaactcatcaatctctcagctatttatttactcaagagaaataaagatacacatttatacaaaaacctgtatgtgaatatctaaacatctagatagcgctattgacatttaccagaaactgggggaaa

SEQ ID NO: 430193 - DNA, 593 bp, Homo sapiens
gcaccaaagttgcaaagatgcctcaaatgttttcttctaagtctttatcttccaataataaaatcatataaatacatatataaaataaaataacaagtgattaaattgaggtattatagagtatarcaaaaacacaaaggaatcattggtcatatatatattttttgctgggaaaagagattagaaaaagcttaatagagtgattggaagggaaaggacaagaaggagatttcttacatgaggagcagatgagcaattcatgaaggtgtaataaaacagatcgcttttaatagaaaccctacatagtatattatgatttagggtatttgaggcaggtataatgaggaataaatgcaatgagaaaagtaggagcaggatcaggaagatcctttgagcaaaattactttaaaactagattgtataattatgagttttttgcacttctcctttgcctctctacatgttgtaaactgaataaatgcataaaaaagcttataagtgaaaataggcatatctattgagatacacagacccaaaagaaaatcaggaaataggctttgctccaagattttattcctgctctaatgcaagct

SEQ ID NO: 430194 - DNA, 574 bp, Homo sapiens
tgtttgatggtgtttttcagtttttctgtattaagtgcctataaacattttctgtaaagggcaagaaagtatagtttttaagcttgtgtgctatatacagtctgtgccacatgttctttatgttgttgttgttacaacctttrcaaaatataaaaagcattcttagcctgtgggctctacacaacaagctatgggctgtatttggcctgtgagccatagttgattgaccgatgttctatagtcttactgattttctatcagtattggattcttcaactatcattttatagagagtattggatccttccaatactctctatatgtagaaaagagggtctatttatatagagtattggatacttccagtacatagagtattggatttttcaactatcattttatatcatataattattgataagtttggattgatgtataccatttactatgtggtttctgcttgtaacctctgttttttatttttctttttcctatcttcttttgggctatttccacatttttagtattccattttaatttatctattgagattggactttatctctctagcctt

SEQ ID NO: 430195 - DNA, 640 bp, Homo sapiens
gtctctgaacaagtgttaatctttccttgtcccttctcttgtacactagtatgcatgagtatgtctccaaaaataaatacgtgtaatgcataaaattcaaatttatacaacagatatatcagatgcttattatttatgttataaaagtatttttgctttctttagcaaattgattaatacatttgaactatcattcaacttacaagggtctgatttgcacatatttcaggaacacaccagctacacgaagtgaggcagatctatagatgttttccaaatgcgagtaaatctaattttggttagttgaatccgatattaaatttccttggagaataggttatttgaaagggccccaaggtgaattcttttagtaaagcataaactctttttgaatggtgaaaaatttktgaaaaacttgatgacaagtctccctggccagaaagaagtgcttgtcagttttcccaagagtggagtctaggcaaagttcaggaagcagctaggaaaggtaaaggaaagaacaggttacgggagggagtgggcagatcatcaagcaaatctgtatggatttctaacctgagctacaagatggatatacaatttccagacacagaatcatgcacacatgtattgtttattcttc

SEQ ID NO: 430196 - DNA, 467 bp, Homo sapiens
agttctgtctaagagaagagcaatatgctcagatataccagacaagagtgggcaaagatgttttgttgtggtaaatacagagataactatgtattcttgacttaatgaagcatatcaacttgcctgcaaagaagtgtccttgcaagtaaattttagacttttctcagaaaacgttctgaatctcttagtgttatwccaaatcctggtgatattatgataacctgagactatttgtagacaacactgagttctagtctcctccacagtttctatgtcctttatgcttaggaatttctaaacctttattaattgtatgtatgcatatgtggtttattcatttgccatccatttatccaacaaacacttattgaaagaaatcactaatctttagcactagcggagataaccaggttgagtaagacatgtaactaaaaaacctgctagataaaatgaagtatcagacaact

SEQ ID NO: 430197 - DNA, 547 bp, Homo sapiens
ttattttgtttatttctactctgagctttgctatttctatttttctgctaattatgagcttagttgtttcttgtttttctagttccttgaggtgcaatggtaagttgtttattgaaatctttctttttttgatgtargtgtgtatcattataaacttccctcttagaactgcttttagtgtttttcataaattttggcatattttatgtccatttttatttgtcttaagaattttttaaatatccttttttacttcttcattgattcattggttgttcaaaagcacgttatttaatttccacatatttgtaaaatttctagtatttgttctattattgattttcagttatataccattgttgtccaaaagatgcatgacataatttttttcttctaaaatgttctaaaacttgttttgtagcttaatataatctatcctggagaatgctctgtgtgcagttgagaagactctgtgttctgcagctgttggattgagtgttctgtaaatgtctgttaggttcatttggtctagaatgcagtttaaatt

SEQ ID NO: 430198 - DNA, 547 bp, Homo sapiens
ttattttgtttatttctactctgagctttgctatttctatttttctgctaattatgagcttagttgtttcttgtttttctagttccttgaggtgcaatggtaagttgtttattgaaatctttctttttttgatgtaggtgtgtatcattataaacttccctcttagaactgcttttagtgtttttcataaattttggcatattttatgtccatttttatttgtcttaagaattttttaaatatccttttttacttcttcattgattcattggttgttcaaaagcacgttrtttaatttccacatatttgtaaaatttctagtatttgttctattattgattttcagttatataccattgttgtccaaaagatgcatgacataatttttttcttctaaaatgttctaaaacttgttttgtagcttaatataatctatcctggagaatgctctgtgtgcagttgagaagactctgtgttctgcagctgttggattgagtgttctgtaaatgtctgttaggttcatttggtctagaatgcagtttaaatt

SEQ ID NO: 430199 - DNA, 547 bp, Homo sapiens
ttattttgtttatttctactctgagctttgctatttctatttttctgctaattatgagcttagttgtttcttgtttttctagttccttgaggtgcaatggtaagttgtttattgaaatctttctttttttgatgtaggtgtgtatcattataaacttccctcttagaactgcttttagtgtttttcataaattttggcatattttatgtccatttttatttgtcttaagaattttttaaatatccttttttacttcttcattgattcattggttgttcaaaagcacgttatttaatttccacatatttgtaaaatttctagtatttgttctattattgattttcagttatataccattgttgtccaaaagatgcatgacataatttttttcttctaaaatgttctaaaacttgttttgtagcttaatataatctatcctggagaatgctctgtgtgcagttgagaagactctgtgttctgcagctgttggattgagtgttctgtaaatgtctgttargttcatttggtctagaatgcagtttaaatt

SEQ ID NO: 430200 - DNA, 609 bp, Homo sapiens
gcttcccttggaataagaccagagtgagtctttgacaaagggttccagaatgatgaagaagctgaatgtccaggtcaacttactttttctgttgtagaaacagaagtccaggggacttctccatgtgtggtgctgtgcagactctggggatgagcactgcagtaaaagataatttttccccttacggtctaaatgtgcatttttcctcagttctacaatccaaagggatatcacattttcactccaagttctgggatgttcatggtggtaatcttgcctctggatagctactagttgttgagaagaaaagatggagaactcttaatcttccattttgctaaagtcactccacaaaggagtcaatcttgcttccaactgccaggmagggaaggaactggatgtttgcctttttcagttcccattacttctattgccacacggtttaatgagtttttattcatggctgcccccctcattggttaggtgatgtaacatgcttgagattaacaagttatggctgtgtttaacttacatgcctaagctcagccattatttttcaagcatgtcagttattcaagagttggctgggcctggggaagcttctagcct

SEQ ID NO: 430201 - DNA, 469 bp, Homo sapiens
cccttatgaatttagtttggggcccttattttcctttcttccagtaactctcaattaggttattcctaatggtaacattgaacttcaaatgagtctcttttcttctcattcaaggaggattttttaagtttgtccacttccttttcaggaatgaggattatgtaccaaggaatactgagacggggtgtttcttgaaaacytaagagaccacataaactatatttcaggacagcaagtgcctaatagacttacattgtattcatttgtacagaaaacatttaagaatgcttacaatctgccaggcactgttttagactccaaggaaacagcagtaaataaatctgaacaattccctgcagtcatggggtttacaatctagtggaaaagaatgatgaacaaacatcatgatatcttatggctggtggtggtagatgtgaaaataaagcaattgactatagaacgagatggg

SEQ ID NO: 430202 - DNA, 469 bp, Homo sapiens
cccttatgaatttagtttggggcccttattttcctttcttccagtaactctcaattaggttattcctaatggtaacattgaacttcaaatgagtctcttttcttctcattcaaggaggattttttaagtttgtccacttccttttcaggaatgaggattatgtaccaaggaatactgagacggggtgtttcttgaaaacctaagagaccacataaactatatttcaggacagcaagtgcytaatagacttacattgtattcatttgtacagaaaacatttaagaatgcttacaatctgccaggcactgttttagactccaaggaaacagcagtaaataaatctgaacaattccctgcagtcatggggtttacaatctagtggaaaagaatgatgaacaaacatcatgatatcttatggctggtggtggtagatgtgaaaataaagcaattgactatagaacgagatggg

SEQ ID NO: 430203 - DNA, 607 bp, Homo sapiens
aatgagtgaagctgtgtattggaggtagtgagggtaaggaggtggaggtaatttcaagctgaaagtcctatggctaatgtgtagatgaaatgaaatgaaatgtgccaaacctcagaaagcactggagaaacactagcgaaatttatcttctcaaacggttgctgtatctgcctacagagtttctacacagggactccgaaattctacatgggtagcagtcaatttcaaccccacaagaagatgtaggtggggagctggaagaccaggcttatctgcaaacgctggctcagaacagagcagctgtggcctctgataagcagggaatagaggaagtggttttgtctcaggcctaaaaaccatttgctatctcacagcgcctgttagtaagtcacctccccttcagtgtttaccaaacattcwgaggccctgcacctacagttctgtggaaaccacaacctcattctcctcagttaaaagcccagtctttttatccctttcctccaagtggcactatgggtgacacagagaatttctactctccaatttgggactcggactctgaatgtggtttccaggactctctttcctcttctgatatgtgggtgcc

SEQ ID NO: 430204 - DNA, 594 bp, Homo sapiens
actacatgtgacaaataatatgtttacaaaaatagtttagaatagtcactaaaaaaacaagaattacaacccagagcaagsaacaaaacaaaatactgaggaaggggaagagtctgatttccagagttatcatattatggtattaaaaatatctagtttcaacaaaaaattataaagcatgtgaagaacaagaaagtgtgacccattcacaggtgaaataaacagaaattgtccctaaggaaggacagatactggatttgctagacaaagtctttaagtcaactgtctttttttgagacagggtctcactctgttgcccagattggagtgcagtggtgtgatctcagctcactgcaacctctgcctcctgggctgaagtcatcctcccacctcagcctcctgagtagctggttctacaggcacatgccaccatccctggctaatttttaaaatattttgtagagatgcagtttcactatgttgcccaggctggtttgaactcctgggctcaaatgatttacctgcctcggcccccacaaagtgctgagattacaggcatgagccaccctgcctggcctcaactatcttaaatat

SEQ ID NO: 430205 - DNA, 594 bp, Homo sapiens
actacatgtgacaaataatatgtttacaaaaatagtttagaatagtcactaaaaaaacaagaattacaacccagagcaaggaacaaaacaaaatactgaggaaggggaagagtctgatttccagagttatcatattatrgtattaaaaatatctagtttcaacaaaaaattataaagcatgtgaagaacaagaaagtgtgacccattcacaggtgaaataaacagaaattgtccctaaggaaggacagatactggatttgctagacaaagtctttaagtcaactgtctttttttgagacagggtctcactctgttgcccagattggagtgcagtggtgtgatctcagctcactgcaacctctgcctcctgggctgaagtcatcctcccacctcagcctcctgagtagctggttctacaggcacatgccaccatccctggctaatttttaaaatattttgtagagatgcagtttcactatgttgcccaggctggtttgaactcctgggctcaaatgatttacctgcctcggcccccacaaagtgctgagattacaggcatgagccaccctgcctggcctcaactatcttaaatat

SEQ ID NO: 430206 - DNA, 594 bp, Homo sapiens
actacatgtgacaaataatatgtttacaaaaatagtttagaatagtcactaaaaaaacaagaattacaacccagagcaaggaacaaaacaaaatactgaggaaggggaagagtctgatttccagagttatcatattatggtattaaaaatatctagtttcaacaaaaaattataaagcatgtgaagaacaagaaagtgtgacccattcacaggtgaaataaacagaaattgtccctaaggaaggacagatactggatttgctagacaaagtctttaagtcaactgtctttttttgagacagggtctcactctgttgcccagattggagtgcagtggtgtgatctcagctcactgcaacctctgcctcctgggctgaagtcatcctcccacctcagcctcctgagtagctggttctacaggcacatgccaccatccctggctaatttttaaaatattttgyagagatgcagtttcactatgttgcccaggctggtttgaactcctgggctcaaatgatttacctgcctcggcccccacaaagtgctgagattacaggcatgagccaccctgcctggcctcaactatcttaaatat

SEQ ID NO: 430207 - DNA, 559 bp, Homo sapiens
gaaatactaaagggaatctttcaggctgaaataaaatcacactagaaagtaactcaaatccctaccaagaaacaaagaatgaaggtaaatctgactgcatagattaatacaaaagccagtattcttgcatttttgctttgcaacttctcctttttcccacatgatttaaaagacaaatgagtaaaacrataattataaatctgttaatgagcacacatgcacaaagatgtagtttgttacaacaacgtaaaggcagcagaatgaaacaacattggagcacagtgtttgtatattattgaagctaaggtagtgtgaattcaaaatagcttgttataagttgaagaggttaaatgtaacactgaggataacaatacaataactaaaaatacaggaaaggaaatgagaaaggaatctaaacttaaaaatataaactatacatgaaagaatagaatagtggagggactgaggggaaaaggtttaagacatacagaaaagaaatggcaaaatgcaagaagtaggtccttacatatcagtcattactttaaatgtaaatgaattg

SEQ ID NO: 430208 - DNA, 652 bp, Homo sapiens
gcacctggcacaatacttgaaatacaataagtgctcagtgaatgcttcctacttttatctgctaccctgggctagctctggactagatttccattggtctcctggactatctctgcctgaatgctacactttgtctcccgtggaccacttgtagttccccaaatgtgatatgaatcttcatcttctccatataatggacagcaggaaacaagaagccagctggatcagttcattcttttctcactgccatatataatgcattgctggactagctagccctaatttgcactaaaggaggggagagatggaaacctttttttttgcaatgagcaaaaggtgagagggttatttttggtgtgtttggttgggcccagaaaatttggctcaactgaataataggtttttaatawtttagatgaggatagtgaggttcaggaaggataagtaacctccctgaggttcacagtacgatagtagatacattggtatgagggcccattttcttggtcttggtactctttataacacaagatgctggtcataaaccacaaacagtcttgtcttcaaaagcttatttcctctgccccagcaaataactttcttacatgcagacacaattgaaattgttcaccgacaaccatctcaggcttat

SEQ ID NO: 430209 - DNA, 596 bp, Homo sapiens
attgcttacatcattttgaaaatgctaagctttcctggcttatttttcagaaaactggcctctcaaaatgtatggtattatttagagatgtgccacctgcaggtcctttatttaggggtggtggggagttgctgatacatgacagatgagttgctgatgcttgaccagccatcctgttatgctgctagatgagaggggaggggtgaaccattgctcatggtttagtggcctctactgtgcccccttcccctcttgagagactacttctgaactcccctaagacccctacatgcagagtgagaagtcagccacctgctatggaactacgtccataggaaactttcaaacttagtggaactctgacccattcagcaagtatttactgatcattatgctaggatatagggcaagagagaggaagacataatttgtactttcagtcrgcttgtaattaagctgaagggacaagacttactgatgcatcaagcggttggagaactgtgtaaggcagggtatgaataaacattcccttaagggtgagaaaggcagacaccagagtggtctagcgcataactttgcagcccctgtcgctgtgg

SEQ ID NO: 430210 - DNA, 519 bp, Homo sapiens
cattgccccagggtgatttttcctttttagttagaatcgcttgtatagaagttttccagacatcacctctttcccattacatttacctgtttggtgttctrttcttcaagaacatgattttgactaatctaacacgataaacctaccagatattcaggggatactaaaagttaacatgtaatctgtctgtggagaccttttattttaacagtgcttttttgagtaccatgtcttaacccaaaggactctgagtgaattttagacactacaggccctcaagtggataaaaattacagaatttccgtggcctttaatgttttctggtctgattgccaatttaatgcttgaatctcctgctaagtgattattctaaagccattaatggcatctctgaatatcactgattgctagagaggtatttttctgatattgactcataagaaatctcattatagtttccataattttatgttgataacattttcattctttttaatcttgggaaggcagattgttgac

SEQ ID NO: 430211 - DNA, 519 bp, Homo sapiens
cattgccccagggtgatttttcctttttagttagaatcgcttgtatagaagttttccagacatcacctctttcccattacatttacctgtttggtgttctattcttcaagaacatgattttgactaatctaacacgataaacctaccagatattcaggggatactaaaagttaacatgtaatctgtctgtggagacmttttattttaacagtgcttttttgagtaccatgtcttaacccaaaggactctgagtgaattttagacactacaggccctcaagtggataaaaattacagaatttccgtggcctttaatgttttctggtctgattgccaatttaatgcttgaatctcctgctaagtgattattctaaagccattaatggcatctctgaatatcactgattgctagagaggtatttttctgatattgactcataagaaatctcattatagtttccataattttatgttgataacattttcattctttttaatcttgggaaggcagattgttgac

SEQ ID NO: 430212 - DNA, 552 bp, Homo sapiens
tctgtggcccggagcctaagagaccggaagttcgtgtttccaggcgcttccggaaaccgcgggagagggtcgctgacgtggaggcgtccgaagggcagcagggtgtgtcggggctcggattaagacatcggagtcggagacctgagagatgttaaccaaattcgagaccaagagcgcgcgggtcaaaggtagtggagaataaaagggggaacatggaggttggatgtcaggagcggcgctgacaccggggaagagaaaatgggtagaggtgttggtcgaaatgggcccaccagacggacccggaggaagacggagggtgggagagaggttgggcctggctagcggttctccagtcccctcttctttggtgtgtccttgggcttcgatttacctataaagtggctcccacactgcaggggattccttagaccccctccctattctttcttccccctttctctcttggctgtgctcccgatttgtrttgttctgctccaaaggccctgtgatctgttggctttttgatgactgtgttatatggagtggccctgg

SEQ ID NO: 430213 - DNA, 629 bp, Homo sapiens
cttgctctattgcccaggctggagtgcagtggcgggatcttggcccactgcaacatccacctccccattcaagccattctcgtggttcagcctcctgagtagctgggactacaggcgcccgctgtcatgcccggctaatttttgtgtttttagtagagatgggttttcgccatgttggtcagactggtctctaactcctggcctgaagtgatcctgctgccttggcctcctaaaatactgggattacaggcatgaatcaccatgcccrgctatgggttttcatctttgatgaacaaagaatgacataagcagcatgaagggcttgagttagacctagggaggagcttccatacaggaggacttgacatcttccccttcccatgtgagttaaatgacatgtgctctgcccagagcctggcaaaagggaaggctgaactgagatcagggagaacttcaggactccaaagggccagagttggacgggaacacagaaatcactgaatccaacaactttatttcaaaggcaggtaaactactgtccagacaggtgacgtgactcacccatgatgatggcctgggattagaagccaagtcttccattcctggccctgagagctttgtgcttctct

SEQ ID NO: 430214 - DNA, 416 bp, Homo sapiens
agcagaggacaaacacatggccatatgtctgacaattcatcctgacattttaaaaaacaatagtaataataataataataataataataataatgaaaaaagacaaagataccacagttctgaagcaaaagaccaaaatgctaccattctcaggcacagcccttagtgcttagagagttggaggmaaaaaattttttttaggaaaggggaatgaaaataaaatcacagtgattaaaaacatggcaggatcttaaaataaacactccccagcccctaacctagggcagcaactaagatcccaaatcctttccctctcccccaccccaacctgctcctcagaccacaccacactccatcctgtccacaaaggcaatgaccccagtcaccatccaggccctgttttccaggatagtgag

SEQ ID NO: 430215 - DNA, 556 bp, Homo sapiens
ctaatgtacgctgtgtatatgtacacataattgctcgacactaaagagaagaggacctttgtggagcccctcatgtttataccacagaacccatacctggtacttgctatttctcagctgccatggttctttctgagggcagcgtcttgccaaagcttaccaaccgtttctgaaatagtatttactatttgaggagagctctgagttaagcattttcagttcagatgttgttttccccttgaattttcagcaaaccatgtggaacctctgcttcctcagattcctggtatggtgccatattgtggtcaaagagatgtccaagaagtcctgtttgcctcagatagtacctcacagagtgtcagtatcttaggagktcattactggtccagacattctgtcttcattaagtaatcaaagggaaataacattctggaaatggaataaaaccagccatacatataaaagagcaattataaataagaatgttaatttatcaatttataacaactgatagatctagtttgggaactggagttggtcatttgtacaggtatat

SEQ ID NO: 430216 - DNA, 446 bp, Homo sapiens
ctcactacttggatgagaacagtcactactggatccccaggagtctctcagatcttccaaacaggcctgcaaaagggccattgtactttcctcttcccgaaagccctatctctgtcagcatctcgtcctcattgccagaacttccaacaactatgaaaagcytgagattttatgccacttctaaactaataagtttgtctgttagtttcatgggtactgacaaaaaacatgagactcctgggtcagagacaaaggactttattacacttggcccagcaggtagcatgaacttcatatttgcattagttctccttgcctctaagttccactgggtgatacggagcagccaatctggatgctctgcatacagtaagtttatgtcatggttgaggaaccctgggattaggaaaccctagtattttaaagagcgtttacttgagacacaa

SEQ ID NO: 430217 - DNA, 493 bp, Homo sapiens
tcataattcaatgtcattaaatggcattcaatttatattttagactattatgatttcaatttgagacacaattgttttccaaatgaattcaatgtggggtatatttatgtaatagatgaaatrtatttcatctattttggaattgaataaattcaatttattcaattgtttggaattgaataaatacagtacgtataaagggaggatgaaaatgtacaactattggatgttgatagaagcattctgaataagaagcatttttacaataaactcaagtatatttttataatgtactttttaataatacactgattttaaaagtcttttttataatgtactttcatatattttttcttgagaaatcttgatcttgtattgacaattgcataaatatatttgtgcccagcacaatggcttacgcctgtaatcctagcactttgggaagctgaagagggagaattgcttagtccaggagttctagaccagcctgggc

SEQ ID NO: 430218 - DNA, 582 bp, Homo sapiens
tttacatgtcaaaataaattacaaattttatatttaatactttattttttccagaaaattaaatataaaaatacagaaaatgaacagaaaaaatataagtaagttacaaattctgggctaggaagcccaattataaaaagcaaaggaagacgccattattgaaaacatttagattttaaaacaaaaataaaccccctttttacatttaaaaataacatttaaaagtcaattgttraaaaaaagtaaatgactttaacaagtgacagacaaagaaaccatacccttaatgtggaaaaaacgcttacagatcaataataaggatgcacaaatgacaaaaaagtatccaaatgaagaactacgatgaaagttcaaaatcactattcatcttgtaaatacaaattaaaactagaataagatttcattttaaatctatcgaatactagttggcgtctttcagaaatgccaggccaaactattcctgatgctagaaatgttttgcctgacagtggctgaaaactatttataacatatggaaaggaaattacacaacttgagaaatttcttgcagtgaactcagaaatg

SEQ ID NO: 430219 - DNA, 583 bp, Homo sapiens
tttacaaacacacatttcattatcgtagtttaataattaaaaccagaactggtgtcgtgcccaattaatgtgccctggtagcatgcccattagtttttccattagtgaattcaacaatactaatgggattactagcatgggatgctaattgggcgtgacataagaaactggcttacttcttagcatacccttgctaatgatgaaattaatgagcattttattaaatgctgtctcatcaaagtgtacttagttagcgttaaaattgttacaaacgatgctgcattctaaagatcaggtgtctgagtaagtggttcttcatattttgtttggcaacaatctgaagcattaatagttctctacatcagaaatcaagtttaytggagacaaattcaagtaccttacctacagcctcagcatgacaaactcactttatacttacagcaatttagaatatcattttttgaagactattttaagattacttccccccatcaatgttgaaagaacaattctgtgatgacttctggtgtcatattatgcatgttgttctttctatttggaacatatcagacacattcaatag

SEQ ID NO: 430220 - DNA, 569 bp, Homo sapiens
gtagtattttataaagtatttgaacatttatttaagaggtgaacacagtgagaagagggcataatatgtaacttctgaataagtaggaacaaatcctttaattatttggcatagccaataatatatattagtttcaaaccaaaaatgtgtaatgtatggtcaaagattagtcaatttaaaatgtttccaatgtaagactaataatattatgttaaagctgctaaaaggttaactatgttaaactaaaaggttgaatgaactttccttcagtaatgataaatttatgaataaatgaataaatataaaagtaaagaacataacttatatcccaaattttagacctaagggaaaaataaaatcaccttgatttaaattttgctggtttttttcttttttttaaacagctaatttgatacctgtttttattttatttttttgccactctattatactcaccactggtaaaacaaacaggacattttagctttaatcttcttactacataacccaaataayttcagtcatgtttgcattaatgctgcattaatcatgttgttgcgtattaatga

SEQ ID NO: 430221 - DNA, 370 bp, Homo sapiens
ttgattacaatatttgtactataatgaatcggatgattggatctatcatgttgcttctaggatatctgctctgcattgtgttctgtttgccagtgaatactaatayagagtctttttgactcttagacacactgggaaaaataattaaaacaaaagctgttttctgtgttttgtaaaaacaactcttctaattctcaaattgcaatacctaaaatataaataaattcagagattaatttccaaaccagaggaaagcatatagaacataaaagttttgaaaattcttctcatatttcttatttatttttaaaatgaagggaaattacatgtacaatttgactcaagagggaattcacacatgaaacccttc

SEQ ID NO: 430222 - DNA, 470 bp, Homo sapiens
aaatgaatgattagaatttttgcttgttagaattctgcatttatagtccaaaattgatttgcttggatattgaacaatgagtttctgtcaaagcttccattaacggttagctttagtatattcattaaaagtatatatatatatatgtatgaagtctaccatcytaagtattttatgtgattaccttaccatattgtaataagtgtgaagacaaatgtgtatctttgattagtatcaaataactctcttgcatattaataccctcatgaagtcacatagaatgttgaacaataattcaagctagtggattgtggttattactgtaaatgtacccaaaccagcaggagttgacaatgaaactattgtctccatgctaataatgtctgatctcaagcattctgagggaaatttgaaaacaagattgctatgctatctctataaatataagaaaactcatgctaaaataaatt

SEQ ID NO: 430223 - DNA, 584 bp, Homo sapiens
catgtcaccactttggaacaaaattcatctcccataccctaggcacaggctgttaaaaatctcgaagttataatggacccttgagtcgcagctgactcaaggtgttgaatttttcttcccctctacagaaaaaaaaagaaaaaaaaaaaagaaaaaattcattttctttccttctagttccaggactatatggctgtgtattgctattaacttacagattgactgctcaatatgcttgatgataacactaataacaatcagtgttttatcacctggaaaatagacaaagcaagagcctgaattagaatagaccatagtgttgatgtttatttagtcttcccaaaatgtacttctaaatagattcagttcagtgagttcaaaacctatcagccagatttttgatgatatgatcctgctgttcagtacttttcctgagttctaatttacwtgagcattcatcttccaatctcatgctttcctgaaaaaggctctgcagtcattccctatctcttcattcttcccaattttgggaacttgtctgaggccgctggttatatatttgtattgcctccatctcagttctg

SEQ ID NO: 430224 - DNA, 382 bp, Homo sapiens
ataacaagatgattatatatggcatttatcacctcttgctcatatcccagacataatatccaactgaaagtatttattcatccatttgttaactcagtcacccaccaactattactgaacacctacattagactagcaaattttaagtgcttcaacaaagacattggccttgacctcaggaatytgaaattaggaaatgaaaaaaaaaaaaaaggtaggattgaaaataaaactggaaagggattatcaaaatccacagtacaccaaaaacaacacacatttccccccaagcaaagtttatgctttgaacaagtttatttctttgaacaagttcaggtacttctacaggtattttctcattcactccttattgtaaaactag

SEQ ID NO: 430225 - DNA, 571 bp, Homo sapiens
aactgtcaaacttgcttaatatttgattttccaggaccaaatctacagaaaatatgaaatgacatggcaaggtcagtgactacaatgcaagaagctttggtcttctattgtatctactgagtagaaaaatatccagactgccgttttgactatcaaaatacaagccaggaacccagtagctatatcaagactttctttagggggaactagtaaatgagagccaaaaatgtaatctcatacagatcaacagattggatttaaagggatcttaagtagtgatgattcccttttatcttctaagtattatgaacattttatcttatcagactggctagaatctgtggccacatgttatgyaatgagaaaatatcaagtgcatcagtagcaatgtagctaatcttccctggctattcagatgagaaatgacccatagtttaaatacgacccttttggagaacaaagaaagagcaaggaaagaacaaagaagacttctcttagaattttaactatcccagaacaaattatgcattctggactgcagggttttttgcttttttttttaatacttgga

SEQ ID NO: 430226 - DNA, 478 bp, Homo sapiens
taatgctgcatattagatataaggggaaaaaaaccctcaaaataggatacttgctgaaagtttttaatgaggctttaacagctctgtaaattaaagttctaatttgcacagttttgtgaagtaaacaaggagagaacagcatcagatgtaggctgctgcttgctgcctccactcaacacattttaagtgagggtcaaattgattttgcaatctttaattatatttctttaatttttttccaactactgaatttataagtatgcagaagaaatctgttttcaagcaactatatttctcacagttgaacttaataatgtagcatattaacacggattatataagctatgaaaaatacattacagaggtgcagtagcwtcaaggcaataactggtcaactgtatactcaagtgtctatttcatatttttactgactaaattccttcttaggataaaataaaatatagtcctttctatttac

SEQ ID NO: 430227 - DNA, 621 bp, Homo sapiens
cagctaatttttcagctttttgtagagatgaggtctcactatgtcacccaggctagtcttgaactcctgagcacaagcaatactcttgccttggcctctcaaagtgctggaattayaggtgtgagccactgtgccctgcatatatatgtatttatttggggtatttatgtggcaatatgttattactatacttatctgttcttttgcctatactatacatgcttacctactgcagtcttatagttagtcttgatacataagccttcctactttgcccttttttagtattgccttggctactctaagtactttcctctctcatgtgcatattaaaattagcttgtaaatttttacagaaatcctgggattttgagagggactatatggattctacagatcaaactaggaagacttgctatttaacaatattaagtgtttagatccatgaacatggcgtaactttccatttatttggtctttaatttctcacagtaattttttgtagttttcagagtggaggtcctacattaccttttagcagacttgtttctaagtcatttatgtgtgttagttctagtaagcatggtacttttaaacatttcattttctacttgttttttg

SEQ ID NO: 430228 - DNA, 621 bp, Homo sapiens
cagctaatttttcagctttttgtagagatgaggtctcactatgtcacccaggctagtcttgaactcctgagcacaagcaatactcttgccttggcctctcaaagtgctggaattacaggtgtgagccactgtgccctgcatatatatgtatttatttggggtatttatgtggcaatatgttattactatacttatctgttcttttgcctatactatacatgcttacctactgcagtcttatagttagtcttgatacataagccttcctactttgccyttttttagtattgccttggctactctaagtactttcctctctcatgtgcatattaaaattagcttgtaaatttttacagaaatcctgggattttgagagggactatatggattctacagatcaaactaggaagacttgctatttaacaatattaagtgtttagatccatgaacatggcgtaactttccatttatttggtctttaatttctcacagtaattttttgtagttttcagagtggaggtcctacattaccttttagcagacttgtttctaagtcatttatgtgtgttagttctagtaagcatggtacttttaaacatttcattttctacttgttttttg

SEQ ID NO: 430229 - DNA, 621 bp, Homo sapiens
cagctaatttttcagctttttgtagagatgaggtctcactatgtcacccaggctagtcttgaactcctgagcacaagcaatactcttgccttggcctctcaaagtgctggaattacaggtgtgagccactgtgccctgcatatatatgtatttatttggggtatttatgtggcaatatgttattactatacttatctgttcttttgcctatactatacatgcttacctactgcagtcttatagttagtcttgatacataagccttcctactttgcccttttttagtattgccttggctactctaagtactttcctctctcatgtgcatattaaaattagcttgtaaatttttacagaaatcctgggattttgagagggactatatggattctacagatcaaactaggaagacttgctatttaacaatattaagtstttagatccatgaacatggcgtaactttccatttatttggtctttaatttctcacagtaattttttgtagttttcagagtggaggtcctacattaccttttagcagacttgtttctaagtcatttatgtgtgttagttctagtaagcatggtacttttaaacatttcattttctacttgttttttg

SEQ ID NO: 430230 - DNA, 621 bp, Homo sapiens
cagctaatttttcagctttttgtagagatgaggtctcactatgtcacccaggctagtcttgaactcctgagcacaagcaatactcttgccttggcctctcaaagtgctggaattacaggtgtgagccactgtgccctgcatatatatgtatttatttggggtatttatgtggcaatatgttattactatacttatctgttcttttgcctatactatacatgcttacctactgcagtcttatagttagtcttgatacataagccttcctactttgcccttttttagtattgccttggctactctaagtactttcctctctcatgtgcatattaaaattagcttgtaaatttttacagaaatcctgggattttgagagggactatatggattctacagatcaaactaggaagacttgctatttaacaatattaagtgtttagatccatgaacatggcrtaactttccatttatttggtctttaatttctcacagtaattttttgtagttttcagagtggaggtcctacattaccttttagcagacttgtttctaagtcatttatgtgtgttagttctagtaagcatggtacttttaaacatttcattttctacttgttttttg

SEQ ID NO: 430231 - DNA, 408 bp, Homo sapiens
ttgctcattaaatttgcctcagaatataaaaactgaatgaaatataaaggaatgtgagttgaaagcactgttttaacgcataacacttcagcccatttcacataatgttatttatattttaaacatctagcttctagtaacactctgggtttaattgctattaaaaaaaaacctgatgcctacatgtctttggggatacaaataaatgaataaataatgccaacactacttgctgtttgtgagctgaaactaactgaaagacaaatccaaaaagtttagcagtgtcrgataaggaatatttgggtgataattatttcacctcctatccctctttcttacttttgtatacttcctattctatcacttccaaagaacagtctacaaaagttcctttccaccctgtagcag

SEQ ID NO: 430232 - DNA, 567 bp, Homo sapiens
gactagcactaaacccatagggcagagccccttgccttaaagaggcatcaactccgtgctgtaatttacacaggcaaagcataatccgtgccaaccaatgggtaatgaaggaatattaacacgagtttgccaaaactttgtgcttgtgtaaaaatacatcagaaagtcatttttaaaaagactttcattatttttgtttttgattgctcctgtggagcacggctacaccataggcaatgtgccaggggtaacctttatttatttttttttttagagatggagtctcacattgttgcccaggctggagtgcagtggctatgcacaggcataatgatagctcactacagcctggaactcctgggctcaagcaatcttcctgtctcagcctcccaagtagctgggactacagacaggtgccactacrcccagtagacttaatttttaagagaagttttatgttcatagaaaaattgagaagaaggtacagagttctaccatatctccccacccatgcacagtctcttccaatatcaacatccggcacccaaatggttcatttgctacagt

SEQ ID NO: 430233 - DNA, 514 bp, Homo sapiens
gctaagccattcagaaatttcttcacccagagtctctcttcagagtttagagttacatatttgtattaagattttagcaggccattcttggctataatctcaactaggaaaggaaagctgccaaagattttttagtcctgggctcagggaagcaatggagaaccaattacataatgtttaaattgaaatttgctagattccctagggttttgggacacagaaacctgaactttttagtttcataaactactarcctagtaatatccaatagccaaaaactactttaccagtactgtccaatagaactttctccaatgaaggaaatgttctaggactgtaatgtttaatacggtaaccactagccttataataagactattgagcacttgaaatgtagctagtgagaatgagaaactgaatgtcaaatttcttaattttaattaactgtattttgaatttaaatagccacatatgattcatgactaccatactggacaccaaagatgtagacaga

SEQ ID NO: 430234 - DNA, 182 bp, Homo sapiens
cactaccttaaccagttattgttctggcgatcacaataatttgcacaaaactaccatcctacacatgaagagagaagaggatccattatttytaaactgcacatatagcagcaatgatgacagcaaccaccattccctaaagtccaccactaataaaaggtagttgctcagactgtaattat

SEQ ID NO: 430235 - DNA, 580 bp, Homo sapiens
ttagtataaaatgttacatccaattgttaccttaggggtcatggtattatttatcacagccactttcttaccctgctaagcagggatctctcatccaactcattttcttcaatttacaaagctgggcattcctgaacttctctgaaagtgacatcatcctttcatttgtttgttttgccccagcctgaaggatttccctgacaatcacagcaatcatcagctgcgcttttctataggcttgctgtggatcgagtgtgccaacaagcaccgatttggttctyataatgcctccagcgatctggtattacaaggagtagcccctatttattttgagaagctgccatgttaaagaaaaaaaaaagcatttaaaaaaagcagtttggcattcagaagactgttcaataacatgctttgcaatcatatttctttaaaaaatggattcttttttttaatcatgaaaaatgtattgcttccaccatatgggacaacctacgactcaccaaccgatttaagatgcggcatattgagctgaccatatgttacagtgctgttgaatggctgagtgattcatgcccgtcac

SEQ ID NO: 430236 - DNA, 515 bp, Homo sapiens
cataatattatattaagaaaaaatgccctgtttaatcaatatagagggagaattctgtcacagaattctgcaaactcaaaaaatgtccaaatgaagccctaagccaattctgaaaggacattagttaaaaataacaatacctgtgaaaacgccatgggaatagactgttgaggtgattgttcagaaagcatattgatgtcataccccacaacttttcctcttgtaacattatctgctggcttctcccaggagatattgagagagtacgaagagaggggaaagactgaaggagggatcatgaatacaggtgctatcaatgagaacaataacaataacatcaaaacaatgaatgtcgtccctatatatttttaaattkaattcacacattcatttagtttctgaaatacctttaccttttaaaatattctgctttgaaaaagtccaagaatatgctggtatatgtaaaaggtattcactttttaaaatgttatctgaaagtatattctccatcttca

SEQ ID NO: 430237 - DNA, 598 bp, Homo sapiens
tttccctttcccccctgccactcctgagctctttacagggattttaaatgtgctaaccaaaggtgtattatcaaaggaactcattgcactttcattagctagtgacccataagattacgagggaccagtattgcagtttcacccattacttttcatttctgaccttgattttccccttccagamtgccatgcctcatcacttgtgctatcatggctctattatttgtccaagatggctggtagtcattaagagatgctcaagcacaatgcgtattttattcatgaaatgattcccttggacatcaacctaaagctaccctcatcctccatattcctaacaggtcaagtttagatcagggtttgggtttctttgatatctacagattaaacacataacaaaagtgtattttttttcttaaaggctcatgaaatttgaagtgttttaatataaaaaataaagtggaggattaaaaatttttgccttaatgaagataatccagaaaatttagatatgttgtcctccttccttatcatcatgccaactgcttacaagcacacttgtgaattatagattttgatgtccacgattctgtcatta

SEQ ID NO: 430238 - DNA, 553 bp, Homo sapiens
ataattcttttattttctaaatataaagcaaccccactgaatgagctacagctcccctaaggtagatctcgagctgttctctgtttcacatcttttaaggcaagtcaacataatttaatttgcctagsatttgccaagaaatatggctgaaaaagagagatgtaacctggttctttatgcaaatatcaggaaaccctgatagctagctatttatcagtcagtcaatctaggagccctaaacaagtaactcaaattagtagtccccaaatttaagacctatggctaggccttcacgggttaacagcaaaatgaaaaaactaaggacaatataaattttccataaacccaaatttattaaacttaaatgaatgtttatattttttctcctttttactttttgtttttaatacagcctatcttttatgaaattatactaattttttttaactgtttctatttgctaagataaacagcaatcccatgtgatgtccccaaatctcttttgaaatatccttgaaatcctaaactcttggaagcacctattacttttata

SEQ ID NO: 430239 - DNA, 595 bp, Homo sapiens
atcagcagtgtgaaaatggactaacacacttctctcaggcatttacctagctgcggaattgctgggtcatatggtaattctatgtttaacttgttgaggaactgaaaacatttcttttttcatagtggctgtaccatgtttcattcctactagcaatgtatgaggattccgattactctacatccacaccaatagttgttttgtttctgtttgcttattttttaattatagccacctagtaggtgcaaagtgctatttcattgtaggtttgatttgcattctctaatgactaatgctagtatcttttcactgcttattggccatttgtgtatcttctctggggaatagcttaatattgaactttgytcatcttttaattgaattgtgtttttactgctgatttgtaagagttcttgaagcattctagatacttaatacttgtcagacatatgtttgcaaatattttctcctattctgttacttgcttttcattttcttgatagtatcctttaatgcataaaagtttttaattttgataaaatctaatttatcgattttcctttggttgcttgtgcttttggcatcatatataaga

SEQ ID NO: 430240 - DNA, 606 bp, Homo sapiens
aatatctaaacagttccttaatggagagttcagaacaacagatctgacaaaaaattatggtctaaccaaagcttctgaccaaatcttactgtaaaacagtaataacaattcaatttatcagttggtagaataggtaggtgccttcaaaataagactaaaagggacaacagagactaagtccatttaacatgccaatggagaggcwtggcaaggattggatttgacagcagagtagtacagcggtcagcagctaaggcatctgagtctaacagagtttggtttgaatccttcagctgatggtacccaggtaatccgagaaagccactaatattttttaccctcttaggtgttatattaatttcgtattacattttaacacattttgaatcgagggatgacctgcttatagcaaagcacatgaagtgcggtaatgtgattggtcaccactttgagacataggccatgttcaacaccccaggattccccacatccctccccaggccataccatgtaaccactccgatggctgctgtcaccattacagagttttatctgttctgaaactttatctgaatgttcacttatcatcatgattgatcttggcca

SEQ ID NO: 430241 - DNA, 611 bp, Homo sapiens
tgataacaacacaaaccacttgataagagtcaaagaagctaaagaaacatcaattacagttggaggaaacagtttttttgtgattaagcaaatgaataaacacacaagaagtaaaacctttctttattaaatacctgacaaactatgtgagtcaataaatgtttttgtagaaataaaataccttaggattaaggaaaaaaataagaaaaaaatattcataaaattctgggagcagaaaagacggtggctatttcaaaatccatgatcagttttccagcttktgctgttttgccatcatttgactccaaaaacgcaagatgaattttgctaaacaatgcaagatgattccaggttagataagagttaaaaatacactattataagaaatcagtagttaattcctaactttttaaattatgttttgcaaactcacagcatctcaataacatctttaattcccttttatttttaccagattttgtaagttgtactaacacatgtgctgcaaagtacctttaaaactaaaaggaataatggcaaagaacactaacttcttatagcacaggcctttttattaagtttttaaatataactaagtataactaaaaaaa

SEQ ID NO: 430242 - DNA, 540 bp, Homo sapiens
tacaaattgaatgcaattgctatcaaaataccaatatcatttttacaatactttttaaaaacgtaaaattcatatggaaccaaaataagagcccgaaaaagagcaattctatgcaataagaacaaatctggagccatcacgttactggacttgaaactatactacaaggctatagtttccaaaacarcgtggtaccagtatacagtagacacatacaccaaaggaacagtatagagaacccaggaataaatccaaatacttacaactgacttaattttgacaaaacgtacaaaatcataaattggggaaagtacccactgtttaataaatggtgctgggaaaactggctagccacatgtagaagaaagaaactggatctctcaacttatacatacatccattaaagatggatcaaagactgaaatctaagacctgaaactataaatttctagaagttaacctagaaaaaactcttctggacataggcctaggcaaagaattaatgaataagacctcaaaagcaaatgcaaacgtaaacaa

SEQ ID NO: 430243 - DNA, 611 bp, Homo sapiens
tgataacaacacaaaccacttgataagagtcaaagaagctaaagaaacatcaattacagttggaggaaacagtttttttgtgattaagcaaatgaataaacacacaagaagtaaaacctttctttattaaatacctgacaaactatgtgagtcaataaatgtttttgtagaaataaaataccttaggattaaggaaaaaaataagaaaaaaatattcataaaattctgggagcagaaaagacggtggctatttcaaaatccatgatcagttttccagcttgtgctgttttgccatcatttgactccaaaaacgcaagatgaattttgctaaacaatgcaagatgattccaggttagataagagttaaaaatacactattataagaaatcagtagttaattcctaactttttaaattatgttttgcaaactcacagcatctcaataacatctttaattcccttttatttttaccagattttgtaagttgtactaacacatgtgctgcaaagtacctttaaaactaaaaggaataatggyaaagaacactaacttcttatagcacaggcctttttattaagtttttaaatataactaagtataactaaaaaaa

SEQ ID NO: 430244 - DNA, 629 bp, Homo sapiens
ctcacaatggggagcaggccagcttcagtcacaacaatgtggagataaggagagccatggaaagcagaagcaacttagcttctgccaactattgccatgtgaaatctattctaccagatctttgcaatttcaggagattgtaaatcttctgtttgttgtggacctgctgatgttagcatttggttttgtttaataatcaaacattctacggactgggtcatatctggaaatgatagctaccagtttaatcttgctccccgccccgccccccctgcttcagatgaacattttccaaacaccccttttctctgagtcagataggaaaggattcctgattgaaattttcaacagcttcaaacccagccctgttatttcagtgtccatggcgttctgtaaactgacctgatgctctccatgcaaaacttccatttccagcagttgatgtcatcttctcaatcccaggtgatcccctcatgctcatttttcacctgtgtttgttttcctattctcttcattttttttytataataaccctcactcctccccacctctccattcagcaaattcttatccttgcttttaatatcaatcaaatgcttgctaatccaagccttctttcaccacatctg

SEQ ID NO: 430245 - DNA, 625 bp, Homo sapiens
gcattatgaaacaaatgtactggaattttgggatttcctcaatcctcaattttatatacttaaatttggaaataggcagcactcttcttagaagaaactttattggaacttggccttgaagggtaagtggccagtttctaaactgtaaaggtggaagggctttctggccagaaaatacagcaagatcaaagtgcaaagataccaaagagaatggtatattcagagaacagaccacatttcacttacgawtggcagaactactgctgtaaaacaagagtaatgttaggtcccaaagctatgcaaggtggttgggccagattgtcatccctctgttgaatcctgcgatagagattttgactttattctgttaattgcagagggttacacttatttttaatgagaagatctactaagaataaaatcaatatcaccttggaatttgtgaaaaatgcaaattcttgagcccaccccagtcttaatcagcatgtctagggctaaagccctggatacattatgaaataagacctccaggtgaatctaatactcagtgtgtaggggcttgtttactcagaaagctaaaaccaaagcaaaataagatcattaaagaccttctcataagcttcca

SEQ ID NO: 430246 - DNA, 567 bp, Homo sapiens
tttaagatgtttttcagatgccaactgctcccacaaagtcactgtagatcacttgtgccagagttgattgctctttgagatacagaaggaagctttcacgatttcaaacatttggccttgtattataaatatgtatactcttatttttcttcctatgctcgaatgaaaggtccttgaaggcatgaaatccaactggcccatcttaacttgctaccgtctctgcccttattcatgtcaggggatccatcaaaatatgttaatgaatataagaatataattatcctatttacttttttgagatggagtcttgctctgttgcccaggctggagtgcagtggcccaatctcagctcactgcaactcctggttcaagcgattctcctgcctcagcctccggaatagctgggactacaggcgcgtgccaccacgcccggctaaatttttctatatttagtagagacgcggtttcaccgtgttagcaaggatggtctcaatcttctgacctcgtgatccgcccacctcrgcctcccaaagttctgggattataggcatgagccgcctggacccc

SEQ ID NO: 430247 - DNA, 599 bp, Homo sapiens
gactttcattagacatcacttttttcacaggatgtagtgggctaggaacagaggtgactctgccataattctccaatattcctccctaacattgccctacccttcctaatgtaggttttatttcttccagcaatgtttgctagggtaagcgtgcaaaataggagcagctcttcatacttctgtacagaaaagaccaacacacttctgaacattgatgcagctcatgaagaaaaatatattaaagttagttctatagatgaggaactggcaattttccgtgagactcagaaaaattcctaaattctaaaagctaaaaaaaatatggagacaagatgyaaggaagtctaatcgcagattctttcttcctctgctattcatattgaattctgtacaagccataccaagggaatacacaccgtgaatattaatggttatcttaataaaaggtctaacattagtggtagcagctctaataatagctgtcttcttcagaccctaacatacgccctgccttgcttagctcaattccaataatcacagcagctgtacaagatggcctgaaaatcttgcaatttacagaagagggtaactgggactca

SEQ ID NO: 430248 - DNA, 555 bp, Homo sapiens
gagcaggtggcaggatccctggagtttaggatttacaggctccagtgagctatgatagcgccagtgttctccagccagggcaacagagagagaacctgtctttaaagaaggaaaagagaaagaagaaaataagtattctaagactaaattacctgaaattgaataccattttgtcttataaacattgtttttaaaataattataaagtataaatgccatagataatgatgtaaaataaagggttaacggtggattatctatatacacaaacgtacgtcccttaaaaaaagtgtaaagacaaaggaaaaagataraacagtatgagagtaatttgatctagttgaaagatgaccagcaatgacattaagtcacaaaggaattgaacttgaaggaaacaatatacatttcttaacaattagcaattaaagcacacaataaaagtggcatcactttatcatctttcattgtatgaaaacactaataccaaacattaaggagtcacataaactattaataatgcacttaaaagaactgaagtgggagcataaacaaaga

SEQ ID NO: 430249 - DNA, 519 bp, Homo sapiens
gtggctggggaggcctcacaatcacggcggaaggtgaaagacacctcttacgtggcggcagacaagagaagagtgacagccaagcaaaaggggtttccccttataaaaccgtcagatctcacgagccttattcactaccgctggaacagtatgggggaaaccacgcccatgattgaattagctcccactgagtccctccaacaacacgaggggattatggtaactataattccacataagatttgggtggggacataaccatatcgctcaggaaggtagagagtcaaatggtgkttagcaagggctgagaaaggaatgaggagggggagacgaagataagttggttaaggggtacaaaaatacaggaagatagaaggaacaagactcagtatttgctagtaggtagggaaattatagtttacaataatttattgtatatttcaaaactccgaaaagaattaaagaattaaaatgttcttagcactaataaaaatgtttgaagtgatgcatagtccaatt

SEQ ID NO: 430250 - DNA, 519 bp, Homo sapiens
gtggctggggaggcctcacaatcacggcggaaggtgaaagacacctcttacgtggcggcagacaagagaagagtgacagccaagcaaaaggggtttccccttataaaaccgtcagatctcacgagccttattcactaccgctggaacagtatgggggaaaccacgcccatgattgaattagctcccactgagtccctccaacaacacgaggggattatggtaactataattccacataagatttgggtggggacataaccatatcgctcaggaaggtagagagtcaaatggtggttagcaagggctgagaaaggaatgaggarggggagacgaagataagttggttaaggggtacaaaaatacaggaagatagaaggaacaagactcagtatttgctagtaggtagggaaattatagtttacaataatttattgtatatttcaaaactccgaaaagaattaaagaattaaaatgttcttagcactaataaaaatgtttgaagtgatgcatagtccaatt

SEQ ID NO: 430251 - DNA, 519 bp, Homo sapiens
gtggctggggaggcctcacaatcacggcggaaggtgaaagacacctcttacgtggcggcagacaagagaagagtgacagccaagcaaaaggggtttccccttataaaaccgtcagatctcacgagccttattcactaccgctggaacagtatgggggaaaccacgcccatgattgaattagctcccactgagtccctccaacaacacgaggggattatggtaactataattccacataagatttgggtggggacataaccatatcgctcaggaaggtagagagtcaaatggtggttagcaagggctgagaaaggaatgaggagggggagaygaagataagttggttaaggggtacaaaaatacaggaagatagaaggaacaagactcagtatttgctagtaggtagggaaattatagtttacaataatttattgtatatttcaaaactccgaaaagaattaaagaattaaaatgttcttagcactaataaaaatgtttgaagtgatgcatagtccaatt

SEQ ID NO: 430252 - DNA, 590 bp, Homo sapiens
gaatctcagtccgaaatcacagacgtgcaagcatatttcattctgagttttctatggcatcaatttaagtttgagcttaatacaataatgttttgatttcagagtcttatgaaatgccaaagcatgtgtctgtgtgtgtgttttgggctacggacaagggagggctgtctcagtcacttcggactgctagaacacattacctagactgtgtgacttagacaactgaaatttatttctcacagttttaatgactaagaagtacaatattatgatgcgggcagattcactgtcttgtgaggccctcttcctggtttgtaggcagcctcttctcactgtgttctcacagagtggagagcggcaacagagagcaagctctgacatttcttctgaagagggcactaatgccattcatgaggactacactgtcatgatctaatgacctcctaataccatcacattgtggggttaagagtttaacacaggaattctgggaagacacaggcattcagtctataacagaggtcatttgttgtctgttcactgcaatatcacartaacatccacttatcccttgccttacaggtcctatg

SEQ ID NO: 430253 - DNA, 561 bp, Homo sapiens
tgtcagtgtgatcagatgatgctatgaacttttaaaaacgttcacaaaatgggaagaactataagaagtaaaccatttatgagtcataaataaggaaacataaatgaagtattaggcaaagttgtaggtttcacagcccagtaatgataacrggaaactggccagcacattccccacctcttttgggagaatgtgctttgccatgcctggaattctttttaaaatgtgcaggcaaacattcgaagaatttaggggttatttttatttttgccaaaatgctacttttacttcaaaaaagaaaagaaaaaaaaaactccaaaaacttgttccaaaagcaacacggacttttacagaactcatccatttctacttaaaaaatgatattttaattaagtaaagatatacatacattaattaaatttagggtttatatcattttaaaaatccgtattgtactttagaaaaattgaatggaaattgcattaaatttaattgacattaaatttaattaaagtcaattgactgaaataaatgtttgctgttcaaaataaatttcataat

SEQ ID NO: 430254 - DNA, 579 bp, Homo sapiens
ttcgttatttgccataaatgtcagtgtgatcagatgatgctatgaacttttaaaaacgttcacaaaatgggaagaactataagaagtaaaccatttatgagtcataaataaggaaacataaatgaagtattaggcaaagttgtaggtttcacagcccagtaatgataacgggaaactggccagcacattccccacctcttttgggagaatgtgctttgccatgcctggaattctttttaaaatgtgcaggcaaacattcgaagaatttaggggttatttttatttttgccaaaatgctacttttacttcaaaaaagaaaagaaaaaaaaaactccaaaaacttgttccaaaagcaacacggacttttacagaactcatccatttctayttaaaaaatgatattttaattaagtaaagatatacatacattaattaaatttagggtttatatcattttaaaaatccgtattgtactttagaaaaattgaatggaaattgcattaaatttaattgacattaaatttaattaaagtcaattgactgaaataaatgtttgctgttcaaaataaatttcataat

SEQ ID NO: 430255 - DNA, 561 bp, Homo sapiens
tgtcagtgtgatcagatgatgctatgaacttttaaaaacgttcacaaaatgggaagaactataagaagtaaaccatttatgagtcataaataaggaaacataaatgaagtattaggcaaagttgtaggtttcacagcccagtaatgataacgggaaactggccagcacattccccacctcttttgggagaatgtgctttgccatgcctggaattctttttaaaatgtgcaggcaaacattcgaagaatttaggggttatttttatttttgccaaaatgctacttttacttcaaaaaagaaaagaaaaaaaaaactccaaaaacttgttccaaaagcaacacggacttttacagaactcatccatttctacttaaaaaatgatattttaattaagtaaagatayacatacattaattaaatttagggtttatatcattttaaaaatccgtattgtactttagaaaaattgaatggaaattgcattaaatttaattgacattaaatttaattaaagtcaattgactgaaataaatgtttgctgttcaaaataaatttcataat

SEQ ID NO: 430256 - DNA, 606 bp, Homo sapiens
tcgtacttttaaaatagagtcatataagacaaatattatatagtgtggaayctaagttctttagaaaatgaaaagggaactccacctaatatgtagatattcaggaaataaatcatgtaggtagaaaacacctcctatattttcttttggttatacatttttaaataaatgttataaatttatttcataaatttttggtagataagtcagaaattttttcctttacctttccaaaataaagaatctttctgctttaatttcacagccttttgacagaccacttacctattccatactcaccaattaattgcttaatttggctaagacctgcaaggctgtgatctaaaatcccttcttaataaaagccttctcggcctccagctctgatttctcattgcgtcttacatgcagatctacaataatacgttcacactgcattgtaaatgaattttcccttttatctgtctatgtgcttcaggaccataataaatcaaggataaactcagtgtctgacacccaagattagcaccttttgttggaagaagtatgaatgaacaaatgactcagtgaatgacacaacacacttcattttctgctcattgccag

SEQ ID NO: 430257 - DNA, 521 bp, Homo sapiens
aataagtgttgtgtgtattctgactgctccacgagctgtgcattcccctgtctcccttactttcctggaacttcactattccctgagacataataacatgaayattagacataataacattaatatcaaatattactaatttgatattagtaatatcaaatactctttaagtatttgagtgaaagtaaaagtcacacttcatttctcttatgttgaaacaaaaacccagaaatgattaagtttagtgtggaaggcatgtttacggaaagaagccataacataaaagtgcaaggtgaagcaggaaatgttgatgtagacgctgcagcaagttatccaaaatttctagctaagaccattgaagaaagtggccacactaaacaacagattttcaatgtagacaaaacagtcctatgttggaagaagatgccatttaggacttttatagctagagaggagaagtcaatgccttgcttcaaagctttgaaggacagactgactctcttgtctgaggctaacgtagt

SEQ ID NO: 430258 - DNA, 562 bp, Homo sapiens
aaaactaaaaaccttctagaatgaattctccattctagatgtcattaggaattcatgattcacaggaggaggtcaaaatatcagcacaaacagtttggaaggagttgattccaatcctcatggatgactttgaggcactgaagacttcggtgaaggaagtaactgcagatgtggtggaaatagcaagagaactagaattagaagtggaacctgaagaagtgactgcattgctgcaatctcatgatcaaaytcaaaaggatgaggagttacttcttatgaatgcataaaaagtgtggtttcttgagatggaatctactcctgttgaagatgctttgaacattgctgaaatgacaaagaaagatttataatattacataaacttcattgatggaacagccagaagatttgaaagaagtgattccaattgtgaaaaaaagttctactgtgagtaaaatgctaccaaataaaatcacatagtacagagaaaacttttgtaaaaggaagagtcagttgatgtagcaaacttcactggtgtcttaagaaatcaccacagccaccctga

SEQ ID NO: 430259 - DNA, 619 bp, Homo sapiens
ctcattttgaaagccaaactcttctgttcagagggacaacattcaaatcaccatgcaacattgttttcatagttacagataacgtaatttgagtttttcccctataatgcttttggggaaaaaataaagaggataataagagttttatcccagaatgaggtcaccactgattacttgggcccaatctcaccacatctagatagagcaaactccatcatacctaatgcctgcatgcaatttttttcctcaattttmtaaagaacaagaaacatctgcctttttcagtctcttcacagtatccaaccccatgcacagatgttttcaaaaccacgttgtctgtgaacatttaaaggaatactatatttgcataaactctgggaattccaagctctgtgctttccaaactgttttagttttttaaatcaacatttttttgttctgtacccatcattttgttttactcctcataaagcagacattgtgtgcacacatctgttaaatgtgggctgcatttattgcagttctgttcttccagaaacaggaaggattaattaccacagaccggctctagaagcacccccgtgtttcttaacacacaaaattaattcagagttgacaa

SEQ ID NO: 430260 - DNA, 581 bp, Homo sapiens
atccactaaaaatgtgtcagaaataataaatgaactcagtaaaatttcaagatataaattcaacataaaaaaatcagaagagttactctacactaacagtgaactacctgaagaagaaatcaagagctatttacaagagctaaaaaataataaaatacttaggaataaattcaacaaaggaggtgaaaaaacagtatgccaaaaactcataaacattgatgaaaaaatagaataaataartgaaaagatatctgtatttacagattggaagaaataaattgttaaaatgtccatactgtcctaagagatctcgatattcaagcatacatttttcatagaaatagaaaaaaaatcccaaaatgtgtatggaaatcagcagacccagaatagctaaacaaacaaacaaaaaaaacttgagagaaaagagcaaagctgaaggcatcacatttcctgattttaaactatattacaaagctgtaacaatcaaaagagaatggtaatggcataaaaactgaaaaatagactaataggaaagaatagagaacccagaaataaatccacacattcacagccaactgatt

SEQ ID NO: 430261 - DNA, 550 bp, Homo sapiens
gatgaacgttaagtttcattcatctggctcaatattgcatgaaaatgtgggtaaagtctgtgtcgagtytgtggatctaagaaacatatgaacccttcttttcatcttctgtaataacctcttgatataatccatttcctataatgtttatatgttaatatacataaagtataaatgcatgaacttcagtttatgtgtttacatctgcagctcgcttgtaccaagtttgtaatgtgaaaaaagtcttattagagcctatgtctctttgagaatatcaggaaatcaggtcaatgcatcaagaagtttatttatctgatagacttaaggtaataggaattaaacaatgagaagcaaaatagaagaaagatgttagaaggtttgagacaagtgacagactgacataaaagaataggaaaaaggaaaagtagtttgattttatatgatctgaaatgtttcccatttatttacattacctgaaaccacagtagcatagacatgcatactctaacttcatgccactgacattctttgcagcagcaagaataaattg

SEQ ID NO: 430262 - DNA, 484 bp, Homo sapiens
gcagtaaaccatggtccaaaaatattaagtggaaaattccaggaataaacaattcataagttttaaattgtgtgctgttctgagtatggtgatgaagttttgtgctctttctccatcaaactcgggatgaatcattcmtttgttcagggtctccaggctgtctctgctccccacccattagtcactcactagccacctcagctatcagattgactatttcagtgcttgtgtccaagtcatccttatttgacttaataatggcctcaaagcacaaaagcagtgatactggccatttggctatgccaaacagaagctgtaaagtgcttccattaaggaaaatgatgcaagttcttgacttaataaagaaagggaaaaaaatcatatgctgaggttgctaagatatacagcaaaatgaatcttttatctgtgaaatggtgacaaagaaaaaaattatacatagtatatatagggttcggcactatcc

SEQ ID NO: 430263 - DNA, 484 bp, Homo sapiens
gcagtaaaccatggtccaaaaatattaagtggaaaattccaggaataaacaattcataagttttaaattgtgtgctgttctgagtatggtgatgaagttttgtgctctttctccatcaaactcgggatgaatcattcctttgttcagggtctccaggctgtctctgctccccacccattagtcactcactagccaccycagctatcagattgactatttcagtgcttgtgtccaagtcatccttatttgacttaataatggcctcaaagcacaaaagcagtgatactggccatttggctatgccaaacagaagctgtaaagtgcttccattaaggaaaatgatgcaagttcttgacttaataaagaaagggaaaaaaatcatatgctgaggttgctaagatatacagcaaaatgaatcttttatctgtgaaatggtgacaaagaaaaaaattatacatagtatatatagggttcggcactatcc

SEQ ID NO: 430264 - DNA, 484 bp, Homo sapiens
gcagtaaaccatggtccaaaaatattaagtggaaaattccaggaataaacaattcataagttttaaattgtgtgctgttctgagtatggtgatgaagttttgtgctctttctccatcaaactcgggatgaatcattcctttgttcagggtctccaggctgtctctgctccccacccattagtcactcactagccacctcagctatcagattgactatttcagtgcttrtgtccaagtcatccttatttgacttaataatggcctcaaagcacaaaagcagtgatactggccatttggctatgccaaacagaagctgtaaagtgcttccattaaggaaaatgatgcaagttcttgacttaataaagaaagggaaaaaaatcatatgctgaggttgctaagatatacagcaaaatgaatcttttatctgtgaaatggtgacaaagaaaaaaattatacatagtatatatagggttcggcactatcc

SEQ ID NO: 430265 - DNA, 489 bp, Homo sapiens
tttctgggggcagcctcactgtcaaattctttgtcccaatgttgccacactaygtgttctgatttggggttcaaaaaatatggttaccaggggaagcaaaagcaaaagcccattgctatgggtgacacctaaaaactggggagtactactttaaaaaaaaaagttgagaactttcagaagaattcactataaacaattcccaatttttagttcctcgctccctttgaatggaatactcaaaggtttaatttgacctccttgacaactagccctttttatggggatgaaaatagatcagtgcatgtgatgtgtcattacactcgaatatttcgcacagtaaccgcgccagaagcattcgttaaatcggcactatcaactttaattcttactcctccccgctgccatctaagataggacagccctctattttcgctattctggagtagccaacattccagtctgcaggactgaagtgaaatttaatcgttc

SEQ ID NO: 430266 - DNA, 608 bp, Homo sapiens
aacaatgtcattagtggaaaaactggtgaaatgcaaatatagtctggagtttggccaagaggaatgtragatgatggcttcttcattttgacaaatgtgccatggcagagtaagatgataacatttggggacactaaagctgagtgagaggcatgtggaagctctttgtaccatctttgtaatttctcagtaaatctaaagtattcaaaattgtatttataaaaaaagcatatacaatcttaatacatacatagaataaaaacaatatttcaataaattttaaaataatttttataaataaaacttttagtaatacattaaaataaatttaaataaatatatattttcaataaatacatttttctttatatatgtagaagaatctaacattctggaaagatagtggtgacaaagcaactcagtagtaaaaccaaaaaccaatggaaaaaaattataataaatctaggtgacacattatctctatcaaccccaaaatgccagaggtggagatgaatcaccaacagccagccgatctgcaggctaccagaatctgtgcaagaggaagcagaggcaagcaactgatggatctgtggataggaaaaccccga

SEQ ID NO: 430267 - DNA, 614 bp, Homo sapiens
ctcttgaacctgggaggcagaggtggcggcgagccaagattgcaccactgcactacagcctgggtgacagagcaacactaggtctcaaaaaaaaaaaaaaaaaaagattaaatgagagctgagaagtaaaataattatgaaaaagaagagtgtctaatgtctatatgctttgacaactactactataaaaatatgagaggaggggaattgggagaacaaaggcaaaatgtttaagtgttttcagtaattgcattgatagtgatggtatttgtgtggatattctggattgtaagcggggagcgtgaggtagagcaaatgactatttacaggatatttcagttctattattctctcatccttgggaaacagaattttctgtattraagagtagaacccccatagtcttaaattttaattggaaatgtcagaatgtgaagcattttgtcttttcaaaagtttctattttttagctctgtccactaaaaaaaccttaagaaatgacaaacccagaagcaataaacatctcttagtgcacagattgtgatcctgtgattctcattaaaagaaaccaatactttttggagaataactgatttggagaatggtcctaaaac

SEQ ID NO: 430268 - DNA, 490 bp, Homo sapiens
aacatcatctatcatcctgacaatgattgttgacactgggctgtgttgtagacaaaattaaggtctgtaaaaatgtttatgtcctaactcccagaatctgtggatgtgttacctttatgtgacaatagacactttgcagatgtgattaagggtcttaagataggaaggctactagtgaaaatgtgctggaaagatagaatgtcatcagagatgagatgcatggaatagaattatggggaactgcaatcattggtgtagactctctcaatcagggatccctgagagaagtcagccctagtgccttagggcatctaaaatatgtaatgaataaaactcactcctaaggagagaatatcttctgaagtctcaggccygggtgatataagtcccagggaggaggacctcatttctcatctcctctccatagttgaatgtgcctggggcaccagtgattttccaggcctttatttttatcagaggcctttcttta

SEQ ID NO: 430269 - DNA, 490 bp, Homo sapiens
aacatcatctatcatcctgacaatgattgttgacactgggctgtgttgtagacaaaattaaggtctgtaaaaatgtttatgtcctaactcccagaatctgtggatgtgttacctttatgtgacaatagacactttgcagatgtgattaagggtcttaagataggaaggctactagtgaaaatgtgctggaaagatagaatgtcatcagagatgagatgcatggaatagaattatggggaactgcaatcattggtgtagactctctcaatcagggatccctgagagaagtcagccctagtgccttagggcatctaaaatatgtaatgaataaaactcactcctaaggagagaatatcttctgaagtctcaggcctgggtgatataagtcccagggaggaggacctcatttctcatctcctctccatagttgaatgtgcctggggcaccagtgattttccaggmctttatttttatcagaggcctttcttta

SEQ ID NO: 430270 - DNA, 554 bp, Homo sapiens
agttttcttatttttcttcttgtttttaaatggactgaaataagtttaagtacagaatcctcctagacctttattcccacttccattatcctcatacctgttcttttatagttgtctagatcatggctaatttgattacagtttttttttttaattttagtgactcrcctttaaaatgagtccttccagattattcaatttagttttcatagaaatgacagctttctttatttttcactctatttcattgacacattcattactactctattaaattatctaattataattgcaactggtttgtgaggaaatgcaactggtgtttggtaagcaaagacctcaaatggagagagcaaaaactggtgaacattcaagaaaacagcctccctgctggctatgaacatccaaacacatacaaagagaatggagaatatcagtcatttcagtaagtctattcatgtgaagatatgttaagaatcctcccaaggaacctcataaaattgtcatgagaattgaaggaaaaggaaaagttgaaggtttgtcaaatggctcaa

SEQ ID NO: 430271 - DNA, 545 bp, Homo sapiens
ctttattattgtgtttattataataaaccttaaatatagagttaacagatgtcctatgatcacagctttaaactattgccctggcatcctgtttagtactcattatgaatttactatttttaaataractattataatttatagttacattaaaataaaactggatgggatagatagaccctcactttgtttttccagctagtctcatcttttggtgtgtaagctgtatgtgcagtaaacacagttctcactttaacctgtggccaaatgggaaacaggatccatgataccctgttgttttccacccttgctagatgcactcagctagcttctccactttatagtcagccagcagggcacttatcaataaaatgaagggtacttggtcattggtaattgcttggatagtggtaggagaagcaagttgtgttgtggcctgtgcaatgccctgtgaaaagcacggaagccagcagactatgagttggtagagtcagtggaaatcaactggaaacaaggaaaattataatttagatgtccataaaata

SEQ ID NO: 430272 - DNA, 545 bp, Homo sapiens
ctttattattgtgtttattataataaaccttaaatatagagttaacagatgtcctatgatcacagctttaaactattgccctggcatcctgtttagtactcattatgaatttactatttttaaatagactattataatttatagttacattaaaataaaactggatgggwtagatagaccctcactttgtttttccagctagtctcatcttttggtgtgtaagctgtatgtgcagtaaacacagttctcactttaacctgtggccaaatgggaaacaggatccatgataccctgttgttttccacccttgctagatgcactcagctagcttctccactttatagtcagccagcagggcacttatcaataaaatgaagggtacttggtcattggtaattgcttggatagtggtaggagaagcaagttgtgttgtggcctgtgcaatgccctgtgaaaagcacggaagccagcagactatgagttggtagagtcagtggaaatcaactggaaacaaggaaaattataatttagatgtccataaaata

SEQ ID NO: 430273 - DNA, 580 bp, Homo sapiens
acaaaaaaaaaaaagaaacttaaaagagacttaaaagaggtcttatttgtagtgacattattgataatgtagataagctgcatttgtaagtttaaagaaattgaagagagagaaaactatagtgggaagaaatgttgggtcagtccttattttgaaaaatgcttcccagaaatatgctcatatcattcatccattgacaatmatcatttgttggacatcaactgcttgtactacattagcttatgacatgaatttgaaatactttattacaccctagaaattattatcattacaccctagaatttgaaatactttattacaccctagaaattattattacacctggaaataatggaaaatcaataaattggttttccatttgaattttgtatagattaaaagtactttcatgcttctaatttttaaaattttctgttccaaataattttcttatgctaaaaacagcacctacatccttgctatcaattgctttcttttttagtgacaactagaccagtaaagagataaaataataaaaatggtatcaatacaatatgaactgatacagtgaaaatgcaca

SEQ ID NO: 430274 - DNA, 530 bp, Homo sapiens
tcactgcaacctctgtctcctgggttcaaacgattctccttcctcagcctcctgagtagctggaattacasgtgcgtgccaccatatccagctaatttttgtaattttaatagacatgggatttcgccacgttggccaggcaggtcttgaactcctgacctcaagtgatttgcctgcctcagcttcccaaagtgctaggattacaggtgtgagccaccgcacccagccaaagtgggtttttaagaattcattatatgtaccattactctttttcttaagaaaagtgtttattatttttaaaattgtagtaaaatatgcataatgtaaaatttaccattttaaccattttaaagttgcagttttgtggcattaagtacattcacattgttgtgccaccgtcaccacgattcatccccgggacttttcatcttccagaattgaaactctgtatccatccaactctaactcctcattttcctatcctccagccctggaagccaccattctacattgtccctataaatttgact

SEQ ID NO: 430275 - DNA, 508 bp, Homo sapiens
ataaagtgggccccgtcaagtcaataagttgtatctcagagagttcctgtagtgtcagtggattggtttttcccctccagtcacactcccacagaaccacctgccactgcatgctccatggtgagcgccatgctcaacagtttcccctgcgagaacgwgattctattacatttcttgacttaaagtcagatctgcctttcaaagagaaccagatttcttcctcttgctttcacgtgaagtcaaactttataaaacaccatttggaagaaagccacagtgcatttctcattgtgcccctctttaatttcttccctatcagctgccccagctgcagtccaggtcaagctcctaaaggctttttctatcagaacccctagccctctggcaacttgctgccatgactgcagcatctatctttccctctttgtaggtgacattatttacagtctgatctaactttcatttaaaggcaacttttagggaatggattttctaaagaagacttaat

SEQ ID NO: 430276 - DNA, 508 bp, Homo sapiens
ataaagtgggccccgtcaagtcaataagttgtatctcagagagttcctgtagtgtcagtggattggtttttcccctccagtcacactcccacagaaccacctgccactgcatgctccatggtgagcgccatgctcaacagtttcccctgcgagaacgtgattctattacatttcttgacttaaagtcagatctgcctttcaaagagaaccagatttcttcctcttgctttcacgtgaagtcaaactttataaaacaccatttggaagaaagccacagtgcatttctcattgtgsccctctttaatttcttccctatcagctgccccagctgcagtccaggtcaagctcctaaaggctttttctatcagaacccctagccctctggcaacttgctgccatgactgcagcatctatctttccctctttgtaggtgacattatttacagtctgatctaactttcatttaaaggcaacttttagggaatggattttctaaagaagacttaat

SEQ ID NO: 430277 - DNA, 448 bp, Homo sapiens
gggatttcgccacgttggccaggcaggtcttgaactcctgacctcaagtgatttgcctgcctcagcttcccaaagtgctaggattacaggtgtgagccaccgcacccagccaaagtgggtttttaagaattcattatatgtaccattactctttttcttaagaaaagtgtttattatttttaaaattgtagtaaaatatgcataatgtaaaatttaccattttaaccattttaaagttrcagttttgtggcattaagtacattcacattgttgtgccaccgtcaccacgattcatccccgggacttttcatcttccagaattgaaactctgtatccatccaactctaactcctcattttcctatcctccagccctggaagccaccattctacattgtccctataaatttgactactccaggtacctcacattagtggaggagacacaa

SEQ ID NO: 430278 - DNA, 568 bp, Homo sapiens
attttctctccattatgtagatgacaaaaccaaggcttgaatagacttgttaagcaaattagccaatattacccagttatggaatggcaggccaacattagcctccaggactcttggtctccagaactcctgctcttycctggtctgcttagttcacatgggaaacctaagattttatcagattcgggcaaaagaaaggagtcagcttcctggagccctcccattggatgctttccaggcatttctgaatcagcaactgaaggtgaacccaccactgtccatccttagcccaccctccaccttggcagtgagcagcaggcaatgcctcctattcccctctgaaagcttttatcctggggcaagagcccagagaacttctagaagcaaattattgccttatgctttgttatagatgaggactttgacttcctaggactgatactcaataggagtcatctttttgagagccatttctttatagtttctacagcataacaacaacagagtaagccagtggatacgccaggccagggcccatcattcctcatcatggattttcattgctgtg

SEQ ID NO: 430279 - DNA, 568 bp, Homo sapiens
attttctctccattatgtagatgacaaaaccaaggcttgaatagacttgttaagcaaattagccaatattacccagttatggaatggcaggccaacattagcctccaggactcttggtctccagaactcctgctctttcctggtctgcttagttcacatgggaaacctaagattttatcagattcgggcaaaagaaaggagtcagcttcctggagccctcccattggatgctttccaggcatttctgaatcagcaactgaaggtgaacccaccactgtccatccttagcccaccctccaccttggcagtgagcagcaggcaatgcctcctattcccctctgaaagcttttatcctggggcaagagcccagagaacttctagaagcaaattattgccttatgctttgttatagatgaggactttgacttcctaggactgatactcaataggagtcatctttttgagagccatttctttatagtttctacagcataacaacaayagagtaagccagtggatacgccaggccagggcccatcattcctcatcatggattttcattgctgtg

SEQ ID NO: 430280 - DNA, 518 bp, Homo sapiens
ggtggaggtgctggctgtgcctgctggagtgatggggaagcagatttcatttttatagaatagcagcagtggcagaggcgaggtgactacctcacaaaacctgtgggcagaaacttaaatgatgagtccagaaagtaagaacattaatgtgctttggaattcctaaaascagttgaggacatgataagggacagaggttgacatagtaattatgctggtgaggactttcagctggctaaagtttagtaaaatttttgctgggactaattttgccagcaaactggagtggcatgcaattataagtatcacgcagacaaaactgcaatgttagtagccttttctcaattgggtattgataaatcctgcattcctaatggattgattagcatctctccccagatccctctgttccttggtagccccatgttctgtttcagctttttctgctaatccacacactgtgttgaccaacttcaaggcttggagctcatacactagaggattctcatgtctctttc

SEQ ID NO: 430281 - DNA, 591 bp, Homo sapiens
aagcttgtcctgcagtagacacagctgagcagcaagcataagactaagttagagttgtagagctccagacatttaaatgctgagcccaagaaggtcgttatacaaaggtcagggccctgaatttaaaaaacaaacaaaccacttgagaccctgaaatatgggttaggtccctgaagactgtgcctttgcagactttcctgcagccaaygtgattacagagatggcccctattcctaataagagttaacactttcccactatggaaagactgcagaggcctctcccttgctaggcagcaaatgcccttttcaggaattgtcccaccacttttcctggatgccaaaccaaccagtagggttaagtcccagtataatctgctggggatgtgttgaatatgataaggaaagaggatactacattccaaagaaacttgcaagaattagcttgcatatactaacagtagctaagaaagtacccttggaactggattttgagggtactcgatcaaggcagttagaaaaagattccataagcaagaattcagagacttgggggcattgttttgaaacagagaatttaacattctggcaa

SEQ ID NO: 430282 - DNA, 591 bp, Homo sapiens
aagcttgtcctgcagtagacacagctgagcagcaagcataagactaagttagagttgtagagctccagacatttaaatgctgagcccaagaaggtcgttatacaaaggtcagggccctgaatttaaaaaacaaacaaaccacttgagaccctgaaatatgggttaggtccctgaagactgtgcctttgcagactttcctgcagccaatgtgattacagagatggcccctattcctaataagagttaacactttcccactatggaaagactgcagaggcctctcccttgctaggcagcaaawgcccttttcaggaattgtcccaccacttttcctggatgccaaaccaaccagtagggttaagtcccagtataatctgctggggatgtgttgaatatgataaggaaagaggatactacattccaaagaaacttgcaagaattagcttgcatatactaacagtagctaagaaagtacccttggaactggattttgagggtactcgatcaaggcagttagaaaaagattccataagcaagaattcagagacttgggggcattgttttgaaacagagaatttaacattctggcaa

SEQ ID NO: 430283 - DNA, 501 bp, Homo sapiens
tacaatcatggcagaaggcaaagaggaagcaaggcatgtcttacatagtggcaggagagaagggggaagtgctacacacttttaaaccatcaggtctcgtgataactcactcactatcatgagaacggcatggggaaaacctctcccatsatgcaatcacctcccaccaggttcctcccttgacacatggggattacaatttgagatgagatttgggtagggacacaggaccaaaccatatcactaattattagtgatgttgaacattttttcatgtgcttattggacatttgtatgtcttctatagagaaatttccattcaagtcctttgtccatgtttttaacttggttgcttattttttgttgttgagttttaggagtccttttcatattttggatattaaccctttgtcagatatattgcttgcaaatattttcttctatcctgtggatcacctttttggtctgttgacagtgtcttttgatacggtgaacaaatgc

SEQ ID NO: 430284 - DNA, 616 bp, Homo sapiens
tggtgacacattatttagaatattcctctttctgttattaatttttagtttagttcttttgtggtcatagaaatacataggaagacttgaattcttttaaatctattgaaacttgttttatgagccagaatatggtctatcttagtggttatcccatatgtacttgaaaagaatgtgtatttttctgttgttggatgaagtccattgtgaatgagttaaacttcataacaatgttgcttaagtcttctatttctttagtgatattttgctccctcttccccaaattactgagtaatgactgttgaaatatctaaataaaattgaatttttaatttctcttctactttcaattagcttttgttttatctattttgaagttctgtatttaggtgcttatgcagtattgttaggtcttcttgwtggatcaactcctttaagtatccttctttattccttcattattcacctttgatctgaattccttttggtctgacattacttttgaaactttagcatttatttaattagtgtgtgaacggtctatctttttgcattttctaacttattggtgactacatatttaaaatgggtttcttgtaaatggtagacttcttgt

SEQ ID NO: 430285 - DNA, 563 bp, Homo sapiens
aataattaaacagaatcaagcaaaaattctggagctgaaaaatgcagctgacatattgaagaatgcatcagagtctttcaataacagaattgatcaaacagaagaattagtgtgaagataggctattttgaaatacatagtcaggaaaccaragaaaaaaagaataaaaaacaatgacgcacacctataggatcaagaaaatagcctcaaagggaaaatctaagagttatcgccctgaaagaggaggtagagaaagagataggggtagaaagtttattcaaaggaataataacagagaacttcttaaacctaaagaacaatatgaggatccaagaacaagaaggttatagaacatcaagcaaatttaacccaaataagagtatctcaaggcatttaatcatcaaactcccaaacaacctaatgatgcatcttaaagcgctggaaaagcaagagcaaaccaaactcaacattagtggaataaaataagtaataaagatcagagaagaaataaatgaaatagaaacgaagagaacaatttaaaaagttgtgttttttttgaaaaa

SEQ ID NO: 430286 - DNA, 621 bp, Homo sapiens
atattttctcttcaaaagaaaattacctctcccatcatttggataataattttaaagaattgtgtctgcaataataccaccgatacaggatacagtggacaagaaggaaatggaacaatagaatgaagggaagaaactgttaaaaactgaaaaaagcagggagaattgtggaaggattgagaatgaaaaactagtaacaaagacattctgaaagagagatgctaatttagcaggaaagatagtacaattttcagatcaacttagaaaaccacattacataactcatcttgagtatcttgactacgtcgcacaaacagacaaaaaaaaaaamacacacttcaaagtgataattttagaagaaaagccaaccagtacatggatctgtgttgactcctacgtgtggaaagcgggatggtctagttgaaatgcctatttatatagcttactatgtagacatagtgatttaataactctgcagttatgtatataattgacagtcttatcttttattcatttttccagggttgtgtttactacagactgtctcatcttggagttgtttatgtccctgtctgtcttctttaccagggggtggattcctacaggtccaagccaggtata

SEQ ID NO: 430287 - DNA, 548 bp, Homo sapiens
gttttatcatagtttgagtatacaatagattggttcaaattacacttcatgttggatggaaaagaaatatatatccctctggtccatttgcccagcaatgcatactttttggataaagtgagtaactaataatacaaatcctaaatagagtacaaaatgctctgtttaaagcagtacatgttgatcacatcatgaataagctttgmatcttttaaatctattaagaactggagctatgggaaatcaattgcctatgaattttaaaataacgtttgcattgctagatattgttaatttttgtaaaaaaagtgcggcaaacttgaagaaactctactagaatgtatatagtgccttttagtcattttcttcatttctgctggggtcttactttagaccccagccacttaagtgcaaatctattaatgaacatgtgcattcttaagagtttacaacacctaaaagcttgagactgtctactttctacaacacagctcctagatgtgctaaatttataattcatttctagctactttaaaactacaaaatcc

SEQ ID NO: 430288 - DNA, 602 bp, Homo sapiens
cttcttttaaaagttaatatgtytgtcataagactttattcctagtagcaaatatttaaagcaacactttttaaagaaagtagaaactggtatgatggtgtgtgcttgcagtgccggctactcaggagcctgatgagggagggtcacttgagcacaggattttgagtctaccctgggtaacacagtgatacctcatctcttaaacaaacagaaaaacaaaaaacgaaagtaagaaagttgtggaaaattgcaatttaaaattataatttcttagtaaacatattagagactgaagttattttgataatatttttttccaaaatcatacatgatagatgtgtcagtcagtttcacactgctataaagaacttcctgagactgggtaatttaaaaagaaaagaagtttaattgactcacagttccacatggctagggaggcctcaggaaattcacaatcatggcagaagaggaagcaggcacatcttacatggcaacaggcaagagagagcctgtgaaggaggaactgtcaaacacttataaaaccatcagatcttgtcagaactcactcactatcgtgagaacaacataggggaaaccatccc

SEQ ID NO: 430289 - DNA, 523 bp, Homo sapiens
catcatatcctaaattttattcttttctaattcccaacttcctgactgttctgtagttcatatttgaacataaggaagaattctcaatgacctcgagatggtctgacttttagccccaatggaatgaggcccagagaaagagagatttctttttctttcctccacccaatatccatcttgtcttctgaggtaggcagcctctgagatggtcttcactggtccctgccttctgcattttgtataatcccttttccttgggtgtggtatagacttaatgactcagttccaagatcagatgtggaagaagctatgtgatgttacytcttagatcaagttgtaaaaagacctggctctgtcctgagtgctctcactgtcttgattgcccacactctgtcttgattctcttgctctagaagccagctgctttcccctaagtagtcttgtgtaaagacccatttgaatgtacttgaaagagaatcttttaagacttgccaagagcagatccttgttcagttgagtcttg

SEQ ID NO: 430290 - DNA, 523 bp, Homo sapiens
catcatatcctaaattttattcttttctaattcccaacttcctgactgttctgtagttcatatttgaacataaggaagaattctcaatgacctcgagatggtctgacttttagccccaatggaatgaggcccagagaaagagagatttctttttctttcctccacccaatatccatcttgtcttctgaggtaggcagcctctgagatggtcttcactggtccctgccttctgcattttgtataatcccttttccttgggtgtggtatagacttaatgactcagttccaagatcagatgtggaagaagctatgtgatgttacttcttagatcaagttgtaaaaagacctggctctgtcctgagtgctctcaytgtcttgattgcccacactctgtcttgattctcttgctctagaagccagctgctttcccctaagtagtcttgtgtaaagacccatttgaatgtacttgaaagagaatcttttaagacttgccaagagcagatccttgttcagttgagtcttg

SEQ ID NO: 430291 - DNA, 577 bp, Homo sapiens
tttcaatacagtatgggtttttctttgcttcatgacttcatattacacttattaagggccaattttagcctatttatgcatatacataactctttcctttatgagtaacactcaattctayaagagttgtatatagatttccaattagagtatttcttaattattagaaatatgttatgtaccaaaggaatactggccaatcttacctggtacacatctaaagatacagataataagtatcaatttgggaatgaattaaagggaaaatgtaacaagaagtgttctgcaggggtcagttcccagttcagtgctatttaacatttttccaatgaccaggatgatagaatatcaagtatgcttattaagtctgctgatgacatcaagtggaagaaatagctgatatcttggagaatagaattagaattaaaagtgaccataataagtgtgaatggtggtacaaaatggaaagaataacattgaatgtatatgcattcctgttgcatacataatatagcatatgcaatgtacagatgagctaacaaaggacaaagaaaatataagctaacaagaaaacacc

SEQ ID NO: 430292 - DNA, 602 bp, Homo sapiens
cttcttttaaaagttaatatgtctgtcataagactttattcctagtagcaaatatttaaagcaacactttttaaagaaagtagaaactggtatgatggtgtgtgcttgcagtgccggctactcaggagcctgatgagggagggtcacttgagcacaggattttgagtctaccctgggtaacacagtgatacctcatctcttaaacaaacagaaaaacaaaaaacgaaagtaagaaagttgtggaaaattgcaatttaaaattataatttcttagtaaacatrttagagactgaagttattttgataatatttttttccaaaatcatacatgatagatgtgtcagtcagtttcacactgctataaagaacttcctgagactgggtaatttaaaaagaaaagaagtttaattgactcacagttccacatggctagggaggcctcaggaaattcacaatcatggcagaagaggaagcaggcacatcttacatggcaacaggcaagagagagcctgtgaaggaggaactgtcaaacacttataaaaccatcagatcttgtcagaactcactcactatcgtgagaacaacataggggaaaccatccc

SEQ ID NO: 430293 - DNA, 518 bp, Homo sapiens
tgtctgtagccttagtggcaagtcaaaatagctacctagcacaaaggtgtcatttccttctgtcctatcattttataaaggaaaattatctacctatgatgataacmacttaaatgaaaaagagagtaaaacaagaacatttaaacatatttgaataatctaggatttttgttgttttttaaaacttactcggatatttgtgtgtcaattttaacctcataaaatgttcctttgtaaatttttatttatgtatgccgtgtttcatcaactagattggataatttggggatgcaaggattggatcttttagccaggcagaaatcattcactataggaatcatatttttcaagtgcttattggtttaataaagtttgaaatgtggaattttctttctaaattaactcggtatttgaaatagcatctgtacagccataacctgatgcgtcgccaagcaaatggtaacaacagtgtctcttttatatatcctaagtggttccttttggggacaacaggtttg

SEQ ID NO: 430294 - DNA, 552 bp, Homo sapiens
gctcggtacctctttccttttcctttttgtaaaatatcatgtggattaattataggtagacaacaaggcaacacaaccaatgctttcttatctaagtaaacaaaataacagatgcgtagtgaccaaacactgacagactttgaaagaagttctgttattggtaactgatcatgatgcatatttgctatttatgaagtgatttgtaggctaaagagatagcggaaaagtttataacttatgcaattactcacaggtaatataccctgccaacttaatgtgaactctgttattgggtgatttgtgtgatttaactaaatcaagataattaaactctgtgcatattggaaccatgcaaagaggggactgtttgtatataattaaaacaaggtatgataaccacatgctatgaagaattgtacactatttagtcataagagaaaatatgcaatgtgaatcagttctagagatctgctgtacaacatartgtctatgtttaaaattcagtattgtacacttaaaaatttgttaagaaggaagatcttatattgagta

SEQ ID NO: 430295 - DNA, 543 bp, Homo sapiens
ttccccctcctgcttgctacataggatagcacatgagaatccatagttaggactttaaacaaacagagttaccagtgagaaaggaggaagatgttttctgaaggagaaaaaagtgtagaagttttagctcaactgctaaatttgaaatgttggcttactcataagacacaaatggaagaggctatttctttaaaatcacagctggaaagaacttttttttatgctagaaaaaattgaccaagtttatggaaaacaaaactaaataggaattattaacaacttcaacatacccagaagtcttttactgagttagaaaagagcatgatagagaacaaatgttatgagagaaaaagaccgctaacaatgatattaaatgggcccacttttcctcaaaatcttgcagttctctgcagtagaatactcacayacatacccagtattcattgttatggatcctacttgctacagacagggtctttatcctcattcataatgtttctgtcttgccgtactttagggtgcaagggtcataagggagcctcc

SEQ ID NO: 430296 - DNA, 595 bp, Homo sapiens
tcatgctcaatatagtaatatacatacctttcctctgacttttaagtgctactccatggtttctgcaattccagaatcccatgatctctattcatattaggcttcatcttccacagtcaacctgactttacaggggttagcaatcatgatgttgttcaaagaagttaatatctacctactttctcctgtacattttttatggtcttagtggaggaagtgtccttactgctcagtaaacttatcaggctgtagatttttcagttcttatatagtctatttacattaacatttctaccttattgagccttctaccctttgagctttctataccttagtctataccttttatcttcacttcatttacaataaaccataataatgtcgaagcttcacagagtcattctaataaattacctgataggttatgagtgttcttttcagaacattgaactctgagtcacargtcaatatttgcatgaagaagttctcttctatccatctttatagatctctattctaatctagaattttccagattactcttaaatgtgtttcttggtccctgctatgacatattaaccaggcaaatgcagaa

SEQ ID NO: 430297 - DNA, 588 bp, Homo sapiens
ccttgtagtgagtagatatcaaaagaaatcagtatgccctcaagattattaggataagatccactctctggtcgcttaaattttatatactaggtaacttaggttgttagaacctaaaasagagggatatcaatgctaaaaaaaatctaggagtacacaatctcatattggtggcaacaagcagtttttaatttttaatggagcatatgtatgataagatatcttaataaagtggtaagataagatatcttaataaagatcacagagcattgacttagaggaaagaaactggagaaagggctctggaaagtttcttttcttgatatcagtgtccttacctgtaaagtaaagtaaagaggttttggccagataattcctttagccaaaagttaaaggttccaacttttccattctctgaaagatcaaagacgtcattaaaataaaatgagtgggaatttcatttctatcagaggataaagatggggataatatcaaagctcaatatccacatctaattacaaaatccttctgttctgatgatggaaaatacagaagaaatgggaagcccttggactctaggacctagaa

SEQ ID NO: 430298 - DNA, 632 bp, Homo sapiens
acatcatgtaaggtacaaacccacatatataaaccttcatggcttgtaatgaaaccttgtcccatgacttgtctgagagaacagttatttcacttttgatgagaagaaaaatttgcaagttcaaatgcttctggggttttctggactccctctgggactttctgtgctctctagcgctctaggctctctcagccacatcttaaatactcagatttccccagagcaagattcacaagacaattttttttttggtcaacttaattgttatgtgaygtgatttagtttctctgtccagagacttcgaattccttaggaagttttttaccttacactttacccaggagaagtctttcaatatgtacattgattgaaaaagaggaaaattctatatgtggttcattattgttctttaaaccaatataagagaagggaacatagcttaaacatgttattaacatctaaggtacaaaaatgtctattgaaaatgctattaaacaaatttaaagatcagggccttcagaatgttttaatttgaaacaattctttttcttaaagacttttacaaccaggcatctattttagctgctttatctgcagcctggtccagagaggtaaactggatttaatgggaa

SEQ ID NO: 430299 - DNA, 579 bp, Homo sapiens
aaacagcaacccaggcatcagagacttgaatgttatcaatcccttctctacttctcatttttcctttacccctgcgtaacagcttcgtctcagtgggaaggaggttcwatgactggtccatcttggtcaggtgctcaccctagaccaatctctgtgctggggctgtgtgattaaaatccagaaatgaagaggaatgttgtggaatagaagagagagaaacacagatgtgaccactgaggaaataacagtttgcattttctaaaattattttttgctttaggagatcgtcccttctaggctgttagaaaaatgaaccactcatatttggacaaaaaatttgttttatgaaatttgccttcaactgaagaaaaaaggtaatgtcaaaggagcaaggaatagggtaggcttaataccaccagttccctttttggagtcaattacctctagggtttctatagtttacgcttcaaggagagctacggttaaatacctacatttgctagcagaacttttttttttaattttaacttttttgtaatgccatgttgtttattaggctggaaacatttttcaccattt

SEQ ID NO: 430300 - DNA, 579 bp, Homo sapiens
aaacagcaacccaggcatcagagacttgaatgttatcaatcccttctctacttctcatttttcctttacccctgcgtaacagcttcgtctcagtgggaaggaggttctatgactggtccatcttggtcaggtgctcaccctagaccaatctctgtgctggggctgtgtgattaaaatccagaaatgaagaggaatgttgtggaatagaagagagagaaacacagatgtgaccactgaggaaataacagtttgcattttctaaaattattttttgctttaggagatcgtcccttctaggctgttagaaaaatgaaccactcatatttggwcaaaaaatttgttttatgaaatttgccttcaactgaagaaaaaaggtaatgtcaaaggagcaaggaatagggtaggcttaataccaccagttccctttttggagtcaattacctctagggtttctatagtttacgcttcaaggagagctacggttaaatacctacatttgctagcagaacttttttttttaattttaacttttttgtaatgccatgttgtttattaggctggaaacatttttcaccattt

SEQ ID NO: 430301 - DNA, 600 bp, Homo sapiens
ttaaaaataaaaagtgaaaaatgaatttttgttaacgtatctcattttgacaacttacattatacaatactcttttgcatgaattagcactttaaagcagatatcttctagacaatctcagaaaaatattttggatrgattggcaggaaacacttaaacatttagcatttctaaatctcaaaatctttggaaaatttccaattataatataaaattaggatggactacagtatggtatggaaacatctcagaaatttcaatagtttaaagcaacgaagatgtagttcttgtacattctgtgtccacaaaagctgtgcagaaaacctgctcattgtgtctctgagagacatagtgccagcacaaatttaaaaggaattttagtacttggtaaaaagctacaagaagagttttattttttttaattaatgaaacatttattaatccaagcattggggttagaaatacacaatctttctcacaacaaatcctcattttaacatgtgaaataggtatataaacaagttattttaaggcaaacacattgagaagattgcaaaatgccctcaaggaaccactaattttgctttaggtgaaatccta

SEQ ID NO: 430302 - DNA, 695 bp, Homo sapiens
tggattttaaaggcatcttttatgacactattccttttcattatttcttggtttatccactaagcgagtcactgcttctttgggaagactcataccatcaagtgtttttgatacataaaatccagattgcctgctttggccatcttattttgtttcctcactagtttttcagcatcataagtcattgagtatcaacacaacaaaaactgttgcaattctctattggtcatacaaaataattgttagcgcttctggaaaaagaattttaatataagtgtataaaagggatcttaacacaaaatcacttttaatttcctacgtaacaagagagatctttacaggctgacaatgacttataaacaacactcaagacagtcacttgggtkatatgaagaagttacatttattattattataattttggtctaaataatgaggcttcctatacatgattgaaaaataactttctggtttctcagctgtcagctgtgtgctcaggttatgcccgtgacagtcacacagataggaagcttatattaaaaccagaatcaaaggtagcaggagtaggaatcagcctacgttaacgaaccattgaagcctctctctggcatgcatgaacactaaatcactggttagatctctggtgatttctcacttgagagatgtgaagaaaatggcacattcagggtaacagc

SEQ ID NO: 430303 - DNA, 695 bp, Homo sapiens
tggattttaaaggcatcttttatgacactattccttttcattatttcttggtttatccactaagcgagtcactgcttctttgggaagactcataccatcaagtgtttttgatacataaaatccagattgcctgctttggccatcttattttgtttcctcactagtttttcagcatcataagtcattgagtatcaacacaacaaaaactgttgcaattctctattggtcatacaaaataattgttagcgcttctggaaaaagaattttaatataagtgtataaaagggatcttaacacaaaatcacttttaatttcctacgtaacaagagagatctttacaggctgacaatgacttataaacaacactcaagacagtcacttgggtgatatgaagaagttacatttattattattataattttggtctaaataatgaggcttcctatacatgaytgaaaaataactttctggtttctcagctgtcagctgtgtgctcaggttatgcccgtgacagtcacacagataggaagcttatattaaaaccagaatcaaaggtagcaggagtaggaatcagcctacgttaacgaaccattgaagcctctctctggcatgcatgaacactaaatcactggttagatctctggtgatttctcacttgagagatgtgaagaaaatggcacattcagggtaacagc

SEQ ID NO: 430304 - DNA, 617 bp, Homo sapiens
tttatgacactattccttttcattatttcttggtttatccactaagcgagtcactgcttctttgggaagactcataccatcaagtgtttttgatacataaaatccagattgcctgctttggccatcttattttgtttcctcactagtttttcagcatcataagtcattgagtatcaacacaacaaaaactgttgcaattctctattggtcatacaaaataattgttagcgcttctggaaaaagaattttaatataagtgtataaaagggatcttaacacaaaatcacttttaatttcctacgtaacaagagagatctttacaggctgacaatgacttataaacaacactcaagacagtcacttgggtgatatgaagaagttacatttattattattataattttggtctaaataatgaggcttcctatacatgattgaaaaataactttctggtttctcagctgtcagctgtgtgctcaggttatgcccgtgacagtcacacagataggaagcttatattaaaaccagaatcaaaggtagcaggagtrggaatcagcctacgttaacgaaccattgaagcctctctctggcatgcatgaacactaaatcactggtta

SEQ ID NO: 430305 - DNA, 695 bp, Homo sapiens
tggattttaaaggcatcttttatgacactattccttttcattatttcttggtttatccactaagcgagtcactgcttctttgggaagactcataccatcaagtgtttttgatacataaaatccagattgcctgctttggccatcttattttgtttcctcactagtttttcagcatcataagtcattgagtatcaacacaacaaaaactgttgcaattctctattggtcatacaaaataattgttagcgcttctggaaaaagaattttaatataagtgtataaaagggatcttaacacaaaatcacttttaatttcctacgtaacaagagagatctttacaggctgacaatgacttataaacaacactcaagacagtcacttgggtgatatgaagaagttacatttattattattataattttggtctaaataatgaggcttcctatacatgattgaaaaataactttctggtttctcagctgtcagctgtgtgctcaggttatgcccgtgacagtcacacagataggaagcttatattaaaaccagaatcaaaggtagcaggagtaggaatcagcctacrttaacgaaccattgaagcctctctctggcatgcatgaacactaaatcactggttagatctctggtgatttctcacttgagagatgtgaagaaaatggcacattcagggtaacagc

SEQ ID NO: 430306 - DNA, 648 bp, Homo sapiens
tgaagatatggcctgattagagaagagaaagtctaaataacaaccaatagggtaagaatgagataaattttgtatgaggaatcttgggtttatggttatccaagtagagatggtcaaagtgccattctcaatgatcaccattgccataaacagaggaatctattaggataaaaagagaccagcayagaatcagttgtaggtgttaccagaaacatgacccacatggccacctccatttggtagtgtttaagtaagtaaagaaggtagcaaggcatcacaccaggagaaataaaggatattttttgagtgtgtatgcaatgtgccaagtgcttttactcacacattttattttaacacactcattatgttgggtggtagaagcctcactttagagatgagaaacatggcaatcagattttaactatatctccattaataaacagtgaagctgtttttctgatttcaagacaagtgtcttttaactagaccatctatactttagtcttggcatggacacataccaggatgactcaacttgggtgacataacccctgtgaaccttggttcctactgtaagatgggaaggatcatatttaacttatgtagttgctgtaagggtaaaataatgtgaaagagttgtgaaaattg

SEQ ID NO: 430307 - DNA, 611 bp, Homo sapiens
atgatttatcagaggatgacatggttacaggcattgcttccacagaaaataatggctgttattaccacttcctgaggtgagcaggcaagccataaacctagcttattgctacacaggtcagaggatgaggggtccattttgccttttgtcttagtggatcctttaaggctgtctcttaataatttggaaaatatttttccatattccacaaacaatatcaatactgactttgtttaggctattctataatcttaacctatttagctaagtattaaagtgaaaaacccctagatctccaagagctttgagttctaatgttagtaattaaggggtcaccttgggtcttctttttcaagttgcattatcttgtagagatattttcgcaagtggttattctagtggaataatcctccagggctctgccgcttgagaagtaagtcctgtgctttttcatatatgattcagagagaatattacatgctactcatcttctggtggaagagaaagaaataagtgatcacaaagccctttggtttgcaaagaaaacatttgaatttacaatgytatatttctttgtatcccaatgacttcaaagtaaataaaaagtaaat

SEQ ID NO: 430308 - DNA, 599 bp, Homo sapiens
atgatacagttaatggattttgaatgtgtcaccactatttataagaattttcaaaagatagcttacctggagtttgaagtttattaaattcaactcagggaatacttatgaaatacctactactcagtgtacaaacttatgtgctatggagaaaatatgaaaatgataaatgacatgacatggtcccttttgtcagtgcaatgtaatcaagacagagaaacagaattgaacaattaataaggcaatatgacatgagaaacagtgttacagagtatgaaggaaacaatcaggaagaagcaattatgccatacagagaatcaaaaagacttcacagagaatttggcaaatgagcttgtccatgagaaataattggcatcccagaggctaaaaaactggaaaaggatcttctaggttgaagaagaaaatgtgtcratgaagaaaatgttgcatgtttgaggtctaggaataacctagaatggcagaaatgagggatatgagaaagaataagaaattagtatggacgtaagttgcaaccagatcatggacagccatgcctacatggggtttggaaacaatttcaggaccagaattcaaccttg

SEQ ID NO: 430309 - DNA, 599 bp, Homo sapiens
atgatacagttaatggattttgaatgtgtcaccactatttataagaattttcaaaagatagcttacctggagtttgaagtttattaaattcaactcagggaatacttatgaaatacctactactcagtgtacaaacttatgtgctatggagaaaatatgaaaatgataaatgacatgacatggtcccttttgtcagtgcaatgtaatcaagacagagaaacagaattgaacaattaataaggcaatatgacatgagaaacagtgttacagagtatgaaggaaacaatcaggaagaagcaattatgccatacagagaatcaaaaagacttcacagagaatttggcaaatgagcttgtccatgagaaataattggcatcccagaggctaaaaaactggaaaaggatcttctaggttgaagaagaaaatgtgtcaatgaagamaatgttgcatgtttgaggtctaggaataacctagaatggcagaaatgagggatatgagaaagaataagaaattagtatggacgtaagttgcaaccagatcatggacagccatgcctacatggggtttggaaacaatttcaggaccagaattcaaccttg

SEQ ID NO: 430310 - DNA, 569 bp, Homo sapiens
cataatgtccttttaggaacatctgaagctagcaatgtaatttaagtagttctataaacacaaatatcccagaaaataatagcagaactccctccctgtttttgtttatataagtaaaaaagagttttaaatgaattctcaagtatttgtaattttagatatctaagagtaagggaaattaaaaaaattttctattttggaaaattattgtcayccagtttataatttcatttagtataatattttctaaacagtgtctacaattgggaagactgcataatttactatgtcctaaaatagttttagttttctgagattattttcatgagaatgcagttataaaatcatgtggtataaaacagaatctcttcatgctaaaattgtattaataattaattggagaaaaagtatttcaccatgacaaatgagagactgtatggaaggagtgatgccatttcatggcagaaataatatagtaacatgtcattaaatacaagacatcatattaaattttatagttaatgtacaaggatatcaaaatatattaaaattcaaattggttatgtttg

SEQ ID NO: 430311 - DNA, 612 bp, Homo sapiens
tttttgccctatttaagaattagtttcctacctaaaagtcataaaggtactaacccatattgtgtcttacagttttataattttgataagacaatttaagtcattagcccaactggaaccattgtttactttttaaatttccatatggatacccaccacattcagctaatttattttaatttttagagatggaggtctccctatgttgcttaggctggctttgaactcctgttctcaagtattcctcctataactgcttctcaagaagctgagattataggcaagagctgagataataggcaagagccattatgaaatacccagcctggtattttataatgtctttctgaaggcttttctatttacccaatcaagatcttacaaatattttgataggtttcttatgatatactttataattattttccccmatttattaagatatacttgacaaataaaacttatatatattaatggtgtacaatgtgatgttgtgatatatgtatacgctgtaaaatgattaaattaagctaatcaacatatccatcacttcacatacttaacttttgggggatggagaacatttaaaatcttcttccttagcagttttca

SEQ ID NO: 430312 - DNA, 582 bp, Homo sapiens
atttaatcattaaataattgctcaggctttttgttgtttcttgaatccattttggaaaattgtataaatttcaatttcttttcaaatttaatggcaccgtttctataatattgctattttttgcagcatgtgtgcttaaaccactttttygttgctgacagtatttactgtgcctccttcattttctctagttcagccttgcactagtttgtgaattttattattcctttaaacaacaaacatttggctttattgatccttctttttcttgtatgtttatcttctatctcattaacttctgttttctccttattacttatttccttatcttgcactgggtttagtctaaatctaatctatattttccccatctcttgaataacatgagaatctgaacacatcagctcaatcacctccagctggctgtgtgatatttttgttctgtatattagctctattttgcacccctcacccaaagacattattaagtttttaaatatatatttgcttctacatctgttggctgcccagagcctccacctctgatcactttcttttggccaaagtgtatctttagaatgt

SEQ ID NO: 430313 - DNA, 561 bp, Homo sapiens
atgagttatgagagtacactaaattgtaaaataattaacatgatataagtaaaaaagcaaatgcccagatgaaatcataactattgagtagtttattgtgagggagttgttaaataatttttatgtatttttaaatgcaaggcagtaatgtatatatttattttattttttatttttaccatatatttcttaagtgtaaggtgcatcttatggattatcttataacccggatctcaaatatgattctggtgatttacaaaagcaggtccaggaagcctgcatcccacttctacttttcagtgccacacctgaggtctcactctggccccaaggtttctcaggtgccactgcctggattgtctgaaagaacccagtgyacagatatctcagaagtggaaagaagataacctcctttgggccaagctaaacactgtgggcactggaaatcaatgtctaaaaccttctccctttcattccttaggtgtttgtttattatataacaaaactgttgcctgcagaagaggtctatttaatgatactccttgtaatatacatgaactt

SEQ ID NO: 430314 - DNA, 636 bp, Homo sapiens
ctagctcattaactatggagtaaaaaggtttgaatgggaatataaaaaaacgcatttgcaaaacttcaccgcctatcaggaggccagcttcagaatagctatttcttccaaagtaaacatttcctttttaatttctttgaattgctcttagtttttcttaaatttcacctcttgattcaaggttttgcatttttagtagtcctctccatctatctgcacaaaagttaaagaatttctaagattatagaatttttttctaaattatacttcattagcattagaagatgttcttacaaatttatctttcaatcatataccagattttatttcacagtactttagatttcatttctctttgctgtaaagtccctagtcttgttcgataaaataaccatggggattttattcattttaaagacaattgkatagggctacgttatcacatttaagtaaatgagatttacatttttacattatttcaaatgaaaagaagcgaatgtctttaaattattaaatcttttgtcaaaaatgctttaaaattctgttttatttatcagagatttttaattaaagctatttcttagaaaatgaattccttatgaagaaaacattgaattctccttttatctatacatt

SEQ ID NO: 430315 - DNA, 636 bp, Homo sapiens
ctagctcattaactatggagtaaaaaggtttgaatgggaatataaaaaaacgcatttgcaaaacttcaccgcctatcaggaggccagcttcagaatagctatttcttccaaagtaaacatttcctttttaatttctttgaattgctcttagtttttcttaaatttcacctcttgattcaaggttttgcatttttagtagtcctctccatctatctgcacaaaagttaaagaatttctaagattatagaatttttttctaaattatacttcattagcattagaagatgttcttacaaatttatctttcaatcatataccagattttatttcacagtactttagatttcatttctctttgctgtaaagtccctagtcttgttcgataaaataaccatggggattttattcattttaaagacaattgtatagggctacrttatcacatttaagtaaatgagatttacatttttacattatttcaaatgaaaagaagcgaatgtctttaaattattaaatcttttgtcaaaaatgctttaaaattctgttttatttatcagagatttttaattaaagctatttcttagaaaatgaattccttatgaagaaaacattgaattctccttttatctatacatt

SEQ ID NO: 430316 - DNA, 609 bp, Homo sapiens
cccttttcttctcccgctgctgtccttgcctctggagtatgctcctatcagggtacaatgcccgagggcccccaaggctgtaaatcctcccacattgtacaacatacagcataccctcaaggcctcactgaactcgagaaagcctgagttctgcttagatggataacaaatctcctttttaaaatagaggttggatataattttgaagtgtggggagttttttgaataccaattgacatgtaaaaaggcatccacaaatttagtggcttgaaataacaactatttatcatttcttaatattctgtgggtcagaaattaaggcatggcaaatgccttaatggacagttcttttgctccatatgatgttggctgggatcacttatgtgagttcattcagctggatgcacagctggaactggaatatccaaggtgggtcactcattctccagggcttctttcaatgtgrcctccacttattcactcttctagaatgggcttcctcacaacatggtggctagtgtccaagatggagttttccaagagggagactgcagaagctgatatacttcttaaagactaggcttaggaggcccagaatgccattttcac

SEQ ID NO: 430317 - DNA, 609 bp, Homo sapiens
cccttttcttctcccgctgctgtccttgcctctggagtatgctcctatcagggtacaatgcccgagggcccccaaggctgtaaatcctcccacattgtacaacatacagcataccctcaaggcctcactgaactcgagaaagcctgagttctgcttagatggataacaaatctcctttttaaaatagaggttggatataattttgaagtgtggggagttttttgaataccaattgacatgtaaaaaggcatccacaaatttagtggcttgaaataacaactatttatcatttcttaatattctgtgggtcagaaattaaggcatggcaaatgccttaatggacagttcttttgctccatatgatgttggctgggatcacttatgtgagttcattcagctggatgcacagctggaactggaatatccaaggtgggtcactcattctccagggcttctttcaatgtgacctccacttattcactcttctagaatgggcttcctcacaacatgrtggctagtgtccaagatggagttttccaagagggagactgcagaagctgatatacttcttaaagactaggcttaggaggcccagaatgccattttcac

SEQ ID NO: 430318 - DNA, 586 bp, Homo sapiens
tatagtcatttctataccatggagtattgaattaataaaatattgatttttcagaatatatcactgtatagacagactttagctaagcagtataaacaaaatttcatggtttaacaccaacatttattgaggacctacaatattcttagcatgctgataggtatcaagggatatgaaatacatacaggtttttgccctatagaagcttttaatctagtttaagaaaagttatgatcatataaaattaaatgagatggagattaaaaaatackcgagtttacagaaagtctagatctctgagttctgggagggtcaagaaaagagaggactggtagactgggacttttagaatagaaagggtcaagaagtgcaaataaagtggtcaagagaagatagaatccaaaacatagccagaagctcatagagtagtttgaataaatactttcaatgaaaaaaagcagtatggtgggatgtagggggaggatgttgtttaaattagccagtgtagttggatagttctcagaacttcagggactgctattaacacagcagagttttaatacaacaaatgcaagtaggtgctaaa

SEQ ID NO: 430319 - DNA, 338 bp, Homo sapiens
ggtttcttgccttgttgacttactgatagtgatttgtttcttaaaatgttctgtgatttttatattggtatcatattccttggaattttacyatgagaattctttaagccctatatttgaagtttagttccctgaagagaatttgtgtttgcttcttctcgacgcttaccattttaagcttagttttcttctagagagttctcatacatgtagtgtaaattttttgctacaaacctcacaacatgtgtatttctttagttctgggaagttcttggccattattgacttaaatatttccttttccttctttactttctgtcctctgaaattttaaggtt

SEQ ID NO: 430320 - DNA, 338 bp, Homo sapiens
ggtttcttgccttgttgacttactgatagtgatttgtttcttaaaatgttctgtgatttttatattggtatcatattccttggaattttactatgagaattctttaagccctatatttgaagtttagttccctgaagagaatttgtgtttgcttcttctcgaygcttaccattttaagcttagttttcttctagagagttctcatacatgtagtgtaaattttttgctacaaacctcacaacatgtgtatttctttagttctgggaagttcttggccattattgacttaaatatttccttttccttctttactttctgtcctctgaaattttaaggtt

SEQ ID NO: 430321 - DNA, 634 bp, Homo sapiens
aatttcaggtcttgggtttaagtctttaattattttgaattgatttttatatatggtaaaagatggaaatatagtttcattcttctgcatatagatatccagttgtctcagtaccatttactgatgaaagtgtcctttccccggtgtatgttcttggtacctttgtcaaaaatgagttaactgtaagtgtgtaaatgtatttctgggttatctgttctgttccatttgcctatgtgcctgtttttatgccagtatcatgctattttggttaccatagctctgtagtataatttgcagtcaggcaatgwgatgcttccgtctttgttctttttgcccagggttgatttggctattctgggtcttttgcgattccacgtaaattttaagattattttttctatttctgtgaagaatgtcattggtattttgataggaattgcatgactattcttaaggagaatcctatttcccgactcctgttttccatgagaatagattttcttcaaacgctcttggcctaccttcacttctttattcactctgaacctgggaaaacatagtaatttattgactggtaagttttgcattggcatttcccttctacttgagagtgagtccatatccagaaagaatt

SEQ ID NO: 430322 - DNA, 634 bp, Homo sapiens
aatttcaggtcttgggtttaagtctttaattattttgaattgatttttatatatggtaaaagatggaaatatagtttcattcttctgcatatagatatccagttgtctcagtaccatttactgatgaaagtgtcctttccccggtgtatgttcttggtacctttgtcaaaaatgagttaactgtaagtgtgtaaatgtatttctgggttatctgttctgttccatttgcctatgtgcctgtttttatgccagtatcatgctattttggttaccatagctctgtagtataatttgcagtcaggcaatgagatgcttccgtctttgttctttttgcccagggttgatttggctattctgggtcttttgcgattccacgtaaattttaagattattttttctatttctgtgaagaatgtcattggtattttgataggaattgcatgactattcttaaggagaatcctatttcccgactcctgttttccatgagaatagattttcttcaaacgctcttggcctaccttcacttctttattcactctgaacctgggaaaacatagtaatttattgactggtaagttttgcattggcrtttcccttctacttgagagtgagtccatatccagaaagaatt

SEQ ID NO: 430323 - DNA, 577 bp, Homo sapiens
taataaaaatgctggccaggtatgatggcacacacctgtaatctcagcacttcgggaggttgaggcgggtggatcacttgaggctaggagttcaagaccagcctggccaaacatggtgaaactgcatctctactaaaaatacaaaaattagctgggcatcgtggtgcacgcctgtaatcccagctacttgggagtctgaggcaggagaatctcttgaacccaggaggtggaggttgcagtgagctgaaattgygccactgcactccagcttgggcgacagagcaaaactctgcctcaaaaaaaaaaaaaaaaaaaaaaaaagctatacattgagatttgttggaatgcctagggcgataaaatagataatatttaaatgttcataatatatgatccaaagggatattttgggacatcttaagagctgttggggcacatgaaaatgataaaacaaggaagcatggaagaaaggagaccctctcgttctctttgctcacggtcacatacagcataatcttcacaatgctagtaatagctatagctgctgtcctgtcatcttcagcctagccgcttacag

SEQ ID NO: 430324 - DNA, 575 bp, Homo sapiens
gataaaatagataatatttaaatgttcataatatatgatccaaagggatattttgggacatcttaagagctgttggggcacatgaaaatgataaaacaaggaagcatggaagaaaggagaccctctcgttctctttgctcacggtcacatacagcataatcttcacaatgctagtaatagctatagctgctgtcctgtcatcttcagcctagccgcttacagtctgtgcacttatgcaaagcctctctggtgatcctggtggagatacaatgacagatttcaggcttggttgtgagggtaggacacagctcctgctgtaaaggcgatatgcaggctgtgttctggggctgagatcttcatgggtgaagagggagcctccttctgtccacctgggttgatacctagcctgactgagagttaagttgtaaagtgaacagtgagtcttcaatgtttgytcccccttctgccttctcccaactccctttacccacctacctgctctcccaagcagcacagtagctggtggagagtctaacatgaccattagcttgcttggtgactttgagtgaacccct

SEQ ID NO: 430325 - DNA, 551 bp, Homo sapiens
cagagctccctgttgagcagaagaatcatggaagccggcttggtttgtgttaccccattaaatgccttggtggtggttacgcggctacaygtgctcattgtgctatagtcgcaacttaaggagccttgaacaaaagcagttctgagctagctggagagattatcattccatttcatcacacgggggctgtgcttctctcattttctgatgacttcaagtgctgaactaagtgaaccaagtgaaaaagtatggcccagaaacaagatatttttatttatttttggtataatatataaggcctcggcacatgcccacatttcccccttgctatgccatttccagtcctttatcccagccaccttgaactaacatcctccagctgcctgtctagtgcctctgcacacaagtttccctctctctgaaactgaatccatattcatctggcaagaccctgttcaagggctgaaaagtttttcctgacttttctccatgcaaattggccctgggggcagcatgtcctcacttctaatatctaataccagaaatgctcc

SEQ ID NO: 430326 - DNA, 551 bp, Homo sapiens
cagagctccctgttgagcagaagaatcatggaagccggcttggtttgtgttaccccattaaatgccttggtggtggttacgcggctacatgtgctcattgtgctatagtcgcaacttaaggagccttgaacaaaagcagttctgagctagctggagagattatcattccatttcatcacacgggggctgtgcttctctcattttctgatgacttcaagtgctgaactaagtgaaccaagtgaaaaagtatggcccagaaacaagatatttttatttatttttggtataatatataaggcctcggcacatgcccacatttcccccttgctatgccatttccagtcctttatcccagccaccttgaactaacatcctccagctgcctgtctwgtgcctctgcacacaagtttccctctctctgaaactgaatccatattcatctggcaagaccctgttcaagggctgaaaagtttttcctgacttttctccatgcaaattggccctgggggcagcatgtcctcacttctaatatctaataccagaaatgctcc

SEQ ID NO: 430327 - DNA, 514 bp, Homo sapiens
gttgaagtaaatatgtatgtggattagtgggttctgtgaaataattacccagccccagtccataggctgggctttagccactgagttactagagaagaggaaacaaattgtaaagaaagactcttattgtgggaaatggaagtgttcccaggggcccctctttttccccctggaaatgtcttcatattgcagaaatttttccagcttccttgttgtgtgaatttatcttatttaggtctctcatgccaggcccacacaggaaaccatattcctgcaatatggccctgtgtctccttcctttggaatattgtaaacacccgctttgtcccaacagaattaagccaaatgatgacattgcaaagagcctcttggctggctattggtcttgtttttattgttacatgtgggccaagtgtctcagaacttttctcataatcttgtgtgcctctcrcctggattggcattggagagcaataatgcaacttcagtgcgattctgcagatttccttccgaa

SEQ ID NO: 430328 - DNA, 551 bp, Homo sapiens
ataaatatctgaagaagcaatgtggaaaaatatttccaaatttgctgaaaaccataaacccaaaggtccagaagctcaatgatcaccaaacaaaatattttttaaaaacacatcaaggcccagcacagtggctcaaacctataatctcagcattttgggaggctgaggcaggaggatcacttgagcccaggggtttaagaccagtcagggctgggcgcggtggctcaagcctgtaatcctagcactttgggaggccgaggtgggcagattacgaggtcaggagattgagaccatcctggctaacatggtgaaaccccgtctctattaaaaatacaaaaaattagccgggcatggtggcrggcgcctgtagtcccagctactcgggaggctgaagcaggagaatggcgtgaacccgggaggcggagcttgcagtgagccgagatcacaccactgcactccagcctgggcgacagagcgagactccgtctcacacacacacacacacacacaaagaccagtcagaatggctcttggtaaaaagtaaaaaaata

SEQ ID NO: 430329 - DNA, 592 bp, Homo sapiens
catcaggacataaagaggtatattttggctaaaatttttttwaaaaatcaatatttgagtaaagtcagcattcctgaatgcagtcaataaaaccactggctactttgtgctgggaatattgtagtgcctgaaaacaaagatgaatgagacagctgctgtccttcactgatcctccagggcagggataaaggagacgaggctgcaagtaatttccgaagagaacgccaggtgctaccaggagcttaggtaccacaggaggggtttagatttcaaagttgtttaaacttaatgcttttattctttcaaataaaagcatctaattcaacctattttaattgagctaactgtattaatacctttaaaatcattccaagggaggcaaagttttcttaaacacaatgcaaaagcaataaagaaagaaaatgtgatacatttgacttcattaaaatcaaaaacttctgcttattgaaaggtattagtaagaggaatagggaaatcacaggctggaaaaatatatttgtaatacatgtatctgatgcttgcatccaaaataaagaacgcatgtaaaacaataaagaatgtgaaaagcaaa

SEQ ID NO: 430330 - DNA, 520 bp, Homo sapiens
aagaaatcattcatagatgtgttcagttaaggaaaggtgtggcatcctaactgacatccccatgagacagtttccatggggcagtaaaaacagagtgtgtgtttagaggccatggtggccatgggaatgagcctcggatctcctgctgcaaggacagagttgtctggcagcccctgctgttgccctctggatgcaccatcactttcctcctgagccacacatctcccagcttctcccagccagtgattgagcacagtcgggtcactaagtgaggaccaatgcagggccattccagtgagacacaggattcctctcatgggcacctttgacttgatgaatccccagaaacctggccaaaccgtccttttggcactacagtttgagacctcccaccccatcctccttccctctctctttctccaggtgtcagacctgcaygtgatctgaagttctgtctaatcccttctgacagtctgcttcttaacagaccagaactaatgcagaggcaaagctaagagtt

SEQ ID NO: 430331 - DNA, 470 bp, Homo sapiens
tggggagaccattgtaaatagcaaaatcatccacagaaagcacaataatgcaaaaagcaaggtactaaatagaccacaagaaagactcttgtttacagtatgagagctggaacaagaaggcagagtgtcaccttgtttgacctcagccatgactgtgcacattgggtgaatcaaatttttcactrctctgcatatgtccactaatgaccatgaaagcaccattgattttggggttacaaacaaatcctgtgagtagacaaattcacaaatatggaatacacaaataatgaggattgactgtgcatgattatgcatggcattatttttataacaaaattttaatttggttatccaggagctaacctatgcttagttaacccctgtctgaggaaatccttgatcccacagagttctgctttgatctgtagagagaaagcataggaagatagcaacaagtggaccaggtgctt

SEQ ID NO: 430332 - DNA, 266 bp, Homo sapiens
ctgcatcccagctgctccagctgtggctgaaaggggccaatgtggagttcaggctgtggcttcagagggtgcaagccctaagccttggcagcttccacatgatgttaagcctgtgagtgcacagaaatcaagaactggggtttgggaacctctgtctagatttcagaggatatatggtaatacctggatgcccagacagaagtttgctgtatgggagggggyctcatgaaaaacctctgctagggcagtgtgggagggaaatgtgg

SEQ ID NO: 430333 - DNA, 508 bp, Homo sapiens
actaccatctgtggtctcacagaatgccttatccactgtcatagtattccrtacaacattgattctaaccaaggaacttacttcacagtgaatgaagtgtggcaatgggcccatgctcatggaattcactagtcttaccacgttcaccaccaccctgaaggacctggcttgatagaattgtaaaataggcttttgaagactcagtcacagctccagattggtggcaataccttacagggctgggacaaggtcttcaggaggctgtacattctctgcatcagcatccaatatatggtgctgtttctcccctagccaggagtcacaggtccatgaaccaagtggtggaaatgaagatagtactagtaccacttgctattacccctagtgagtcactagcaaaagttttcttcctgttcctacaaccttatgctctgaggtcttagttttgaagagaagaatgcttccatccggaggcataacaatgattccactactgaattgggagttt

SEQ ID NO: 430334 - DNA, 499 bp, Homo sapiens
actccaaataatttttaccaaaaaaaatttgcatatacttttttggtatagagttaatatagcccagttargcatgaaaactttttaaggttatttcattttccccattcccccacctttaataagcaatacatctaaaaagtgcctcaatggaaggcacagaggccctatgtgagctgagttaggtaatatgaatgctgaatactgtactgggaaagagaaaagtcaaacaaaaaggtagtaacaataaaggaacacctggtatttgttggaaatgagaactccttgctcctcctcttttctgtgaccaaggtgttcattgaaagctgtagaattttaaaattctaagttatcttattggcgatttttcttttgttttactgagatttagacctctttggatggatcactatgtattatattgcacacatgcgtgaacacatacgacacactgctgttgcagcactaccctacgcccagtacttgactgttgccaact

SEQ ID NO: 430335 - DNA, 499 bp, Homo sapiens
actccaaataatttttaccaaaaaaaatttgcatatacttttttggtatagagttaatatagcccagttaagcatgaaaactttttaaggttatttcattttccccattcccccacctttaataagcaatacatctaaaaagtgcctcaatggaaggcacagaggccctatgtgagctgagttaggtaatatgaatgctgaatactgtactgggaaagagaaaagtcaaacaaaaaggtagtaacaataaaggaacacctggtatttgttggaaatgagaactccttgctcctcctcttttytgtgaccaaggtgttcattgaaagctgtagaattttaaaattctaagttatcttattggcgatttttcttttgttttactgagatttagacctctttggatggatcactatgtattatattgcacacatgcgtgaacacatacgacacactgctgttgcagcactaccctacgcccagtacttgactgttgccaact

SEQ ID NO: 430336 - DNA, 391 bp, Homo sapiens
ttttataccacatacaaaagttaacttgaaatggattagagactttataagatctgaaaacagcaatcctgatgtaattgaactggttacaggtgggcactgggatttgtaaaggctcttggtgattttaacatgaattcagagcttagaagcactacattagaagtttattaattctccctacagcattcactgctttccccattaatattactmttttcttctttgtttgtctaacccctacccattctttgagatccaactcaaagtggccaaaaggataggtcacagatctcaattcaaagtgtcatatagtgacccaaactcatagatccaactcaaagagtactatgggatctttctttaccacccagtgccaattagttcccat

SEQ ID NO: 430337 - DNA, 567 bp, Homo sapiens
aaagggctgtatagtaggtacattctttggtacaagcagacctgccacttggactctgtgagccagcagatcccatggtactagaggtgtctgttgtaaagaaagatgccacgtggtacttctggcaagccccaataggcgagtcacagcacagaccccaggatcctggagcaaggccatgccatctgctgcagagaactatactccatttgaaaaacagctctgtcatgatmctgggccctggtagaaactgagcatctgaccatgggacactaagtgaccatgagacacagagtgaacataagttggattctgtcagactctctgtgtcataaggtcagctgggtgcagcagcaatcccctgtaaggaatccagtaggtctgcaattagatccaagcaaatccagagagcatgagtgagctgcacaaataggtggctgagacccccatgtcaactgctactgttgtaccaacgcctctccctaaactcatagctatggccgcaggggagttccccatgaacagttgacaatgaaagaaaaaaatccaagcttggatcttagatgg

SEQ ID NO: 430338 - DNA, 391 bp, Homo sapiens
ttttataccacatacaaaagttaacttgaaatggattagagactttataagatctgaaaacagcaatcctgatgtaattgaactggttacaggtgggcactgggatttgtaaaggctcttggtgattttaacatgaattcagagcttagaagcactacattagaagtttattaattctccctacagcattcactgctttccccattaatattactattttcttctttgtttgtctaacccctacccattctttgagatccaactcaaagtgrccaaaaggataggtcacagatctcaattcaaagtgtcatatagtgacccaaactcatagatccaactcaaagagtactatgggatctttctttaccacccagtgccaattagttcccat

SEQ ID NO: 430339 - DNA, 567 bp, Homo sapiens
aaagggctgtatagtaggtacattctttggtacaagcagacctgccacttggactctgtgagccagcagatcccatggtactagaggtgtctgttgtaaagaaagatgccacgtggtacttctggcaagccccaataggcgagtcacagcacagaccccaggatcctggagcaaggccatgccatctgctgcagagaactatactccatttgaaaaacagctctgtcatgatcctgggccctggtagaaactgagcatctgaccatgggacactaagtgaccatgagacacagagtgaacataagttggattctgtcagactctctgtgtcataaggtcagctgggtgcagcagcaatcccctgtaaggaatccagtaggtctgcaattagatccaagcaaatccagagagcatgagtgagctgcacaaataggtggctgagacccccatgtcamctgctactgttgtaccaacgcctctccctaaactcatagctatggccgcaggggagttccccatgaacagttgacaatgaaagaaaaaaatccaagcttggatcttagatgg

SEQ ID NO: 430340 - DNA, 513 bp, Homo sapiens
tgcaccagcagaagtgctagctgaggtggaggggaatctagaaagggtagtgcaggagggagataatgagtatcagttatggccttggaaccagctgcagcaacaggggctgtagtttgtcccaatacccttgtcttttaaaaatttcccagaaattgggattagaaactgctcagatggagaaatttcacatgagaagcaaaagatctcagcaatacaaagcgtggaccatagtgaacgttttttgtttcctgcccaaatccactctataagctcatgcatctgtactccagctgctgggagtrttggataacaatttcagctgccttcttctctagagaatttcccttggctaaaacaggagccacctcacgcatgaggttctgctgcaatcctgcccctgaagatctcacccaatgagggacaggcatgtacgtacaaagagctggccaacaaggccacttggtggtgaatttcacgggatcagtggaggctcattcttgtttccttgtc

SEQ ID NO: 430341 - DNA, 613 bp, Homo sapiens
aaataacatcagaagaactgcaacagcggttagatggcgtcaaggaacaactagcatctcagcctgacttgagagatggaacgaattacagaggtactatggagtcctttccataaggaacaggcttgattggagcacttgcagaaatgaaattcttagaccttgtatagtatgtttgtcttcaattttttccagttttaatgtgatactcattcagataatatatatatgagtagtaaagcagtatggttaagcagtataggacagaggaatgaatgcaaagatgtcttaaacacacagattgccttcagagagctttatgtaataatatacaattaagttaattcccagcatgcttctttttaatcttggaatgtacacattactttttctaaagtgatattacttagcttctaaaaatttatatacagaaccgtgtagaaagactgagttaggaaacctgtttttgtttctttgttctgtttgatggtttacatataaaaagttcttataaggaaagtactrtaaaagaacttcaaactaaatgaagtatgtagagttaaaaggaaaagccacttttgtgttcctcttaaccagttctacttccctcctc

SEQ ID NO: 430342 - DNA, 575 bp, Homo sapiens
atgtgaactatgtttttctgttgttccactgtggtttattcaccctccactaatatttcatactagatgccaggcagtgttatgggatagagtatttcccagacgacagacaaaagtccctggcttcatggaaaagacatatttgctcttagaaactgaawatcaattgataaagtgaattattattcttactttcatatttgcttattaatatatgacaggattttcttgtggtgatactgtttgggcaaaatcacaagaacagtacttaggccagattctgtgagatttagaaatatctccacatttaattttcctttctgactggtgactatgttcaattcattaggttagatgcatgcccaggaatgttaaggagtgcatttacatggagtaaaaggttttcataaaagttgtgactttgtttggagtaaattatttatgtaggtcagtttgaggatctaagactgggaaggttgatttcaatcagatttgaaggcttttcatagcaaactaaggactttttatcttaccttatagagatgttagatgtctcttgattttagtggcatagg

SEQ ID NO: 430343 - DNA, 571 bp, Homo sapiens
agtatatatatatatatctcacatcttctcacacatttaattgtaaaaatgctcctacttaatcctaatccagccaccttctgtgcaattccaaatgtgctgtgcaattccaaatgtgctcaccttctccccagtgggtaacaatccaaaatcacatgcagcttctgtactgtgaagtgacacaatttagcccctctgagttcaggttttctaggtagtgtcaattcctccattagcttggatctgatcaggtttgtgacttctcaccattctgcagattatgggataaatgataaaagtagcttctcctgcctacccgatacagtgaaatggaataaaaatcaaacaaaaacagggaragaagtgccatacattgattactggtacagattatataatagcatatctcgctgagcaagcttagcaggatgaatgatagaaacaatgggtctcatgagcattctctttgttgcctcacttctctggatgtagaataaattgttggaaccacttcagaaaaggcaccaagggaggatttcctactggtgcttgtggtggtgatggcaggcag

SEQ ID NO: 430344 - DNA, 560 bp, Homo sapiens
aaaactttcatggtgaattccccaccttctattttattcctgttttgaaatggagttccccaacatcaccattacagctcagccatatctttgcatttctttgtggacttagttagaactgaatgattgatgattttcagcgcgaggagtacaaaataggggagttgayacttgcatcagccctgctagctgccttgaatcctagctcagtaggggtcactcttaagctgccataggcataacaacttctacataggtggcacttctggcactttggagaacattctagtggtgggatagttccctaacccctgtcttatctctgtggtaccctgcatctatgccatttttgtttggttacataaaatgtttctgtggagtgattggcctatgattgcattgataacatttagtaaaacagaagatttgttcctaacacgttttacagagctgatctttttattgaaaaatccctaaccctaaagaccacagttttttgtttgtttattttgtttgttagcctcatagggataaagtgcttccttataatcttgtttcca

SEQ ID NO: 430345 - DNA, 267 bp, Homo sapiens
tccgtttgtgggcgtaatgtgctctctctctttcctcagtgatgycatagcccttcactatggattggatctgctatgagggctatctttataatgaagtcaagagtttctgtccagatcatcaatcttgcagtgttaaggaaagtggaaggactcaaatatccctgctgcgggagcaagcatcattgatctgtgaaagctcagggtttgaatagttactgaatctgaatgtgttgatcctaaatattaatatgatttagtaagcat

SEQ ID NO: 430346 - DNA, 573 bp, Homo sapiens
cagaaaagctgggagttttccacctgcaccttgcagggtgtgaaacctgattataattatctgagtccagaacctaactctgtgttaaacacaaacacgaagtagcttttaagaggtttcaatatatactgaattttccaataatataactaccatgtaaaatgagagaaaatcgtgttgtgttttgtttgcaattttgccaagaattatttaccattttggaaaaacacaacactgattagtcatcttatttgagttgacaataccacaaatctttatcagtctgcatctgtggctgctacattcatgttttctttgacataagggcataaataactcaatacttcaatatttctttagtgtaatcataaccacctatatacatattgaaatatgaattactttattcgtcacacttttaatttttatctctttaaatatattacttgatatgtaaaactgtgtaacacatatatgtattaaawtgtgtaataatataatgagtatcaatgaattcacaatgccattcatgaaatagaacactgtattagtccgttttcacgctgttgataa

SEQ ID NO: 430347 - DNA, 584 bp, Homo sapiens
ataaactaagaaaaatgcatatactgataatgtatttatataggaaataaataatgataatacaaatttacaaagctgagaaaattaagggaatgaattgtgtctgtttttatttgaaaagactattatagttagttgagatgtaagggttgaaatatgattgctatgattcttatacttatcagaataattttacagatgacatagcatacaattactagtataattactactcactccaggaaataattgaagtcatttattaattttgagattttttttccttttttccaaaacattatcataagagtttttccatctttatatggacaagtgtattcagatttttctcrtttttcagataggaataatatgtgctaggcacacaactgataacaacaacaaaaaataaaaacatgacaacaggactagagtatatctacccatgtgtacaaatgtgcctgtgatatgaaggttgaagtatttgccaaccaaatggtaacttgccttctaaactagattcctttcaaatccatacttcccctttatactgacatgttggttacctacattcagaggaatat

SEQ ID NO: 430348 - DNA, 584 bp, Homo sapiens
ataaactaagaaaaatgcatatactgataatgtatttatataggaaataaataatgataatacaaatttacaaagctgagaaaattaagggaatgaattgtgtctgtttttatttgaaaagactattatagttagttgagatgtaagggttgaaatatgattgctatgattcttatacttatcagaataattttacagatgacatagcatacaattactagtataattactactcactccaggaaataattgaagtcatttattaattttgagattttttttccttttttccaaaacattatcataagagtttttccatctttatatggacaagtgtattcagatttttctcatttttcagataggaataatatgtgctaggcacacaactgataacaacaacaaaaaataaaaacatgacaacaggactagagtatatctacccatgtgtacaaatgtgcctgtgatatgaaggktgaagtatttgccaaccaaatggtaacttgccttctaaactagattcctttcaaatccatacttcccctttatactgacatgttggttacctacattcagaggaatat

SEQ ID NO: 430349 - DNA, 546 bp, Homo sapiens
tgggattaattgatgttatttctcttttctttattcactttactaaattcatgtttttgtctaatcttctaagaatcatgagaattgatctaagagtttactgattagaaaattttcccaaarggaaaaaagatacttatgtctttgttttaggagcagcttctgcttagaaaataaatgtgaatttattacttaggtgtcagagtgtttattttaattaggaaagaaactgtctgtctctgaacactgtacagcttctttttaaaaagccaaaattaattacatatgccactgtcataatacgtaatataacctattgactctagaatttgagttgttagctctgtcttataaataaatataattttattgctcaatgctttttgaagtgtgaaaggggccattgaggtcatatttaaatgcctataagagggttttacatctgcaatctccaaagagacattgataatgggaccataaaagaatacttgtgaagctagtccttagtgccactgactttttgcagtagttgtgagcatggttcta

SEQ ID NO: 430350 - DNA, 546 bp, Homo sapiens
tgggattaattgatgttatttctcttttctttattcactttactaaattcatgtttttgtctaatcttctaagaatcatgagaattgatctaagagtttactgattagaaaattttcccaaagggaaaaaagatacttatgtctttgttttaggagyagcttctgcttagaaaataaatgtgaatttattacttaggtgtcagagtgtttattttaattaggaaagaaactgtctgtctctgaacactgtacagcttctttttaaaaagccaaaattaattacatatgccactgtcataatacgtaatataacctattgactctagaatttgagttgttagctctgtcttataaataaatataattttattgctcaatgctttttgaagtgtgaaaggggccattgaggtcatatttaaatgcctataagagggttttacatctgcaatctccaaagagacattgataatgggaccataaaagaatacttgtgaagctagtccttagtgccactgactttttgcagtagttgtgagcatggttcta

SEQ ID NO: 430351 - DNA, 546 bp, Homo sapiens
tgggattaattgatgttatttctcttttctttattcactttactaaattcatgtttttgtctaatcttctaagaatcatgagaattgatctaagagtttactgattagaaaattttcccaaagggaaaaaagatacttatgtctttgttttaggagcagcttctgcttagaaaataaatgtgaatttattacttaggtgtcagagtgtttattttaattaggaaagaamctgtctgtctctgaacactgtacagcttctttttaaaaagccaaaattaattacatatgccactgtcataatacgtaatataacctattgactctagaatttgagttgttagctctgtcttataaataaatataattttattgctcaatgctttttgaagtgtgaaaggggccattgaggtcatatttaaatgcctataagagggttttacatctgcaatctccaaagagacattgataatgggaccataaaagaatacttgtgaagctagtccttagtgccactgactttttgcagtagttgtgagcatggttcta

SEQ ID NO: 430352 - DNA, 548 bp, Homo sapiens
ctctcgtgctcaactgttcctcctgcctcagcctcctgagtaactaggactacctgtgtgtgccaccacccctggcaattttttttaaatttttgtagagacaggatmttgcgatgttgtccagaatggtcttgaactcctagcctcaagcggtcctctcaccttggcctcccaaagcactgggattacatgttgaaccaccacacctggccttttaactctattttcaagagatattcttgattatatattttattctttctaatgacttccaacttttgattggtgatgtttaatttctatacattctcatttgttctattacatttgcttttatataaaatcctgtccctttttattgatgaaattggtatcatcccaaatatacttgagtagcctaattatatttttctttcatacttcttccttgaattgtatgtatttctcctagtgtaaaatattcaatttaatccttatgctctttctattttgtacaattttttcaaatatgggtttatctttgatggttagtcatttggtaaaaatca

SEQ ID NO: 430353 - DNA, 548 bp, Homo sapiens
ctctcgtgctcaactgttcctcctgcctcagcctcctgagtaactaggactacctgtgtgtgccaccacccctggcaattttttttaaatttttgtagagacaggatattgcgatgttgtccagaatggtcttgaactcctagcctcaagcggtcctctcaccttggcctcccaaagcactgggattacatgttgaaccaccacacctggccttttaactctattttcaagagatattcttgattatatattttattctttctaatgacttccaacttttrattggtgatgtttaatttctatacattctcatttgttctattacatttgcttttatataaaatcctgtccctttttattgatgaaattggtatcatcccaaatatacttgagtagcctaattatatttttctttcatacttcttccttgaattgtatgtatttctcctagtgtaaaatattcaatttaatccttatgctctttctattttgtacaattttttcaaatatgggtttatctttgatggttagtcatttggtaaaaatca

SEQ ID NO: 430354 - DNA, 548 bp, Homo sapiens
ctctcgtgctcaactgttcctcctgcctcagcctcctgagtaactaggactacctgtgtgtgccaccacccctggcaattttttttaaatttttgtagagacaggatattgcgatgttgtccagaatggtcttgaactcctagcctcaagcggtcctctcaccttggcctcccaaagcactgggattacatgttgaaccaccacacctggccttttaactctattttcaagagatattcttgattatatattttattctttctaatgacttccaacttttgattggtgatgtttaatttctatacattctcatttgttctattacatttgcttttatataaaatcctgtccctttttattgatgaaattggtatcatcccaaatatacttgagtagcctaattatattttkctttcatacttcttccttgaattgtatgtatttctcctagtgtaaaatattcaatttaatccttatgctctttctattttgtacaattttttcaaatatgggtttatctttgatggttagtcatttggtaaaaatca

SEQ ID NO: 430355 - DNA, 579 bp, Homo sapiens
catgctataaattacatcctcagaacttcttcatcttatacctgaaattgtgtacccttttaccattatctccacatttcccttaggctttcaggtttttgtgtggacaaacgttttccactcatttgtgtaaatatcaagaagtgtgaattattgaattgtatggtagcgctatgtttagttttgtaagtaactgacaaaatgtcttccaaagtggctatgccatcttggattcccaccaacgatgattgagagctcctgttgctctaaatccttgtgttttaatacaattttgtaaaagtattatagtccaagaatacgaaatgtgcccaatatagaaaattcaaatttatccctaatcctattaaaaaaactattttctgctactatgtgtgtatttatatatacacagtcatacagtgtatatatgtttgctttctgcctttttcatttaaagacacatcatcaaagaataccatgtttttgcacactcttcagaagagcacttttttttgggggggtgggcrggcagggagatggagcctggctctgttccccgggctggagtgcagtggcgtg

SEQ ID NO: 430356 - DNA, 335 bp, Homo sapiens
taagaagcgtcaatcagggtactatttctacttttctcaatatattgctctggaattctggatcagtcataatcttttaatgtctctcaactgtaaaatggggctaatcacaaggagtggatccagactttgtggaaacaraagcttatatatttggacatgtggtctttaaaacctctccaaatatatacctgtgaaattatatggcttttaattatcttcacagaaaacccatatctactaacactgatcctatctgaagataaagaaaggtgccatatatacagaaggcgcattcacaaaacatcatgtttttactctgttaacctcactca

SEQ ID NO: 430357 - DNA, 335 bp, Homo sapiens
taagaagcgtcaatcagggtactatttctacttttctcaatatattgctctggaattctggatcagtcataatcttttaatgtctctcaactgtaaaatggggctaatcacaaggagtggatccagactttgtggaaacagaagcttatatatttggacatgtggtctttaaaacctctccaaatatatacctgtgaaattatatggcttttaattatcttcacagaaaacccatatctactaacactgatcctatctgaagataaaraaaggtgccatatatacagaaggcgcattcacaaaacatcatgtttttactctgttaacctcactca

SEQ ID NO: 430358 - DNA, 494 bp, Homo sapiens
gcaggttgtacaagcatggtgctattaatagcgactgctcagcttcagagtcggcctcaagggagctttcactcatggtgaaaggtgaagcgggaggagggatgtcacaaggycagagcaggatcaagagagaaggggggatgtaccacatacttttaaacaactagatcttgtgtaaactcactcatcaccaaggaaatgttggtaggccattcatgagggatgtgctcccatgatccacacacctctcaccaggccccaacaccaatactgaggattacatctcaacatgagatttagagaagacacccaaactatatcaactgtcatacagattagaaagttatagtcccattaaagtgtcttgttgatttgggaaattgatgtgacaagtgagaaagttaggatagaacatgattgtgtcaaaatttaacagtgatttccttctaatacaattatataaacatcattttaaatatatttttaagttttct

SEQ ID NO: 430359 - DNA, 494 bp, Homo sapiens
gcaggttgtacaagcatggtgctattaatagcgactgctcagcttcagagtcggcctcaagggagctttcactcatggtgaaaggtgaagcgggaggagggatgtcacaaggtcagagcaggakcaagagagaaggggggatgtaccacatacttttaaacaactagatcttgtgtaaactcactcatcaccaaggaaatgttggtaggccattcatgagggatgtgctcccatgatccacacacctctcaccaggccccaacaccaatactgaggattacatctcaacatgagatttagagaagacacccaaactatatcaactgtcatacagattagaaagttatagtcccattaaagtgtcttgttgatttgggaaattgatgtgacaagtgagaaagttaggatagaacatgattgtgtcaaaatttaacagtgatttccttctaatacaattatataaacatcattttaaatatatttttaagttttct

SEQ ID NO: 430360 - DNA, 585 bp, Homo sapiens
tatcaaaatattctttcttgcctcttctagcctctgggagttaccatcaatccttgctcttcttcaggttgtggcagcataaatctaatctcagcctctgtctttacatagccattttcctctgagtatattggtgtcgaagtttccctcttcttatagggacaccagtcactggattagaatttaccctaatccttcatgaccacatcttaacttgactacatacgcagagatcctatatccaaataagatcctattcacaccttctgggtggacataactttgaaggggatactcttaaattcagtacacaccatatggatgaaccacaatttatttcttcattggtcagttatttccattttctggcttttacagtaagtgtgctatttgtgtaaacactcttgaggaataatgtgtttttttttctttccaacatttattttaggtttgggagtacmtgtgaaggtttggcgtatagatcattttatcatctggataataatcctagtacccagtaggtggattttcaatcctcaccctcctcataccctccaccttcaagtaggctgtggtatttactgt

SEQ ID NO: 430361 - DNA, 585 bp, Homo sapiens
tatcaaaatattctttcttgcctcttctagcctctgggagttaccatcaatccttgctcttcttcaggttgtggcagcataaatctaatctcagcctctgtctttacatagccattttcctctgagtatattggtgtcgaagtttccctcttcttatagggacaccagtcactggattagaatttaccctaatccttcatgaccacatcttaacttgactacatacgcagagatcctatatccaaataagatcctattcacaccttctgggtggacataactttgaaggggatactcttaaattcagtacacaccatatggatgaaccacaatttatttcttcattggtcagttatttccattttctggcttttacagtaagtgtgctatttgtgtaaacactcttgaggaataatgtgtttttttttctttccaacatttattttaggtttgggagtacatgtgaaggtttggygtatagatcattttatcatctggataataatcctagtacccagtaggtggattttcaatcctcaccctcctcataccctccaccttcaagtaggctgtggtatttactgt

SEQ ID NO: 430362 - DNA, 573 bp, Homo sapiens
ggtagttacagcacagcttctggactgcaatcctatatatctccagaaacttagaatgcacttaagaaaaggtgggtatcctgctaagagtaagagattaagaaaccaccttctcagaccccagtgtgcattgttcacctcaagagaaagaagtgtgaagtccattttaatagctgacacttttaattagctatgggaattctattcaaaaagcatttattgagagttgaaaatatgcaaaggcacataggtacatatgtgaataagacagctaaacaaaggttgttcataaaagaggtagtattggtactggagacagattggtatgtaaaagttataaaacagtgcttttataataaaagggaaatacaatcgaagaattctttaaaaagataatgggtggaaacaattcagagctaaaaaaaaaaaaagcaacctggtatcttcgagatggaagacatagggratttaaattcagacatatgtaacatggaaaaaagggactagctagattttacttgagaagcaaatgttttggtccatatgatccagattcatatgtctttgcaaact

SEQ ID NO: 430363 - DNA, 632 bp, Homo sapiens
atgcaaaccaataaatgttatacataatatcaagagaataaaggacaaaatccatattatcatttcaattaattctgagtaggcatttgatgaaattcaacatttttcatgattaaaataacctcaaagaactgggtatagaggaagcataactcaamataatgaaagccacatatgacagaaccacaagtagtatcatattgagtggggaaacactgaaagccttttctctaaaacctgaaatgtgacaagaatgcccactgtcaccagtattatttgacatgtattaaaggtcccagttaaagcaatcagacaaaagatagaaatacagggcatccaaattaaaaataaataagtcaaattatccttgtttacagataatataatcttatatttgaaaaaattgaaagggacacaaaaaatcaaaagatattccatattcattgattggaagtatcattattgtcaaaatgtctatacaatctaaagcaatctacagattcaatgcaattcctatcaaaataccatggcattcttcacagaaatagaaaaaataaactatgctaaaatgtatatggagacacaaaagactcagaatagtcaaagctctcttaagcaaaaataacaaaact

SEQ ID NO: 430364 - DNA, 632 bp, Homo sapiens
atgcaaaccaataaatgttatacataatatcaagagaataaaggacaaaatccatattatcatttcaattaattctgagtaggcatttgatgaaattcaacatttttcatgattaaaataacctcaaagaactgggtatagaggaagcataactcaacataatgaaagccacatatgacagaaccacaagtagtatcatattgagtggggaaacactgaaagccttttctctaaaacctgaaaygtgacaagaatgcccactgtcaccagtattatttgacatgtattaaaggtcccagttaaagcaatcagacaaaagatagaaatacagggcatccaaattaaaaataaataagtcaaattatccttgtttacagataatataatcttatatttgaaaaaattgaaagggacacaaaaaatcaaaagatattccatattcattgattggaagtatcattattgtcaaaatgtctatacaatctaaagcaatctacagattcaatgcaattcctatcaaaataccatggcattcttcacagaaatagaaaaaataaactatgctaaaatgtatatggagacacaaaagactcagaatagtcaaagctctcttaagcaaaaataacaaaact

SEQ ID NO: 430365 - DNA, 636 bp, Homo sapiens
taatcttgccatgcaaactaaattgcaaaaattactattgctaggataacaaatataatagtcaaatcatattgcttggagctttgtaaaacacacaggtatcaaaattaaaacagaatttgccaggaaaatgatctaatattattactccttatatcagtgtatagaaaccaattttatggttgcatactgcataaaggtaaartgtttattataccagaaaatgtatatgtgttaaaccagtaattaactgaattggtagggaaaaattatgaagtgtacataacaagtgtctatttctctctctcatacaaacacacatccacgcacaaacacacaagcggttgattctagagtcaagccactaaacttatcttaccttcagtttctttattaataaaatgatgattaaacacaaggaaacacacacacacacaaagttctgtttttcttatcttacagaatgtttgtttagagaaaatgagataatttgtgtaaaaatgctttataaactctaactcatggttatagctaataatgagacatgaagaagacaccattaaagaactccattaaaaactcaacaatgttgatgtatttctaccctgaatatttcgctggacaagtaaacaactg

SEQ ID NO: 430366 - DNA, 636 bp, Homo sapiens
taatcttgccatgcaaactaaattgcaaaaattactattgctaggataacaaatataatagtcaaatcatattgcttggagctttgtaaaacacacaggtatcaaaattaaaacagaatttgccaggaaaatgatctaatattattactccttatatcagtgtatagaaaccaattttatggttgcatactgcataaaggtaaagtgtttattataccagaaaatgtatatgtgttaaaccagtaattaactgaattggtagggaaaaattatgaagtgtacataacaagtgtctatttctctctctcatacaaacacacatccacgcacaaacacacaagcggktgattctagagtcaagccactaaacttatcttaccttcagtttctttattaataaaatgatgattaaacacaaggaaacacacacacacacaaagttctgtttttcttatcttacagaatgtttgtttagagaaaatgagataatttgtgtaaaaatgctttataaactctaactcatggttatagctaataatgagacatgaagaagacaccattaaagaactccattaaaaactcaacaatgttgatgtatttctaccctgaatatttcgctggacaagtaaacaactg

SEQ ID NO: 430367 - DNA, 620 bp, Homo sapiens
taaaactgggcattctcattctcaatttaaagcatgtttcagtttggagacacatggaaataaaacttcaattggcctctaaaaatgcattcagaacaatgtacatctttttcgatggaatcttgaagatacaaagaagaaaaatagcctaatcacatagccaaactctctaaaactttttcctcatcactttgttctaaatccatacctaactatggctactttgatctctttctcttctcccacaactctcttgtctagttgctttcatgagattattcctcctttggtgattctcacttcatcattttactttctggatattttatttttcttcaccagtttctctatgtatacattattttgaatattttaatccctgttccttagatttttcaattttatgtctcaaaaaattatgctactcagcaaaacaacaagaaattcagaagcagaaaggttcctccttcctaaaaattgggtaagcattggaaaataattttacaggaatatgtatatttctttctgmagcaaacggacttcttggggaggtatttatctttgtcaacctgaacttttaaaaatccatttgatgagatatagcagtcaggaaaacaaac

SEQ ID NO: 430368 - DNA, 630 bp, Homo sapiens
taacttctctgacattcagatatatttttaatgagatgtataagtttttaagtatcaaatttgtaaagattaagcagatgttagaagtaaacatttctcaatatttatagcaatcttttagaaatatacgtaaaaccattttaaattgcaatytttttaggtcaaaaattcaaagtctagaaatatataaaaatggattaacctgacaattgggtgaggtatgcatgcacacacatatacatatgcaaacaaatgatcttatcaaataactgtctaaataataaaaaactggaaacagatggttaatgaaatgtattgtaacaagtccataaaatggtgcaccatgtaaccgttggtggtaatgaaaaatatttgtattaattgacataaaaaggcaccacgacatattttggagtgtcaatagcagtgtgcatagagcatttagaacaacacacacacctgcatcctcagacatggtgtatatatgactaaggatacatctgaaaagacattttcaacatatcgaaaatttttaatgctactatttttggctccttttactttctttattacaattttctgtgttgtttgaatttttcacaatgattacatatcaatttttataatctg

SEQ ID NO: 430369 - DNA, 603 bp, Homo sapiens
aaaaatagctcagttaaaaatctctgggttaatgatagtcatttatgtgaaagtgcaataaatacaattttttaaaaaatttacacacatattttaagtgattacttgagttgtttcttccgtgattgttttgagctttcaggagttttcaagagtaatatggataatggatattttctgttgagagcagaggatgttataactcatttcttgaattacttgatgcctaacacagtgtcttcaatttgattgctaggttccggaaactactccctgataaactgagactcaagcaacctccaatgttggtggcttttgcctttgcagatttaatccttaactcacaactgaacttagcctgaggtctgtgctstattttcacactacgcacagtcataaacacatcgtttctctcaggccaccggcatatcatttagtactttctgactatggagtcttagctgatatcttcattgactgacaactaatactagtgttagcattaaattaattagttgtagaaaactcaaaaattctaaagaggtatcttcaagttcaagtgaaattctgttcattgtatacatcttggtaactctgtgtaaa

SEQ ID NO: 430370 - DNA, 603 bp, Homo sapiens
gtggctgaatggagcaaaaaacaagacgcaatgttattttgcctacaagaaacatacttcacctaaaaatatacctatacacttaaaataaactgaggacaaaaaatattgtatgccaatggaaaccaaaacagagaaggaggagctgcacttacatcagacaaaatagattttaagaaaaaaaactgtgaaaagagacaaagaaagttatgatataatgataaaagtgtaaattcagcaaaagaatataatgattgtaaatatatgtacacccarcaattgaacacccagatatataaagcaaatattattagcactaaagagagagctagaccccaacaaaatatcttgagacttcaacatcccagtctcaacattaaacagatcttccagacagaaaataaacaagaaaacactagacttaattttcactataccaaatggatttaataggtataaacagaacatttcatccaacagctgcagaatacacattcttttctgcagtacatgatcatttttaaggctagcctatcttaggccacaaaacaagacttaaaacattcagaaaaattgaaataatatcatgtatctcctttgaac

SEQ ID NO: 430371 - DNA, 563 bp, Homo sapiens
tttacaatttcataatgtagtctctattaaccttacaagtcmtgtggtattgaacataactttctattatccttaagaagcttcaaagcactaatattttataaccattaaatttttacttgaaacattttggatcaaatttcttattgtttttgtttttctacttttcacatagaactcaaaaaatggacttttaaccttggtagtaatcagagggagtcttgaatttgaagtgatgctaaacacccacacttcatttgcatttatttactgcctttatttttgcaatttttaatttcataaagtgtctcaggacttcctataaaggtgtacgtataaaaatagtctcatataatcacaccatgcagagataactattgttttcattcatattctttcttatcactccataatccattcacaactcacacttgtgtatttattgtgagaatgttatataccaggaactgtactaaatgctttacacggattggctagtttaagtcatacaacagccttttatcagtcatgttattacttgcagataatgaaaacaaaccacg

SEQ ID NO: 430372 - DNA, 563 bp, Homo sapiens
tttacaatttcataatgtagtctctattaaccttacaagtcatgtggtattgaacataactttctattatccttaagaagcttcaaagcactaatattttataaccattaaatttttacttgaaacattttggatcaaatttcttattgtttttgtttttctacttttcacatagaactcaaaaaatggacttttaaccttggtagtaatcagagggagtcttgaatttgaagtgatgctaaacacccacacttcatttgcatttatttactgcctttatttttgcaatttttaatttcataaagtgtctcaggacttcctataaaggtgtacgtataaaaatagtctcatataatcacaccwtgcagagataactattgttttcattcatattctttcttatcactccataatccattcacaactcacacttgtgtatttattgtgagaatgttatataccaggaactgtactaaatgctttacacggattggctagtttaagtcatacaacagccttttatcagtcatgttattacttgcagataatgaaaacaaaccacg

SEQ ID NO: 430373 - DNA, 525 bp, Homo sapiens
attgctattatcagtgcctgttaattcactcagagtatatgagcaaactataaacctgcaaaggattacagaggatgcttagcgcagtgaagccctgtactgaatgaacaaataagcccccagggaagcttttaaaaattaccagtttctagagccggtccctggacattatgattcaatagatgaagtgyggtggctaggagtttgcatgttaaagaatcttcctagaatatcaatgaacagccaagattgagaacacctgaactgatcagattcctcattttacaagtgaggaatatctggcagagggaggaagattgagatcccaaagcaggaacttgaaaaaaattctcctgatacttaatcctttgttctttccataatatcacatggcaaaagacagatagtagagtcagtggtatttcctgcaagccaggaccattgtatatggtatcctggctgtctatgctgaagtcaggtttatgttctcatgcacataatgtgagccatggagtgctggggcca

SEQ ID NO: 430374 - DNA, 525 bp, Homo sapiens
attgctattatcagtgcctgttaattcactcagagtatatgagcaaactataaacctgcaaaggattacagaggatgcttagcgcagtgaagccctgtactgaatgaacaaataagcccccagggaagcttttaaaaattaccagtttctagagccggtccctggacattatgattcaatagatgaagtgcggtggctaggagtttgcatgttaaagaatcttcstagaatatcaatgaacagccaagattgagaacacctgaactgatcagattcctcattttacaagtgaggaatatctggcagagggaggaagattgagatcccaaagcaggaacttgaaaaaaattctcctgatacttaatcctttgttctttccataatatcacatggcaaaagacagatagtagagtcagtggtatttcctgcaagccaggaccattgtatatggtatcctggctgtctatgctgaagtcaggtttatgttctcatgcacataatgtgagccatggagtgctggggcca

SEQ ID NO: 430375 - DNA, 525 bp, Homo sapiens
attgctattatcagtgcctgttaattcactcagagtatatgagcaaactataaacctgcaaaggattacagaggatgcttagcgcagtgaagccctgtactgaatgaacaaataagcccccagggaagcttttaaaaattaccagtttctagagccggtccctggacattatgattcaatagatgaagtgcggtggctaggagtttgcatgttaaagaatcttcctagaatatcaatgaacagccaagattgagaacacctgaactgatcagattcctcattttacaagtgaggartatctggcagagggaggaagattgagatcccaaagcaggaacttgaaaaaaattctcctgatacttaatcctttgttctttccataatatcacatggcaaaagacagatagtagagtcagtggtatttcctgcaagccaggaccattgtatatggtatcctggctgtctatgctgaagtcaggtttatgttctcatgcacataatgtgagccatggagtgctggggcca

SEQ ID NO: 430376 - DNA, 557 bp, Homo sapiens
tcttctggcttgtagggtttctgctgaatgrtccactgttggcctgatattttgtttctgttttcctttcttttcttttcttttttttccttccttccttccttccttccttccttccttccttccttccgtcctccctctctctctttttctttctctttctttctttcctttctttctttcttctttcttctttctttctttcttctttcttccttccttccttctttctttctctatttgtctgtctcttctctctagttcccactaatattttttctttttctttgaccttggaggatcaaggactatgtgtcttgggaatggtcatcctgtatggtatctcacaggggttatctgagtttcctggatatgaatgttgacctctatagtagtgttgatgaaaatcttgtgtacaatatccttaaatatgttttccaagttgtttgctctctctcactttctttcaaggacaccaattgaagcagaagatataaaaagaaaaacaagtttttctgtactaggctcactcactccaagacccagggaagggcagg

SEQ ID NO: 430377 - DNA, 590 bp, Homo sapiens
tccacccctcctcatcatcggaattggtaagggctgtacagctctgtaaatttactaaaaatgattgaatcatacactgaaaatgaatacatttggtggtatgtaaattatagctcaattgatttttttcttaaagtatttgttttattcaagttgaaatagtttttgtcttattttgtttttatctggtgtttgtttcacatagacctgacacttcggatttaatacaacattcaaattycctatcgggatgctctttcctgctttcagtaggcctgccatattctctatttcaaagttagtatcttagggaagaatcctgtgaactgcagaatgtgctctgaatatctactggtctccagttcagcgaggtgtctctgttcgtgtcctgtgacagcgcacactgaaatgcagctgcacctcttacaaaattttgtcctccacgcagatatatgttgctgaagttcatgttcctgccatggcctatgactgtgagatctctgtattttgtggcttcttttcatcagtcccagactaattttgatttactggttttcccaacccttaggggtctggtaaaaatatcttgg

SEQ ID NO: 430378 - DNA, 590 bp, Homo sapiens
tccacccctcctcatcatcggaattggtaagggctgtacagctctgtaaatttactaaaaatgattgaatcatacactgaaaatgaatacatttggtggtatgtaaattatagctcaattgatttttttcttaaagtatttgttttattcaagttgaaatagtttttgtcttattttgtttttatctggtgtttgtttcacatagacctgacacttcggatttaatacaacattcaaattccctatcrggatgctctttcctgctttcagtaggcctgccatattctctatttcaaagttagtatcttagggaagaatcctgtgaactgcagaatgtgctctgaatatctactggtctccagttcagcgaggtgtctctgttcgtgtcctgtgacagcgcacactgaaatgcagctgcacctcttacaaaattttgtcctccacgcagatatatgttgctgaagttcatgttcctgccatggcctatgactgtgagatctctgtattttgtggcttcttttcatcagtcccagactaattttgatttactggttttcccaacccttaggggtctggtaaaaatatcttgg

SEQ ID NO: 430379 - DNA, 557 bp, Homo sapiens
tcttctggcttgtagggtttctgctgaatggtccactgttggcctgatattttgtttctgttttcctttcttttcttttcttttttttccttccttccttccttccttccttccttccttccttccttccgtcctccctctctctctttttctttctctttctttctttccyttctttctttcttctttcttctttctttctttcttctttcttccttccttccttctttctttctctatttgtctgtctcttctctctagttcccactaatattttttctttttctttgaccttggaggatcaaggactatgtgtcttgggaatggtcatcctgtatggtatctcacaggggttatctgagtttcctggatatgaatgttgacctctatagtagtgttgatgaaaatcttgtgtacaatatccttaaatatgttttccaagttgtttgctctctctcactttctttcaaggacaccaattgaagcagaagatataaaaagaaaaacaagtttttctgtactaggctcactcactccaagacccagggaagggcagg

SEQ ID NO: 430380 - DNA, 590 bp, Homo sapiens
tccacccctcctcatcatcggaattggtaagggctgtacagctctgtaaatttactaaaaatgattgaatcatacactgaaaatgaatacatttggtggtatgtaaattatagctcaattgatttttttcttaaagtatttgttttattcaagttgaaatagtttttgtcttattttgtttttatctggtgtttgtttcacatagacctgacacttcggatttaatacaacattcaaattccctatcgggatgctctttcctgctttcagtaggcctgccatattctctatttcaaagttagtatcttagggaagaatcctgtgaactgcagaatgtgctctgaatatctactggtctccagttcagygaggtgtctctgttcgtgtcctgtgacagcgcacactgaaatgcagctgcacctcttacaaaattttgtcctccacgcagatatatgttgctgaagttcatgttcctgccatggcctatgactgtgagatctctgtattttgtggcttcttttcatcagtcccagactaattttgatttactggttttcccaacccttaggggtctggtaaaaatatcttgg

SEQ ID NO: 430381 - DNA, 590 bp, Homo sapiens
tccacccctcctcatcatcggaattggtaagggctgtacagctctgtaaatttactaaaaatgattgaatcatacactgaaaatgaatacatttggtggtatgtaaattatagctcaattgatttttttcttaaagtatttgttttattcaagttgaaatagtttttgtcttattttgtttttatctggtgtttgtttcacatagacctgacacttcggatttaatacaacattcaaattccctatcgggatgctctttcctgctttcagtaggcctgccatattctctatttcaaagttagtatcttagggaagaatcctgtgaactgcagaatgtgctctgaatatctactggtctccagttcagcgaggtgtctctgttcgtgtcctgtgacagcgcacactgaaatgcrgctgcacctcttacaaaattttgtcctccacgcagatatatgttgctgaagttcatgttcctgccatggcctatgactgtgagatctctgtattttgtggcttcttttcatcagtcccagactaattttgatttactggttttcccaacccttaggggtctggtaaaaatatcttgg

SEQ ID NO: 430382 - DNA, 557 bp, Homo sapiens
tcttctggcttgtagggtttctgctgaatggtccactgttggcctgatattttgtttctgttttcctttcttttcttttcttttttttccttccttccttccttccttccttccttccttccttccttccgtcctccctctctctctttttctttctctttctttctttcctttctttctttcttctttcttctttctttctttcttctttcttccttccttccttctttctttctctatttgtctgtctcttctctctagttcccactaatattttttctttttctttgaccttggaggatcaaggactatgtgtcttgggaatggtcatcctgtatggtatctcacaggggttatstgagtttcctggatatgaatgttgacctctatagtagtgttgatgaaaatcttgtgtacaatatccttaaatatgttttccaagttgtttgctctctctcactttctttcaaggacaccaattgaagcagaagatataaaaagaaaaacaagtttttctgtactaggctcactcactccaagacccagggaagggcagg

SEQ ID NO: 430383 - DNA, 617 bp, Homo sapiens
tttagaatgacttcatttagaatgattgacatctttctattaaccccaattcattcatccaatgaatgttatattgaatacctactataaaccaagcattaggcttggaaattagatacaacttttagaaaaaatagacacaattccttacrttattacttaaaatctcataagaagcaatagatattaataaaataaccacaaagagaaggacctgatgtcatgagtggttttgacctagacttggaattcagggaaggtgaagttctgggactgtgctgatggaggtgatatctataaagtaagaatgaataagaagagaaagaggaagagaagactattccagaacccatggtaggtaggaactttccaagtacaagggcatatgagaaggccagcatgactagagtagaaatcatggggaaacagttgaagatgaagctaaagtggtaaggggaagccacaggtacttgaaggtcatgatccaaagtttttatttttgttcttttaaccacagagtgatgtgaagttatttaattgtagaagattgtagatgatgatgaggtttgattagatttgcaattcgaaaaaaaggcagtcctgttactgcagagata

SEQ ID NO: 430384 - DNA, 627 bp, Homo sapiens
attgacatctttctattaaccccaattcattcatccaatgaatgttatattgaatacctactataaaccaagcattaggcttggaaattagatacaacttttagaaaaaatagacacaattccttacgttattacttaaaatctcataagaagcaatagatattaataaaataaccacaaagagaaggacctgatgtcatgagtggttttgacctagacttggaattcagggaaggtgaagttctgggactgtgctgatggaggtgatatctataaagtaagaatgaataagaagagaaagaggaagagaagactattccagaacccatggtaggtaggaactttccaagtacaagggcatatgagaaggccagcatgactagagtagaaatcatggggaaacagttgaagatgaagctaaagtggtaaggggaagccacaggtacttgaaggtcatgatccaaagtttttatttttgttcttttaaccacagagtgatgtgaagttatttaattgtagaagattgtagatgatgatgaggtttgattagatttgcaattygaaaaaaaggcagtcctgttactgcagagataataaattggaaggtagaatacttaggagactgtt

SEQ ID NO: 430385 - DNA, 577 bp, Homo sapiens
tgggtaatttatacagaaaaaaaggtttaattgactcacagttttgcatgactggggaggccttgggaaacttccaatcatggcggaagtcacctctttgcagtgctgcaggacaaaaagtgagtgccagcagggcaaatgccacacacttataaagccataagatttggtgagaactcactgtcrcaagaacagcatgggagaaactgcccccattattcaattacctcccaccagttccctcccacgacatgtggggattatggggattaaaattcaatgtgaggtttgggtaggaacacagaacctaacaatattaactagcaattaaatatatttgttcaaatgtatacagtaatgtttaagttccatcactgcctatctacttataagttttcccccatctcaaagacataaataaattttaaaaaaatgcttatttgattataacaaatcatcaaatagaacaatgattttgtgaaattgcaggctgcctttcttactgccctccaggaatcattaattgaagtctgagaaaccaaattctaggattaaaattaaaatacaaaatgtgaat

SEQ ID NO: 430386 - DNA, 628 bp, Homo sapiens
tgtttccctacacttttgtcttagcagatagaaaatagcctcaagtattcatcttgttctattcaaacaaagctgagttgcatgctaccttagtagtaaacagatggattttacttaaggcagaatcggcataagcattagccttctgttccattatatatctagggttacataatcaattttgttaataccttaaaacatgcattaccattcatggaacagatctgccattgtggcgaatataaaggaatggttttacaacttttccatttagagtaacgggaaactgagaaggtttatgcatttatttatccagtgctatttcraatatcaataaaaaccaagatgttattttcaatagatttgttaaagttatctgagatgacttgttcaggagactagtgtgtttttcattaatttctgaagcaagagaagtcgtaatatgacaactgctacgtttcaccaacaaagtcatttagtaagaaaaaaataaattgattgtttaccattatagagtcaaaacaatacattctttgattaatttttttcactgctcaactttttgaaaggaggtatgagtatacgacgcattccttattcttgaaaaaagcttgcataattattaaaa

SEQ ID NO: 430387 - DNA, 461 bp, Homo sapiens
tgtctttgttcagggctcagcctgtggatgttagttcactgagccagtggtcacctaaataaaattctcctgttccacacattggtctctctagtccctcaattcccacaacacaatgaccaatgagtcataggtttggtgtctacgtaatcccatatttttcagaggttttaatcattctttttattcttttttctttataattgtctgactgagttgattcaaagaacggatttttttgaacactgagattctttcctctgcttattcctttctcttgttgatatttctgattgtattataaaattcttatagtgacrttttcagctgtatcagatcatttttcttctatgactagaatttgttcttatatgtctaagaaccctttgcctacctcaaagtcagcaacatcttcctacaattttttctaaaagcttttaattttggttgttatatttaga

SEQ ID NO: 430388 - DNA, 631 bp, Homo sapiens
atatggaatatgttgacaagtaaaaactaagatattaaacacagtatcaaatataggtttaagcatttaagaaattataaattatctcargaaactgatgaatgatgtcatgttagtttcatattgttgcataataaactaccacaaatttagcagcttaaaagaacattcatttattatctcaaatttctgtaggtgagaagtctgagctggggttggctggagttagctgaattctctgattaaggtcccatgaaactgaaatcaatatcgccagaaagactggtcttatctgaaagctctgagggggaatctgctttccagtttattgaggttgttggcaaaaatcaaattttcatggtagtagatgtaatgtccctgttttcatgtcctagaggctgcccacattcccatataccttagcatgcgaccttctccatcttcaaaccagtaacactgacttgaggtcttcctgtgcttcataactctcactttcttttctatgaccagctggagaaaaggctctgattttaaagggctcttgtaattagccctgacacacccagataatctccctatcttaagatcaactgatttaaacacttaaatatatctgccatatccttacaca

SEQ ID NO: 430389 - DNA, 631 bp, Homo sapiens
atatggaatatgttgacaagtaaaaactaagatattaaacacagtatcaaatataggtttaagcatttaagaaattataaattatctcaggaaactgatgaatgatgtcatgttagtttcatattgttgcataataaactaccacaaatttagcagcttaaaagaacattcatttattatctcaaatttctgtaggtgagaagtctgagctggggttggctggagttagctgaattctctgattaaggtccyatgaaactgaaatcaatatcgccagaaagactggtcttatctgaaagctctgagggggaatctgctttccagtttattgaggttgttggcaaaaatcaaattttcatggtagtagatgtaatgtccctgttttcatgtcctagaggctgcccacattcccatataccttagcatgcgaccttctccatcttcaaaccagtaacactgacttgaggtcttcctgtgcttcataactctcactttcttttctatgaccagctggagaaaaggctctgattttaaagggctcttgtaattagccctgacacacccagataatctccctatcttaagatcaactgatttaaacacttaaatatatctgccatatccttacaca

SEQ ID NO: 430390 - DNA, 609 bp, Homo sapiens
aacacaagcacacagttgccagggcactaccagtccaggatatattttcttacacttcactttcatacttcaattgcctcccttccaagccaattgtaaaaattcatgcataatctcaagaaatgccttaaaacagaccaatacgttcaggtaatgtgaacggtgcaacatcaatacttttctgtgttttaacagtgttaccagaaaggggtcctgatccagacccaagagagggtacttgaatctygcacaaaaaagaattcaggccgagtccacagtgcaaagcaaaagcaagtttattaagaaagtaaagtggtgaaagaacagctactctatagacagagtagggtgttcctgaaagtaagaggagggacttgtccactctaggtacaatacttgctcatatatgggataaaaaaagatctcagttaatttagaaagtttattttgccaaggttgagaaggtccacctgtgacattgcctcaggaggtcctgacgacatgtgtccaaggtggtcagagcataccttgcttttatatattttagggagacatgagatatcaatcaacgtatgtaaaataaacatttgtttggttcggaaaggcagg

SEQ ID NO: 430391 - DNA, 589 bp, Homo sapiens
ttgattttatacacaatatgcgtagtatatagatgttgttactcagtgcttcatgatgtaaaaaaataaaggtaatactgaattacatttttctttattaatcttatatgataattaaaatctattttcagaactagaggcaatagagcaagtttgtcgaatccatataagtgtcatggtttagctaggtgaattcttaataaggacttcaaaacaggctaaattaatggtattaaaagaaacactgctttctaatgagagttatggatttggtggctgattgcaatgattatacaatgtaaaatmtatgtagtacctaagagaatcactgcattttaactggattattgtgcctttgaaaaatagaaatccactcagctaggtacattatattcctaaaaacaaggagggagtctaaactttcttatttctagttcagtaagattctgatttaagcaaggaatccaaaacaagaaagaacacttagaaaacacacgaatgttttttactacctgcggtttcgatcaataagatatagactgatactgacaaatctaattggctctggctaaccagagtgaggtattct

SEQ ID NO: 430392 - DNA, 579 bp, Homo sapiens
tttctaatgagagttatggatttggtggctgattgcaatgattatacaatgtaaaatatatgtagtacctaagagaatcactgcattttaactggattattgtgcctttgaaaaatagaaatccactcagctaggtacattatattcctaaaaacaaggagggagtctaaactttcttatttctagttcagtaagattctgatttaagcaaggaatccaaaacaagaaagaacacttagaaaacacacgaatgttttttactacctgcggtttcgatcaataagatatagactgatactgacaaatctaattggctctggcwaaccagagtgaggtattctcatttttacagatattttcagtgtctgaaaataaaatggcctaagcaaagcacacagtcttggccttttgcttggaaaactaacatattttttaaatattcaaaaaatttaaaaaatatttataggtccttgactgacacttaaagaatatgcatggctataattttttttttcattttaaaacctgaattttatttaaagtaatttatcaaaggcctgaagtatagctgaatttttc

SEQ ID NO: 430393 - DNA, 579 bp, Homo sapiens
tttctaatgagagttatggatttggtggctgattgcaatgattatacaatgtaaaatatatgtagtacctaagagaatcactgcattttaactggattattgtgcctttgaaaaatagaaatccactcagctaggtacattatattcctaaaaacaaggagggagtctaaactttcttatttctagttcagtaagattctgatttaagcaaggaatccaaaacaagaaagaacacttagaaaacacacgaatgttttttactacctgcggtttcgatcaataagatatagactgatactgacaaatctaattggctctggctaaccagagtgaggtattmtcatttttacagatattttcagtgtctgaaaataaaatggcctaagcaaagcacacagtcttggccttttgcttggaaaactaacatattttttaaatattcaaaaaatttaaaaaatatttataggtccttgactgacacttaaagaatatgcatggctataattttttttttcattttaaaacctgaattttatttaaagtaatttatcaaaggcctgaagtatagctgaatttttc

SEQ ID NO: 430394 - DNA, 608 bp, Homo sapiens
cttttcttgtagtgtactgtactagctttggtatcatggtgaggctggccttgtaaagttagtttggaagtactctttttctcttcaattttttggaagagtttcagaatgattggcattagttctttaaatgttaattagaattcatccatgaagctatctggatctgggcttytccttgaacagactttttaatttttatttaatctctttacttgttattggtctgttaagatttcccatcttatcatgattaagtcttagtaagttatatgcctctaggaattgattcatttcttccaggtgttttaacttgttggcatataatttttcacaatagtctcttatgatcctttgtatttctgtattatcaattgtaatgtctcattcttcatttatgatgttatttatttgtcttctctcttttattcttagttagtttagctaaggttttgtcaattttattcaccttttcaaaaagccaactcttattctctttatttctattttttcatgtatttattgcacttatttttgctctgacctttgttattttctttcttctgctatctttgggactagtctgttcttcttttactaattgctta

SEQ ID NO: 430395 - DNA, 470 bp, Homo sapiens
aaaaagccaactcttattctctttatttctattttttcatgtatttattgcacttatttttgctctgacctttgttattttctttcttctgctatctttgggactagtctgttcttcttttactaattgcttaagatgtaatgttaagctstttatctgagagctgccttcttttttgatgtagattttaattgttatacactcccttcttagaactacttttgctgcatcccataagccttggtatgttctgttttcattcttgttttctcaagatattatttaaatttcctgtttagtttattctttgactaaatagttgttgaggagtgtattagttatgtttcacttatttgtgaattttccatgactcttcctgttattgatttccagtttcacaccattacgatggaaaatgatacttgatatgatttctttttatttcaatgtgttaagaattgtgttgttgc

SEQ ID NO: 430396 - DNA, 340 bp, Homo sapiens
catatagaaaatcctaaagactccactaagaacctgttacaacatatttaaaagttcagttaagctacaaaataaaataccaacttacaaaaatcagtagtgttgctacacactaacaattaactcaccagaaaaaaattwaaaaaacagtgttatttataatacaataaaaatatttataattaaatgttaccaagaaagtgaaaaactgtaagctgaaaactataaaacattgatgaaagaaatggaagaaggtgcaagtaaatgaaaagatatcccatgttcatgaattagtagaattaatattgttaaaatgtttatattacccaaattgatctat

SEQ ID NO: 430397 - DNA, 477 bp, Homo sapiens
tctactgagactattccaaacaattgagggactcccctctaactcatttatgaggccagcatcatcctgataccaaaacctggcagagatacaaaacaacaacaacaacaacaaaaacttcaagccaatatatttgatgaamcttgatataaaaatttttcaataaaaggctggcaaaccaaatccaggagcacatcaaaaagcttatccatcgtgatccagttggcttcatatccgagagggtataaactgttggttcaacatatgcaaagcaatgaatgtgattcatcacataaacagaacaaaagacaaaaaacacatgattatttcaatcaatgcagaaaaggcttttgataaaattcaacatcccttcatgttaaaaactctcaataaactaggtattgaaggaacatacctcaaaatagtaagattcacatatatcaaactcacagccaatatcacactaaatgagcaaaa

SEQ ID NO: 430398 - DNA, 477 bp, Homo sapiens
tctactgagactattccaaacaattgagggactcccctctaactcatttatgaggccagcatcatcctgataccaaaacctggcagagatacaaaacaacaacaacaacaacaaaaacttcaagccaatatatttgatgaaccttgatataaaaatttttcaataaaaggctggcaaaccaaatccaggagcacatcaaaaagcttatccatcgtgatccagttggcttcatatccgagagggtataaactgttggttcaacatatgcaaagcaatgaatgtgattcatcacataaacagaacaaaagacaaaaaacacatgattatttcaatcaatgcagaaaaggcttttgataawattcaacatcccttcatgttaaaaactctcaataaactaggtattgaaggaacatacctcaaaatagtaagattcacatatatcaaactcacagccaatatcacactaaatgagcaaaa

SEQ ID NO: 430399 - DNA, 425 bp, Homo sapiens
atggtgaaggtaagaactcatttctcttggagtgaaattgctggctcaccagatgtatgtattcttagatatagtagaaacagccaaaattatttctgaaaaactgacagcaatttatatttccactggcaaaatatgggattgtcagttcctttacatccttgtcaacatttggtattatttgtctttttaattttagtcatcagtaggtctgtagtagtgtctcattgtgattctattttcattcgattaatgactagttgygttgatcattatcctatgtgcttattggtcatgtacatatcattttctgaaagtcttgttcaggttcttttactatgttatatttatttatttatttatttatttatagacagagactagactctctgtcacccagtctagagtacagtggcatgatcgta

SEQ ID NO: 430400 - DNA, 563 bp, Homo sapiens
tgtatccttcctctggctcggacaaagccggacctctcgcccggggaggaaagacgctatgggcacatggcaggaggggatggcgggtgggacatgctggccaactagccacgtgaggcccctggcccctgagactgccctggggcctgggcagcagccacagttctctcccaccctgcatggccattgcaaacatacccctcgccccacatgtgcagacacaggtgtgtgccgtggatccgcccaagcaccccatccagragggaaggggggtgagaaggggagccaccatgcaccctgcatggctgtggatctttggctagaggtggggatcgcacctctatgaacgaatggaaatcacattgttctaaattgcatatgtggtggctaggccaaacactcattttacctagtaacatttctgcagtttgtaacaagatccttatcaataatattcaaaatgatgttataacatagcaatttaatagctggaaagttattaaaaattcaagtgtacagcagcaaacaaaatttaatcaggaaatttgttactgacttcaaat

SEQ ID NO: 430401 - DNA, 563 bp, Homo sapiens
tgtatccttcctctggctcggacaaagccggacctctcgcccggggaggaaagacgctatgggcacatggcaggaggggatggcgggtgggacatgctggccaactagccacgtgaggcccctggcccctgagactgccctggggcctgggcagcagccacagttctctcccaccctgcatggccattgcaaacatacccctcgccccacatgtgcagacacaggtgtgtgccgtggatccgcccaagcaccccatccagaagggaaggggggtgagaaggggagccaccatgcaccctgcrtggctgtggatctttggctagaggtggggatcgcacctctatgaacgaatggaaatcacattgttctaaattgcatatgtggtggctaggccaaacactcattttacctagtaacatttctgcagtttgtaacaagatccttatcaataatattcaaaatgatgttataacatagcaatttaatagctggaaagttattaaaaattcaagtgtacagcagcaaacaaaatttaatcaggaaatttgttactgacttcaaat

SEQ ID NO: 430402 - DNA, 563 bp, Homo sapiens
tgtatccttcctctggctcggacaaagccggacctctcgcccggggaggaaagacgctatgggcacatggcaggaggggatggcgggtgggacatgctggccaactagccacgtgaggcccctggcccctgagactgccctggggcctgggcagcagccacagttctctcccaccctgcatggccattgcaaacatacccctcgccccacatgtgcagacacaggtgtgtgccgtggatccgcccaagcaccccatccagaagggaaggggggtgagaaggggagccaccatgcaccctgcatggctgtggatctttggctagaggtggggatcgcacctctatgaacgaatggaaatcacattgttctaaattgcatatgtggtggctaggccaaacactcattttacctagtaacatttctgcagtttgtaacaagatccttatcaataatattcaaaatgatgttataacatagcaatttaatagctggaaagttattaaaaattcaagtgtasagcagcaaacaaaatttaatcaggaaatttgttactgacttcaaat

SEQ ID NO: 430403 - DNA, 569 bp, Homo sapiens
atgtaatacgagtatccttgtgcaagatgcaactatgaacaaaactgattgtgcctctgttttcgtgcttcagtgttttaaaagtacttcaaaaagacaaaaaaataaagtatctcaaagccaaccaatgcttcacagagaaaaagacagtagaaaagttacataaaatataaataactttttcttaaaagcattagggaactaatacagaaacaagaccagagtgctcaagattctgggagagagaagaaacactgagagttgagtagatacttttacctcaggagtccattttgtcataaatggactgagagctcaaaatccagtctttgctcaggcagaatggttgctgaaagacagaggtataagcaaagtgtttgtcagtgtcaacaaactagagagaaaattgaaagctttawggcacaaaatgttcaacatattaaatagcagaaaactgggcattgaatgtgtattgttttattttcaaaaagtttgccaaattctgaagctacaagtagcaaggtgctgaaaagctaagctgatattctctgtaaagtggtgtaaagttt

SEQ ID NO: 430404 - DNA, 548 bp, Homo sapiens
atgttaccaccactccaatttccgtctgaacccctgaatcctggtaatcagagaaacagcgctatatcttgaacactgattaagctgaattgcattcaattccattgaaggggaatcctcccagtgacctgctatagcaaaaataccatagactggatagtttaaacaacaaaaatgtatttctcatggttctggaggttgggaagtctgagataagattgccagtattgctggattttggttatggccttcttcctagtatgcagaagratgtctttttactgtgtcctcacatgttgaaaaccaaacaccaagaaaagaagccgtggtttatcttcttataagggcaattttcatttgtcttagtccgtttgagctgttataacaaaatatcttagaatgaataatgtataaataacagaagtttatatcacacagttttggagtctgcaaagtccaagatgaaggcactgacaagttttgtgtctggcgaaggcccattcctcatagatggcacacccttgctatgtcctcacatggtagaaggg

SEQ ID NO: 430405 - DNA, 548 bp, Homo sapiens
atgttaccaccactccaatttccgtctgaacccctgaatcctggtaatcagagaaacagcgctatatcttgaacactgattaagctgaattgcattcaattccattgaaggggaatcctcccagtgacctgctatagcaaaaataccatagactggatagtttaaacaacaaaaatgtatttctcatggttctggaggttgggaagtctgagataagattgccagtattgctggattttggttatggccttcttcctagtatgcagaaggatgtctttttactgtgtcctcacatgttgaaaaccaaacaccaagaaaagaagccgtggtttatcttcttataagggcaattttcatttgtcttagtccgtttgagctgttataacaaaatatcttagaatgaataatgtataaataacagaagtttatatcacacagttttggagtctgcaaagtccaagatgaaggcactgacaagttttgtgtctggygaaggcccattcctcatagatggcacacccttgctatgtcctcacatggtagaaggg

SEQ ID NO: 430406 - DNA, 551 bp, Homo sapiens
tcagtcataatacatggtgtcaaaagttgtaattgtaagaagtgagtgcctggtaggaaatataagggtgattctaggcactagtaattttgttttatgactttgtttatgttctgtttacatatgtacattcactttaagaaagttattctagctttacacttatgagtcttstacttttctgaatagatactgtagttcaataacaatgtacttcaaacaatatatttctaagggaaaggagttctgaaatataaccattttgacatactaaagtatatactccatgaagcattacattaactgcaatatagacacacacacacacatatatatacacatatatatgtatttccatgtgtagatataaattgacataatcaatgattgagtcatgtgtactcagatatgctttcaaatgtcttcctttctcaatcagatccagaggctagaaaacctaagcaaagatggtagctatatggtctgcaatggtgctaatgaataatcaattctatgaaaatgacaaactatcaaagaggccagatttatca

SEQ ID NO: 430407 - DNA, 582 bp, Homo sapiens
gaacaggatgaagagttaagaggaggaatgtgtgtgtacacgtgtgttagaatgagtgccgtctggatatattcataaatttggaaggaaagagttgagtgagaaggaaaaaagtttaaaataagaagagaaagtgaatgaaaaattgtatctgtgtgagatggaagtaagacaggataaagagcacagaataggagatcatacagaagaagaaggagccctctacaaagttattagattttagaatacagaatgttgttctctattcagaaagtttccatccaaatattttctactaggtaaatacctctcccctcaaaactcttctcatctttcatctctatgaagagtttctctgaaatctcacggtctctcaattgtgaccccactcaacttttatatatatatgatctcaatatgtttaccatgcctgctcttatttgtttactgtatgccactagaccaacrttgtaagatcattgaatccagatacactgtatgcttcatgtatattattacatcctagtgaggtgtcagacttatggcctgcatttaagagatatttggtaaatataaaagaaa

SEQ ID NO: 430408 - DNA, 530 bp, Homo sapiens
gtggctcactcgtgtaatctcagtgctttaagaggccgaggcaagtttgtggttgcagtgagcaatgattgctccagtgcactccagtctgggcaaccgagtgagactctctctccaaaaaaagggraaaaaaaaaagcagcaaaagcttttttaaaaagccacatatcacaggtatacccccgcaaccccaaggaaagatacacatttctgcaggatgttttaaaaacacaaaaactggacaagaaagcttaaacagtgactattcatttttatttttattttgtttgagacggagtctagctctgtcgccaggctagagtgcagtggcgcaatcttggctcactgcaacctctgcctcccaggttcaagcaattctcctgcctcagcctcccaagtagctgggattacaggcacgcaccaccatgcctgtctgagtacgtatgactcaatcatagattatgtcaatttatatgtacacatggaaatacatatatatgtgtatacatatgtgtgtgtgtgtgtgtctat

SEQ ID NO: 430409 - DNA, 530 bp, Homo sapiens
gtggctcactcgtgtaatctcagtgctttaagaggccgaggcaagtttgtggttgcagtgagcaatgattgctccagtgcactccagtctgggcaaccgagtgagactctctctccaaaaaaagggaaaaaaaaaaagcagcaaaagcttttttaaaaagccacatatcacaggtatacccccgcaaccccaaggaaagatacacatttctgcaggatgttttaaaaacacaaaaactggacaagaaagsttaaacagtgactattcatttttatttttattttgtttgagacggagtctagctctgtcgccaggctagagtgcagtggcgcaatcttggctcactgcaacctctgcctcccaggttcaagcaattctcctgcctcagcctcccaagtagctgggattacaggcacgcaccaccatgcctgtctgagtacgtatgactcaatcatagattatgtcaatttatatgtacacatggaaatacatatatatgtgtatacatatgtgtgtgtgtgtgtgtctat

SEQ ID NO: 430410 - DNA, 530 bp, Homo sapiens
gtggctcactcgtgtaatctcagtgctttaagaggccgaggcaagtttgtggttgcagtgagcaatgattgctccagtgcactccagtctgggcaaccgagtgagactctctctccaaaaaaagggaaaaaaaaaaagcagcaaaagcttttttaaaaagccacatatcacaggtatacccccgcaaccccaaggaaagatacacatttctgcaggatgttttaaaaacacaaaaactggacaagaaagcttaaacagtgactattcatttttatttttattytgtttgagacggagtctagctctgtcgccaggctagagtgcagtggcgcaatcttggctcactgcaacctctgcctcccaggttcaagcaattctcctgcctcagcctcccaagtagctgggattacaggcacgcaccaccatgcctgtctgagtacgtatgactcaatcatagattatgtcaatttatatgtacacatggaaatacatatatatgtgtatacatatgtgtgtgtgtgtgtgtctat

SEQ ID NO: 430411 - DNA, 530 bp, Homo sapiens
gtggctcactcgtgtaatctcagtgctttaagaggccgaggcaagtttgtggttgcagtgagcaatgattgctccagtgcactccagtctgggcaaccgagtgagactctctctccaaaaaaagggaaaaaaaaaaagcagcaaaagcttttttaaaaagccacatatcacaggtatacccccgcaaccccaaggaaagatacacatttctgcaggatgttttaaaaacacaaaaactggacaagaaagcttaaacagtgactattcatttttatttttattttgtttgagacggagtctagctctgtcgccaggctagagtgcagtggcgcaatcttggctcactgcaacctctgcctcccaggttcaagcaattctcctgcctcagcctcccaagtagctgggattacaggcacgcaccaccatgcctgtctgagtacgtatgactcaatcatagattatgtcaatttatatstacacatggaaatacatatatatgtgtatacatatgtgtgtgtgtgtgtgtctat

SEQ ID NO: 430412 - DNA, 578 bp, Homo sapiens
agtctatcaatttttggtattacatattcaaatattacatctgctctattttctctctcttctctttctgtacctctaacaacatrtatgttagatattttaatgtgctcacattttccttacactgtgtccagtaaaaaaaaatcattattgccctgtgcttcatattgactattttccattgatatcttttccattttactaatttgtcttctgccatgtcctgtttgctgttaaacatattttatatggcctaagtttgagacactgcgtttttaatctctagaatatttatttggttatttctcatagaatccaattatttaagttaccatactttccattattttattgactattttcattgtttcatgcaaaaacatatttcttgtgttttatttcatgcaaaaataactttaattttaaagcctgtgtggtaacgcaactatgttaatgtgctgtaggtctttttctactatttgtgatatggtttgacggtgtcccactccaattctcatcttcaactgtaactcccataatccccacttatcatgggagacaccaagcaggaagtaatt

SEQ ID NO: 430413 - DNA, 578 bp, Homo sapiens
agtctatcaatttttggtattacatattcaaatattacatctgctctattttctctctcttctctttctgtacctctaacaacatgtatgttagatattttaatgtgctcacattttccttacactgtgtccagtaaaaaaaaatcattattgccctgtgcttcatattgactattttccattgatatcttttccattttactaatttgtcttctgccatgtcctgtttgctgttaaacatattttatatggcctaagtttgagacactgcrtttttaatctctagaatatttatttggttatttctcatagaatccaattatttaagttaccatactttccattattttattgactattttcattgtttcatgcaaaaacatatttcttgtgttttatttcatgcaaaaataactttaattttaaagcctgtgtggtaacgcaactatgttaatgtgctgtaggtctttttctactatttgtgatatggtttgacggtgtcccactccaattctcatcttcaactgtaactcccataatccccacttatcatgggagacaccaagcaggaagtaatt

SEQ ID NO: 430414 - DNA, 578 bp, Homo sapiens
agtctatcaatttttggtattacatattcaaatattacatctgctctattttctctctcttctctttctgtacctctaacaacatgtatgttagatattttaatgtgctcacattttccttacactgtgtccagtaaaaaaaaatcattattgccctgtgcttcatattgactattttccattgatatcttttccattttactaatttgtcttctgccatgtcctgtttgctgttaaacatattttatatggcctaagtttgagacactgcgtttttaatctctagaatatttatttggttatttctcatagaatccaattatttaagttaccatactttccattattttattgactattttcattgtttcatgcaaaaacatatttctygtgttttatttcatgcaaaaataactttaattttaaagcctgtgtggtaacgcaactatgttaatgtgctgtaggtctttttctactatttgtgatatggtttgacggtgtcccactccaattctcatcttcaactgtaactcccataatccccacttatcatgggagacaccaagcaggaagtaatt

SEQ ID NO: 430415 - DNA, 490 bp, Homo sapiens
cccatgctgctcttcttgtgatagtgagtaagttctcacgagatctcatggttttataaggggcttttcctccttttgctcaatgcttctccttgctgcaatgtgaagaaggacatgtttgcttccatttccatcatgattgtaagtttcctgaggcctcctcagccatgctgaactgtgagtcaattaaacctctttcctttttgaattacccagtttcaggtaattctttatagcagcatgaaaccagmctaataaaaaatgttatgttgtttcttggtggggccttccatagataaatatcaagtccatttgatacagggctgagtacagattctgaatatattttgtcaattttctgcctcgatgatgtgtctagtattgtcagtggggtgttaaaatctctcactattattgtgtggaagtctaagtctctttgaaggtctctatgaatctgagtgcttctatgctgggtgcatatatatttagg

SEQ ID NO: 430416 - DNA, 490 bp, Homo sapiens
cccatgctgctcttcttgtgatagtgagtaagttctcacgagatctcatggttttataaggggcttttcctccttttgctcaatgcttctccttgctgcaatgtgaagaaggacatgtttgcttccatttccatcatgattgtaagtttcctgaggcctcctcagccatgctgaactgtgagtcaattaaacctctttcctttttgaattacccagtttcaggtaattctttatagcagcatgaaaccagcctaataaaaaatgttatgttgtttcttggtggggcsttccatagataaatatcaagtccatttgatacagggctgagtacagattctgaatatattttgtcaattttctgcctcgatgatgtgtctagtattgtcagtggggtgttaaaatctctcactattattgtgtggaagtctaagtctctttgaaggtctctatgaatctgagtgcttctatgctgggtgcatatatatttagg

SEQ ID NO: 430417 - DNA, 571 bp, Homo sapiens
ttttcctccttttgctcaatgcttctccttgctgcaatgtgaagaaggacatgtttgcttccatttccatcatgattgtaagtttcctgaggcctcctcagccatgctgaactgtgagtcaattaaacctctttcctttttgaattacccagtttcaggtaattctttatagcagcatgaaaccagcctaataaaaaatgttatgttgtttcttggtggggccttccatagataaatatcaagtccatttgatacagggctgagtacagattctgaatatattttgtyaattttctgcctcgatgatgtgtctagtattgtcagtggggtgttaaaatctctcactattattgtgtggaagtctaagtctctttgaaggtctctatgaatctgagtgcttctatgctgggtgcatatatatttaggatacttagatcttcatgttgaattgaaacctttaccattgtgtaatgcccttctttgtctttttttatctttattggttttatgtctgttttgttagaaactaggctagcaacttctgttttttttttctgtttttcatgtcctt

SEQ ID NO: 430418 - DNA, 571 bp, Homo sapiens
ttttcctccttttgctcaatgcttctccttgctgcaatgtgaagaaggacatgtttgcttccatttccatcatgattgtaagtttcctgaggcctcctcagccatgctgaactgtgagtcaattaaacctctttcctttttgaattacccagtttcaggtaattctttatagcagcatgaaaccagcctaataaaaaatgttatgttgtttcttggtggggccttccatagataaatatcaagtccatttgatacagggctgagtacagattctgaatatattttgtcaattttctgcctcgatgatgtgtctagtattgtcagtggggtgttaaaatctctcactattattgtgtggaagtctaagtctctttgaaggtctctatgaatctgagtgcttctatgytgggtgcatatatatttaggatacttagatcttcatgttgaattgaaacctttaccattgtgtaatgcccttctttgtctttttttatctttattggttttatgtctgttttgttagaaactaggctagcaacttctgttttttttttctgtttttcatgtcctt

SEQ ID NO: 430419 - DNA, 606 bp, Homo sapiens
cgggttttttttctcttgctgttcttataatagtgaataagtctcatgagacctgaaggttttataaagggccgttcctctgcacatactctcttgcctgctgccttctaagacttgcctttgctcctcttttcccttccactgtgattttgaggcctccccagccatgtggaactgtgagtccattaaacttctgtttttttgtttttttaaattactgtgtctcaggtatttcttcataatggtgtgagaacaaactaatacaacttgtttacattgtcttttttattgggttctagacatctaatgtttgcattttaccttcccaacaagaaaacagattgacacaactgttctagaaagtaatgtggcaaaaataatcaagtaatatggtaataagaatatttaaaatatctatatcatttaattttctacatgcatttccaggaatataattaatgaaarttagtagaattattaaaaaatatttgagtacatgtatcttcactgcagcactgttaaagcaattttaaagtagaaagcaatggaaatgttcaagaaatgaataaataaacacactatagtcccttcttgtaatcaattacc

SEQ ID NO: 430420 - DNA, 584 bp, Homo sapiens
tgtagcatgcagtgctgtttgatagcattttacccacagttgaacttctttaaatattggagtcaatgttctcaagccctgcagctgctttatcaacaacatttatgtaatatttaaatcctttgttgtcattttgacaatacttacaggatcttcattaggagtagattccctctcacgtaaccactttctttgctcgttcataagaagcaactcctcatccactcaagttttatcatgagactgaagcaatacaactacatcttcaggctctattatatattttctcctctgcaaaaagagttatgaaataattttaaaatttaaatgattttaaagtacttttaaaatttaaatgattttaaagtaaaataatttgtagtatacactgaaggcaaaaagtgttatataaatgctaaataataatattgtaaagcccctatattctgtgataatgagcactatataaatgctaagtggaaaagaatagaaaatgtagtgtttcgaaatggcttatmaatgtatcaggtttcttgtgtttcatatgcactatatatataggacttgcagcaaaaatgcaaaag

SEQ ID NO: 430421 - DNA, 629 bp, Homo sapiens
ggacttgtgcagggtagctcgacaggcctgcaggtagtcctccacggtgaagcccaaagtttgccgtcaccctagtcaaggaactcaggygctagagaaggacatattttagatagatggtcagggaataatgctggaggagatgacatttaaaattaatatcgaaacaaaaaggttagttagctgtatagctgatggtgacagtagcacatagctgacaaagggaatagtatgtccaaaggctccgagtcaggaaacagcttggtgtgtttgtggagcttccaggcaagtgtgcctttagcatctcaagcaaggggaacaatgacagaatgaggttggagagtagaccatggtaatgagttcagattttatgttaagtgtggtgccagtcctcaagaggtttctaagcaagggacggacatgtataaatgtatgctttaaaaggtcgctttagtttttgagaagatcaagattccagatcaagtagatcaatgtcttaaaatagataagtgaagatattggtagcatgcaatagaaccaaatagtttaaaagcaaataaacagtcttaacagagactgctacatagtaaaacttcttgtataatgtttaaattcactcatgctcataa

SEQ ID NO: 430422 - DNA, 554 bp, Homo sapiens
accatctgaccagagactgttcaaccatgggtttttaaaaaatcattgctcacctatgtcttctctgtggctactctccacagtaacccgatcttttactcattgtcccatcctccttgatgatttccatcagcccgacccatcctcatcttgtcctgtgctctcctcatcgttggtgatatcctcctcctcactgagaacccttctttcgaatacactggcaccaaggctgtttcaccatctaacctatggagagcttcatgattttccgattctcagggcattaccaacagagaacctcaatctatgccatttcgtttgatcaccgagactttggaactcagaccttccccttcatcatggccacctggttcgttcatcttgtctacaggcactacctagcccttcagttcctctctgttctgccagaacatctgcctcccttagtgtatcagtctgttttgcattgttataaaggaatacctgagastgggtaatttataaagaaaagaggtttatgtggttcatggttctacaggctgtacaagcatggc

SEQ ID NO: 430423 - DNA, 346 bp, Homo sapiens
taaagccttgtgtgccattgtaagaactttggcttttactctgygagagatggtaagccattggagggttttagcagaacagtgacgcgacatggcttctgttttatcaggatcattgtgttgggaatagatgaaagggggttaagggtagaagcagggagatcagctagaagtctgttgccacaatccaagtaaaaaacaatgacagctcataccaggttggtagcagtggaagtcatgagaatattttggattttgatattcattccagatagagatgacaggaattgttgatgagtttaaagtgagatgtgaaataaaaagaggcaagagtaatttacatctt

SEQ ID NO: 430424 - DNA, 346 bp, Homo sapiens
taaagccttgtgtgccattgtaagaactttggcttttactctgcgagagatggtaagccattggagggttttagcagaacagtgacgygacatggcttctgttttatcaggatcattgtgttgggaatagatgaaagggggttaagggtagaagcagggagatcagctagaagtctgttgccacaatccaagtaaaaaacaatgacagctcataccaggttggtagcagtggaagtcatgagaatattttggattttgatattcattccagatagagatgacaggaattgttgatgagtttaaagtgagatgtgaaataaaaagaggcaagagtaatttacatctt

SEQ ID NO: 430425 - DNA, 466 bp, Homo sapiens
aagatttcgaagtggttctcaaactgtcatgtgcattggagtcacctggagggtttgttgaaatgctaatttctggaccccacccccagattttctgattcagtaggtctagggtggggctgagaatttgtttttctaacaggttcccaggtgatgcccatctgggatcacactttgaaaaccactggcttagggtactttgatctacccataactcctgacmttcagtgtttaacgatatatgatcttttccattaaactttctcaaaagatttttcttatgataatttcatctaagactgtgcagactagcacctagaacatttattcagtaatccctcatcccagtgtagatttccaaaatttggacactgtgagagttaagagcaattcctttatatccaagaatgcatgaaagtgatcttcatttctggattcatgccttatttatttacacgtaagtgat

SEQ ID NO: 430426 - DNA, 526 bp, Homo sapiens
catgaccacccaactaaaggcaaatctccaccaccaacagcaccayagcctgtctctgctggatcttactgtttaattttctttataacactcatcatgacctgaaattatctgggtttgttgttgttgttgttgttgtttgtttgttttttgagatggagtttcactcttgttgcccaggctggagtgcaatggcacgatcttgggtcactgcaacctctgcctcccaggttcaggcaattctcctgcctcagcctcctgagtagctgagattacaggcacacaccaccacacctggctaattttttatatttttagtagagatggggtttcatcatgttggtcaggctggtctcgaactcctgacctcaagtgatccacacgcctcagcctcccaaagggctgggattacaggcgtgagccactgcacccagccgacctggaattatctgtttacttgcttgtatagtatctgcctccttccactagaccataagccctgcatacaggcagtggtcatgaccac

SEQ ID NO: 430427 - DNA, 526 bp, Homo sapiens
catgaccacccaactaaaggcaaatctccaccaccaacagcaccatagcctgtctctgctggatcttactgtttaattttctttataacactcatcatgacctgaaattatctgggtttgttgttgttgttgttgttgtttgtttgttttttgagatggagtttcactcttgttgcccaggctggagtgcaatggcacgatcttgggtcactgcaacctctgcctcccaggttcaggcaattctcctgcctcagcctcctgagtagctgagattacaggcacacaccaccacacctggctaattttttatrtttttagtagagatggggtttcatcatgttggtcaggctggtctcgaactcctgacctcaagtgatccacacgcctcagcctcccaaagggctgggattacaggcgtgagccactgcacccagccgacctggaattatctgtttacttgcttgtatagtatctgcctccttccactagaccataagccctgcatacaggcagtggtcatgaccac

SEQ ID NO: 430428 - DNA, 526 bp, Homo sapiens
catgaccacccaactaaaggcaaatctccaccaccaacagcaccatagcctgtctctgctggatcttactgtttaattttctttataacactcatcatgacctgaaattatctgggtttgttgttgttgttgttgttgtttgtttgttttttgagatggagtttcactcttgttgcccaggctggagtgcaatggcacgatcttgggtcactgcaacctctgcctcccaggttcaggcaattctcctgcctcagcctcctgagtagctgagattacaggcacacaccaccacacctggctaattttttatatttttagtagagatggggtttcatcatgttggtcaggctggtctcgaactcctgacctcaagtgatccacacgcctcagcctcccaaagggctgggattacaggcgtgagccactgcacccagccgacctggaattatctgtttacttgcttgtwtagtatctgcctccttccactagaccataagccctgcatacaggcagtggtcatgaccac

SEQ ID NO: 430429 - DNA, 547 bp, Homo sapiens
ttcacgaaataataaaatgtctgggatttgctccaaaatatttggggcagagaggcagtaggaaaggtatagttgaaacaaaattgataattttttggaagctctgtgaaggattacattattatatctacttttttaataagttcaaaatgttccatacaacatttttcttaaagcagaataaaattgtgaaaatagaagacacatataatatctggcttccagaaaaagtagttttagagagaaaaggatattttctattagttgtagtcataagtgattatatgagaaggaaagaaagaaaggctgagaaatgaaggtgtaaacatccaatttaagttagaaaaacagcaacagaattcctcccactcccaagtagaagaaagtatacagttaagtaagagcaaaaakcaatgaaaataagaatcaaaaaagcaaaaacttggttctttggaaagactaataaaattgacaaacctctggtaaaattgttcaataaaaaagagaaggaaggtacaaataaacaacattaggatggaatggagga

SEQ ID NO: 430430 - DNA, 577 bp, Homo sapiens
ttaagaccaatgagggaatttctttttatttcctatggaaggaacaagcctattttaatatctcccagtggcacctcccatgcagaacctcactaaatacttggcaagttattttataaaatttcagttcaacattccagatacacaaagaaacgataatacaagagagacaaagtgacataarggacctttcagcattgaagacagtcaaccactacgtaaagtaactatgaaagggcctctccttaacttttaaggaagaaaagaaacacagtaattaaaaaaaaaaaaaaagacgaatttgctcagagcgccatacttctaagttcaccaattatagattaaattgtagactatttggcaaaaacattgtgttttaaaggtggcactatccagtcaccaaatcaattccaatatgaaatgttaaacaattttttttcttcataaataaactctgacaaattgtggatgttttggtgagtaggataagtggatcctggaaggaggttataggcataggtactgtctgaaataatacaattctaaatagaacaataagtacaattctctcgcatta

SEQ ID NO: 430431 - DNA, 577 bp, Homo sapiens
ttaagaccaatgagggaatttctttttatttcctatggaaggaacaagcctattttaatatctcccagtggcacctcccatgcagaacctcactaaatacttggcaagttattttataaaatttcagttcaacattccagatacacaaagaaacgataatacaagagagacaaagtgacataaaggacctttcagcattgaagacagtcaaccactacgtaaagtaactatgaaagggcctctccttaamttttaaggaagaaaagaaacacagtaattaaaaaaaaaaaaaaagacgaatttgctcagagcgccatacttctaagttcaccaattatagattaaattgtagactatttggcaaaaacattgtgttttaaaggtggcactatccagtcaccaaatcaattccaatatgaaatgttaaacaattttttttcttcataaataaactctgacaaattgtggatgttttggtgagtaggataagtggatcctggaaggaggttataggcataggtactgtctgaaataatacaattctaaatagaacaataagtacaattctctcgcatta

SEQ ID NO: 430432 - DNA, 623 bp, Homo sapiens
tttataataagacctaataactagtggcataagtctggttctgcatcagaatttaccttgcactcttgggtatccattcayttatttcacaaatatttattgagcaactagtgtatgtcatgcacttcttttcatgtgcttggaggtaaatcagtgaataaaagagttactaatccctgtgctcataacgtcttatatatttacctgtgaatataggaattattctgtcaactttcacaaaaatcctattaggattgtgacagaaattacatttaattaaaacactaatttgagaagaatcactatctttatgctattgaaacttttcacctgaatgtcgaatctctttatttattcagctatttttttgtgcccttcgattacattttgtgattttctccgtaaaatttcttacatcttattaaattatctctgggtactcagtagtttagttattgagaatggtctgtttttttaattacgttttataattggttattgctgctctacagaaacgtttactttgtgtatgatgactgtatctagcaattttttaaattctaactaattctaatcatttttttctgaagatttccttaaattttctatgaggatagcaatac

SEQ ID NO: 430433 - DNA, 437 bp, Homo sapiens
gaatcaccttttgtttgtatgaaattcctaccatattattgatttcaatgaattcacatagtatcatctcaggccttaaagtcaggtgtacaagaatgaatatatctcattattttctataagtcagtttaatttccattctgattttcccatccaacaagactagtaggaaatttgacctcaatcattcttgtggctctgcctcaagaagtaccaactttccagggtcttacacagtgcaaagcattggaacacttcattcttctgtcatctgcccacacagtcaccagcaagayacatggtcctttttggtctggcagctcgacgaggcttctgtgccaggtgtggggagctggaacctttggggaggttggaaacccccatacccatgtctccaatccccaggaaaacccccatatgccactcctggagcacat

SEQ ID NO: 430434 - DNA, 646 bp, Homo sapiens
gacaaaattcaacaactattaatggcaaaaactctcagcaaacaggcaaaagaaagaaacttctcaaactaattaagggcattggctgggagcagtggctcacacctgtaatcccagcactttgggaggccgaggcaggcagatcacaaggtcaggaggtggagaccmtcctggctaacatggtgaaaccccgtctctactaaaaatacaaaaaatcagccaggtgtggtggcatgcacctgtagccccagctactcgggaggctgtggcaggagaatcacttgaacctgggaggtggagcttgcaccactgcactctagcctgggcgaaagagtgagactctgtctcaaaaaaataaaaaactaattaagggcatctataaaaatcccacagctaacgttaaatagggaaaaacagaattttttttccttaagatcagcaacaaaacaaaaatgtctgctctcacaacttctaaccaacattgttttgaacgttctagcaagtgccataagaggaaaaaaaatacagattgaagaggaaataaaactttttattttcagataattttagtttattgataaactcctaaagtgtcttacaaaaagctactagaccaaaaaaagaatgcaatattgatatatgccac

SEQ ID NO: 430435 - DNA, 646 bp, Homo sapiens
gacaaaattcaacaactattaatggcaaaaactctcagcaaacaggcaaaagaaagaaacttctcaaactaattaagggcattggctgggagcagtggctcacacctgtaatcccagcactttgggaggccgaggcaggcagatcacaaggtcaggaggtggagaccatcctggctaacatggtgaaaccccgtctctactaaaaatacaaaaaatcagccaggtgtggtggcatgcacctgtagccccagctactcgggaggctgtggcaggagaatcacttgarcctgggaggtggagcttgcaccactgcactctagcctgggcgaaagagtgagactctgtctcaaaaaaataaaaaactaattaagggcatctataaaaatcccacagctaacgttaaatagggaaaaacagaattttttttccttaagatcagcaacaaaacaaaaatgtctgctctcacaacttctaaccaacattgttttgaacgttctagcaagtgccataagaggaaaaaaaatacagattgaagaggaaataaaactttttattttcagataattttagtttattgataaactcctaaagtgtcttacaaaaagctactagaccaaaaaaagaatgcaatattgatatatgccac

SEQ ID NO: 430436 - DNA, 646 bp, Homo sapiens
gacaaaattcaacaactattaatggcaaaaactctcagcaaacaggcaaaagaaagaaacttctcaaactaattaagggcattggctgggagcagtggctcacacctgtaatcccagcactttgggaggccgaggcaggcagatcacaaggtcaggaggtggagaccatcctggctaacatggtgaaaccccgtctctactaaaaatacaaaaaatcagccaggtgtggtggcatgcacctgtagccccagctactcgggaggctgtggcaggagaatcacttgaacctgggaggtggagcttgcaccactgcactctagcctgggcgaaagagtgagactctgtctcaaaaaaataaaaaactaattaagggcatctataaaaatcccacagctaacgttaaatagggaaaaacagaattttttttccttaagatcagcaacaaaacaaaaatgtctgctctcacaacttctaacmaacattgttttgaacgttctagcaagtgccataagaggaaaaaaaatacagattgaagaggaaataaaactttttattttcagataattttagtttattgataaactcctaaagtgtcttacaaaaagctactagaccaaaaaaagaatgcaatattgatatatgccac

SEQ ID NO: 430437 - DNA, 646 bp, Homo sapiens
gacaaaattcaacaactattaatggcaaaaactctcagcaaacaggcaaaagaaagaaacttctcaaactaattaagggcattggctgggagcagtggctcacacctgtaatcccagcactttgggaggccgaggcaggcagatcacaaggtcaggaggtggagaccatcctggctaacatggtgaaaccccgtctctactaaaaatacaaaaaatcagccaggtgtggtggcatgcacctgtagccccagctactcgggaggctgtggcaggagaatcacttgaacctgggaggtggagcttgcaccactgcactctagcctgggcgaaagagtgagactctgtctcaaaaaaataaaaaactaattaagggcatctataaaaatcccacagctaacgttaaatagggaaaaacagaattttttttccttaagatcagcaacaaaacaaaaatgtctgctctcacaacttctaaccaacattgttttgaacgttctagcaagtgcmataagaggaaaaaaaatacagattgaagaggaaataaaactttttattttcagataattttagtttattgataaactcctaaagtgtcttacaaaaagctactagaccaaaaaaagaatgcaatattgatatatgccac

SEQ ID NO: 430438 - DNA, 599 bp, Homo sapiens
ccagtggcacgatctccactcacagcaacctctgcctcccaggttcaagtgactctcctgcctcagcctcccaagtagctaggattacaggcataagccaccatacccagctaatttttgtatttttagtagagatggkgtttcaccatgttgtccaggctggcctcaaactcctgagatcaagagcccacctcccaaagcactgggattacaggtgtgagccccatgcctggccctgcattgtattttaaccctcagtgaaacttatcagcaaagcttcttgagtcaaagtatagatgaggttaaggacagggaatatctatgcaaaaaggatcctagtccctgggagatttaaacttgatgttgtgtagaaacctgtctccatgcgttgttgcttcagttatccaaaaccttcatgtttctcactgttgagacagtcactaccatggcatcatgacaattatttcacctcttttaagagtatgttgcaaatattgttaaacccagaagaggccaaagtatatggaatctatagataggatctgtagaattgtttatgatgatttttaaaaactaaaaagataactgttaattttgga

SEQ ID NO: 430439 - DNA, 395 bp, Homo sapiens
atacaaatttaagttacactgaaatatttttcagttatcaggttggcaaaatccaataaatatgaaaatgtattctggtggcaagactaatgaaaacgcaattctaaacatgagctggtgtgagtaractggtagctgatagaatactctggtagtatcaaggtcacaaatgcaatttacatctacgaatttattctacacatatactcacgtgttcaaaatgacatgtgtacaagttattcattgtcatattgattgtaaaatcaaaaatgtgcacatgtccatttagagagaactggaaaaataaactgtattaaaatccacacaaaagaatgacatgtagcaaaaagataaaaagacaggtaatgaagttttcaacccctaaagaaatcttc

SEQ ID NO: 430440 - DNA, 615 bp, Homo sapiens
acaaatcttgaaaatgactttaaaattagtctatatgcaagggaatagaaatccacatggcatcagacttgctagcagcaatttgccatcctagaggatgctagaggaaaatgaagccatacttcaaatgtttgtgagacaattattttctcctagacaaattaatggtcaagtaygagggtaaatagagacattcaaagacacataattcaaacatataacttttgtaggaaacaactggagaatatataccaacagaagaaggagcatacatgacagaggactccagggtccacaagaaggaagagatccaatgcaggcaggaggcaaaggacagtctcacataatagcgaaagggtgtcctacatgactgctgtgtaacaaaccagaaatcaataactcaagattggagcaggaggactgggaagagcctccaggaaaaaatagaattgacagattatctgatatatctgagcacttggaaaatattgataagtatttgagagatgcgatggagcacatataaaaatttttgatgagaaatcaagaaatgaggcatttattaatactaagaaatgacaaaatgtggcaattgttaacactaggaaaaacaat

SEQ ID NO: 430441 - DNA, 502 bp, Homo sapiens
agaactgattatttccttcatatctccagagcaactactattaaatataatgctgagggtaaaactgatgcttagtaaccaacctttgggataccactaagaatcacagcatttgagatgaaagggccattcagcaggtataatcttcattttgaacatgagcctaataaatcccaggaagtccaagttaaataatggattaacagagactagaatcccattctcccttcttgtaggtcaatatattaccattayacaaagtctttttcattacatcctgacactgacggaggcaacttcaagatcataggtcaaaattttatcttgtttcaatactgggtcagctagatcaagaatacatttttaacaaacacaaaccttattttaaaaatctggatggcccatgcaatatgttaactttttctttaaaagtaaatatcaaatcaaactaaactacaagacttccctctctgaaacagcaaagtttatattgttcatttca

SEQ ID NO: 430442 - DNA, 583 bp, Homo sapiens
agaaataaattatagaagtgagaaacagagtcgtgcttgctaggcattatgaaggtggtgggggtgggaaggaagtaggtgggattgtagaagggcgacaagagggatccttatggtgatggaaacattctgtatcttgactgtatcactgtcagtattttggatgtgatatcgtactacagttttgcatgacaacaccatgggggatatttggaaaaggacacatgggatctctctgtgttatttcttacatctttgtgaatttaaaatgtctcaaaaagtttatttggaaaagagaaaaaagtaatcaaaggcagaataacagctaactagcatcatattggacatgcagaaatgcctcggaggtatgtgtgctccctgttaagaatgaacttgggaaagcaaggattggaggtatagaaaaggaataaattgagtttgctcacctgagagtttctggaggcactgcaractcatttctcccaatggtttcactgcaacctgtgccagtaagtaccacatgcatgttgcttcttttattctttcaccagtattgctaactgaaagagactctagactgaga

SEQ ID NO: 430443 - DNA, 352 bp, Homo sapiens
ggacagagatttcaggatgcaccatgggaagggatggagaaaagaggttgtgaaaacagtaatgagagtgtgcaagaatatggtgctcaaggcctgatggttcaaggactactcaagcatggtatggctggcagaaatrcatggaactaactggactgtgtttttaagtcagttttgagagaaagttcttttgactggaactggggcaggtatcaagtactggagtgtgttgattgccattggcaaccaatccccagaaatactaacacaactgaaatgttataattgtccattacaaaattaaaatgacttgcccataataagcacgcataatatttgtaaaataaatgaa

SEQ ID NO: 430444 - DNA, 352 bp, Homo sapiens
ggacagagatttcaggatgcaccatgggaagggatggagaaaagaggttgtgaaaacagtaatgagagtgtgcaagaatatggtgctcaaggcctgatggttcaaggactactcaagcatggtatggctggcagaaatgcatggaactaactggactgtgtttttaagtcagttttgagagaaagttcttttgactggaactggggcaggtatcaagtactggagtgtgttgattgccattggcaaccaatccccagaaatactaacacaactgaaatgttataattgtccattacaaaattaaaatgacttgcccataataagcaygcataatatttgtaaaataaatgaa

SEQ ID NO: 430445 - DNA, 634 bp, Homo sapiens
ttgccaaaaaaaaaaaaaaaaagcataatgaaacattcaacaactcagtggcttacaataagcttycattctgcacatctgcaggttaactgcagttcagctgatctaccctagggtcaactgagaagatttgctccaagcctgtggggcttgctttacttctgtcccacgtgtgttcacactggggctcaggcaggaggagcagcagagtcttgggcattctcctttcctgcatgtagttgtagaatgagaggatgactagacacatgtcatatctcaggaggcctcagtctggcacatgtcacatccacccataatccatcagccaagccacatacactctgcctactctcataaagcaatgtcaactggcaaaagccatggatgcagaattctaaggcaggaaattttgaagaatggcaaaagaggtttgaaacaactataatccatatgcatgaggtgcccactctcatctaatctttgtatgtacttacacagaaggcagctgagtagcacagcccaccgtgcccatgggccaatgcgcatgatgcagtatgactcacatatctagtgtgtgaacacaaggaaatgtgtaaatatcatgaggaaaaagaatagaagggaacagattgct

SEQ ID NO: 430446 - DNA, 596 bp, Homo sapiens
cagagagaatggaggtgggtgtgttggctgagaagggggcactggggctgctcctcagaaaattcgtgtgaggttttgggaaggagtgacttcccagaagaggacctatcttctccagggcggtagtgatggaaagagtgtccatgctggagaaggacagtgaagtgtcatgagggaacatggagacggaggtcaagaagagagtctgtccctcgaagaaaggtgatgtggaacctgtggaggacaagttgattgggtactagtgagcgaagacttcactaataatgtgtgtgaaaagccaaaacctaagacacaattaagaaaaaaacaaaaacaattaaggaaaaataccatcttggtttctggagagaagtasaattctcaggcctgaggcctttgggaagggatgagatgcagattccaactccttctccttatgagctgttgaaaactgctggggaaaagaagcatccactgctctgagtcttatcatcatatattagttttgactactcatatactcatacatagttttgtcaacttcatatactcatatatagacttcccagactcatacttaaaaaaaaactacatac

SEQ ID NO: 430447 - DNA, 576 bp, Homo sapiens
aattaaggaaaaataccatcttggtttctggagagaagtacwattctcaggcctgaggcctttgggaagggatgagatgcagattccaactccttctccttatgagctgttgaaaactgctggggaaaagaagcatccactgctctgagtcttatcatcatatattagttttgactactcatatactcatacatagttttgtcaacttcatatactcatatatagacttcccagactcatacttaaaaaaaaactacatacatagacttcatagactcatgcagttaaaaaaaggaaaaaagataatatgaacggttgattatacaaggtaaaataattacaaatatgaatatgtatagcagatgacacatgatttatgtttattaaaaagttatagctgatcaagaaggtaatactataattaatgtatacaatattttatttatcatattaagttaattttattttgaaactatagccaaaaaactttaaagctgttgcctatctgtatttatatatccatgtatgactaaatatgtacttatgaagttatattaataaatactttactacaag

SEQ ID NO: 430448 - DNA, 401 bp, Homo sapiens
cacattctgaaatgattaccaaaatgaagtcaatgaacatgttaattacctcacagaatagttaccttttcgtgtgcatgcgtgggataagaaaacttaactctatcccctgtgactgcagagtggccatttcagctgctccaggctcaggcagaggaagaccagggcaggtggcaccaccaggggggscctcaggcctggcgcgcacgcattccagaggccacccagaccatgctccgctgcctgggcgcccaagctgcagtcgccctctgtgtgcaggcagcagcctctaggcaactcctgggcccgcccgcactccccacatctcggaagcagggccagatgtccctgtggctgcggccgagccaggcggtctgccctgcagcagctgcacgggggcg

SEQ ID NO: 430449 - DNA, 565 bp, Homo sapiens
aggtaatgagggaaaatgccaagaataggttttgttttttagtttgttgtttttccagtttatgtattgagacaaagcgctcttcagctttggggtaatcatttttggtttggtaaaaagagtgactgaaacttgcctaaagattaatttttagaggactctgaggaaaacagattggcagtgaatatacggtgatgaagtgagaaacacttcagcaaagggtggaacaaattagtaactgatttattacccatcccggcaaaaacagccacttagataagagtctaaactctcctttcaaatctagaatatcttgatgggaatgtgggagataagcagcttataaatagcaaaatcaactgggattttgagtttacttgtccctgttatacccacacccaggaaaattaattggagttttaatacataactctatctcatactcttctctctggccacatcccaagytgataaaggatattggccatgtgggtgagagatgaaactgaagtgattgtctgctgcagtatttctcagctaggattgtgcattacaatgacctggg

SEQ ID NO: 430450 - DNA, 547 bp, Homo sapiens
aaatataaaaacacaagagctatagtctaaatgtggtgtatagatttgttctttgcctctttgaattgagtcaacatgtaaactttagtggactcatgcagaagwctggacctcaggcttaagaaacaaatctggtgtccccagaaccacatcactgcttggtctgctgcgcagaggttgccctgggtaggaggcacatattctccagtttgctactgtgcccacctgagtacttcacttacttaggtaacctccttcatccttataagtatttgagtttacaactccttttttatagtatattttcataaagatttcaaggttttcaagacagcatatattggttcataatatatagtctatagtttatataaatccctcaattatagagttgaattttagaattcagaagtttttttaactctttttttatatctataccacaaatagtcatctgctcataagaatgcctagaagcccttttaggttattcctgctgagaagtggatagattatgaatattgcagacattatatctttcttctca

SEQ ID NO: 430451 - DNA, 558 bp, Homo sapiens
cctctttcagttatgctgttggcagtgtcttgttcatgtctcccttcatggttggctacttagcaacagctccaaacaccatgttctcacaagacagtatctaaaggctggaagggctgcttttcttcacatgtgtcttttaaattgggagaaaattcagaagcatgcaggggactttttgtaaattttttttttccttcggggatgtagtctcgctctatcaccagtctggagtccagtggcatgatctcagattactgcagccttcacctcccaggttcaagcaattctcctgcctcagcctcccgaggagctgggacaacaggcacatgcgaccatgcccaggtaatttttgtatttttagtagagacagggtttcaccatgttggccagaatggtctcagtctcttgacctcgtgatccgcctgcctcrgcctcccaaagtgctgggattacagagatgagccactgtgctcagccctttctgtaatattttattagctgggtcacaccacatgctcattcctaaaccaggcaccgggaaagcaaatgtagtta

SEQ ID NO: 430452 - DNA, 558 bp, Homo sapiens
cctctttcagttatgctgttggcagtgtcttgttcatgtctcccttcatggttggctacttagcaacagctccaaacaccatgttctcacaagacagtatctaaaggctggaagggctgcttttcttcacatgtgtcttttaaattgggagaaaattcagaagcatgcaggggactttttgtaaattttttttttccttcggggatgtagtctcgctctatcaccagtctggagtccagtggcatgatctcagattactgcagccttcacctcccaggttcaagcaattctcctgcctcagcctcccgaggagctgggacaacaggcacatgcgaccatgcccaggtaatttttgtatttttagtagagacagggtttcaccatgttggccagaatggtctcagtctcttgacctcgtgatccgcctgcctcggcctcccaaagtgctgggattacagagatgagccacygtgctcagccctttctgtaatattttattagctgggtcacaccacatgctcattcctaaaccaggcaccgggaaagcaaatgtagtta

SEQ ID NO: 430453 - DNA, 558 bp, Homo sapiens
cctctttcagttatgctgttggcagtgtcttgttcatgtctcccttcatggttggctacttagcaacagctccaaacaccatgttctcacaagacagtatctaaaggctggaagggctgcttttcttcacatgtgtcttttaaattgggagaaaattcagaagcatgcaggggactttttgtaaattttttttttccttcggggatgtagtctcgctctatcaccagtctggagtccagtggcatgatctcagattactgcagccttcacctcccaggttcaagcaattctcctgcctcagcctcccgaggagctgggacaacaggcacatgcgaccatgcccaggtaatttttgtatttttagtagagacagggtttcaccatgttggccagaatggtctcagtctcttgacctcgtgatccgcctgcctcggcctcccaaagtgctgggattacagagatgagccactgtgctcagccctttctgtaatattttattagctgggtcacaccacatgctcattcctaaaccaggcacygggaaagcaaatgtagtta

SEQ ID NO: 430454 - DNA, 424 bp, Homo sapiens
atataccatgtgaccttctgaaccagataagcataagggaaattgctaaagaaatamtgtctagattcttttttctatattcatttaaagatgaattacatttatttaaatgataaaatggtaatacagtgggaggaaagcaatgactgagaagagacatgaaaatgtatctgaccttgagagttgcaacaaatattcccagccaaaccagtctgtttaatatgctttcatgcatgcaagtttatctgtttgactcaaactgtttaaacttataattccatcatggccactttaaatgtttttggaaacaaatacacatactttcacatatttaagaaaatcaccactccaatgtttctgttgaatcagacttttacatgatgttgtttaataaaatatggtaggttttgacatgtatgatttt

SEQ ID NO: 430455 - DNA, 424 bp, Homo sapiens
atataccatgtgaccttctgaaccagataagcataagggaaattgctaaagaaatactgtctagattcttttttctrtattcatttaaagatgaattacatttatttaaatgataaaatggtaatacagtgggaggaaagcaatgactgagaagagacatgaaaatgtatctgaccttgagagttgcaacaaatattcccagccaaaccagtctgtttaatatgctttcatgcatgcaagtttatctgtttgactcaaactgtttaaacttataattccatcatggccactttaaatgtttttggaaacaaatacacatactttcacatatttaagaaaatcaccactccaatgtttctgttgaatcagacttttacatgatgttgtttaataaaatatggtaggttttgacatgtatgatttt

SEQ ID NO: 430456 - DNA, 454 bp, Homo sapiens
gtggacagctatactgtgtatcttccagctacaaacttctgtggtgattgaatgtamatttgaggaacatctcattttccaggattccacactagaaactcagcagtttcactcggctccttgtgttgtggcaaactttggttcctctatttcagtgagcaccttcacttttttgatatcccaggaaccaaatgaaaaaataaggagaaaaggcagtggggaaaagaatatcttagtgcagaaaagggaaaggttcttttctgtttctgaagccccacaaggtcacatcctctcaatctggctatttcatggagaatccaagtgacaaaggcagaagacacattttatgcctgtgtctttttgtttctctgtttttgtgttgatatatttacaccacagaggtaactgtgatctgatggagaactggaagtagagtcagaagccgtgaggaaaa

SEQ ID NO: 430457 - DNA, 454 bp, Homo sapiens
gtggacagctatactgtgtatcttccagctacaaacttctgtggtgattgaatgtacatttgaggaacatctcattttccaggattccacactagaaactcagcagtttcactcggctccttgtgttgtggcaaactttggttcctctatttcartgagcaccttcacttttttgatatcccaggaaccaaatgaaaaaataaggagaaaaggcagtggggaaaagaatatcttagtgcagaaaagggaaaggttcttttctgtttctgaagccccacaaggtcacatcctctcaatctggctatttcatggagaatccaagtgacaaaggcagaagacacattttatgcctgtgtctttttgtttctctgtttttgtgttgatatatttacaccacagaggtaactgtgatctgatggagaactggaagtagagtcagaagccgtgaggaaaa

SEQ ID NO: 430458 - DNA, 454 bp, Homo sapiens
gtggacagctatactgtgtatcttccagctacaaacttctgtggtgattgaatgtacatttgaggaacatctcattttccaggattccacactagaaactcagcagtttcactcggctccttgtgttgtggcaaactttggttcctctatttcagtgagcaccttcacttttttgatatcccaggaaccaaatgaaaaaataaggagaaaaggcagtggggaaaagaatatcttagtgcagaaaagggaaagsttcttttctgtttctgaagccccacaaggtcacatcctctcaatctggctatttcatggagaatccaagtgacaaaggcagaagacacattttatgcctgtgtctttttgtttctctgtttttgtgttgatatatttacaccacagaggtaactgtgatctgatggagaactggaagtagagtcagaagccgtgaggaaaa

SEQ ID NO: 430459 - DNA, 454 bp, Homo sapiens
gtggacagctatactgtgtatcttccagctacaaacttctgtggtgattgaatgtacatttgaggaacatctcattttccaggattccacactagaaactcagcagtttcactcggctccttgtgttgtggcaaactttggttcctctatttcagtgagcaccttcacttttttgatatcccaggaaccaaatgaaaaaataaggagaaaaggcagtggggaaaagaatatcttagtgcagaaaagggaaaggttcttttctgtttctgaagccccacaaggtcacatcctctcaatctggctatttcatggagaatccaagtgacaaaggcagaagacacattttatgcctgtgtctttttgtttctctgtttttgtgttgatatatttayaccacagaggtaactgtgatctgatggagaactggaagtagagtcagaagccgtgaggaaaa

SEQ ID NO: 430460 - DNA, 607 bp, Homo sapiens
ttttcagctccgtggctcagcctgtctctgctggtcatgtcggttatgtactactcaatccaggaggtgctgtttccattgtagtacatacatgactgttgcccactgagtcacacagagagaagagtaagctataaattatacactccccatttgctgccactttcagtggtgtgaagaatgattcagtgcatctataggaggccacttccattggaatgccacctccctaacacatacaatggtcaagagataaaaaasagtgaaaattatcatgctaatagcaaatattgtctgtagctcactatgtacatgtactcttctaagtgcttctaagcaaatcttacctgtagctcaccatgcaccacatactcttctaagtgcttcacgtcagtccctggtttaatcttcccaacatcccagtgaagtagatggtattattctctccatttcatagataaagaaccggagacacggaaaattaatttgctcaaggtcgcacagctagtatctggtagatctgggattcagacccagcccttctggcttctgtgtagaactgcctctcaaaccattccatggaacacctggttggtgaggtggctca

SEQ ID NO: 430461 - DNA, 620 bp, Homo sapiens
gctcactagtccccaacagaagaaccactgtcgcatccactgaggtaccaagaaactagcaaagggccttctagctgtctggggacagtcctcatgtggtccctggctcagcctcaagggttcttgattagtctcyctgcagcctctgtgctgtgtctctagatcggggctctgtgggaagggccctgggagacccagcagcacagggtgtcttgtctgccaaatgtccctcccttcctcccactctgacactcaggaatagggaagatggcatgtccaggcagtgccaggccacctcattgtctcctttcagatgggcccagagggccttgcggggtgagtgtgaagctgggtacctggagcctgaggctgactccctccctgtgtcttggaggagaggccttgcagcccaagaaaaccccccgggcctgacccctgggcacacatgcagggagggagggtctgtgggctgatggcagcattgtaatgagactttgaacacagctgctcaagggcctcatcagtggaccatggtcagagatgacctagccatcaggacctggccagttgggacctgatcagcagggacctggttagcggtggcctcctcagtgaaggcc

SEQ ID NO: 430462 - DNA, 511 bp, Homo sapiens
aagatagaaacacagggcactcagctcaacttctcagccaatgagttgacatgcaagcagattatggtgaygggttttaagaaggagcatcagaaggtggccagttcttcagcctcagccaggtcttggagctgggccaggccatcacttcaccagagatgccttcaacaccgttggtgagctctgccaatcagcccatccaggaactggacccagtcatggacctgttagtgctgtctcagggacaccaggtcaacatcccggacatcatccacatacacaaggaagctcttaccaaagtcatggagagcaggcaacatgtggcagaagggaagacagaggtgcagaggctgatgatgtcagaatcacaggaacaggatttctttggacactgtggctgaaattcaccacttccatccaattccggtgagaaacatggactcacagatgcaggatttcttgcaacaagagatactattttttcaaaaggtcacccaggaattgatagtgt

SEQ ID NO: 430463 - DNA, 511 bp, Homo sapiens
aagatagaaacacagggcactcagctcaacttctcagccaatgagttgacatgcaagcagattatggtgatgggttttaagaaggagcatcagaaggtggccagttcttcagcctcagccaggtcttggagctgggccaggccatcacttcaccagagatgccttcaacaccgttggtgagctctgccaatcagcccatccaggaactggacccagtcatggacctgttagtgctgtctcagggacmccaggtcaacatcccggacatcatccacatacacaaggaagctcttaccaaagtcatggagagcaggcaacatgtggcagaagggaagacagaggtgcagaggctgatgatgtcagaatcacaggaacaggatttctttggacactgtggctgaaattcaccacttccatccaattccggtgagaaacatggactcacagatgcaggatttcttgcaacaagagatactattttttcaaaaggtcacccaggaattgatagtgt

SEQ ID NO: 430464 - DNA, 349 bp, Homo sapiens
agtcccatcggtgttttgtttttgtttctggcaatttttcttctgttggctgggagtgcttacccattgcctgtasaatcattgtaccttggaagtagttaacttgctttataattcagagacttatgggcagaagggactgtatccttgtctcagatgaaactttgggctttacacatctgagtaaatgctggaatgagttaagatttgggggactgtaggagaggcatcattgtattttgcaatgtgagaaagacagatttgcaggggcagggacagaagaatatgatctggctctgtgtcccactgatgtggaattgtaatgggaaatgttaaaggtgggggacag

SEQ ID NO: 430465 - DNA, 526 bp, Homo sapiens
cacttcaatccacttatgtctgattctacctctactattgctgaatcaccctagctaaattgttgggaggaagtcccaataaattttaagaggcttttcagtttgagtagcaaagtttagataggttttattaaaaatagcccggccggaagtggtgattcacggctgtaatcccagcactttggaaggccgaagcgggcagatcacccaaggtaggtggatcacccgaggtcaggattttgagaccagcctgaccaacacggagaaaccctgtctccaccaaaaatacaaaattagccatgtgtagtggcgcacgcctgtaaccacagctacttgggaggctgaggcaggagaatcgcttgaacccgggaggcaggggttgcggtgagccgaaattgccccattgcactacatacagcctgggtaacaaaagcgcaactccatctcaaaaaaaaraaaaaaaaaaaaaaaaaaagcccaagagaaggaaagtgcatactcaacaaattacattaagctccactca

SEQ ID NO: 430466 - DNA, 586 bp, Homo sapiens
ttcgttctgattctctgcaggagaaaacatggatcttgaagttatcaaggagaataaaactttgtcttttatatctgcaaattatttgactttgaaactcagaatatactgaaaatatataagaaaatgtttatactaaaaagataaatagatgataaatatcactgatatattatcatataacctatgtaataaactatatattctatataataaggtatattatacagaatttataattatgtaagtaaattatatgtaatatataattataagtaagttatacataatttatgtatatgtataaaatttgctgattggaaaaccctgttgtgggggaaattacttgttccattcctgtcatttatatatttatatattagttaaagagacaaggaggttagtatatatttattacgtttttaataattccaatgcctaatatgacatttaattctaataataatacatatgttayaattaaccccgtttataaatggagaaaattgagactcatgaatattaagtgaattgtcacatggtacagacatcaagaggtatgggctaaattaaaactcagtcttct

SEQ ID NO: 430467 - DNA, 478 bp, Homo sapiens
tttcctgcctcaagacaaaactagtcctagattctggaaattagaagggcggatccagtaggtctaattttcaaaggtaagaggaatgcagcagtatgacaccaaacagattataaaaccttcatcaggacaaaataaattcttctgacatttttatcgtgttttcttcttcaaggatatgacatmctatgttgctgggattttgttttgttggatcttgtgttttactttttatttttccctttggtatgaatgtttattgaaaataaaacttgcatcattttcagctccataaaccttccttattatatgtgtgtctggtaataaaatgatttatctaaagttatttgtttttttaatcacacacattggcaacttcccatcaagttgtttatatgttgttatgtgaaacagaagaggcccttttatactcatatttagatagctttcagcatttgaaattgattttgtcatgact

SEQ ID NO: 430468 - DNA, 478 bp, Homo sapiens
tttcctgcctcaagacaaaactagtcctagattctggaaattagaagggcggatccagtaggtctaattttcaaaggtaagaggaatgcagcagtatgacaccaaacagattataaaaccttcatcaggacaaaataaattcttctgacatttttatcgtgttttcttcttcaaggatatgacatactatgttgctgggattttgttttgttggatcttgtgttttactttttatttttccctttggtatgaatgtttattgaaaataaaacttgcawcattttcagctccataaaccttccttattatatgtgtgtctggtaataaaatgatttatctaaagttatttgtttttttaatcacacacattggcaacttcccatcaagttgtttatatgttgttatgtgaaacagaagaggcccttttatactcatatttagatagctttcagcatttgaaattgattttgtcatgact

SEQ ID NO: 430469 - DNA, 478 bp, Homo sapiens
tttcctgcctcaagacaaaactagtcctagattctggaaattagaagggcggatccagtaggtctaattttcaaaggtaagaggaatgcagcagtatgacaccaaacagattataaaaccttcatcaggacaaaataaattcttctgacatttttatcgtgttttcttcttcaaggatatgacatactatgttgctgggattttgttttgttggatcttgtgttttactttttatttttccctttggtatgaatgtttattgaaaataaaacttgcatcattttcagctccataaaccttccttattatatgtgtgtctggtaataaaatgatttatctaaagttatttgwttttttaatcacacacattggcaacttcccatcaagttgtttatatgttgttatgtgaaacagaagaggcccttttatactcatatttagatagctttcagcatttgaaattgattttgtcatgact

SEQ ID NO: 430470 - DNA, 595 bp, Homo sapiens
tatgccagagcttataaaaatgtctgaaaccagactgcgtttgtccacactctctgctaagaataatggactctcttcctctcctccttccaagtcttacttttcatgggctaactctaactgagaaccatttagagacaaatattccgggaaatacagttcttggcttctcttctataatgctaataagacctcagatgcagaaggcaatgttggtaaatcacaattcattacttataatatctaccttataaagccaacaagactaaataaaataattatatgatggactcagaataacaactggctcaaataatgtattcaatgacatacccattaggtcacaaactctattatttagttaaagttactttacatctctaaactttttttcttttgtctttctcaatataccatatgaatggtgtgaaattgttattttttgacagggagttcatgtcatgtttatatttttggacttagctggtatctaggacttgactggttacagyaggcacttcacatgctagttatcttccctctctgagttagcttgttttctgttgctataactgaatacctgagactgggtaat

SEQ ID NO: 430471 - DNA, 543 bp, Homo sapiens
ctcctgtcagttcagccgctggcttctgctccttttaagctgtggctcttgaatttccctgtctygccacttttagtggccgtagtttgccatgggatcttaatttcctgatggatctaagaagagttgttgattttcaggatttgattggtctttttggtgctgtgagaatgtgagtgatgattcaaagctctttacatgctgcaccagaaactggtggttgagaactgaaattttagagctaaaggggaacaatagattataacaatctcattttaagaatgagaaaacttgaatgctgattagataaataacattccaaatcctaactttagtaaattcctatgataatttaatgtgatcagtcctctctcatttctaaatggctgctgtaccagctcctcctttatcttccccaccaatctttaggaataaattttattcaaaatggcacaatgagatatcagtgtattatagatgcatgtaaagttgagagattaatgagagatgctccatttgagggtggaaaaaaatgttaaaatt

SEQ ID NO: 430472 - DNA, 596 bp, Homo sapiens
ggttttttatgatctaggctcaaaagtcacatgaggtcacttccgtcacattctatgggtcacttctggcatactctattggttaaaacattccaagcctgttttgatttaaagggaaagaaaactgtctttatgtcttaatggcaggagtaccaaagcttgtgtagtgatgtcttcactgacctcaagctgccatagtccaacttctcagcacaaattatttccatttctcccttttgcaaaacatacttactccccactaagatcctcaaaggtctcattccattccaagctcaggcccaaggtccaagatattttaatctgcaycagatccaggtggggctcatcccttctggttcaattgctcaggtatgtcttctcttggtttaaaggcctattaaccaaaaaaacaagttatttgctttccatatactcaacacaaaatggagggctaggcaggcttttgtacaacagcaatacctaattcaattcaaagcgaggaaacaggccatacatggcagtccctggcctgtagcaatattaaacccagcaggacactcatcaattacctccgtttagggccccatattgcaccg

SEQ ID NO: 430473 - DNA, 596 bp, Homo sapiens
ggttttttatgatctaggctcaaaagtcacatgaggtcacttccgtcacattctatgggtcacttctggcatactctattggttaaaacattccaagcctgttttgatttaaagggaaagaaaactgtctttatgtcttaatggcaggagtaccaaagcttgtgtagtgatgtcttcactgacctcaagctgccatagtccaacttctcagcacaaattatttccatttctcccttttgcaaaacatacttactccccactaagatcctcaaaggtctcattccattccaagctcaggcccaaggtccaagatattttaatctgcatcagatccaggtggggctcatcccttctggttcaattgctcaggtatgtcttctcttggtttaaaggcctattaaccaaaaaaacaagttatttgctttccatatactcaacacaaaatggagggctaggcaggcttttgtacaacagcaatacctaattcaattcaaagcgaggaaacaggccatacatggcagtccctggcctgtagcaatattaaacccagcaggacactcrtcaattacctccgtttagggccccatattgcaccg

SEQ ID NO: 430474 - DNA, 562 bp, Homo sapiens
aacattttgctactttaactatacatagtgacttgcatctttacataaattgtgtttaataaacagtagtactgttactgcaattttttcatcttctgcaccttattttttaaacaaaatcagggcaaaatctgaaaacaaattattcaacaattttgtcgtatgtcagaaattcacataaaaagatgttaacttaaaatcaaattattggctgcctaccattggggtagacaaaaatgccaaccatgacttctatagaatcatcttgggttattaaaaataattctaggtgtcaatatattatttataaaagtgatttttttcaactgttaaaccaaatattacctctaagtattttctgatcaagatagaatgaaaaaaactgcaattttgcatggatacttcttaagacagtgaagtaggtacaaaatttrttttacaattatatactgaggaaaaattaagagacctatggacttcaaaataggtgatttgatgttgaaattatgatgtaatatgcagggcagaaaatttaaaagatgcataaggttgtattttttta

SEQ ID NO: 430475 - DNA, 564 bp, Homo sapiens
tcgggctccaaatatataacaatcatatagaaaatataacttagaagtcttacaaatttatatgtctagacaaggtggaataacaaggaccacacaccatcctcccacaaaacacaagtagaaacagyaaaatagatacaatggctttcagatattgaacaacaagcagtgcaggactgtgatttctgagagaaaataaacaaagtaaaaaaaagatcagcgaacttgaagatttttaggcttaaacattaagcaaacagataaaaaggcaaagaaaaaaatttcagggtaatatcaaacactctaacatatgtaaaaatagattctcagaaagagacaagggggagggcacgaacaattctgagggaaaaatatgcagaaatcttccaatattgatgaaaatgacaaattcatatttccaggaacaacaaacactaacatgttatatacaacatacacagatacagacacaaacagcatataccaaagctcatcataattattttgcttaaagccagtaactaaatgatagccttgaacgtaatgagagcaaatagtcacaat

SEQ ID NO: 430476 - DNA, 535 bp, Homo sapiens
gtggagtcatgtaaactaattgcttcaatctgaagacaaaacctcagtgatctaaaaccttgtatgtctctgraatcatacaagtcaaaatgtaactacatatgtgtaaatgatttgtaaactgtaaatgagaaacataattttacatttcatctgtggagattattatttatgactagctatttggttcctagaacaaagtacagcagctttccaggtgtttattggaaagaagtaaggaggttcttgggaagaggcatagactatttcagataattagcataatttgttaaaaccatatttgttaattccgaggattaaagcatgggctggaaaaatacaatcgcagtaacatcacagtgacatctgtactagtgaagttacagaaaaaggactttctagactgaagagaactaagttatactgggtcttataaagtttataaaaataacgcccactcaaaaaaaaaaggaaattgaccctataaaaaaattacaaaacttctataattgattagatagctgcataacagttg

SEQ ID NO: 430477 - DNA, 535 bp, Homo sapiens
gtggagtcatgtaaactaattgcttcaatctgaagacaaaacctcagtgatctaaaaccttgtatgtctctggaatcatacaagtcaaaatgtaactacatatgtgtaaatgatttgtaaactgtaaatgagaaacataattttacatttcatctgtggagattattatttatgactagctatttggttcctagaacaaagtacagcagctttccaggtgtttattggaaagaagtaaggaggttcttgggaagaggcatagactatttcagataattagcataatttgttaaaaccatatttgttaattccgaggattaaagcatgggctggaaaaatacaatcgcagtaacatcacagtgacatctgtactagtgaagttacagaaaaaggactttctagactgaagagaactaagttatactgggtcttataaagtttataaaaataacgcccactcaaaaaaaaaaggaaattgacmctataaaaaaattacaaaacttctataattgattagatagctgcataacagttg

SEQ ID NO: 430478 - DNA, 587 bp, Homo sapiens
ttatgtttacttttttgacatgatatgccacatagattatgtactctatgtacatctatttctagggtttctattctattcactcgtaacctggccacttatgctctagttttaattatgagactttactgaatggtttgaaggctgataaagggctgttgtcctttggattatttctctttctcagtggtttccttgttctttttgcagatttttttccatataaactatggtatcagcatgtttagttccaaagtaacaggtttgttggcatttttattatgaaagaaagtgctatattaacttaggaagaactaacattttgaaggtgttgagtcatgcttgttaggatcaagggatgtctattcatttgttcaaatctaacattgtgttgatcaggagtactttaaatttttccttataaacactttggacatttcytattaactttatccttaagtatttgattatctttgttattataaatggggttttctctaccattatgtccaaaaactagttattgtttattacaaaaatgtattgatttctatacattatttttgtatcatgctatattcattact

SEQ ID NO: 430479 - DNA, 537 bp, Homo sapiens
attaacaaaggaaaaaagagagaagatacaagtaagcacaatcagaaaagacaaaggtgacattataactaatcccacagaaatacaaaagattctcagagactattattatggacacatctatacacacaaactagaaaatgtagaggaaacagaagatagattcctgggaacacacaacctcctgagattgaagcaggaagacactgggaccctgaacagacraatcttgagttccaaaattgaatcagtaataaaaagaaaagccccagacctgctggattcaccaaattctaccagaagtgcaatgagtagctagtaccaattctactgaaactacaaaaaattgaggaggtgggttcctccctagctaattttacgaagccagcattggcctgaaaccaaaacctggcaaagacacaacagagacaacagcagggcagtatccctaagaaacacacgcacacaaatcctcaataaaataccacccaaccaaattcagcagcatataaaaaagttaattcatcacaatcaata

SEQ ID NO: 430480 - DNA, 453 bp, Homo sapiens
cgttcccttgtttgttcttcataacgtattttaacttctatgtatggcttactcaacagtgggctttttctatgttcctccttccctctttctttcccccatattttagctgcatcatatttacattgactcaccatgtactatttatacattaattttcctccatcatctaccctttaatttatctttagggctataattacatatgtccaagtgtgcatcataaattcttttgcttaagaatttcaaatgatctcttgtttagataaaatccacactcagatattcctcaaaaaaggcatgtggataargaatccctaagtttttgtatttaaaactgcttttctataaccttgatatttatctgacaatttagctagaattaaaattcttggtccacacttcctttcattgggtttttgttgttgttgttaaatgctactctactgttgc

SEQ ID NO: 430481 - DNA, 556 bp, Homo sapiens
gcctacgtattacatcagttttggaaacagtggtctttagatccatggaacttctaaagaacattgttagccagagtttacaagtcaaatattatttatgaatgctagctgtattttatgtactgtgctaagaattagagataaagagacaaaagacgcaaaaaccaggaatggcttatgatcttatgtggyttatagatatccaggggtaattgaaaatatatggtttaacatttacaagtgtgaaaactggagggaaggaggaacatatgacattaagggaggacataataagaagaccgaatttatttctagagtggtcagcaatatttgtggaggatacaaaaaagtagaagatataagtaggcgtcagatgatccaaggccaattacaccattgctatctcaagtttcatatttttccactcccaccccagttagatttcttactccaaagtgttattacgaggattaaatgtgtttatttaatgccatatggtgaacactcagtaaatctgagttttcctcttaattcttatttttaaaatattgtttcc

SEQ ID NO: 430482 - DNA, 484 bp, Homo sapiens
ggcctgaaagcgttccaaatgtccacctggatgctctacgaaaagaatgtttcaaaactgctctatgaaaagcaatgttatactctgggagttgaacacaagccycacaaaggagtttctgagaatgcttctgtttactttttacgtgaggatattcccgtttccaaagaagtcttcacagagttccacctatccatttgcagatgctagcaaaagagagtttcacaattgctctatcaaaaggaatgttcaactctgtgagttgcatgcaatcatcacagagaagtttctgagaaggcttctgtctagattttatgtgaagatatagccgtttcgaacgaaggccacaaagtgctccaaatatccacttgcatgtcctccaaaaagagtgtttcaaacgtgaactaccaaaggaaggctcaactctggactttgaatgcaaacgtcagaaagatttttctgcgaaagcttctgtttagttagg

SEQ ID NO: 430483 - DNA, 484 bp, Homo sapiens
ggcctgaaagcgttccaaatgtccacctggatgctctacgaaaagaatgtttcaaaactgctctatgaaaagcaatgttatactctgggagttgaacacaagccccacaaaggagtttctgagaatgcttctgtttactttttacgtgaggatattcccgtttccaaagaagtcttcacagagttccacctatccatttgcagatgctagcaaaagasagtttcacaattgctctatcaaaaggaatgttcaactctgtgagttgcatgcaatcatcacagagaagtttctgagaaggcttctgtctagattttatgtgaagatatagccgtttcgaacgaaggccacaaagtgctccaaatatccacttgcatgtcctccaaaaagagtgtttcaaacgtgaactaccaaaggaaggctcaactctggactttgaatgcaaacgtcagaaagatttttctgcgaaagcttctgtttagttagg

SEQ ID NO: 430484 - DNA, 484 bp, Homo sapiens
ggcctgaaagcgttccaaatgtccacctggatgctctacgaaaagaatgtttcaaaactgctctatgaaaagcaatgttatactctgggagttgaacacaagccccacaaaggagtttctgagaatgcttctgtttactttttacgtgaggatattcccgtttccaaagaagtcttcacagagttccacctatccatttgcagatgctagcaaaagagagtttcacaattgctctatcaaaaggaatgttcaactctgtgagttgcatgcaatcatcacagagaagtttctgagaaggcttctgtctagattttatgtgaagatatagccgtttcgaacgaaggccacaaagtgctccaaatatccacttgcakgtcctccaaaaagagtgtttcaaacgtgaactaccaaaggaaggctcaactctggactttgaatgcaaacgtcagaaagatttttctgcgaaagcttctgtttagttagg

SEQ ID NO: 430485 - DNA, 541 bp, Homo sapiens
taacgttaagtcaatctcatagaaagtaaaatggtggtcgctaggagctgggggaagggtaaatgggaggttgttgaccaaaggtcataaagttttacttatgtaagacaaataaggtgagactctgtctctacaaaatattgtaaaaattagccacatgtggtggcatgcacctgtggtcsaaactactcaggagactgaagtgggaggattgcttgagccctggagattgagcctgcagtgagttgtgttcactccactgcactccagcctgggcaacagagcaagaccctgtctcaaaaaaaaaaaaaaaaaaaaaagagagagagagatctggtgtaaaacattgtgcctatacatttgttaagaaggtaaatctcaagttcagtgtttctgccacaataaaaaaaataactaaaaattaaaaacaaactttggtttctctttagataaacatacttacgtttacgttttaaattaccatgttttatatttaggctaaaggtttttgtttgccccaatacaagagacttcagaacat

SEQ ID NO: 430486 - DNA, 548 bp, Homo sapiens
aatgtccctcaatagatgaatggataaagaaaatgtgatatatacatacaatgaaatattacttagctcttaaaaaaattctaccatatgtaagaacatggataaacctgaaggatattgtgctaagtgagttagccagaacaaatgctgtatgatgccacttatctgagctatctaacgttaagtcaatctcatagaaagtaaaatggtggtcgctaggagctgggggaagggtaaatgggaggttgttgaccaaaggtcataaagttttacttatgtaagacaaataaggtgagactctgtctctacaaaatattgtaaaaattagccacatgtggtggcatgcacctgtggtcgaaactactcaggagactgaagtgggaggattgcttgagccctggagattgagcctgcagtgagttgtgttcactccactgcactccagcctgggcaacagagcaagaccctgtctcaaaaaaaaaaaaaaaaaaaaragagagagagagatctggtgtaaaacattgtgcctatacatttgttaagaaggt

SEQ ID NO: 430487 - DNA, 537 bp, Homo sapiens
tattattggtaggaaaagttgctacatggggtttatggcaagcccaaataggaaaaacatagctgacattttgggaactggagcaatgccatgttatctgcaccaaaggattacatacttttcaaaaaagagcttcttttgtttccactggagttctagatgggkgcagtaagagaccatgaggccagagtagtccattagtactgtaagactcacaaagtgttaaagttgagcagaaccagcagcaatgaggatggaagtgatgtatctaggatggtgcataagcagagtcagagggcccaataacctgaatgagaagatagattgggcctcatggcacccaccgcatttgcaacagtacctctctcagcactcattatagttatattgagaagcccagataactagctgatggaggagggataaatctgagcttgcttcctggatggcagctgcactcaggcccactcagagatgaccttgtaagtcagtggtgaggagaaatactcccaatgggcagagcctcaggaggttcac

SEQ ID NO: 430488 - DNA, 617 bp, Homo sapiens
gaggctagtttctgtgttaccacaaacaaagtgctgaaggaagcagcatagctcagattactgggatagcttggaacaaagacaaaggggcgggcaccccccctacaggtagcacagagctgcaagattggaaacagtacagaactgagacttctccctcaggaaagaagatgagtggaatgtgactccaatgtccctggcctttcagcacacttctcaaggagtcagtgcctgtcttgccttacacggagcactaaaggaactgacacagtctaacaccagcaggagcaagaaaccatgagytttaaaaacaaaaagactagatacccgggcaactaggaacacaggcctggaatccctagccaggctgatcaggaaatttttttctgtcaaagccactttatggagaattgctagaagagttagttgtttcttcaaatctccagacatcaatacaaagctacaaaaaataggaaaagatcaggaaagcatgatacaatcaaataaagaaaacaaatctctagtaatggatcctaaagaaagggagatataaaaactatttgacaaagaattcaagatagtcatcttcaagaggctcaggagttgcaagagaacac

SEQ ID NO: 430489 - DNA, 503 bp, Homo sapiens
agcatgatacaatcaaataaagaaaacaaatctctagtaatggatcctaaagaaagggagatataaaaactatttgacaaagaattcaagatagtcatcttcaagaggctcaggagttgcaagagaacacagacaattaaacaaattctgaaaaatgttgcgtaagtaaactaagaatgtaaacaaatagaaatttttttttaaagaaccaaacaaaaattctggaactgaagaatataactgaactaagatattcaatgtaagtgttcaggagcatatttaatcaagcagaagaaagaattagtgaactcggaggggtggggccaagatggctgaataggaacagctccagtctacagctcccagcatgaacaatgcagaagacgggtkatttctgcatttccaactgaggtactgggttcatctcactggggagtgtcagaaagtgggcagaggacagagggagcagtgcaccaagaccaagagtgagccaaagcagggca

SEQ ID NO: 430490 - DNA, 596 bp, Homo sapiens
agttattgaggttattgtactaatgtgtccctaatcccaagccagaagcttttaatagccttacaattatatacttctgagaacctgaaagggaatttagatacctcgtttgattgatcttgaagcycaaagtgcttttgtaacttagccaaaaacaatgagatagctaacagctataactgttttcctgggttgtatttcagcgtccatccagcatgtggtttttcttcataaaaagtcctcaaaataggcccctggcaggagggtgttcttgggagggaagggtggcaaaaaatgttcacactttaaaaatgtctgcacctaaactatgcagaacaggaatttagggccacagggccattggaagattattaagaatcatcacattgaagaatcagggttgccgatgtatctgttcaaaatcaaggttttcaactttggtactattggcattttccactggataattctttttcgtggaaagttgttatcctaaaacatttaacagtatccctggcctctatatatgtggtgggtgaattgtacacccccaaaagatatgtttaatccctgatctttggtacctgtgaaagtga

SEQ ID NO: 430491 - DNA, 632 bp, Homo sapiens
atagaggaggcttatcattaataggaaggggagttatagggaggctaggatatgggggtaagctgagaggtcctcttgtgggatgtaaattagaagctttgaatagttgtggattctccttcaatgaaaagaaagcttggacataaggtatttcactccatttgccttcctcttacagaaaaggtcaagctcgctgacttcaagaatgaagctgcgggcctcacagtgagtgttacagctcttaaaggtggtgcatccgcagtttgttccttccagtgggttcatggtcacgcagacttcaggaatgaagccgcagacactcgcagtgagtgttacagctcataaaggtagtgcggacacaaacaatgagcagcagcaagatttattatgaagagtgaaagaacaaagcttgcacagcwtggaagggaacctgagtgggttgccactgctggctcaggtggccaacttttattcccttatttggccccacccatgtcctactgattggtccattttacagagtgctgattggtccatttttacagaatgctgattggtgcatttacaatcctccagctagacagaaaagttctccaagtccccacctgacccagaagcccagctggcttcac

SEQ ID NO: 430492 - DNA, 535 bp, Homo sapiens
aagctgtttttcaggaaagtattaaataattgttactagctcttttttataattattttcctattcaaagtaataataaagtaatccttgaacatccttttagttaacacacgattttttaataattcactatttttgaccaggcatggtggctcccgcctgtaatcccagcactttggaaggccaaggtrggaggatagcttgagcccatgagtttgagaccagcctgagcaacatagtgagaccctgtctctacaaaaattaaaacaaaaaattagcagggtgtggtggtgcatacctataatcccagatactcagaaggctgaggtgggaggatcgcttgagcatgggaggttgaggctgcagtgagccatgattgtgccactacactccagcctaggtgacagtgagaccctgtctcaaaaaaaacaaaaaacaccactatttttgttaagtaatgtattttaaaaggaatacaagtaatgccctgaaaagtacagatcaagaaaagaatgcaaatgagacaaaaataatg

SEQ ID NO: 430493 - DNA, 535 bp, Homo sapiens
aagctgtttttcaggaaagtattaaataattgttactagctcttttttataattattttcctattcaaagtaataataaagtaatccttgaacatccttttagttaacacacgattttttaataattcactatttttgaccaggcatggtggctcccgcctgtaatcccagcactttggaaggccaaggtaggaggatagcttgagcccatgagtttgagaccagcctgagcaacatagtgagaccctgtctctacaaaaattaaaacaaaaaattagcagggtgtggtggtgcatacctataatcccagatactcagaaggctgaggtgggaggatcgcttgagcatgggaggttgaggctgcagtgagccatgattgtgccactacactccagcctaggtgacagtgagaccctgtctcaaaaaaaacaaaaaacaccactatttttgttaagtaatgtattttaaaaggaatacragtaatgccctgaaaagtacagatcaagaaaagaatgcaaatgagacaaaaataatg

SEQ ID NO: 430494 - DNA, 509 bp, Homo sapiens
caataggaatttttcagctccattgtaatcctatgggaccaccatcacatatgcggtctaaacaatgcggattaaracaatgtcctgcagtacctggctgtattctgtaaatgttgattagatccaattgattgatggtgttgtttacttcagctacgaccttactgattttctgcctgccggatctgtcagttactgacaagggtgttgagggctccagctataataatggattcatctgtttctccttgcagtatccatttttgcctcatgtattttgacactgttgttagatgcatgcacattaagaattgttatgtcttcttggagaattgatgcctttatcgttatgtaatactcttcttcatacctgataacttctcttactctgaagcctgctttgtctcagaataatatagctactgttaactttctttttattagtgttagcatgatatatttttcttcatctctttacttttaatctctgtacagtagtccccacttac

SEQ ID NO: 430495 - DNA, 391 bp, Homo sapiens
tcttgaaaacagctgtggacaagaatacttagcaaataagctgcatgcctgggtgtaaagggccaacagtttactagtttactgggcccctaaaaatttagagcaatttccaactgtccccaccagtcaaccttaaatagttcccttgcttttgttaaccttaacataagccttttaaaaaaataaaaacaacagagtgggcttctttcctgccgttgcttttgccatttgtagcattacaggtaatcagtcagaattcagatcacttaactacataggtgagagtgagaktgggttaagttatgagtcctctgtttttgctattctctctggcctgtggttctgctggccactttttcttgactaatattatgcttatagactatttgac

SEQ ID NO: 430496 - DNA, 607 bp, Homo sapiens
agagatgaggaagaacctaggctggggcctttcagcatttctaaccaaatattatagttcgaacttgccctcatcactgaaccatctgctgctgtgaggtaggcaatgttttccaaagaaataatttagaataatactacaagcattagttacctttctatatagtaccagaaaccagaaactggctagtatgaagaaactgaaatagaaactacttgtaatttttattaacttactgttttagtttacttttattatttttttatcttatagcttatgcattgagtatagggaactaatgaaaactcatttgtggcttaagcacattgagttcttgaagttttcagagttttgaaacaacttggacttcggagttgtaaaacagaaactacaattttgtttataaattctgttttcagactttctttagaaataagatgacagagagttaaatgatttgaagaggatgggagtgggaagaatggagcagaaagaaaagaatttaaatgagtcacttttgtagcttttggataaatcattcaggtttttttttaacggttaatttagtcttgtagtctggaycatttaaaaaaggaaataggtaatt

SEQ ID NO: 430497 - DNA, 441 bp, Homo sapiens
atcccttgccttaacctgtattagaaatggtaattctaayatataatcataaaatgcttgaataaagaatatcttatggaaagtttatggaggcaggtgtgtctttcagtaaaaaaggaaagtaaaaataagatggtaatgagatagaataaaaatatcattgtcttcctttgtacagacaggattgtcagatgtaatgggaaacactataattgagtataactaagtataactgaggataattcaagttgatcagttatagactcctcttgtaaacttctatttttgattttttaaaacatttttaaagggaatttaaaatagcactgttactgtagctgtttagcataatttagttctcaagttatgatcagctaaaatcattatttttttattttattgaatacctgcttgtttagtaccattttctgacatcaagag

SEQ ID NO: 430498 - DNA, 441 bp, Homo sapiens
atcccttgccttaacctgtattagaaatggtaattctaatatataatcataaaatgcttgaataaagaatatcttatggaaagtttatggaggcaggtgtgtcyttcagtaaaaaaggaaagtaaaaataagatggtaatgagatagaataaaaatatcattgtcttcctttgtacagacaggattgtcagatgtaatgggaaacactataattgagtataactaagtataactgaggataattcaagttgatcagttatagactcctcttgtaaacttctatttttgattttttaaaacatttttaaagggaatttaaaatagcactgttactgtagctgtttagcataatttagttctcaagttatgatcagctaaaatcattatttttttattttattgaatacctgcttgtttagtaccattttctgacatcaagag

SEQ ID NO: 430499 - DNA, 381 bp, Homo sapiens
atcttgctttgcagttaaagctttaactagcaacttactttggggaaatttcagtagagcaacactgtcttctaaaaataaatgtgctaacctaaagactattttaaactctgcttctgtgtcagatcagacattgatgaggggcaccactggtcagaccacaaactcatccaccccaccacttatgggacaagtgtgataatctgcaaaatttgtaactgggaatgttcagtgaataatcaattaggactayagtttcttgatgtatctagagcataattctgtttccaatttgaagacaatgaaactgctctactagtagtccttcatgaactaacaaattaattcaacaaaagttacagcactattaaaggtaaattc

SEQ ID NO: 430500 - DNA, 657 bp, Homo sapiens
aaactaaataggttagaggtaagaaacactgggaaaatttgagtgatttataaagaatttttttttcagatttatctaacctaaatttatatagcctaagtaaataagtcattagtgcttttaaaaaagccattaacttgtctactgattggagtttatttcataaaacatttaattttccatgcgtatatcaagtatttctgaaaattttattaaaagaattatttttaaaccacttataaacgcacgttatttcctgtttcaactctaccttaataaccatacacaatttcctttttttattggtgcatgtgtatatgcatgtttgtaccttctacctctaaaaggcttattttcaagcrgaaatgacagcatggcatggttctctgttgaactgctttgttgatcagaacctcatgataatgaacaaagctaagcttataggttcaatactcatctggatcatttaactttgaaacaaagtgccctcttaaccagtcatctcacaactgtgtgcaggagactgagagaatgtgaattatgcagtgcaaatctataccactattacaaaagtttcaaaatgtaaatgagctaatattaacattatctttgtatatgaaaaactaaaaagcacataaaaactactgcttgtaatcc

SEQ ID NO: 430501 - DNA, 518 bp, Homo sapiens
tcatgggtaaaactaaacactggcaagatctggagtaacttaactattacaatacaaacaatgacagactgtgaaactccctgagggcagagaccctgtctaattcatctctgtatccaacaattagcatcctgtagttaaatgttgaagagaggtaagctaacatccaaaatttaaatgtgagctattgaaaaattcaacttaacaatctgaaagttatctttttatgactgacattattttttaaatgttaaacaataatgtccaatgcaagtatacaagcgacattaccatggaatgtttgtcaacaactgtggctgtcaaaatcagtataacctagtcttaagagtataaggtagggtgagaggmtagaaacagtggcagggaagggtagtaagggaagacctgagactggtgcagagacctgaagaagtgagggatatatactgccttggggaaaaaggttacaggcagagaggacattaagtgcagacacctcagtgtatttgacctttttg

SEQ ID NO: 430502 - DNA, 578 bp, Homo sapiens
tgtaatcaaaacaaaaacatcatccgccacctaagaagagtggctggctacctgtagggctgtggctcattgaccttctgctctattattctatttcatttcttatacctcctcccttcaaagaagtaacaaaatgattttccctcccaaaacagaatgcattactcctcaatggcagttctttttccaagaggtcaaaggttccctaaactctggttctcagccctaagaggagatcccattttgtaggcacaaaygtcttcctctcatcttctccccgtagcagtaaattacacaactcggctgaagacaccgtccttaacttcctgattaagggggcaagagatactcttaccaagccgctagtttgaaggataacaagaatcacaccgtgacctcttccctaacaaaattcagggaagaagcagagacccatgaaaagtaacactgaaaaggcgaacacatggtaagctacggaagacatgagggtaaagaaggcgggaaaggggctggaaggtggagtgggatgtagatgtcagccctattaactgggggaataaaggaaggaaagggagacc

SEQ ID NO: 430503 - DNA, 564 bp, Homo sapiens
ctgtgtttttaactagagttatgcaggcataaaatatccttggcttgcaaattttctattaacttgaacatactgggaatgcttagcagcaatgaagtgctgaaaatgccaaagaaattaatggctttgtgctgtactactgaaacatgtccgctaatatttaaaattccatgkcccaggacatcacttatatctgctgactgaagctgaatggcctggaatctgctgggtgcatcaggccatttctcaagtctctctctgttgggcttttgtttccctctctcttccatttctattttccctctctccatcctttttccctagctcacccccatttttctgggattaattgagaatgttatttataagagactagaagagagttatacatatggaataggatatgatttatcaggatttatttcagatttcttaagtttaaaaaaggtactaaatatccatgtctcattttaagtattcatatgaagtcaacatttatggaccttgaaatccattgttttctgtgtccttgagagaaattttacaggccttgtgcaaggttta

SEQ ID NO: 430504 - DNA, 339 bp, Homo sapiens
ttccccccagccaggaaggactctagccacaaaacttgctgggtggaagagatgatgtgaacacctttctccctacctattactcttccttacgcctcaatagaagaaagagtggcagaacaggtggcaaaatttgtcaactgttacaaatcccactccccatacayaggcgtctgggatggaaagaaagattatgcccacttcaaagggaacatatctcttcttaccttgctgaagaaccgtgagtgagtaatgatgtaattgttgtggtttctttatggccataccccatctgggccacgtaccctttgaaggtatgtgtacattgacaaggatgta

SEQ ID NO: 430505 - DNA, 554 bp, Homo sapiens
gcattccagacatgcagggtaaggaaggacctttcaaagaacattcttttaacctacattcagccacrccgggaatgatgcttcttgacctgaggtagaactgctcccttagggagattttggaggcccttttgttgttaattgttacaatgactgggggatgctagcagcatttagcgcctggaactcagaaatgataaatgtcctgcaatgagcgggttagtcccatgtccagccagtagtgcctaggttgaaaaacaacacatgtggggtaatgggacattgactcttccctgtcgtctccatgctcccaagaactccattctggcttgtgaaaaactagtaatggaattactcgtatatgaaaataactaatgcccgatagacaaaccaaacagttgcctagggcaccagcaaacagagagaaagaaggataagttcagctgtaatgagcttattcacaattttgcaggcagaaaatctagaaagttgctttttaaaattttagcataaactttcatgttaaaccaaaaaataaaattttattttgaatt

SEQ ID NO: 430506 - DNA, 575 bp, Homo sapiens
tttttttacattaaatgcttatcaaccatccacacctccccccatgtttcctaatacccttcccagctggtaaccatccttctactctgtgtccatgagttcaattgttttgatttttagaccccacaaataagtgagaacatacaaagtttgtctttctgtgcctggctgatttcacttaacataataatctccagttctatccatattattgcaaatgactggatctcactcttttcttttatggctgaatagtactctatatgtgtatgtatgacatttattatttatttatttatttwtttgagacagagtctttctctgtcgcccagcctggggtgcagtggcgcgatctcagctcactgaaacctccgcctcccgggttcaagtaattctctgcctcagccttccaagtagctggaattacaggcatctgtcaccatgcctggctaatttttttgtatttttagtactgacggggtttcactatcttgcccaggctgttcttgaactcctgacctcgtgatccaccagcctcggcctcccaaagtgctgggattacaggcgtgagccac

SEQ ID NO: 430507 - DNA, 575 bp, Homo sapiens
tttttttacattaaatgcttatcaaccatccacacctccccccatgtttcctaatacccttcccagctggtaaccatccttctactctgtgtccatgagttcaattgttttgatttttagaccccacaaataagtgagaacatacaaagtttgtctttctgtgcctggctgatttcacttaacataataatctccagttctatccatattattgcaaatgactggatctcactcttttcttttatggctgaatagtactctatatgtgtatgtatgacatttattatttatttatttatttatttgagacagagtctttctctgtcgcccagcctggggtgcagtggcrcgatctcagctcactgaaacctccgcctcccgggttcaagtaattctctgcctcagccttccaagtagctggaattacaggcatctgtcaccatgcctggctaatttttttgtatttttagtactgacggggtttcactatcttgcccaggctgttcttgaactcctgacctcgtgatccaccagcctcggcctcccaaagtgctgggattacaggcgtgagccac

SEQ ID NO: 430508 - DNA, 600 bp, Homo sapiens
ggtatttttgtaggaattgcattgaatctgtagattttttggggtagtatggacattttaacaagatttagtcttccaatccatgaacgtggaatatttttccattttttggtgtcttcttcaatttctttcaattgagaccaattttgaaagacattctggttaaaatggtatcaaagctgggcatggtggctcatgcctgtaatccaagcactttgggaggccgagctgggcagatcacaaggtcaggagatcaagaccagcctggtcaacatagcaaaaccctgtctctactaaaaatacaaaaactagctgggtgtgctggcatgtgcctgtagtcccagctactcyggaggctgaggaaggagaatcacttgaacctgggaagtggaggttgcagtgagctgagattgtgccattgcactccaacctgggtgacagagtgagactccatctccaaaaaataaaataaaataaaataaaataaaataaaataaaataaaataaaatggtatcaaacagtatctcatgctacagagaaaactttcgtgaaaggaagagtcaatcaatgagacaaacttcatgtcttattttaagaaa

SEQ ID NO: 430509 - DNA, 532 bp, Homo sapiens
tcataatgtcaccttctcaatgaggcmttccctggccaccctccctaaaatgccagcctctttgacccatcttatctttgctttattttttctccttattgttcatctctatctaacatgctgtttttcattatctagcttcttattgctctctctctccagaatatatgctctctcagaacagagatctttgtgggctttgatcattgctatatccctggcacctaggacagtacctggtacatagtggccctcaggaatacttatagaatgaataagtgaggtcatttgatctttaccatagccccatacaatatcttctattattatccccattttaaagatgagaaaattgaggcacagagttgggtaacttgctaaggttatacaacttgtaaatagcagagctggtatcctaaccctagcagtgtggttccatagtccttgctcttcacaaccaacaatgcccaggtacccactactacctgcatttactttttaaagaaaacaaaattttttttttaatattaag

SEQ ID NO: 430510 - DNA, 532 bp, Homo sapiens
tcataatgtcaccttctcaatgaggcattccctggccaccctccctaaaatgccagcctctttgacccatcttatctttgctttattttttctccttattgttcatctctatctaacatgctgyttttcattatctagcttcttattgctctctctctccagaatatatgctctctcagaacagagatctttgtgggctttgatcattgctatatccctggcacctaggacagtacctggtacatagtggccctcaggaatacttatagaatgaataagtgaggtcatttgatctttaccatagccccatacaatatcttctattattatccccattttaaagatgagaaaattgaggcacagagttgggtaacttgctaaggttatacaacttgtaaatagcagagctggtatcctaaccctagcagtgtggttccatagtccttgctcttcacaaccaacaatgcccaggtacccactactacctgcatttactttttaaagaaaacaaaattttttttttaatattaag

SEQ ID NO: 430511 - DNA, 530 bp, Homo sapiens
aataaaaataggaagagtatctgtgtagtcctaaaagataattgccatacctaattaatcctgagtcactagaaggagaactttttgttcttgctttttctgggaaagtttcaaggaagtatttgtatgaattaggttattaaaggcttctagtcaaatatgattgtaacatatttctctaagattactcaaattctgccatttctgagtgacaaattgcttaagaaatatatataaagttggcatccgaagttaaaatgctaatgaagaacatattttcytaaagtaatatcttacatattaaacttttaagtgttatttacttaatagttttggactaattccacatagtataagaacccactgccagtgctttccaaagaggaaacagactatcttggcaggtagtagatttttgtcactggagggaaaataacatttattgaacatttgctatgtactaggtatagtgccaagtgacatttcatattacggtattccatttaattctcaaacagctttaaaagata

SEQ ID NO: 430512 - DNA, 530 bp, Homo sapiens
aataaaaataggaagagtatctgtgtagtcctaaaagataattgccatacctaattaatcctgagtcactagaaggagaactttttgttcttgctttttctgggaaagtttcaaggaagtatttgtatgaattaggttattaaaggcttctagtcaaatatgattgtaacatatttctctaagattactcaaattctgccatttctgagtgacaaattgcttaagaaatatatataaagttggcatccgaagttaaaatgctaatgaagaacatattttcttaaagtaatatcttacatattaaacttttaagtgttatttacttaatagttttggactaattccacatagtataagaacccactgccagtgctttccaaagaggaaacagactatcttggcaggtagtaratttttgtcactggagggaaaataacatttattgaacatttgctatgtactaggtatagtgccaagtgacatttcatattacggtattccatttaattctcaaacagctttaaaagata

SEQ ID NO: 430513 - DNA, 569 bp, Homo sapiens
tgaatcctttcccagaaaatatacatatccatacacatacaaacacacacacacacacacacacagagagagagacttaattttttttgtacaatgtcaggaacttaccagttcactaaagcctaatccatagctgtttgttccctgaccttttcctgaggaaawgcaaataaatttcaataacagtccaaattagaatggtacatatatcattgtccataatacacatacacaatatttaaaagtcaaaatagttttggaactatttagtttttgatcatgttattgcttttctctcatcagaaaataatatatcattatgtcacagaaaaaaataaagtcatatgtcttatggtgtgtactatattgaaaatataatatgaatataacagtgaaaagggtaagatattagaaactgactaaggtgatggataccgttattaaagaatcagcacagagactcaggaaaccctaaagggagatccaggaagaaatgtgatggttggtacctgagggaaagctataaatgaagaaacaaagccaattttccctttcattcatgttaagtt

SEQ ID NO: 430514 - DNA, 569 bp, Homo sapiens
tgaatcctttcccagaaaatatacatatccatacacatacaaacacacacacacacacacacacagagagagagacttaattttttttgtacaatgtcaggaacttaccagttcactaaagcctaatccatagctgtttgttccctgaccttttcctgaggaaatgcaaataaatttcaataacagtccaaattagaatggtacatatatcattgtccataatacacatacacaatatttaaaagtcaaaatagttttggaactatttagtttttgatcatgttattgcttttctctcatcagaaaataatatatcattatgtcacagaaaaaaataaagtcatatrtcttatggtgtgtactatattgaaaatataatatgaatataacagtgaaaagggtaagatattagaaactgactaaggtgatggataccgttattaaagaatcagcacagagactcaggaaaccctaaagggagatccaggaagaaatgtgatggttggtacctgagggaaagctataaatgaagaaacaaagccaattttccctttcattcatgttaagtt

SEQ ID NO: 430515 - DNA, 616 bp, Homo sapiens
gggcatgtgttacagtgtgctctttcagctttgccgtctgcaggcggcttgtgttaatcagctcaattagatgctctgccttatcgcaaagacagagggctttctgtatcccgggttcttgccctggtgtcctggaaaaatcagatcacatgtgggcttggaggatgggtgcaaggttttactgagtgatggaggttgttctcagcaagccagatggggagccaaaaggggatggartgggaaggtggtcttcccctggagtcaggccacccagtggctggacttttctcccaactacaccaactgaattccatgtggtctccccgtagatggcctgctggtgtctgttgttgtgttattctgcttctcttatcatccacccatttgtgtctgtgtctgtatccggcttatagcggcacaggatggggagcatggtgggccatcctaggcacaggcctgagggtggagccctcaccagttacccagcccttccctaccctgcacttccgtatcaataggagactgctagttttagtgggacctacctaaatcataagaagtcatatttccttgagggaaagacccagatactggtggtaccattcagccatgcagg

SEQ ID NO: 430516 - DNA, 616 bp, Homo sapiens
gggcatgtgttacagtgtgctctttcagctttgccgtctgcaggcggcttgtgttaatcagctcaattagatgctctgccttatcgcaaagacagagggctttctgtatcccgggttcttgccctggtgtcctggaaaaatcagatcacatgtgggcttggaggatgggtgcaaggttttactgagtgatggaggttgttctcagcaagccagatggggagccaaaaggggatggaatgggaaggtggtcttcccctggagtcaggccacccagtggctggacttttctcccaactacaccaactgaattccatgtggtctccccgtagatggcctgctggtgtctgttgttgtgttattctgcttctcttatcatccacccatttgtgtctgtgtctgtatccggcttatagcggcacaggatggggagcatggtgggccatcctaggcacaggcctgagggtggagccctcaccagttacccagcccttccctaccctgcacttccgtatcaataggagactgctagttttagtgggacctacctaartcataagaagtcatatttccttgagggaaagacccagatactggtggtaccattcagccatgcagg

SEQ ID NO: 430517 - DNA, 594 bp, Homo sapiens
ctgttctttctctagattttccaaatttttagaagttttagcatatctgtacttaaagtgaaggtaacactcttctatctacttcagagcagaaggacaaagtgcaattatcttccattatatcatttataaacaaacaggaaagaaattttaggtgataaataagaaatctagccaacttaaacattgttgtcatcagctcaacacactttcttctgacatttccttgtgtcaagaattatttaatagacccaaactctgaataaactgatgagtaaatgaaggaatgaatgatgtatcaatgaaaaagagtctttttwaaaaaaaaagttataatattttgtctcactttttcacccagttctgtagcagttttcctttcttaagcctttgggtctccatctatcagccttccctgagcaaaccttgttttaaatcaagaatacagattgcaaattccaaaggagtttaccatctgtctaagtcagtttgggctgctataacaaaagaccatagactgggtggcttataaacaacagaaatttctcgcaattctggaggctgaaagtctgagatcagcatgccagcccggtt

SEQ ID NO: 430518 - DNA, 573 bp, Homo sapiens
tttactatatagattctataattattatttgaatttgagagtgtcttctgttcaataactagtaactccaaggaatatatgcaaaatatatttggcactgtacaacttactcttactgcgttttgtcatcttgcttcagtgatccatataactgtgttcttccatgtaccatttttgcattgtattatacatccttttgttttttccttttcccatttgtattgaaaattgttttctaggctgtaaccctcttaagttgtacttttagttaagttttcacactttagttaggtttcacacttgggagtgtgattggaataaggagggaatttcacattcataaagggtctcaaatgtagatttaaaaattatttgaaatttaggggtatatgtgcagstttgttacatgggtatattgtgtaatgctgaggtttgggcttttagtgatcctgttgtcaaagcagtgaacatagtacccaataggtagtttttcaacccttgcctttttctggccctccctccttagggaatctatagtgtttatttttcctgtctttgtgtccatgtataccc

SEQ ID NO: 430519 - DNA, 515 bp, Homo sapiens
tatgacctagcttcagaaattacacattgtcacttctatattcttttggtcacataggcccacataattcagggtgcgtctggactacataacagcatgaataccgggaatcaaagatcactgaggtccatcattgaggctgggtaccacagtttaataatgtttaggcttcagagaaattctccacatctcttgcctgtattttcatgtctgaatgccatgaaggtttttaagtggtaccattgctgacattggagacagaaactgctcaagattgtgctaagggttcgagcaggcagtagaagcattttgataaaaggaaagagaaattaattatctaatttttctctcagcatgaatgcaatagaatcttacrtaataaaaatactgttttctggtaattttaagcttctattatcttttctttctattatgatttattcttcctgaggtaatagaattagtgtgatatttgcaaacagttgcaattggagactgacaagcattttccatta

SEQ ID NO: 430520 - DNA, 575 bp, Homo sapiens
tgtgtgtttgttaagatagtcctttccatacttacttggattacttttgcataatttccaaacagagatatttttgtatttttctaacctatcataagttttaaagctatgaactttgaataaactagccactgtaatcataagcacaagttttcctattgacataatttgaaattacaagcatcatgtattaatattgcatatctattaagttggaaagtattaccctttgcctctaacggtgttatatatttcaggattaaacatgttagaaataatttatcttagctgtatttcacagactttaagactcatccrtatgatgtcttattttccattctgaaatttgtattatataaatgtagacaattagaaatgctgttatgttaggatattgagctctagaaatcaccatttcaaattaatcccttcagtattcattctacactttatttcagaaccattatctgccagttattatgttgggtctgggaaataaaaaaaatgaatgaaacgtgtttccgctgtcacaaaatgcacagactaggaaggcaggaaaaaaaaagtacagtgcc

SEQ ID NO: 430521 - DNA, 575 bp, Homo sapiens
tgtgtgtttgttaagatagtcctttccatacttacttggattacttttgcataatttccaaacagagatatttttgtatttttctaacctatcataagttttaaagctatgaactttgaataaactagccactgtaatcataagcacaagttttcctattgacataatttgaaattacaagcatcatgtattaatattgcatatctattaagttggaaagtattaccctttgcctctaacggtgttatatatttcaggattaaacatgttagaaataatttatcttagctgtatttcacagactttaagactcatccatatgatgtcttattttccattctgaaatttgtattatataaatgtagacaattagaaatgctgttatgttaggatattgagctctagaaatcaccatttcaaattaatcccttcagtattcattctacactttatttcagaaccattatctgccagttrttatgttgggtctgggaaataaaaaaaatgaatgaaacgtgtttccgctgtcacaaaatgcacagactaggaaggcaggaaaaaaaaagtacagtgcc

SEQ ID NO: 430522 - DNA, 581 bp, Homo sapiens
ttccaatgttctatttaatatccttaatagggtttgttttatcatcattgtttaagctgtkcacatatgtttcatatttatcatatgttaaacacaaactttaaaaaagttaaaatgtgcagaactggaagtagagtgcagatttgaaatccagttctgcactttactagagatgtaaactatttcttaatctatagaatcatgttaccatcagcatcataaggttgctgtaggaataaataaaatgatacatagaatataacaggaacttaataaatatcagtttcctttctccttttatatcagacattaattagtagacatttctcaaagggagacatacaagtggccaataaataaatgagaaaatgttcaacattgctagtcatcagggaaatgcaaatcaaaaccagaataagatatcatctcattagaatgatcattattaaaaagacagaaaataacaaatgctggtgagaacacagagaaagggtgatttattggtgggaatgtaaatcaatacagctaatatgaaaaaagtatggagtttcctcaaaaaaataaaaatagaactaccatat

SEQ ID NO: 430523 - DNA, 596 bp, Homo sapiens
aaaccctaaagtctcatccgaaaaactcctagctctgataaatagattcagtaaagtttcaggatacaaaatcaatggagacaaatcattagcactgctatacaccaacaacgagcaagctgagaataaaaatcaagaactcaaccccttttacaatagctacaaaaataaaaaataaaatacttagaagtatacctaaccaaggcgggygcggtggctcatgcctgtaatcccagcactttgggaggccaaggcaggcggatcacaagaccaggagatcgagaccatcctggctaacaaggtgaaaccccgtctctactaaaaatacaaaaaaattagccaggcatggtggtgggcacctgtagtcccagctacttgagaggctaaggcaggagaatggcatgaacccagaaggcggagcttgcagtgagccaagatcacgccactgcactccagcctgggtgacagagtgagattccgagactccgtctcaaaaaaaaaagaaatatacctaaccaagaaggtaaaagacctctacaagaaaaactacaaaacactgctgaaagaaatcatagatgacataagcaaatggaaac

SEQ ID NO: 430524 - DNA, 596 bp, Homo sapiens
aaaccctaaagtctcatccgaaaaactcctagctctgataaatagattcagtaaagtttcaggatacaaaatcaatggagacaaatcattagcactgctatacaccaacaacgagcaagctgagaataaaaatcaagaactcaaccccttttacaatagctacaaaaataaaaaataaaatacttagaagtatacctaaccaaggcgggtgcggtggctcatgcctgtaatcccagcactttgggaggccaaggcaggcggatcacaagaccaggagatcgagaccatcctggctaacaaggtgaaaccccgtctctactaaaaatacaaaaaaattagccaggcatggtggtgggcacctgtagtcccagctacttgagaggctaaggcaggagaatggcatgaacccagaaggcggagcttgcagtgagccaagatcaygccactgcactccagcctgggtgacagagtgagattccgagactccgtctcaaaaaaaaaagaaatatacctaaccaagaaggtaaaagacctctacaagaaaaactacaaaacactgctgaaagaaatcatagatgacataagcaaatggaaac

SEQ ID NO: 430525 - DNA, 578 bp, Homo sapiens
ttttcctattgcttattcatgttcctatcccctgtaaaattcattttcactcygtagccagactgatcattctatggaatctgagcatgccactttgttactggcctcagaatagaatccaaattctttaatacacagtttacagggtctttcgtgatttggtggtctctatttatctctcttctttactctctaccacccagcacttcagtcactgaacaattttcatactctgataatatatactctctttcaattctgggcttttgcatatactgtttccctcaccttgaataatgttcccttaagtttcctcacctagaacacttatgttttaactagacgactgaataacattttacttgcaaacttttctttgacctccataccttgaattaggttgcttctaagaactctcacaccatcctggggtcctataaggtcccttaatgtagtgttttggcttgttttgttttcctaatcagattgtaaactctttgagtgcagttttatgttattcacttccatattctctgcaactagtacaatgcctgatacacagtaagtgcttaaaaaat

SEQ ID NO: 430526 - DNA, 560 bp, Homo sapiens
agttttaaattttaatgaagttcagtatggattgtgtcttttgtgttgtttctaaaaacaacatacccaaggtcatctagattttctcctgtattatctgctaggattttataatattgcattttacattaggtctgtgatctattttgagttaatttttgtgacaggtgtaaggtctgtgtctaaattcatttcttttttgcatgtagatgtccagttatttcagcaccgtttgttgaaaagactatctttgctccattgtactgccttcrctcctttgtcaaagatcaggtgactgtatttatgtgggtctatttctgggttctctattctgttccgctcatctacttatctgtttttttcttcattaccacactgtctcgaatattgtagctttatagtaagtcttgaggtccagtagtatcagtcctccaactctgtcctcttttcaagttgggttggctgttttgggtcttttgcctctctgtataaagtttagaatctgtttgtcagtatccacaaataacttatgggattttgtttggtattgcattgaatct

SEQ ID NO: 430527 - DNA, 559 bp, Homo sapiens
tacttaatgtcccatagtcaagtgtccttcctttaccaggttccagtaacaccaaaaactgtttctcaaaaagcatagtattttctgcttcagatgacatggccttactccagaattccagaggcagcatttgtttctctcactgcaaactgccataggctccatactgcatcttctcccaccataatacctccaatactaaagggtcttctggattaaatrtgcaagtggcgggactgattgtaccatgtcctagacttatgatgttgccctttcctgttttgggtgctgctcaaagctagcagcctacagtgtcacctggtatatgggctagagtagtattcctaggtatagaatggtttgctccttagaccccaaaaggtgtgcctttcctttttttgtggtggagtatgtaagactctcaatttgctcttgccttagaggggctattcaagtatatccctaaccactgggatcctaaatcttcagaaaattggccagcttatgaatctttgaagggtgtatatcctaccatcttgagtgcatgtgtcttgccaaa

SEQ ID NO: 430528 - DNA, 559 bp, Homo sapiens
tacttaatgtcccatagtcaagtgtccttcctttaccaggttccagtaacaccaaaaactgtttctcaaaaagcatagtattttctgcttcagatgacatggccttactccagaattccagaggcagcatttgtttctctcactgcaaactgccataggctccatactgcatcttctcccaccataatacctccaatactaaagggtcttctggattaaatatrcaagtggcgggactgattgtaccatgtcctagacttatgatgttgccctttcctgttttgggtgctgctcaaagctagcagcctacagtgtcacctggtatatgggctagagtagtattcctaggtatagaatggtttgctccttagaccccaaaaggtgtgcctttcctttttttgtggtggagtatgtaagactctcaatttgctcttgccttagaggggctattcaagtatatccctaaccactgggatcctaaatcttcagaaaattggccagcttatgaatctttgaagggtgtatatcctaccatcttgagtgcatgtgtcttgccaaa

SEQ ID NO: 430529 - DNA, 559 bp, Homo sapiens
tacttaatgtcccatagtcaagtgtccttcctttaccaggttccagtaacaccaaaaactgtttctcaaaaagcatagtattttctgcttcagatgacatggccttactccagaattccagaggcagcatttgtttctctcactgcaaactgccataggctccatactgcatcttctcccaccataatacctccaatactaaagggtcttctggattaaatatgcaagtggcgggactgattgtaccatgtcctagacttatgatgttgccctttcctgttttgggtgctgctcaaagctagcagcctacagtgtcacctggtatatgggctagagtagtattcctaggtatagaatggtttgctccttagaccccaaaaggtgtgcctttcctttttttgtggtggagtatgtaagactctcaayttgctcttgccttagaggggctattcaagtatatccctaaccactgggatcctaaatcttcagaaaattggccagcttatgaatctttgaagggtgtatatcctaccatcttgagtgcatgtgtcttgccaaa

SEQ ID NO: 430530 - DNA, 498 bp, Homo sapiens
ggagggaataggctcttggacccatgaagcatatatccataatctcataagaattactcccaacacatggcttcaggttaattctggatttgttattttgcatagactctgatcacggctatagctttagatttcagagacccaatctgaatgcagggttcaaatagtttgttcacattctcctctctgagtagaacaatcccactcaagtgattgtcccccatcaaacaggactcattctcttctattcctgcctggttccccataatatgcctcattattgctatgtcttcccttagaagtctattccatttatttatccagcatraagttcacccaaaactgtcatattgatacttcccttgtaattcttccagtattttctactgatcttcctactcttctctataatctgtccagaatgtttgtaactactcaaaatagcagtctcagtccttaagatagtgggttcccaattgtctatattatgaatttttc

SEQ ID NO: 430531 - DNA, 601 bp, Homo sapiens
cttcttgcccacacttccttctaagcgaatctaccttcaccctcattgccttctgaaatggtgattctgtgtggtcttgcttgtatcacagctgagatgagagctgtatacatgattcaagtgaaccaataggcttcttttctttagaatttgttctaagaagtacagaggttggggaggtagagactgtcatccttggtcatatagatttagagctggaagccatttttatccatgaatatactgagakaagcagagataataggtttagggaaagaagcatgagaaccagtaacttgatgttacaagaagagacaaatgtccacggagactgagagaagccaaagttgtttctgattttccagttcctagtctaggttcagctctattcctggtaattgagtcccttgaatttaggctcatgattacttgaggtggtgtagattaatatctgtttctttttgtttgattgttttactttgcttaattttttactttttatttctgcgggtacatagctgtatatattaatacggtacatgagatattttttgacacaggcatgcaatgtataataatcacctcacggtaaatggagtat

SEQ ID NO: 430532 - DNA, 521 bp, Homo sapiens
gtctcccaagaataagtcttgaccttttcaatactacttccatggcagatgttccttccagctgtgaatgttggtattgatcattatgagaacatgacactgaatataggtcagtggcaggatttgttgccacatcaggagataaatgacttgctggacagaatctgatcgaggtagaatggattgtgaaaactctcatgctgggctgcacataaggttttgaaactagaaagcagataaaacaaggcaggcagagagacagggccaaagagcagggattacagagggcacatagcaggtgaggcgagcacacaatacagttttctgacagcagatgaatttccagtggggcccggggacccactgatctttctcactgatttattcattaggtggaaaaaatgtgggttaagctttaagacttcaaatttgttcagatactagaaacrgaatattcagaatatagattcttaaccaaggtacaaaatctagtcattgagtcactttggtttcaccagtct

SEQ ID NO: 430533 - DNA, 362 bp, Homo sapiens
gttgaaacatcattatggagaggggtgggggcaaaggggaggccagccctgggctttacagtttctaaaagaattgcacattttatctgcttgkggtggctgtggaatctttgatgaaatctgtggtgcaagtggaaattttggatactttgatcttgacaaagacatattggagtccccattcttaaagagcacctgttgacttgaacagtgagcatacaggcaatgaacttcatgaacaggaaacaggcactgggcttggctctggggatctcagagtctgtgtagcagatcttagagtctgtgtagcaaactcagtgataacaaagattgaatttattgccagctttttggaataggaa

SEQ ID NO: 430534 - DNA, 509 bp, Homo sapiens
tttggtaaatagctcccatcctcatyattcttaatatatatatatatatttttttcccgagatggagtgtcgctctgtcacccaggctggagtgcagtggcgtgatcttggttcattgcaacctccatctcccgagttcaagcaattatcctgcctcagcctcttgagtagatgggattacaggcacgtatcaccacgtccagcaaatttttgtatttttagtagagacagggttacaccatgttggccaggctggtctcaaactcctgaccccaggtgatctacccacctcggcctcgcaaagtgctgggatcacagacatgagccaccacgcccggcctcttaataaaatctttattttattcaagtattgggttcttaagtgcttcctggatcactctcaaaactagaggaataaatgttgaggccaatcataatcattttattcccatgtcagcaaaagatggtcatgtgctgcactgcggtcagttaaataaaagaaagagggt

SEQ ID NO: 430535 - DNA, 509 bp, Homo sapiens
tttggtaaatagctcccatcctcatcattcttaatatatatatatatwtttttttcccgagatggagtgtcgctctgtcacccaggctggagtgcagtggcgtgatcttggttcattgcaacctccatctcccgagttcaagcaattatcctgcctcagcctcttgagtagatgggattacaggcacgtatcaccacgtccagcaaatttttgtatttttagtagagacagggttacaccatgttggccaggctggtctcaaactcctgaccccaggtgatctacccacctcggcctcgcaaagtgctgggatcacagacatgagccaccacgcccggcctcttaataaaatctttattttattcaagtattgggttcttaagtgcttcctggatcactctcaaaactagaggaataaatgttgaggccaatcataatcattttattcccatgtcagcaaaagatggtcatgtgctgcactgcggtcagttaaataaaagaaagagggt

SEQ ID NO: 430536 - DNA, 617 bp, Homo sapiens
tcccctgccctaatcaccccagggcctaccagacaactagagaaaacccctatacccttgagccagctgaaattattcaaattagtcaatgttaaacctattcaccctgcctcacctgtttctttctgcagaacccacaataaagactttgcccgtgttttcccctagctctctctgacttctgactgaccttggtgcttccccttrtagcccctgcatggtgaggtatagccctcccctttgggaactgtaataaactatcctttcaatggcagttgggtcctgatctgttggcctcaccatacccaaataataataaaacctacattttaaaataattatttataaacatagtatgttaatgtatttttataatgcattggcaggatttacactaaatctgtcaaatggctgactccaggaatgagaagggttatgagactggggagttgggagattagagggtcacaactttacatgtaggattatgctgtcataaaacaggagacttgaagcaaatatagcaaaatgttaagaactactcattctgtgtggtgagacagaagtgcttattatatgattttaaaatatttatttttgaaaataaaaattatttt

SEQ ID NO: 430537 - DNA, 481 bp, Homo sapiens
gcaacagtttaaaatattttgaaggaattacaggaaactatracatcagaatagagaaagttagatattttagtcaatcatctgtttactttgtgatatgaatccaaatattaggattgcctagtaattttgaccaatgaaataattttatactatcattattattttcctgccctggttggttctctattatatatacagagcattggtggatcacatttattcttcccttgagtggttattgtttagaagaatcagtaacatttcatagttcaagccaagtaacttgacagcaaagtttaaatagaattctttaaacttcacatattaaagttttcctctaaagcagggtaaatatgagtcagaaatataccttaaactaataggaggaaatattgtagcatttaattttgactttagaagagtaacaaaatttgtgcttttaataaacttatttttaaaaatgcaatttattgactaa

SEQ ID NO: 430538 - DNA, 570 bp, Homo sapiens
gagtctagccacagaagataacataatctttacattttcagcaaaagcaggtgatagcatatatttgcccttcagacacctgaggcgactctagccacacccccctcaacttctctaggacccataataatgagtaagtcaagtggagatcgcaactttgagggtaaacagccaaacacccctcagcacctactgatgcctgtgttatcgccctgaaggatttcttcaggttttgaagagcgaygtgagagagttttcttgcattgattctagcccctgagttgttggaagggacacttctcagtatggcaaagtatttcattccctgaagctaaggcttagcagatgtctcctgatgaaagccactaagcaaaggcttgaaaaatcacctaaaactatagaaacaccgggaaggtgctaattgaagcaggagagcctgggcttctagtgaaattctcagaaataaaaaaaacaagaatgtgattagagaagtctcactggatgccatgggataaataaccatgtatataatatatgagatgtgtatatatatttatatatttatacaca

SEQ ID NO: 430539 - DNA, 585 bp, Homo sapiens
agaaactagttttaaaaggcataacaaatgtatgaaagtatagggtaatttgtgaatcctgtgaattttaagtttggatttgagacaggcraaaccatcacctcttcaacctcgtgaactacaatatcaatatttaagggaaaaaaaagacctttagaagaaattgccaaaccaaagtttcctagaccccaaaccggaattcggacccttggaaacaagcctttaattttttttttttttcccctagcccttccctacccaatccctcccacttctccgtaccttaatggttagggcttttgtttgaaagtgccaccaagctttgtcaacccaccccgggaagttgacccaaggacagatcatgaaagctgccagcttttccatttcactgaagttggcacgcctttcatgcttactgaccacaatgctgccatcgtgccgtgggtgagaagacaccttcccctggaaagtgatcagtaaaagaaaaatgtgtttcagttgtctctaaaagcagggagctaattcatcttgctctgatgccactttccttttccaatttttaaacaaatgatttttgacagaaac

SEQ ID NO: 430540 - DNA, 448 bp, Homo sapiens
tcccctccaagaaccggaacaagacaaggatgcccactttcaccatttctattcaacatagtactggaagtcctagccaaagcactcagacaagagaaagaaataaagggcatccaaatccataaagaggaagtcaaactatcactgtttgctgatgatatgattgtatacctagaaaaccctaaagattcatccaaaaagctcctggaactgataaatgaattcagtgaagtttcagaatacaaaattaatgtacacagatcagtagctctgctatacaccaacagcgaccatactgagaatcaaatcaagaactcgacccytttcacaatagctgcaaaaaaataaaatacttaggaatatacctaaccgaggacgtgaaagacctctataaggaaaactataaaatgctgctgaagaaaatcatagatgacacaaacaaatagaa

SEQ ID NO: 430541 - DNA, 579 bp, Homo sapiens
cttgcagataaatttgtgttttgtacaatgcttggatatctattttcttactttacttcataatagccttacaatttatgtggaccttattttttaaaactgtggaagctgatgctcaaagaaattgaatgctttgcccaaggtcactagctacctaagttcagagcaggactcggcttctgattatttttccctttaattatttcaaatttcatgcagagccaggtgtgtacaagccataaaaacaaaatragcatgatctgtgttcaatataaaaagtaaaccaaatgtcttatgaaattaatctgacacgcttaaagatatgcataaatgttattgtgttgcatagtgattaggtacagattctaagacatttggataaattacaataattagtattacttttccttagacacagccaccaattgggacacttgggtaccccaacaaacccataatcatattcaagtgacaagacctgctgtctaagactcctcaggagacaaacactacagatagcttccctttgataagacaagtgacaagagaaaaatacctgtaggaagggcttttaacccc

SEQ ID NO: 430542 - DNA, 619 bp, Homo sapiens
catacaaacacactgtagctgtttctatctttgaaaaaacctcatgagaaattatcttttgggtacaatgtacactattcaggtgatagttgcactaaaagcccaaacttcactactacgcaatatatcctagtaacaaaactgcacttgtaccccctaaagctatttaaaacaacaacaaaaagcaacaaaaatytttacttaaccctacatcccttctgggctccccatctccgttcttctttacagcaaaaagcctcaaaagagttatccatatttgctgtctaaaatccttttctcacttctctcttgaactcatttcaaccaatcttttgcttcccaacacttcccccaaactgtgtccaggtcacttccacattgcttacattaatatccaattctcaggcctcttcttcctacttcacctatcagcaataatacagatggtcactcctgcctatagatatatatattttcccttttggcttccagagaatattcactggctgcccttttacctcacttatcagtctttctcagtcttctctgctagttcttcctcctctctgaaaactgaaatcgccaaaggctaaagaaaaaaataaagcttggtacaaga

SEQ ID NO: 430543 - DNA, 619 bp, Homo sapiens
catacaaacacactgtagctgtttctatctttgaaaaaacctcatgagaaattatcttttgggtacaatgtacactattcaggtgatagttgcactaaaagcccaaacttcactactacgcaatatatcctagtaacaaaactgcacttgtaccccctaaagctatttaaaacaacaacaaaaagcaacaaaaatttttacttaaccctacatcccttctgggctccccatctccgytcttctttacagcaaaaagcctcaaaagagttatccatatttgctgtctaaaatccttttctcacttctctcttgaactcatttcaaccaatcttttgcttcccaacacttcccccaaactgtgtccaggtcacttccacattgcttacattaatatccaattctcaggcctcttcttcctacttcacctatcagcaataatacagatggtcactcctgcctatagatatatatattttcccttttggcttccagagaatattcactggctgcccttttacctcacttatcagtctttctcagtcttctctgctagttcttcctcctctctgaaaactgaaatcgccaaaggctaaagaaaaaaataaagcttggtacaaga

SEQ ID NO: 430544 - DNA, 572 bp, Homo sapiens
ggttcacttctggttgactaacccaattctagcattcacaatgaagcaccatttccctatcataaataaaaagagatgagtcattaggtatgagtttaccagtaaaacagggcaatgattttattcttcaaaagctgaaggtaaatcamagttataatcttacaatcataaacataatattaatttgaaagctttacccttaaatgctaacagattaaataagcagtagttacttattactctttactgccagtaattttttacaagtaaaaatatattcaaatcttacttcagaagcagcttttagtgaaagagcctcactacttcaacagtaaataaaattatctaccagtaattataaacaaaccaaacaaaaaagggtatgcattacgaaaacttctgaagaacagtctactgacaatcacaatgtttaacaataaaaaatttcagttaaaattattacttagatctgagaataaatgtcaagtaatattaattaaaacaagattacagattcatcttgatgaatcagcttatgagctaagttttcctatatattgtaggggttctta

SEQ ID NO: 430545 - DNA, 532 bp, Homo sapiens
tcttgttaaaatgcagttttcattctgtaggtctgggytagggcttgaatttctgctttgctaacaagtttccaggtgctgccaacactgtggattcgtggaccacccttagagtagccaggttctgaaatattatggtcactgcaaatatatattttctattgtaaatggataacgtggcattctgatttacatgtcattctcctgtggggcagctggagtgagagtcaagatctaaaataaatcatctccttgagtgaacctgataacattgtgagttcctgaacagaaatgcctgaggctctaactgtggctgtggtttcatttctctttgacatctagtaggcacttcataaacgcttatggaaagaattaatggggaccccaaggtactccaaggggcctttgcctgagcagtgggcagcatcgttctgttgactcttttttttttaatctgccaggataagggactgaagcaggagagaggcacacgcacagccagatgaccccagggctccaagggaagagccag

SEQ ID NO: 430546 - DNA, 528 bp, Homo sapiens
caagactgcagtcccgaccctcattttgcatgactctgtccaggtatgatacagatggagagtattaaagatgtgttaactaatgaattctgctgttataaatgtgttgacttcaagcaaaggtgtgagaaaaataatcgaggttctgttccacaccactgatctgtgcttcttggggtgcctcatttaacatctgtggaccttggcctgttcctttacaagatgaaggctttgactctctttagtttcttaaaatcctctcaggacttaccatttcattctagatttcacagtggttcatttgagcatgcgttctttcttcaattcattcattcactcaagacatgtttttgagtgcctactatgtgcactatataggctagctactctatatacaggaatgggtaagcctatttttgcttaactgggatattagaaagtgaataaacaactttcctgccatgtactactctataktagaagtctaagcaaattgttagaggaacacaaaaaagggcactcaactct

SEQ ID NO: 430547 - DNA, 473 bp, Homo sapiens
tgattgtgaggccctgaaatgtgcagccaacattggtcatgaaatctctgttccttggggatttgtaagaaaagggtagccaagtctcatttgaggacagcttgaatgcagtcctgacctctgtggcctcttgtagctccatgtgcaaaaagactcagccaaaattcaattttcactcactgacacacaaagtagtcaattccttacatttgcccccaatcttccacaatcctttctcctgttcaagagacagcaaccttaaagtcttctacccagcaacgaaacccaatgacactgaatttatatgcccagtaatgtgcyggcactttactcaggaaacactgtcaaatgttagttaatattccaaaacatgcagctgacttctagctaactgacttgtccatgttaaagaaaaattataactaatttcagccacttaaatatcccagactgagaaaaagaaaatgtaaaat

SEQ ID NO: 430548 - DNA, 587 bp, Homo sapiens
aggaacaagtgtgattgtgaggccctgaaatgtgcagccaacattggtcatgaaatctctgttccttggggatttgtaagaaaagggtagccaagtctcatttgaggacagcttgaatgcagtcctgacctctgtggcctcttgtagctccatgtgcaaaaagactcagccaaaattcaattttcactcactgacacacaaagtagtcaattccttacatttgcccccaatcttccacaatcctttctcctgttcaagagacagcaaccttaaagtcttctacccagcaacgaaacccaatgacactgaatttatatgcccagtaatgtgccggcactttactcaggaaacactgtcaaatgttagttaatattccaaaacatgcagctgacttctagctaactgacttgtccatgttaaagaaaaattataactaatttcagccacttaaatatcccagactgagaaaaagaaaatgtaaaatgacatgcattgcatattgacctgtaagttttataactaaaaatcttataaatagtaaccaaaatracttccaggatatgcgtaaggacaattaaaaatactca

SEQ ID NO: 430549 - DNA, 621 bp, Homo sapiens
ttgtcaccactggcaaactggaaacgtacaaaacagttgtaaaagccatattcaaatcccttttcaactatggcaatgcagcttccactgctgacattttaaaaacttcgtcttaatattgactttgtcaatgtatttgaaatgtaaaaaaagataaattttcaaactctgcaattttctccctgaatcagactttgttaaaactaacagcatctgattcaagcagacttaaaaacaagcatcaatgtattctctgttcaaacgcatctacaatggataaaatgtatgaaaaatcattttttaaacacacagcagtgaggctgggcacagtcactcaygcctgtaatcccaacacattgggaggccaaggtgggaggatcacttgaggtcagatgttcaagaccagcctggccaacgcggtgaaaccctgtctctactaaaaatacaaaaaattagctaggcaacatggcacgcacctgtaatcccagctacttgggaagctgaggcaggagaatgtttgaacccagaaggcagaggttgcagtaagccgagatcgcgccactgcattccaacctgggtgacagagcgagactccatctcaatgggacaaacacattaaat

SEQ ID NO: 430550 - DNA, 606 bp, Homo sapiens
atcacacaattatggaaatttgaaatttaatataacaagtaatccttacaaaacagtcaaatatttaattaartaacagtgttaaatgtatggccatttataattatgccttgtaacagttttaactaatgcttgaaaaaggttggtgaaacatttccacaagcacgtgtcttctgtttctagatgaaaacatttttagtaatatggtttttgtcttttggggtaacagttatgtgctttggagaaaagtacaattttttgaaatgggatcaagtaatttgcagagcttcactgtgacaatttatgaaagaggagactaattgtaaaaagttatacttctatgcatggaattttggcttttctccttgactgtaaatgcgcactcctcctgattaagatccactgtgtaaatctgctcttgtaggttccagaactcccatgcccctcagtaactgctttccttcagtttggctggctgggactcttgtcagaaagccactaaacaaacaaacaaacttcacatggagtcgctgcaatattacaaaaacacactgtatcttccttggtctaaaaggcagatgaaagaagccaggccaccagtttgtt

SEQ ID NO: 430551 - DNA, 464 bp, Homo sapiens
tcctgtatgattctgatgtgtggcaggattgagagccattgctttacattcttgctatcagattttagtaacagaaacctgcagcttattattatttttttaacctagcttaccttttatctgtctgatccttcaagaaggactgattaaaccaaagctagattagaaaatggagaaaaggaccctgactaaatcactggccagaacctttgaagctaatttgccatattttttatcttcacatcctcagtgcttagtaaattcctgctctgtagacgttccttccttcccttccttcttgtccctttcttcctttccttttattccttccttcaacayttattaagtgcctactgtctgttccagcactgttttatatcctgaggatataaatacaatttggaatccttcttacatttgagttggcagaagatgcctaataaatatttgttgaattgaataga

SEQ ID NO: 430552 - DNA, 616 bp, Homo sapiens
ggaacagtccaagcattatctgtcacttcctcatttgtctgtctttttcccctttctagtcaggaacatgccagctttagccaggcttaagccatcaggatgtagttggttaagacaggtaactttggtatcccttctccatgaatcctccataatctgtacataatctgtacaacaaacccccatgacatgagtttacctatataacaaactttcacatgtacccccaaacctaagataaaagttaaaaaataaaaaggaaattcatggccaatgtgatggtattaagaggtggggcctttaagaggtgattaggccataagggcctaatcattgatatccaggaacattccaagcattggaatggtacctggtacctgggatccactgaattatggagttttgggtaagatcagagtccagttagatgatagggaaartggatattttggtgggttttaagttagagaaggctgtcccaggagaccttctgcaggttttagaaccctgtttggcctcttggcagatttccttctctgggagcaagaggacacatgctgtcttcctgtaccagtttatcagagctcactgggtttgttcatccctcctgtacttc

SEQ ID NO: 430553 - DNA, 635 bp, Homo sapiens
gggttcactgaatttctgcatcatgataggtcttatttctttcaattctttgggggactcttrtagaggtaaatgaagatccagataaattacttcattgtataagttatagtaactttgacatagttacacaagtgtctggctcacacctgaatttctcactttaaaatatatgtgttttgaatatgaccatgatttgctgttttaaatttcagtgtgtatatacatgccaatatgtatgtgcatatgaattagatacagagtagtatacagtgtgtatatatatatatacatgtgtgtgtgtgtgtgtgtgtgtaagaatcagatacagagtaatatacatatatgcagattgtatgtatgaatcagtaaaatgtgtgtatgaagcagatggaggatagtggaatgtatgtgtatatgaatcaggatatgggagtataatgtttgtgtctatgtatatatgaatcagaagcagagtactgaagtgtgtgtttttgtttgaattgggcagacaagtatgtgtatgtgtgtacatgtatatttgtgtatgagtcaaaaacagtagaataacgtatacatgagtgtgtgtgaatcagacttagagtagtatgatgggaagaatgcaggatgaataa

SEQ ID NO: 430554 - DNA, 635 bp, Homo sapiens
gggttcactgaatttctgcatcatgataggtcttatttctttcaattctttgggggactcttatagaggtaaatgaagatccagataaattacttcattgtataagttatagtaactttgacatagttacacaagtgtctggctcacacctgaatttctcactttaaaatatatgtgttttgaatatgaccatgatttgctgttttaaatttcagtgtgtatatacatgccaatatgtatgtgcatatgaattagatacagagtagtatacagtgtgtatatatatatatacatrtgtgtgtgtgtgtgtgtgtgtaagaatcagatacagagtaatatacatatatgcagattgtatgtatgaatcagtaaaatgtgtgtatgaagcagatggaggatagtggaatgtatgtgtatatgaatcaggatatgggagtataatgtttgtgtctatgtatatatgaatcagaagcagagtactgaagtgtgtgtttttgtttgaattgggcagacaagtatgtgtatgtgtgtacatgtatatttgtgtatgagtcaaaaacagtagaataacgtatacatgagtgtgtgtgaatcagacttagagtagtatgatgggaagaatgcaggatgaataa

SEQ ID NO: 430555 - DNA, 475 bp, Homo sapiens
ctctgggaagcatgagggcttgtgtaatggcccacacagaaagtgggtgaagaggatctctagccttttcaggttatttcaagtggggtctcattgtcaagggaccaaccatccaacaaaataggttcctgtgggttaggaaaatggtgatggtgaaaagctggagatgaaatcttttgtttctagagctagatggattttttcrtttttcttttttaacacaaaagggtcagaaatgcaaaggatgccctttgctgacacagctctgtaagagattacaagcaaaacaaagacagatttatagataatttatcagcatattgaagacaaattgaatatcatgctgcacagtaaattacttcagaacaaccccaaagtggaagaaaatacttgtaaattgcatttttaagcccttaagaacaagttctatcacttgtttaaaaaaattgttttgtaacatgaagtgcattttaat

SEQ ID NO: 430556 - DNA, 571 bp, Homo sapiens
aaggtataaaaatcatgtgtgaccttgatttctacaatactttacgtattcaaagtarttgaacctttatttaggaggatgcttccttcaaattaaagacttttgctcagagagtgccaccatgtttcagtgggaaaaggatcagattagcctcgggatacttggaagttatggcagaggttgcagagtaatttttcattatttgctagaacttgggacatcattgggattgtttttaatcacaggtgaagaaactgagaccccagagtgttttttttatctgtggtctcacagtctaggaagtatcatggaaattagatggatgagtctaattgaaagtcactgtgtgcaataactggcgtgccactttagagggcaattaggaaaaactgtagtatgcttatattaaatttttctggaccttgatttcatctgtctttggaacttagaagtttcttaaggatcatgaaatttgtcttagtgattaaaagctaggctccagaacccacctatctgtgtttgaaacctagttcctccctcagtgttacatgacctaggctaagttacctaa

SEQ ID NO: 430557 - DNA, 571 bp, Homo sapiens
aaggtataaaaatcatgtgtgaccttgatttctacaatactttacgtattcaaagtagttgaacctttatttaggaggatgcttccttcaaattaaagacttttgctcagagagtgccaccatgtttcagtgggaaaaggatcagattagcctcgggatacttggaagttatggcagaggttgcagagtaatttttcattatttgctagaacttgggacatcattgggattgtttttaatcacaggtgaagaaactgagaccccagagtgttttttttatctgtggtctcacagtctaggaagtatcatggaaattagatggatgagtctaattgaaagtcactgtgtgcaataactggcgtgccactttagagggmaattaggaaaaactgtagtatgcttatattaaatttttctggaccttgatttcatctgtctttggaacttagaagtttcttaaggatcatgaaatttgtcttagtgattaaaagctaggctccagaacccacctatctgtgtttgaaacctagttcctccctcagtgttacatgacctaggctaagttacctaa

SEQ ID NO: 430558 - DNA, 673 bp, Homo sapiens
gtgattaaaagctaggctccagaacccacctatctgtgtttgaaacctagttcctccctcagtgttacatgacctaggctaagttacctaacatatcagggcctcagtttcctcatttataagatgaccttattgatagaacttaaccttaaaggattgttgtgatgttttgagagaatatatctgaaatgcctcatttggtacctcctacataaaaagaccaaagttaatgtgaactcttgctatgatgaatgttactttattgtacaatgcctcaaggccttgattcgatagctgcatttttgtttgtgttgaaagtattggaccacacatggtaacccagggaccaaggtctagacttagcccatgagatggtactattcccctcacccttgtctactagaaaataatttctcttctggtaggaaataagtgctctatcaatagtgaagtgctttttcaggagtaaagttcaagaagttaaaacctgtgaatagagatcagtgaacattytagaaaatagaaaacgaccactcctattcaacagagtactggaaggcctagccagagcaatcaggtaagagagaaataaaagacatccaaattggaaaagaggaagtaaaattatctctgttcactgatggcatgatcttataccctagaaaccccaaaa

SEQ ID NO: 430559 - DNA, 552 bp, Homo sapiens
gcgaactataaagtggtaaaaaccatttacaacatatatgacagtgaaaatatttttcatgaagaaacctcttaaataaagtaaggcagcagctgcccaatataaagatgggaaaatatttgaactgggatttcacaagagaatgcataaatgggccgggtgtggtggctcatgcctgtaatcccagcactttgggaggccaaggcaggtgaatcacctgaggtaaggagttcaagaccagcctggccaacatggcgaaaacccatctctactaaaaaaaaaatacaaaaaattcgccagscatggtggtgggtgcctctaatcccagctacttgggaggctgaggcaggaaaattgcttgaacctgggaggcagaggttgcagtgagctgagatcccgtcattgcactaaagcctgggtgacagagcgagactctgtctcaaaaaacaaaaacaaaacaaaacaaaaaaagtgaatgcgtaaatgaccagtaaacagatgagttgatgtttaatgtcactggtagtccaagaaatataaattaaaacagtg

SEQ ID NO: 430560 - DNA, 552 bp, Homo sapiens
gcgaactataaagtggtaaaaaccatttacaacatatatgacagtgaaaatatttttcatgaagaaacctcttaaataaagtaaggcagcagctgcccaatataaagatgggaaaatatttgaactgggatttcacaagagaatgcataaatgggccgggtgtggtggctcatgcctgtaatcccagcactttgggaggccaaggcaggtgaatcacctgaggtaaggagttcaagaccagcctggccaacatggcgaaaacccatctctactaaaaaaaaaatacaaaaaattcgccaggcatggtggtgggtgcctctaatcccagctacttgggaggmtgaggcaggaaaattgcttgaacctgggaggcagaggttgcagtgagctgagatcccgtcattgcactaaagcctgggtgacagagcgagactctgtctcaaaaaacaaaaacaaaacaaaacaaaaaaagtgaatgcgtaaatgaccagtaaacagatgagttgatgtttaatgtcactggtagtccaagaaatataaattaaaacagtg

SEQ ID NO: 430561 - DNA, 554 bp, Homo sapiens
ttcctcatttataaaataaacggttaccaaaattacctacttggtaatgtggtactgagaattatgtaaaagggaactatgtaaactatctggcagggcatctggaagttagtactcaatggtaaatattaactattaatagtgataactgcaaaccttttttaatatcatatgtttttactgctatttctctagatctttttaattgatcatataaggtatgcccctttaaaaaaattgaaaattctttctctttttcttatattaatttaaacttataaaatgatgtgattcccttgtcttccttctcttacacattgtaactctctgctgcacctagatgcattrtaaaatcttactaatgtaaacattttaaaacttgaagcattttcctcataagagccatgtttcttatatttatcatagtaagagaacttctagatatgaccttactaatccttatagtctttcaataaatattgccatttggaatctactttaatgtttaaaaatattagggattataaaatatgtatatatattgtagctataag

SEQ ID NO: 430562 - DNA, 554 bp, Homo sapiens
ttcctcatttataaaataaacggttaccaaaattacctacttggtaatgtggtactgagaattatgtaaaagggaactatgtaaactatctggcagggcatctggaagttagtactcaatggtaaatattaactattaatagtgataactgcaaaccttttttaatatcatatgtttttactgctatttctctagatctttttaattgatcatataaggtatgcccctttaaaaaaattgaaaattctttctctttttcttatattaatttaaacttataaaatgatgtgattcccttgtcttccttctcttacacattgtaactctctgctgcacctagatgcattataaaatcttactaatgtaaacattttaaaacttgaagcattttcctcataagagccatgtttcttatatttatcatagtaagagaacttctagatatgaccttactaatccttatagtctttcaataaatattgccatttggaatctaytttaatgtttaaaaatattagggattataaaatatgtatatatattgtagctataag

SEQ ID NO: 430563 - DNA, 570 bp, Homo sapiens
ctaattgagttttactattaaaggtgactatactctgtcttcctccttagcttgcttttgcttcatttatagaacagaccctagtattttaaaaacaattatatatgccactcatacctacccctctccccccgctcccaagacaaaatgtatgcatgttgaatgaacagacatcgcgaagtggggggatttctttgagctgtagaattagatgatgaaaaaagggagagggggaagtgtgagaactacagagaaaagaagacagttagagaagaagacatggagatatgaaagaagtagctttacactttgagttctcattgccttcgtatttcttcacaaattctcaggcaagctgtaaggtaggttgttttttaaggcttattgataagcagttgattcgtattttaggtcaaactaattctgcatctctttcccattgttcttttctattctkcttctttattctactctatttttaagagaaacactgtctaacttgctggctctttctgctctgctgttgctccagccctgcagcttccccaccgtgtgaatttgcacttcagt

SEQ ID NO: 430564 - DNA, 547 bp, Homo sapiens
atgtgataaccctgtatatgacagtgtatctattggaaaatgttttgagttttcgtatgaatttttaggggcattgctgtagctctgacagtataaatatggatttgaaagttataagccatacacaacttgatatttcagaggctaggagttgcagtggggctccagtgcactggtggtgataaaactgttaggggttggaatctctttgcactttgatctcttaggaactgtcttaaccctagctgtatttcacatgccccttttcttcaagatcwccagaaacttgcttaatctgctacctcttcacaatgaacagctgatgctctggccatagtagctatcagccccctttcctgctagttagttcctgggttagtgtccccacaaaattcatgtcctttttgggacctcagaatgtgatctcatttggaattagagttgttgccaatgtaatgaattaagatgaggtcatcctagagtagagtggcctttaatccaatatggctgtgtccttctaagaagacacacacatagggagagcacc

SEQ ID NO: 430565 - DNA, 402 bp, Homo sapiens
gaaaagagtgtggactttgggaactgacaaaatgggttcaaattccagctgtttggttgaatagctgttgaactgtcttcacttgtaagtggaggttactatcctttsttcacaaggttaccgtgaagattacttaacataatgtgtataaagtacttaccacactgcctgacacataacctgatttatgaattgcatttgtgctgctgaaatactattgtaagtaatatactcctttaaaattttcaagatagtgacagatagattcctgagcattccaagtggctgtgataaaacagtagggaaacagattatttacagtcacagataaactgttacaatgcagtgctttattgaactgtgcttagaaaagaaatcctctctactcaccttcagaattcc

SEQ ID NO: 430566 - DNA, 402 bp, Homo sapiens
gaaaagagtgtggactttgggaactgacaaaatgggttcaaattccagctgtttggttgaatagctgttgaactgtcttcacttgtaagtggaggttactatcctttcttcacaaggttaccgtgaagattacttaacataatgtgtataaagtacttaccacactgcctgacacataacstgatttatgaattgcatttgtgctgctgaaatactattgtaagtaatatactcctttaaaattttcaagatagtgacagatagattcctgagcattccaagtggctgtgataaaacagtagggaaacagattatttacagtcacagataaactgttacaatgcagtgctttattgaactgtgcttagaaaagaaatcctctctactcaccttcagaattcc

SEQ ID NO: 430567 - DNA, 544 bp, Homo sapiens
aaaactattaatcaggcatttaaaattaatatttaaaagtcataatcatcttaattattctgtctatatagtatcttaaattatcaagaatggtttatataatctmgaattaaaataatttttatgagcattaaatctatgaattaaaataaagaagttttatatatatatatatatatatatatatatatatatatatataaaagttattacaacttgacattaaaaacgagattaaccatagaggtttcttggtgactcttgtagattttatattttacaatttattaatattcaatgtaaatataccaggtttcaatatttcacatgttcttcaaaagtctttcttttctttaaagagtagaaacttgtaaaatcaaattagttaggtcataacttttttcctgatttcatttcctcctaccttctcatatttattatttgtattctagaataaattcttctgttatttttatttttatttatttattattatatttcttttattcacttttatttttattttgaattttatgggtacaca

SEQ ID NO: 430568 - DNA, 614 bp, Homo sapiens
tctgctccctgttacttccaacagagcttcaaagacataatttaatccaaagagagaccattatcattcatattttacaaatctttatgagcttaaggctatcattgctttcctcataatagtaatcagccattcaaaataaaacaataacccactttgtgccactttgaaaataaatgtaatacaaatatctgaataacatttttacataaaataggtttggattctacctaggtggtttttcatggttagatacagctatgaattagagaaacttttcctaaaatatatggcgaagcataaaaagtaatctattctgagattgacaagttacctagaattaaatgggattgcagttaaaaataagctcttctatgtctctgccactttaatactatttccattcctatgttccccttttataaatatatatgtgcatrctgtatatacgacaggaacttgacattttatagtagcaagaagacaaaagctatattaccttcttactgtgttattttttcaatctgttcagcgatgttttattttcagtcataactagaatgtaagtatgtttgagtaaagatattacctttcttcttttaggtgctacttct

SEQ ID NO: 430569 - DNA, 650 bp, Homo sapiens
tttgtggaacattttattcataagtaaaacgggggatataccatgttgttgtcctagggtttctgtaagatgttacttttaatgtgcttaaaatatttcttgacatgtagtaggtgcttcagaaatgttagatacattgttacaattgtttattattattattatataatcttagcttttattttagatacagagggtacacgtgtagaattgttacatgggtatattggactcaagtagtgagcatagtgcccaataggtagtttttcaagctgtgtctccccttccagcctattcacctctagtagtccacagcgtctactgttctcatgtttatgcccacgtttacagctcccacttataagtgagaatatgcagtacttggttttctgctcttgcatgaattcacttagtattatgrcctccagcagcatccatgttgctgcaaagggcattattccattcttttttgtggctgcatagtattccatgttgtgtatgtacaacattttctttacccaatccacggttgatgaaccttaatcaattccgtgtctttgctaatataaatagcacagtgatgaacatacaagtgcgtgggtctttttagtataatgatccatattcctttgggtatatccccagtaatg

SEQ ID NO: 430570 - DNA, 614 bp, Homo sapiens
gtgggtctttttagtataatgatccatattcctttgggtatatccccagtaatggaattgctggttcaaatggtagctctgttttaagttctttaagaaatcatcaaactcctttccacaatggctgaactaatttacagtcctaccaacatgatataagcattcttttttctccacagtcttgtgagcaatttttttccttttttttatttactatactttaagttctagggtacatgtgcacaacgtgcaggtttgttacatatgtacacatgtgccatgctggtgtgctgcacccattaacttgtcatttacattaggtatttctcctaatgctaagccattctgactggagtaggagaatttctcatcatggttttgatgcgcatttctctgatgattagtgatttggagcattttttttatatgtttgttggctgcttgtatgtcttcttttgagaagtgtckgttcatgtcttttgcctagtttttaacggggttgtctttttgctgattgatttgtttaagattcttacagattatgaatattagacctttctcagagacatagtttgtgaatattttctccaattatgtagattgtctgttaacct

SEQ ID NO: 430571 - DNA, 572 bp, Homo sapiens
tatgtcttcttttgagaagtgtcggttcatgtcttttgcctagtttttaacggggttgtctttttgctgattgatttgtttaagattcttacagattatgaatattagacctttctcagagacatagtttgtgaatattttctccaattatgtagattgtctgttaacctgtatatgctttcttttgctttgcagaagctctttagtttaattaaggcccgcttttcaatttttgtttttgttgcaattgyttttggggactttgttataaattccttgccaaggtcagtataaagaaggttacttcctaggttttcttctagggtttttatcatttgaagtcttacatttaaatatgtgacccatcttgagtttatttttgcatatgatgaaaggtaaggatctaatctcatttgtctgcacatgctagccagtcatgccagcaccatttattgagtaaggatttatctcccccttgcttttgtcaacattgtcaaagacccgatggttgtacatgtatggctttgtttctgagttttccattcttttccatttatctatgtgtgttttta

SEQ ID NO: 430572 - DNA, 572 bp, Homo sapiens
tatgtcttcttttgagaagtgtcggttcatgtcttttgcctagtttttaacggggttgtctttttgctgattgatttgtttaagattcttacagattatgaatattagacctttctcagagacatagtttgtgaatattttctccaattatgtagattgtctgttaacctgtatatgctttcttttgctttgcagaagctctttagtttaattaaggcccgcttttcaatttttgtttttgttgcaattgtttttggggactktgttataaattccttgccaaggtcagtataaagaaggttacttcctaggttttcttctagggtttttatcatttgaagtcttacatttaaatatgtgacccatcttgagtttatttttgcatatgatgaaaggtaaggatctaatctcatttgtctgcacatgctagccagtcatgccagcaccatttattgagtaaggatttatctcccccttgcttttgtcaacattgtcaaagacccgatggttgtacatgtatggctttgtttctgagttttccattcttttccatttatctatgtgtgttttta

SEQ ID NO: 430573 - DNA, 621 bp, Homo sapiens
ggcattacatcatagtgtagtgtagcatagtgtagtgtagtgttgtgttgtgtagtgtgtttacattggacctaaatatataattacaccattaaaacagttaaaacttttgtgaataacaagcatccacctttgtttatctatctatactgggacaggagagaatttgcgtctcaaagctctttgagcaatataagacctgtcttgtactctatacattgtagggatcacaggaaaacctycccttaaccatctaatggttcactgaaaaatcaactgacaaaaggcagattaataaaaggaaagacatataaagacaaagtggggaggaatcacagaatgattaccacaacctctcaaaggggatgcagaagtttatacaatattgaggttacagaaagatgagagtttacatcatgacaaaacagattatgggaaggggagaaagatgagacctggctggaaaaggtagtctttttatgtcaatgaaacctctcttggtggcagccctgagagacaatagatgatcaatggtttctcagacctttaaaagtgtcagactttcagttaatattcctaaactcacacaaaggaagacctggctgtgtcaatcagattttc

SEQ ID NO: 430574 - DNA, 511 bp, Homo sapiens
ttttctgttactatttattcccagtgactcagcaagtagctgagacctactttccatattctttttctctgtatattgttaacataccccctcattaacatcctacatacatgccacacacacctacatgtactcacacatgataattttaggtattttgggaaaatacaaaaaaaaaaatctactacatttttccaatgctaaaataatttaataagaaggattgttaacaayagtaaccttatctaaatcattaataatatgtgtgtatatatacatatatatatgtgtagatacatatgtacatatatagtttatatcatcatttatgctattagttcaaatactcatatgatgacttcacatataacctatttttggtggcaataggtctgtgagcagtaaactatgaagaatcagttatacaggggcagataagtgaaaccattgtttagttaggctactgaaaccatcatatttatatgttttgaaggattttataattattaaa

SEQ ID NO: 430575 - DNA, 551 bp, Homo sapiens
acacgatgaaaccccatctccacaaaagatacccaaattagctggcttgctagcatgtgcctgtagtaccagttactcgggaggctgmggtgagaggatcacatgagcccagaaggtcgatgctgcagtgagctgtgattgcaccactgccctccagcctgggcaacagaatgagaccctgtctcaaaaaaacgaagactcatctaaggcaccagtttaggaatgacaccattcagggttagggtgctcttgtccaagttgtggtacatatattgaagctattgcctaacaaattgttctctatccccagtagctattatacacaggtccagtaaccaagggtgaaagtagaattggcttttctcaccgttatttccagagtcccactaatctttcttttcccataaacttaggctgtgctagtttaaaggttctgtttcttagggcaggagttccactgaccatgaagctatggctactgcctggtctttgggtccctcattttaatagatcgacaggttaaacatacatacatgtatatgtgggtagat

SEQ ID NO: 430576 - DNA, 551 bp, Homo sapiens
acacgatgaaaccccatctccacaaaagatacccaaattagctggcttgctagcatgtgcctgtagtaccagttactcgggaggctgcggtgagaggatcacatgagcccagaaggtcgatgctgcagtgagctgtgattgcaccactgccctccagcctgggcaacagaatgagaccctgtctcaaaaaaacgaagactcatctaaggcaccagtttaggaatgacaccattcagggttagggtgctcttgtccaagttgtgktacatatattgaagctattgcctaacaaattgttctctatccccagtagctattatacacaggtccagtaaccaagggtgaaagtagaattggcttttctcaccgttatttccagagtcccactaatctttcttttcccataaacttaggctgtgctagtttaaaggttctgtttcttagggcaggagttccactgaccatgaagctatggctactgcctggtctttgggtccctcattttaatagatcgacaggttaaacatacatacatgtatatgtgggtagat

SEQ ID NO: 430577 - DNA, 551 bp, Homo sapiens
acacgatgaaaccccatctccacaaaagatacccaaattagctggcttgctagcatgtgcctgtagtaccagttactcgggaggctgcggtgagaggatcacatgagcccagaaggtcgatgctgcagtgagctgtgattgcaccactgccctccagcctgggcaacagaatgagaccctgtctcaaaaaaacgaagactcatctaaggcaccagtttaggaatgacaccattcagggttagggtgctcttgtccaagttgtggtacatatattgaagctattgcctaacaaattgttctctatccccagtagctattatacacaggtccagtaaccaagggtgaaagtagaattggcttttctcaccrttatttccagagtcccactaatctttcttttcccataaacttaggctgtgctagtttaaaggttctgtttcttagggcaggagttccactgaccatgaagctatggctactgcctggtctttgggtccctcattttaatagatcgacaggttaaacatacatacatgtatatgtgggtagat

SEQ ID NO: 430578 - DNA, 551 bp, Homo sapiens
acacgatgaaaccccatctccacaaaagatacccaaattagctggcttgctagcatgtgcctgtagtaccagttactcgggaggctgcggtgagaggatcacatgagcccagaaggtcgatgctgcagtgagctgtgattgcaccactgccctccagcctgggcaacagaatgagaccctgtctcaaaaaaacgaagactcatctaaggcaccagtttaggaatgacaccattcagggttagggtgctcttgtccaagttgtggtacatatattgaagctattgcctaacaaattgttctctatccccagtagctattatacacaggtccagtaaccaagggtgaaagtagaattggcttttctcaccgttattyccagagtcccactaatctttcttttcccataaacttaggctgtgctagtttaaaggttctgtttcttagggcaggagttccactgaccatgaagctatggctactgcctggtctttgggtccctcattttaatagatcgacaggttaaacatacatacatgtatatgtgggtagat

SEQ ID NO: 430579 - DNA, 565 bp, Homo sapiens
actgtcccgcagtccaatgaatggtgtcaaaacagagcccaatgcctgtgatttcaaagctaacratggcaggaccaagtcacacagtaactctggatgttcctcgggctgccatcccaaaattccacttgcagactgccacatggtcatcgtgccctcctctaaagcagaacttcctgttatttgatcacaaaaggcagcctcacaagaagtgagcagcaggtgtgcattcattcaacttccccatgtggagtgggaactgggaaaaccattcaaatcaacaacatctagagcacactctgggtggggctgaaatctggcatgaaaacagacttagcttacagtcaccatgatctccaggtcatgctggtttatttcaactaaagaaaggtgtctggtgagttgaaggaatgacgtggtggaatatggagccaatcatctccataatcacactttaaggtgaacaggattcattataaaacttttattaaaggataaaacccaatgctaagcctggctgggtggtatgttccctccccattgaggagcagtggttcctcgctct

SEQ ID NO: 430580 - DNA, 565 bp, Homo sapiens
actgtcccgcagtccaatgaatggtgtcaaaacagagcccaatgcctgtgatttcaaagctaacgatggcaggaccaagtcacacagtaactctggatgttcctcgggctgccatcccaaaattccacttgcagactgccacatggtcatcgtgccctcctctaaagcagaacttcctgttatttgatcacaaaaggcagcctcacaagaagtgagcagcaggtgtgcattcattcaacttccccatgtggagtgggaactgggaaaaccattcaaatcaacaacatctagagcacactctgggtggggctgaaatctggcatgaaaacagacttagcttacagtcaccatgatctccaggtcatgctggtttatttcaactaaagaaaggtgtctggtgagttgaaggaatgacgtggtgraatatggagccaatcatctccataatcacactttaaggtgaacaggattcattataaaacttttattaaaggataaaacccaatgctaagcctggctgggtggtatgttccctccccattgaggagcagtggttcctcgctct

SEQ ID NO: 430581 - DNA, 565 bp, Homo sapiens
actgtcccgcagtccaatgaatggtgtcaaaacagagcccaatgcctgtgatttcaaagctaacgatggcaggaccaagtcacacagtaactctggatgttcctcgggctgccatcccaaaattccacttgcagactgccacatggtcatcgtgccctcctctaaagcagaacttcctgttatttgatcacaaaaggcagcctcacaagaagtgagcagcaggtgtgcattcattcaacttccccatgtggagtgggaactgggaaaaccattcaaatcaacaacatctagagcacactctgggtggggctgaaatctggcatgaaaacagacttagcttacagtcaccatgatctccaggtcatgctggtttatttcaactaaagaaaggtgtctggtgagttgaaggaatgacgtggtggaatatggagccaatcatctccataatcacactttaaggtgaacaggattcattataaaacttttattaaaggataaaacccaaygctaagcctggctgggtggtatgttccctccccattgaggagcagtggttcctcgctct

SEQ ID NO: 430582 - DNA, 582 bp, Homo sapiens
ctatagcaaaacagtttctgacattcattacattgatagggtttcacacaagaatgaatttttagatgttcagtaaggtgtgtacttcgactgaaggtttttccacattctttacaaacatagggcttctctccagtatgagttctctggtgttcagtaagatgtgcactccgattgaaggcctttccacatgcattacactcatagggtttttctccagtatgaattctttgatgttgaatgaaggctggggtatggctgaaagctttcccacattcattacattcatatggtttctctcctgtgtgggttctctgatgtcggattagtgatgtactgtggcaaaaaactttccgacattgcttacactggtaggatttttcctcagaatgaattccctgatgttcaattaggtgtgtgctgcggctgaaggtttttccacattcagtacattcatatggtttctttccagtrtgaattctatgatgttgagtaagggcagagatatggctgaaagctttcccacattcattacaaggatagggtttttctccagtatggattctctcatgatttctaagg

SEQ ID NO: 430583 - DNA, 530 bp, Homo sapiens
ggtgtggttttctgagtactgtgatgaaatcttgtgtgatctgctctgtcctgcctgggctgtgaatcatttctttgtctggtgtatctacactctatgtactacccacccatttgtcatttagtagctcatcctaagaacctggttagggtttggtacatcagtgatttcaggcmttctctgtgggtcttgaaatgtatcccccatgaataagtggggactactgtatgaggtctttttcttataaaaactctcagttgtttaaaaagctttggtctttggttaaatgtttcctcgaagttgttatattcatgatcatccttttgactcgctttttcttgtaatctggatatactggtgtttctcaaactggtcatcaaattcgagttcttctaatgtgaagtattaggaaccatcatttgaaaaaaaattctaacatcatatgatgacattattttgtttttcagaaattctctgctttggagtggatgctctgacttcagatatagtatccaggattaagtagaaga

SEQ ID NO: 430584 - DNA, 557 bp, Homo sapiens
ataaaggtatatagaaatgaagttgctgttgcttctactagatgaatgcaggtttttaaaatacagacgaggggctctgcatagaggaccttaaccaacatttcaaaagctatctcctagtaccactattgttactagcaccaccataatggataaatggactcttatttacaaggattcctgtcttcttggttgttttagttatctgattctttcctggctgatattttgtgacatttctccatttttcctttgttatctatttatatggttcttcttagttggaagataatatcaatggatcctagaattatgtcctaagtagtcttcagraattctgcgatagagaaatgttgatacttctaaggtaacaaagtaagactatttacaaagttttaaagaaaaggactatcatctgtttagtacagaaatatcttgtctctggtccctaaactcaaagctcagtctcagatgaacacttgtaaatctcatgatcctacatattttggcattggagaaactgtactcacccaatgagatgaggctgtaacagtttt

SEQ ID NO: 430585 - DNA, 599 bp, Homo sapiens
gttgttatttaaaaaccctgtggttactatgttctcaactcataatgatccctgtaatcagccaggcaaaattagctgtgagtatcctaatctttgccacatccctcaggccatccaactgtaagttcctttctctttcaaggctgactctgatgttgttagaacagtaaagacagaaaataaaacgagtgccagatgctagagcttcttgctctctaaacctcacaaatgatgtcataatgtcagtgcatttgagttagaaagaggttcaggaaacattaaggcaaatttcttcagtttgcccaggacacacctcaagccaacagtaatgaactgacttgcctaaggtcacccaattagccactggcagagctaggactatagcctctcccctattctcgagttcagcattatttctctccatttaaaaatggtccaaacactatttctgaaaagaaaaagaargaaaaggagaaaaatttcaaattattagtcaaattcatagagggaaaatttttctgcatcaccgggacagcattttgtacaaagattttcttgaaagggcaatgagccattcaaatgaccctgagtccttctaa

SEQ ID NO: 430586 - DNA, 534 bp, Homo sapiens
attttggtctgttgccaaggctggagtgcagtggtgcaatctcagctcgctgcaacctccctctcctgggttcaaatgattatcctgtagcagcctcctgagtagctgggattacaggcacacaccattacacccaggtaatttttatattttcagtggagacgaagttctccatgttggccaggctggtctcgaactcctgacctcaggtgttcctcctgcctcagcctcccacagagctgagattacaggcatgagccaccaygcccagctggttctttttcttgagtcttctaaatttaagtgtgatgtgccttgcttttggctttttcattcactaatatataaatcagtggttgtatcattttacattctatcaacaatgtatgacaattctggttgctccacattcttctaatatttcatgttgtgaggtttttgtgtgtttttgtcattctggttagtgtgtagagatatataatagttctaatttaaaaatataaataataaaatatcatttaaactttccccctt

SEQ ID NO: 430587 - DNA, 534 bp, Homo sapiens
attttggtctgttgccaaggctggagtgcagtggtgcaatctcagctcgctgcaacctccctctcctgggttcaaatgattatcctgtagcagcctcctgagtagctgggattacaggcacacaccattacacccaggtaatttttatattttcagtggagacgaagttctccatgttggccaggctggtctcgaactcctgacctcaggtgttcctcctgcctcagcctcccacagagctgagattacaggcatgagccaccacgcccagctggttctttttcttgagtcttctaaatttaagtgtgatgtgccttgcttttggctttttcattcactaatatataaatcagtggttgtatcattttacattctatcaacaatgtatgacaattctggttgctccacattcttctaatatttcatgttgtgaggtttttgtgtgtttttgtcattctggttagtgtgtagagatatataatagttytaatttaaaaatataaataataaaatatcatttaaactttccccctt

SEQ ID NO: 430588 - DNA, 592 bp, Homo sapiens
tctagttccaaatgacagccccttagagcatctgctatttttcttgataatgtgttctgggaaatttgaggtcactaactagatctaaaggagacggaattgccaagtttcaaaagggcaggaacaatccttggttgcacaccagtgaaggaaagaccatttcatggagggggaagggaaaggtagtacccccatgggcaaaacactggacacagactggatataaagacagatgagctggsgagtggagcccactgctagagaaagacccatccccagcaactgtggaggaggcagtgctgtcccttaccaagatgatgctgctgttgctgtgtctggggttgaccctcgtctgtgcccaggaggaagaaaacaatgatgctgtgacaagcaacttcgatctgtcaaaggtagagttatggaacgcattgacttctggctctggggagtggtttcagggattctgaagccatgtggatcctattgtagggcaggagttccttaacatatcagacaaaagcattggtttctgatcttgggttaagagcaattgtaccatatgaaaagatgacaatgcttggggatctccatc

SEQ ID NO: 430589 - DNA, 592 bp, Homo sapiens
tctagttccaaatgacagccccttagagcatctgctatttttcttgataatgtgttctgggaaatttgaggtcactaactagatctaaaggagacggaattgccaagtttcaaaagggcaggaacaatccttggttgcacaccagtgaaggaaagaccatttcatggagggggaagggaaaggtagtacccccatgggcaaaacactggacacagactggatataaagacagatgagctggggagtggagcccactgctagagaaagacccatccccagcaactgtggaggaggcagtgctgtcccytaccaagatgatgctgctgttgctgtgtctggggttgaccctcgtctgtgcccaggaggaagaaaacaatgatgctgtgacaagcaacttcgatctgtcaaaggtagagttatggaacgcattgacttctggctctggggagtggtttcagggattctgaagccatgtggatcctattgtagggcaggagttccttaacatatcagacaaaagcattggtttctgatcttgggttaagagcaattgtaccatatgaaaagatgacaatgcttggggatctccatc

SEQ ID NO: 430590 - DNA, 585 bp, Homo sapiens
ttctggcacatcctgtttctcagttatgcccattcctgccacacataatcggctttctgattttaggccagatccacagttaaatctagttccaaatgacagccccttagagcatctgctatttttcttgataatgtgttctgggaaatttgaggtcactaactagatctaaaggagacggaattgccaagtttcaaaagggcaggaacaatccttggttgcacaccagtgaaggaaagaccatttcatggagggggaagggaaaggtagtacccccatgggcaaaacactggacacagactggatataaagacagatgagctggggagtggagcccactgctagagaaagacccatccccagcaactgtggaggaggcagtgctgtcccttaccaagatgatgctgctgttgctgtgtctggggttgaccctcgtctgtgcccaggagraagaaaacaatgatgctgtgacaagcaacttcgatctgtcaaaggtagagttatggaacgcattgacttctggctctggggagtggtttcagggattctgaagccatgtggatcctattgtagggcaggagttcc

SEQ ID NO: 430591 - DNA, 592 bp, Homo sapiens
tctagttccaaatgacagccccttagagcatctgctatttttcttgataatgtgttctgggaaatttgaggtcactaactagatctaaaggagacggaattgccaagtttcaaaagggcaggaacaatccttggttgcacaccagtgaaggaaagaccatttcatggagggggaagggaaaggtagtacccccatgggcaaaacactggacacagactggatataaagacagatgagctggggagtggagcccactgctagagaaagacccatccccagcaactgtggaggaggcagtgctgtcccttaccaagatgatgctgctgttgctgtgtctggggttgaccctcgtctgtgcccaggaggaagaaaacaatgatgctgtgacaagcaacttcgatctgtcaaaggtagagttatggaacgcattgacttctggctctggggagtggtttcagggattctgaagccatgtggatcctattgtagggcaggagttccttaacatatcagacaaaagcattggtttctgaycttgggttaagagcaattgtaccatatgaaaagatgacaatgcttggggatctccatc

SEQ ID NO: 430592 - DNA, 611 bp, Homo sapiens
cagaagggagcaatccaggggaagtaataccctccaaatcagtcccctttgtgctaacttggagaatcatctggtttctctctgaaaaataaactggggttggtgtctgaatttgttctcttctccctcgacagatcgctgtctccaggcccgagatgagggagcagcctaggactccgggttggtgatctctgacwccggtggagagagggtggcccagggaccagtgccttccaaaagcattaggggtttgcacccaaagataccataaaaataatttggtaggaaagcttgtgggaaaatcttgaaatctggagttggaagacctggatagaggacccaattctcccataagctttgagcaaataacctaagacttaaaaaggagacaatgggccaggtacagtggctcacacctgtaatcccagcacttagggaggcagtggcaggaggatcgcttgagcccaggagcccaagaccagcctgggcaacataatgagataccattcttcatgaaagggagaaaaaaaaaagaagaggaaacactgatgcctagtttacagagttgctgtgtagatataatgcttgcgaaagggccaataattgaaatg

SEQ ID NO: 430593 - DNA, 611 bp, Homo sapiens
cagaagggagcaatccaggggaagtaataccctccaaatcagtcccctttgtgctaacttggagaatcatctggtttctctctgaaaaataaactggggttggtgtctgaatttgttctcttctccctcgacagatcgctgtctccaggcccgagatgagggagcagcctaggactccgggttggtgatctctgacaccggtggagagagggtggcccagggaccagtgccttccaaaagcattaggggtttgcrcccaaagataccataaaaataatttggtaggaaagcttgtgggaaaatcttgaaatctggagttggaagacctggatagaggacccaattctcccataagctttgagcaaataacctaagacttaaaaaggagacaatgggccaggtacagtggctcacacctgtaatcccagcacttagggaggcagtggcaggaggatcgcttgagcccaggagcccaagaccagcctgggcaacataatgagataccattcttcatgaaagggagaaaaaaaaaagaagaggaaacactgatgcctagtttacagagttgctgtgtagatataatgcttgcgaaagggccaataattgaaatg

SEQ ID NO: 430594 - DNA, 496 bp, Homo sapiens
actcaacatcctccctcccccttttctggtatacaacataagttagaatacagggtcagaamtatttcttcatcatttttctctgtaatagaatttctcttcatcattcatgcaatgcaaggaatgtttaataagttcctgtgttctctctcttctctgcttaattagtgctgagtgaatgagtgatgagtgaatgagtgaatgctgagtgctgagtgaatgtttcctcacctggactccagtatcttcccttcctgatccccatgtcctcttatgacaagttctgtgacctgatttccatcatatcacacatgaagacgtcatccctgcatctttaggatcttccctaactgcctaagaagactcagaaattcaccaagaatcaaaggttttctttgaatttctgactgtctttgtcacagccaggggaactctacatgaataacacctgactctacatgatcaataaatcattaaccttgcagtcatgtaattt

SEQ ID NO: 430595 - DNA, 501 bp, Homo sapiens
gtcgggttgattggaaagcctggtgctgcacatccgacctggtcagcagtaccaagagccattacccagctgcctggattcccacagcctaacacaactaccttcattttcccatgttcctgttaaacctgcattagcactgcacacagttttcctcaaaaacccaagaacaattccacctctacactcttctccttgcagttccctttgtcagaaatactcatcccccagatgtctgcacgatgcactccctcataaccttctggcccctaggggtcacctcaaagagggtagcccccraaaccccaagaataaaggagtactctttccccagcctccttgactggcccctcatacttgtttgttgcctgtacccactccctctaagtgcaacaaagtcaagagttttatttgttcactgtggtatcagcactggaaacaataccaagcgtgacacaggcactcagtatttgttgctttaataagtgggcttccggccgg

SEQ ID NO: 430596 - DNA, 543 bp, Homo sapiens
ttattataagtgtctcatcctcttaccaaactactgaaattagcatccagctcatttttcagtcttaaaaatatgcaaacacatgccctcagatttcagcgtaaattgtgtcccattatttttggtacaaaatgttcccttttcattgttatggtttatcttgatttcttattgaatctaggtatctaatctcataatttctcaattcaaactaagaatttatctttacttcatttctagttttattgatcagaaaagacccttgaaaattttaagtggacraatatatatcctacatattccgcagaaagtatgttctttgcatagttgttttattcatatactttgttttgcctactagatagtctggtcattgttaagaggtattttcaacagccccactaagattgttcttatcaaatttcattttttttttgtgaggtttttttgcttttacagttgggtagaggtagatcaagtttgactaccatatttccaatttaagtcacgattacagtatataaaatcccagtttgtcctgtt

SEQ ID NO: 430597 - DNA, 581 bp, Homo sapiens
aatagtctcaacctttcttaaattcccatttgtccaatgacatcaccccacctgttttttcatctctgccttcccttaatctaaaaatacagttgtgctctttaatccatgctgacagtccacttggtaataggcaaaattcatctagcttccatttagctacttgtatgtcctatttatttttgctgaatttactttgttccttagagcggctgatctgatmttttttcgcttgttaatttagaagtgctacaatttttagatctaggagctactgttccactctcaaacatctacatttctgtttaatgcactagctataagttacaaagtgacctaagatgaggcaaggagctgttttgaaaaggtattagctatttcatgttcatacacattgaactgtattaaagtggacttctgggggttaggggtggggactttttgggggtacaggagggatggagtctcactctgtcacccaggctggagtatagctgtatgataatagctcaccacagcctcgagtccctgggctcaagccaccttcccacctcagtctccagagtagaactacaagcatg

SEQ ID NO: 430598 - DNA, 522 bp, Homo sapiens
gggttgcatttatccacttcacaaaataggtcaactgtctggctgagaatggcagtcccagcagtcagattgctgtggtttgagggacatgtcatggagtttccttctgtatcaaaacttcagggcagttctgagagcaggggtcattgttcaatgacccaacgttcattgttcaacatgaacttcaatgttcccagtgtttatcaaaggtaagtgccactttgtggatgaagccatcacgaccaacaaatgcatcatctagaggatggggcaagacagacgtttaaacagtcagctgtctggctgaggatggcagacccagcagtcagattgctatastttgagagacatgccatgagttttcctttctgtaccaagactctagcacagttctgagaggggtatcactaatgcccctctttctttctcacctcctagggtgtaagacaggtcacctcagcagatgctggcttgtttgttgctcttccatcatctccacaaaattgatgtcccattccagga

SEQ ID NO: 430599 - DNA, 522 bp, Homo sapiens
gggttgcatttatccacttcacaaaataggtcaactgtctggctgagaatggcagtcccagcagtcagattgctgtggtttgagggacatgtcatggagtttccttctgtatcaaaacttcagggcagttctgagagcaggggtcattgttcaatgacccaacgttcattgttcaacatgaacttcaatgttcccagtgtttatcaaaggtaagtgccactttgtggatgaagccatcacgaccaacaaatgcatcatctagaggatggggcaagacagacgtttaaacagtcagctgtctggctgaggatggcagacccagcagtcagattgctatagtttgagrgacatgccatgagttttcctttctgtaccaagactctagcacagttctgagaggggtatcactaatgcccctctttctttctcacctcctagggtgtaagacaggtcacctcagcagatgctggcttgtttgttgctcttccatcatctccacaaaattgatgtcccattccagga

SEQ ID NO: 430600 - DNA, 560 bp, Homo sapiens
tggcttgtttgttgctcttccatcatctccacaaaattgatgtcccattccaggagctacaactccagctattatccaaccattccctgctcacacccagaccttctgtagatcaggtgaaagrgataggacactaagatttaacaggtttgagtccccaaggcctcctttttggcttagggaaaataagctcataaataacctgaggaagaatctatggagaaacagtcttagaagggggtcagagctgataaagtcaatcttccaggcagggaaaagggaactaccttttgtgatattgcatgagcttgtggcaggagtcagaagtttggtgtgcaacagtagcctctgcatcaaaacacagttcagttcaatcagcagcttgattctagttagtttcagaaccagcctttgccatgggtatctgagggagtgagccagatagtttccagtttgagaggactatttgatctgtttcttccacttagaacatgaactggcaaacaggccattaacagcccagcagtttgaattctgctctgagtagggcaaccacattc

SEQ ID NO: 430601 - DNA, 560 bp, Homo sapiens
tggcttgtttgttgctcttccatcatctccacaaaattgatgtcccattccaggagctacaactccagctattatccaaccattccctgctcacacccagaccttctgtagatcaggtgaaagggataggacactaagatttaacaggtttgagtccccaaggcctcctttttggcttagggaaaataagctcataaataacctgaggaagaatctatggagaaacagtcttagaagggggtcagagctgataaagtcaatcttccaggcagggaaaagggaaytaccttttgtgatattgcatgagcttgtggcaggagtcagaagtttggtgtgcaacagtagcctctgcatcaaaacacagttcagttcaatcagcagcttgattctagttagtttcagaaccagcctttgccatgggtatctgagggagtgagccagatagtttccagtttgagaggactatttgatctgtttcttccacttagaacatgaactggcaaacaggccattaacagcccagcagtttgaattctgctctgagtagggcaaccacattc

SEQ ID NO: 430602 - DNA, 471 bp, Homo sapiens
cttcttttcagtcttttaatattaaataatgctaaataaacaatcctatacacatatatggcatgtgcacatgctgacaagtgagactctaggatgttcatacagatcttgaacatctttcattagatttattataatttatctttttcttccattttgattatacatggtatctttttaaaaactaatacactctacagccagtgaaaaaggacagaaataattgttcacattgattttgtattcattaaccttattgaattagtaagaattaggcttgaccatgtgtaactgaaacccgatgaaaaaaacttgtccaactayaactttgtctgttccataccaaaggccctcagagatggtacaactgttcagttttttgttgttggtgttgttggtggacaattaaaaaaattatgtgcaacataatcacaattttcagttgagaaaatgattgcaaaattcacacaa

SEQ ID NO: 430603 - DNA, 502 bp, Homo sapiens
atgattgcaaaattcacacaattttggaggtggaaaagtatggtttaaatggggactcaaacacaggtaatatgtaaaatcatattagtactaaattgacaacatcaatataaaaccattttaaaaactaggtttctgggttttattgggatgccttagcataagtgctcctgyagagcaatctggagtcaggaggtacatccccatgaccctgatgttggtctctaacacagcctgcaccagaaggaagcatggatccttgaaaagtggctgtgtctttgccttggaacagatgaaatttgtgagcctggaacatctaattatcagaaagtgaagatactttcttagcttctaaagtgtagcctaaaagaacacaaaggccagccgggcgcagtggctcacgcctgtgatcccagcacttcgggaggccgaggcgggtggatcacctgagtcaggagtgaaaccctgtctctcctaaaaatacaaaaacttagcctggtgt

SEQ ID NO: 430604 - DNA, 599 bp, Homo sapiens
aaactaaattattggtctcaattcttcactctcctgaagtagaattttctgtatctactcatgatgtgtgaaggatacttttcaatctcttgactttggacttgaccacgtgacttcctaatggatgttatcaaacatgatgtgagcaaaggtttgaaatacacttgtgtagttgaatttgtcctcttgtatccctgcattttgaattaataagaatatgccttgggtagtcacttgttgaaagaggatgagatatatggggagtggattttgatctaacccacagtttaaggtcaagcccagctaagcccagggtagatcagttgacccacagctaacccacagacctgtgagtgagaaaaaaatacttgttactgtaagtcacctaaatcttgaaattgttttatatatagtatttctctggcaacagctgactgatacaacatctagcaaagaatcctgactagctgaaatgtttgccaaaggaaagaggaayataaaattcatggcaaagaaacccctcaaatatcagtagtacctcaggatcttatacttaagtgaggattacagctgctacctttcttattatgtatcatata

SEQ ID NO: 430605 - DNA, 548 bp, Homo sapiens
tcacaataactcttttccagtatcccataagaaaattcctcacctgtcccaaactttacttytggattgccaaacaaaaggaaagaattctttagtgataatgaagacaccataagtccctatggcttccttctatcaaggatgaagtatgggattcaaaatagggtattttggccagtgttaggatattctacaatgagattatgatagaaggcatagtggaagcaatgaaaaattttaaaaacttcttttatctccacaactgttgctaaaaaatgtcttgctcttgagggagggtcccttgagaatacaaaaaagaacattagaaatattaaaagataaacatggcatttatgtagttaaacataagcaattatttcatctatattaatctcccatccctaggtgcatgcttagcttaaaagaaaagcatctttaacaggagcactagaggtctatagcactatacttgatcttccacttcacatgcaggaagaggtggtctgatatgaggctttacaaggattcctaagcagggctgctatggt

SEQ ID NO: 430606 - DNA, 570 bp, Homo sapiens
agaacattagaaatattaaaagataaacatggcatttrtgtagttaaacataagcaattatttcatctatattaatctcccatccctaggtgcatgcttagcttaaaagaaaagcatctttaacaggagcactagaggtctatagcactatacttgatcttccacttcacatgcaggaagaggtggtctgatatgaggctttacaaggattcctaagcagggctgctatggtttgaatgtttgaacgggccgggcatggtggctcatgcctgtaatcccagcactttgggaggccaagacgggtggatcacttgaggtcaggagttcgagaccagcctgggcaacatggtgaaaccccatgtctactaaaaatacaaaaatcagccaggcatggtgacacacacctgtgatcccagctacttgggaggctgaggcacaagaattgcatgaacccgagaggaggaggttgcagtgagccaagattgcacactgcactccagcctgagtgatagacaaagactgtctcaaaaaaaaaaaaaaaaaagtttcaactcatgttgaaacttaatc

SEQ ID NO: 430607 - DNA, 570 bp, Homo sapiens
agaacattagaaatattaaaagataaacatggcatttatgtagttaaacataagcaattatttcatctatattaatctcccatccctaggtgcatgcttagcttaaaagaaaagcatctttaacaggagcactagaggtctatagcactatacttgatcttccacttcacatgcaggaagaggtggtctgatatgaggctttacaaggattcctaagcagggctgctatggtttgaatgtttgaacgggccrggcatggtggctcatgcctgtaatcccagcactttgggaggccaagacgggtggatcacttgaggtcaggagttcgagaccagcctgggcaacatggtgaaaccccatgtctactaaaaatacaaaaatcagccaggcatggtgacacacacctgtgatcccagctacttgggaggctgaggcacaagaattgcatgaacccgagaggaggaggttgcagtgagccaagattgcacactgcactccagcctgagtgatagacaaagactgtctcaaaaaaaaaaaaaaaaaagtttcaactcatgttgaaacttaatc

SEQ ID NO: 430608 - DNA, 570 bp, Homo sapiens
agaacattagaaatattaaaagataaacatggcatttatgtagttaaacataagcaattatttcatctatattaatctcccatccctaggtgcatgcttagcttaaaagaaaagcatctttaacaggagcactagaggtctatagcactatacttgatcttccacttcacatgcaggaagaggtggtctgatatgaggctttacaaggattcctaagcagggctgctatggtttgaatgtttgaacgggccgggcatggtggctcatgcctgtaatcccagcactttgggaggccaagacgggtggatcacttgaggtcaggagttcgagaccagcctgggcaacatggtgaaaccccatgtctactaaaaatacaaaaatcagccaggcatggtgacacacacctgtgatcccagctacttgggaggctgaggcacaagaattgcatgarcccgagaggaggaggttgcagtgagccaagattgcacactgcactccagcctgagtgatagacaaagactgtctcaaaaaaaaaaaaaaaaaagtttcaactcatgttgaaacttaatc

SEQ ID NO: 430609 - DNA, 570 bp, Homo sapiens
agaacattagaaatattaaaagataaacatggcatttatgtagttaaacataagcaattatttcatctatattaatctcccatccctaggtgcatgcttagcttaaaagaaaagcatctttaacaggagcactagaggtctatagcactatacttgatcttccacttcacatgcaggaagaggtggtctgatatgaggctttacaaggattcctaagcagggctgctatggtttgaatgtttgaacgggccgggcatggtggctcatgcctgtaatcccagcactttgggaggccaagacgggtggatcacttgaggtcaggagttcgagaccagcctgggcaacatggtgaaaccccatgtctactaaaaatacaaaaatcagccaggcatggtgacacacacctgtgatcccagctacttgggaggctgaggcacaagaattgcatgaacccgagaggaggaggttgcagtgagccaagattgcacactgcactccagcctgagtgatagasaaagactgtctcaaaaaaaaaaaaaaaaaagtttcaactcatgttgaaacttaatc

SEQ ID NO: 430610 - DNA, 604 bp, Homo sapiens
gttttgttcacccatttgccaatcaatgtgcatttaggttgttgccatttttggctgttatgaataatgatgctgtgaattttcacctacatatctttgtgtggacgtatattttcattatcagttgaccttagtcaattgatgggttagtttttggactctcagttctgtttcattkttctatttatgtatccttacatcaatactaaactttcatgattactacagctttatattaagttttgaaattggataagtcatccaagtttgttctgttctaaaattgttttgttttatgtagatcattttcatttccatataaattattggatcatctgccactcagagtaaaaccagagaagcagaaccagtaggaaagatatatattaagaaatttattatgagaaattggcctatgcaatggtaggggctttttaagtaagactaaaacccacaggcaggcagtccagaaggtcaggctagaactgttgggcatgagctaatgctactgtccaaagtaaaattttcttctttttttttagggatgcctcagacccagttttaaagtcttctagctgactgaatcaagcccatcaagattatc

SEQ ID NO: 430611 - DNA, 561 bp, Homo sapiens
tgtgggttgatagtcttgcggaagtctcacatacccttgttgtttttttgtccaattgttctatcatttattgaaagtgggccattgagatctctaactattattgttaaactgcctatttatcctttcaagtctgtcaatatttgcttcatgtattttgaggctcagttataaaatacatatacattttaaattgttgtatccccttactgtattgatccttttataattatgaaatatttttagtaatatttcttatcttaaagtttgtttgatattattgtaaccactccagctctttcatagttacttcaatatgtcttttccatccttttacctccaaaccatttctgtctttgcatcaaaggcatgtctctcataaacaacaattattgagtcttgttttctttggttcagacagacaatctctgccttttgagtagggtgtttattccatccacatttgtgtaattattaatatcactgkattagacagacaacttcgctatctggtttctatttgtcttatgttggttttgtccctctgctcttcctttgcta

SEQ ID NO: 430612 - DNA, 564 bp, Homo sapiens
actctcacaagagattgggcagaatctctgaaagcaacctgaggccattgtgctttccatactcagtaactgggattcctatacctttgatctgctgacagaagtgggtgcactcaactttatggctataagccactggcactttcgcacatgtgagttgagcatccattctctatgtatctccctccatcccattttagtaagatcttctagaatactcatccttatggaattctcataataacatcaaaaggaaatactactactacctcaacaaagatatatattgcatctgatatcactgcatttggtcttaaaaatgaagycccatgactagtagaataaatgttaattgcaacttgtctgattcatttctcctacctaatagagacacaggacagtatcttaaatttagatttagtgaaccattttcattcagactacaaaacatgccacccatcctgaaacaaatttctggaccactataacactgcagtttagcaaacaattaaacatacacacacagaaatcaaccttaactagacaaacttcacacataagatg

SEQ ID NO: 430613 - DNA, 576 bp, Homo sapiens
accagttaatactatactattcactttgtcatttaaacgtaaatcacttgatatcatttagttgtttctctttgcataagtgttttrttactatttgaaggtaaaggtatttcttatatttctattgtatacttttaaatatcaagtatatttttctgatgcatagatggtacaaaataaatgtagatttgaaataaactgattgtttgaatttctcttcacatatattcatcttgaagaatgatgaacaattacatcttgttctacacatgagttatttaatgttcttctggtcaatgggaggttcactgcaatttgatattttgttaatgacatatttgacatgttggtgaattttcgttacatatgtggatgatgctaagatgaactcattcttaaaaacctgaggggagatgagaatttgaaaggctctaacttagaaataaagtcattgaaagggagcttaataaattaaacaatcaaaaatacattacagcatatatttttttaaaattatataggaaattacttacattgagacactgagataactaaaatgtccccttctggtcccca

SEQ ID NO: 430614 - DNA, 609 bp, Homo sapiens
agatatggggcttttaaagaggtgattcaattaaaataaggccattagggtggtcccaaatctcatctggctggtgtcctcataaaaagaagatawtcagccacccaaattgacagcagaaatgtgcatatgcaaaggaaaaaccatgtgaagacccagcaagagagtggccatctgcaaaccaagaagacaggtctcagaagaaaccaaacctactggcatcttggcttggacttccagtctccaaaactgaaagaaaacaaatttctgttgcttaagccaccccagtctgtagttttttgttatggcagccatagcaaattattacactaaagcagttaaaaacaagtgcaatacagttctaaaacttcaatgtaatttaagtcaaaggttttaggcttagccttggtttatttatcaaaccatatttcttgacccactcttcaaaactgagaatgcacagaatcttgcagtagaacattcaaaggaggaaacaaattataaactacaattacctgcagctaaggagtattttatatgctactcaatttaaattctaaaagctgtattgatgacagttaaatggtagctgcctatgcaggatgacag

SEQ ID NO: 430615 - DNA, 615 bp, Homo sapiens
ttgagttgcttattagataccagttagggtgctaaagagagggttggacatataagtctggagctcagggtggtggtaaaggctagtcgataaaacctgagggggtttaggctgacatctatgtttcagaaaraagaaaaatatcatgcacaatcccaccactcaaagataaattctgttaactaacatttttaagtagctccctccaacgcatgtttttatatggctaagatatactgtatgcacaatatcacattcttttttctcacttaacattgtagtagaaacatttccaatttgttattaatatccaaacatattcacatgccataatttattcttagcattacaaaaatttacacctatatgtcttggttttagattcttttctctgaattttcttgtcctaagaaaagctaagaggagctcttctgacttttatagtcaatatcctagtgctcaccaaccaatttctaaggttaatttcaaagtaagctacaagttacatctacccatttcaaggagtctgtggttttttaaagagcaataccaacttctaatgagcatttaactccacaatatgctgcttccatagaaatacaataaaagaaaaat

SEQ ID NO: 430616 - DNA, 565 bp, Homo sapiens
aaggaccaaaagtgatggcatatataagtgatgacagagaaagacaagcctgaaaacgaggctgagaaacagtaactaaggagatagaagttgaactaagacagagtggtgtcaccaaaagccaaagagagtctagaatctcaagaaagttgtcagtataaaatatcattaaaagcacaacaggaagcctgaaagaagcctattggatttgaagactaagggtttgttgttgtttcagtctttgctaggacagtttcagtgggagccaaactgcatatgtaggtttcctggcatatgcagttatctgtgtgtgcttatgtatkcatgtgtgtgttcttgtgtgtttgtgtgtgtgtgcacatgcatatacagtatctatatttcctcttaagtttactaccttcataagactgcctaaatattttatattgcatgtttctctcccactcacatttctaggtctctcatgtatctgtgcctgaattgatagtctgagcattcataggttgagttccaaactatatgcagcttaattggcagtgtttttcaatgcttccactgtaat

SEQ ID NO: 430617 - DNA, 573 bp, Homo sapiens
tgcactgcatccattcaactgggcactgtgcaaccaaaggtgaactgtttgtgatgttacagactaaatgagaacagtatcttataagtggtaagcagggtttgattttctgatagctgtctggaaaaaaacctaaaagtatatgtctacacacaaattatctatgaatacaaaatatttatttccttcttttcactttcctccatgttctatattttataaagatatatagaatatgttatcctcaaaaataagtgttaatttttttattcwttaaagcataacttcaattctaaggtatatcttgggaaatgtgacacctcaaaaccatcatgtttttcagattaatatagaaaatatgtggtcagtacctataaagtaggcctacttgtgaaggatagggtcagaagagtggccatgagttgttaggtacttctggagaagcctgagagcagcctgacttgaacgccgccagcatggccccagtgagaaataacgaggtcctcaagtaagagtctccctgtgctccaagaagcatgcattgtggaaataattcattatctcacctaacag

SEQ ID NO: 430618 - DNA, 358 bp, Homo sapiens
ctgatctcatcaattcgctgactttcattatatccacctggaaagaatggccatgaatatggaaacttatgttgtccttggccacaaatgtttgaaactctccaatctggactagttgtcttttcttcctaggatcctccttcaccaaaatctgggaatcyttttttctgacctgtgtttgtatgctttgttttcttcatgcacccttcctctttcttgatatgctttctgcttttggtttggtacgccctccaggagcctcctgagaaaatatgagaataaaatttttgtatgtctgaaaatctctttattctaccctttcccttgactgatagtttggctgagtattgaaattcta

SEQ ID NO: 430619 - DNA, 569 bp, Homo sapiens
gtgttacttgcatatttgttaatattaatgtgcttttaggttgcttagtaactgttctacttaagttaaattttttgctataataattagtttaacaaatccttttttccaagacatcataaaactaaactttagcccaagtccttgtctaaattattagaaacttcaaatacataaattttattgcagttgtacttgttttatcatttagaaaaacataaaattgccactccagagtagcaagatttttctgggaataacattactgaaataacactgaggttttggtgatttgaaataaatggaaccctgttattattacttgaagctgaattgggttttttagtggaaaataaaataggacaaaagtaacttaaaggaagaagtggcaattttatttatttttttataaaattgtacagacatatcttataaaatgccccaaacaaagcaacaatgactatagaytggattgaaatgggtttacatgccagctacatttgacattatacctcaaggactcttgccctttctatgtactgctgtttagatcaaagaaataaacaaga

SEQ ID NO: 430620 - DNA, 608 bp, Homo sapiens
ctgtctgcaaatgtatttaggaagattttttatcctgggactttatgaacaactcaaagtataaatggttagtaaaactgaaaagggtttaatgtggctgctaataaataatataaataaaaatgataatcctctagcttttatctgttgtccatcctaatactgccaaggatggrgttagcaggtacattcatgtactgaaggggcaagggtaacaaaatgtaccctttctgtaaaacagggagaaattcataattttctagccagtatttacattcttaggagccctaattcccagtacttggcaatctatattttcattattctggttaagaattaccctctcctcactaatgactcagaggaatataatgtttcaaagcagaatttcttgacgtagtttccacagaaaacttgtcctgttcttttgactaatcatttcaagatctgaaaaatacagagtcctggatggtccctagggacttccatgatgaatggttgacatattaatactctaagaaatcatgcagtaaaaagacttgcctaacattaccttttttttatttctcacaaatttacttgaccatggaatctgttggtcagattat

SEQ ID NO: 430621 - DNA, 537 bp, Homo sapiens
tccacacttgtaaaatatctttataacttgctgggctaacagattaagcatttaacttctctgatggggtttagcctaggactgggaggatttcctttgtttcatgtctgactgatgatgggtgtgagggcggggcagtgactgtgcagctcttagaagattcaaggagacttgagcttttcaatctcagtttctcccactcctggagtctgtaggagtttaactggagagctraggaaattctcccaactgtatattatgaagcactgataagttcctttgcagaaacttggtaggcagaaagagtgtgagtgaattcatttatatgcctaatttaagacataattgagaggcacagtgttctaatagatggagttctggctgaggaattaagaaacctgagttccattcttagcacagatgatggctcagtgcagggaaatcaagggctggcactttccagaggaatttgaactctagagacagtcaattcaggacacaattattcagaaatacagccatgatccccattatcta

SEQ ID NO: 430622 - DNA, 576 bp, Homo sapiens
ttttttgttttactggtttgcatgcctttttcttatttactttaagaattttagaatatattttgcatatgaattatgtgtcagttgcatgttttgaaattctctctctcatgcttgccttttcactctcttaatggtggcttttaataattagaagttcttaaattttaatgtagcccaatgtactctttctcttcacattcagtgatctgtgtgtgcttttaagacatctttgcccatcctaatgtcaggaagataactcccagtttacttgaaggagctttaatgttgtgcctttcacatttcaatgaacaatctatctagaattaatgtttgcctttggagtgagataggggtcaatatttgattttttccactatggatatgcagacgactccaaataatttattgaaaagaccacttttttctccattgcactgtgatgtcayttctgtgaatacatgtgtgtgtctctttttggtctccattcttccaatttgtctactcaactgtcttttcacaaacaccacactgtcttaattactgtggccttatattaagtcttgacatctgcaa

SEQ ID NO: 430623 - DNA, 567 bp, Homo sapiens
gttgtcatcaggctttttgacaataatactttctaccagaagaaattgggcaacttgaggaaaaaaaatttgagccaaagattttatactcagccataataactttccaatatgaagtctcaaacaaattgttaagaaacaacttaacaaatgagggaatactggtctcatgaaaacttcttgaggattctactagaggaaaagattcagaaaaccaaactatctggtgaggcattgccttaagcattgatggtgaaggttaggtatatatttacttatgaaactaggaagaagtgacagttacaaagaagcaaggagggtaagtatggctataatgctttggtagtgtagctacagtagtaaaaatgaggggtaggagagtaggaaaacatgtaaaaagtagaatgtttgctgatcgcattatgcctactaaataaaagtaaaggaatattactccaaatcagatgtagtggaaggagggaagggggaacatttagcattcctaaaagygtgcagaaaatgctaacatttttctaagagaaagggataaaaataaacacacacaca

SEQ ID NO: 430624 - DNA, 484 bp, Homo sapiens
cccttcattttctctaatgtgcttctagagtttgtaaatccagtacaacaacaataagaatattctatgtagtgcccaggtgggtcagataattgacatttaggaaktcttgagagaggggacttaaaatgaaaccaagtacgcagtggaaggctcagctgaggtcacactgtgaggatgctgctcttctatgacctgggaccaaaatgcccagtgtccagtgagaaggccgctctgttctagctgggtggactgggaagaactctcaggaaaatccagttccatctagagcccagagatcccacctctgaccaaaatggagcaagagcgacctgattaattgttatgcctgaaacaactaaaaaacaggtaaaagagataaaatagtttctcaaggcactggacatctgacaatggaagcagtcacccctaagaagcaggacacaaatgggggaagggtgtcactgccagctcactgcctgga

SEQ ID NO: 430625 - DNA, 429 bp, Homo sapiens
cccagcgcggacgggctccgggctaggagctcgcagagggacgggctgtgtcgcctcgcctctccctgcctctgtgtaggaattccccgccgctgaggtcaggagggcgggagtgacacaggagccgtggctgcctggactcctgggctgccccaggagccgaggacagccaggtggaggcggctacggctcggcccgaacccaccacggcctcccctgcagggacctgtgtccagcctccacggccctgcagctgcattcgcctcagcctctcgtgctgggatccctgggcccttctagattcccatcacgcagggtcaaaaatgcccccacccgtgcacgctcaccgtgagaaacccactcccatgccgtgcactgatcrcccggcgtgctgcccggactccagccctgctgcctcggcctttccat

SEQ ID NO: 430626 - DNA, 570 bp, Homo sapiens
aatagactggccataacacggtggcttcattaggagagctctaacgaggtgaggtcatccggcagtaaagggcaggcgtgcacagacacagcggaagaaacctgagcaagaacattttaccaagcaaaatattctgttaaggaaaacctagtggggaaaaacaccrccgagtaagaatgaaatatgagaatccatatcacaatacaaaaattactttgggaattctatttactaagaaagaagcaagtacaattgaaatgcattaccctttactcatgatctaataattttacttatcttgacattttccaagtaaattattctgaacgtgatcataattattttaaaagtaatgatttttaattttggaaaaacaagtctaatctgtttaaaaaacattaaaaagaggtgtctgacttaggattattttggttaccagatacagaaagaaagtggtttcaaattgtcttagacagtaaagtttgcctggtcactcgccagaggaaggaatcaacatcaggcctcgccctgtattaacaggggaatgaggaagggtgatccagcacccac

SEQ ID NO: 430627 - DNA, 570 bp, Homo sapiens
aatagactggccataacacggtggcttcattaggagagctctaacgaggtgaggtcatccggcagtaaagggcaggcgtgcacagacacagcggaagaaacctgagcaagaacattttaccaagcaaaatattctgttaaggaaaacctagtggggaaaaacaccgccgagtaagaatgaaatatgagaatccatatcacaatacaaaaattactttgggaattctatttactaagaaagaagcaagtacaattgaaatgcattaccctttactcatgatctaataattttacttatcttgacattttccaagtaaattattctgaacgtgatcataattattttaaaagtaatgatttttaattttggaaaaacaagtctaatctgtttaaaaaacattaaaaagaggtgtctgacttaggattattttggttaccagatacagaaagaaagtggtttcaaattgtcttagacagtaaagtttgcctggtcactcgccagaggaaggaatcaacatcaggcctcgccctgtatkaacaggggaatgaggaagggtgatccagcacccac

SEQ ID NO: 430628 - DNA, 567 bp, Homo sapiens
ttttcatcatgaagggatgttaaacatttgtttttatttttcaggacaaattgaaaggatcataggctttttgtccttcattcatatgttgatgatgttgacatgctgtataacattgattgctttgcatatatcgtaacatccttgcatccctgggataaatctcacttggtcatgatgaatgatctttttaatgtgttgttgaattcagtttgctagtattttgttgaggattttccatcaatatttattagtgayattagcttgggttttctttctttcttttttttttaatgtgtctttgtctggttttggtatcaggataataccggccttatagaatgaacttggaagtattctcttctcctttatttttttttgggaatagtttgagtaggattggtattagttcttcttgaaatgtctggtagaattcaagagtgaagccattgagtcctgggattttctttgctgggagactttttattatgctttgtctacattacttgttattggtctatttgggttttggatttctttatgattcaacctaggtaggtttttatg

SEQ ID NO: 430629 - DNA, 567 bp, Homo sapiens
ttttcatcatgaagggatgttaaacatttgtttttatttttcaggacaaattgaaaggatcataggctttttgtccttcattcatatgttgatgatgttgacatgctgtataacattgattgctttgcatatatcgtaacatccttgcatccctgggataaatctcacttggtcatgatgaatgatctttttaatgtgttgttgaattcagtttgctagtattttgttgaggattttccatcaatatttattagtgatattagcttgggttttctttctttctttttkttttaatgtgtctttgtctggttttggtatcaggataataccggccttatagaatgaacttggaagtattctcttctcctttatttttttttgggaatagtttgagtaggattggtattagttcttcttgaaatgtctggtagaattcaagagtgaagccattgagtcctgggattttctttgctgggagactttttattatgctttgtctacattacttgttattggtctatttgggttttggatttctttatgattcaacctaggtaggtttttatg

SEQ ID NO: 430630 - DNA, 567 bp, Homo sapiens
ttttcatcatgaagggatgttaaacatttgtttttatttttcaggacaaattgaaaggatcataggctttttgtccttcattcatatgttgatgatgttgacatgctgtataacattgattgctttgcatatatcgtaacatccttgcatccctgggataaatctcacttggtcatgatgaatgatctttttaatgtgttgttgaattcagtttgctagtattttgttgaggattttccatcaatatttattagtgatattagcttgggttttctttctttcttttttttttaatgtgtctttgtctggttttggtatcaggataatacyggccttatagaatgaacttggaagtattctcttctcctttatttttttttgggaatagtttgagtaggattggtattagttcttcttgaaatgtctggtagaattcaagagtgaagccattgagtcctgggattttctttgctgggagactttttattatgctttgtctacattacttgttattggtctatttgggttttggatttctttatgattcaacctaggtaggtttttatg

SEQ ID NO: 430631 - DNA, 555 bp, Homo sapiens
gtgaaaacgatgagtagcagctgattctttctcaaatatgatgtcatagtttgcagtacacagtgggccatgactattaaatttttgttgtgaatattttaatcattataaattgatcctctttatacacttgaaaactctttacaattaaattttacttttctaaaattaaaatcackacttctgcttttttatttattccaatatatctttgaacatatttaagtattattttgttttttagagagtttacatacagattttgttttttcagttgtaaagttaattttcgtagctgatctattggatgttacattcttcatcctattttgtgcttttggttcttagcccttccttgctgtctattcagcttttgtccttttaatagacagactctgtttaactacctttatcttctgcattgactttgagggtgtagaccccagttttcctgggatttttaagagtcattactgcaaaattatgattcaacacttcatgtggctttgaaactcttttccctccactatttagacataaccctaggtttagtgc

SEQ ID NO: 430632 - DNA, 555 bp, Homo sapiens
gtgaaaacgatgagtagcagctgattctttctcaaatatgatgtcatagtttgcagtacacagtgggccatgactattaaatttttgttgtgaatattttaatcattataaattgatcctctttatacacttgaaaactctttacaattaaattttacttttctaaaattaaaatcactacttctgcttttttatttattccaatatatctttgaacatatttaagtattattttgttttttagagagtttacatacagattttgttttttcagttgtaaagttaattttcgtagctgatctattggatgttacattcttcatcctattttgtgcttttggttcttagcccttccttgctgtctaytcagcttttgtccttttaatagacagactctgtttaactacctttatcttctgcattgactttgagggtgtagaccccagttttcctgggatttttaagagtcattactgcaaaattatgattcaacacttcatgtggctttgaaactcttttccctccactatttagacataaccctaggtttagtgc

SEQ ID NO: 430633 - DNA, 561 bp, Homo sapiens
acatgtttttagaattctattatcaaagctatgggttaatatccarcattgtgacgtgatcctgtgactttagtcaaatcagtcatggaaagttagaaatctcctcccttaaacattgatgcattcttagaattgcttcttgcctaaactatgtttttcaaaaatgtaaatctcagagagttgttcttccagtcacattgctggagtagagatttataatttttaaaatttttaatgagattattgacttgttaatttgtagattattgacttattaatttgtttcaagttcttttgtgttaactgtcttaaaaatggctaacagttatttagtgctttttataggctagattctggattaagctgttttcatgaatcatctcatttaatcctcacaaacccaggaggaagaaagtatccttcctctaatttaacagatgagaaaatgaatgcagagagataaagtaattttcaaactgtcaatcagttagtaaaagggcacttataggattattcaaatggaaagagagataaaaagtgataacttgtacagttttctcc

SEQ ID NO: 430634 - DNA, 539 bp, Homo sapiens
ctagctggattcagtgtcatatttcatattggcaaagaaaacttgtgattgaaagtaaggtttctctaccagacaacttttacaaagaatccaatggtgtactctttcaataatttatttcccttgctccccaaaagtcaatcatttaccaatcttattacttgttcatttgcaactgtgtacccaccccactgttgccagctgcccctactatgctgtaacagtgagttcagagcatcactatcacacgttgtctatgatagcaaattcttctttgttctycatgcagcaaaaattacatctgttgtctcatctcgatttgaaaaacctctcagcaattctaggaacaggtagccaccagtctaaaagaatgctggacaaaattgtagtagtagtttgtggttttcctttcttccttttgaaatatttctatctttataatctcttaacattatctgagtcctatctaaggcattttagtaagtagagcattttagtaggaaagagaaaaatcaacttcctaagcacctcctcccctc

SEQ ID NO: 430635 - DNA, 536 bp, Homo sapiens
cacacgttgtctatgatagcaaattcttctttgttcttcatgcagcaaaaattacatctgttgtctcatctcgatttgaaaaacctctcagcaattctaggaacaggtagccaccagtcyaaaagaatgctggacaaaattgtagtagtagtttgtggttttcctttcttccttttgaaatatttctatctttataatctcttaacattatctgagtcctatctaaggcattttagtaagtagagcattttagtaggaaagagaaaaatcaacttcctaagcacctcctcccctcaatgctttgaagtctcagcacatatgctcatgggacaaatgacacttttgtaaaagaagaaacagaaaacctgccaattgactgaatattgggaataaacaagcagggatttccactttttaaagaattcttcactttgttaagaatttacatgatgactctttctgtggtactatagagcctcctccacagtgaaattgagaaggagattgggacttgatatgcaaactcaagtatataa

SEQ ID NO: 430636 - DNA, 473 bp, Homo sapiens
ttctctcaccaaatgctctgtttttctgaagacattaaaaccttattcctagttttgtgacctaatctgatacttcctggggtctcctggcatcacctggaactcacttctgcaactggattttgtctttatctctagcatctgaggatttcctgagctcagctttgcattgggcatattttgttttttaagtctgtagcagttgatggatgaatccgtttcagtcttgtctgccatcttgcctgaaatktgcttcatttctgcccttaagagcatttttcatgttaaaaagtcttaattttagcattaagaatctcatgtgctatattacatgattttagttgtatattcagtatcactggaaaatataaggtgagaaattatttttagttattcatcacaactgcatcacacgtatttgaaaaataatagtacatctacttgtaaaatatattatatatattttctgtaga

SEQ ID NO: 430637 - DNA, 622 bp, Homo sapiens
acataattaatgtgtacaatttggtgagtttggaggtatacatacatttatgttaccatcaccacaacaaggagacagacacatccatcatctccagaagtttccttttgcgtgtctgtgtgagggaagaaaacttaacataagactactgatacagctccgaagactggagaaacaccagggtcctttgtctcatgccaatgctattaacgacaaggacacccgtggagtggttttaaggagcggagagtttaasaggcaagaaacaagaaagaagaaaacagctccccggtacagaaggagctgggctcctaacggagaaaaaccccgtgtgcccaggaaaaacagttgtttatacctggaggctggaggaggcggtgtctgatttgcttagggcccaggggattggcttgaccaggtgtgtcattcacatagccaacctggtcctcccaccctagccttttaatatgcaaatgcgggtcggcatgatgtcctgcacacgtggtgttatttggaggcagccatgacagctgtggtgacaaggagaagagggcgggaaccgccatgtcgggtggacctggtttttagctgctggcatttacatatcaatgttgccagcctg

SEQ ID NO: 430638 - DNA, 566 bp, Homo sapiens
ctggggttgacaacccctgccttgggccgctaaagacaaggccaagtggaaactttagtacagggtggtggggccctctgtctctcatccccttcctctgacagctgccaggtaggtcctttgaggggatccccatcactggagatgggggagtttaaggccctcttgcctagacatcctcttctgcatctggcagtgcctgcatgaagatgaggcagcctctgttagtgggctggtttcccagctgcatcaaatccagggtttgtgacacgctaattgagaacaagggtttggtgctgacatcgacatccttaaagcaccccgaggggccctggcccgccgccagtgccgaatagcagctgggcccacaggggaagacgggtgccaagctcttccacagcacccatggagggaaggtgccaggyggcctgaccaggcctgttggcatctgcttaaccctagatgacggagcagcggaaacgcaggcaacgcctaggctttgtggatgtccagaactgcattagccgctgaggagagccaccgaaggccccaacaggggatgctca

SEQ ID NO: 430639 - DNA, 598 bp, Homo sapiens
ttatcaatttccaaattgggcagcttgttgtcctctgcccgtgtggacagacttctgttaggcactggaaaaagcaaattggtgaggmcctctgttctgttgacttacataatgacgttggagtcctccttctagttggtcactctgcgcagggtttcacagcacccatggggacagggtgaaatgttcataacatctgggcagcccctgatctgagaagcagcgaatgtggagcagagaggatccctctgtcgtatcccatctccttcatccctcatttccttcgggatcaattcctcccctgctgggattggaagcttcctgggcagcctcttatttttccctaatcatgttttcttccgtgggtctgatcctttcccacccgtgctccttcttttctgccttgcagtctgctttagatggtgcctgtttcctttttagtttctgaccatcctctgggaaactaaagttcttcaggaggctgaacttctccttccttggagcatcagaaccaggtaatgagaacacctttccaacttcaagaccgagttcacctggtctgttgatttgctgctcagcactgcctacccagtagatg

SEQ ID NO: 430640 - DNA, 598 bp, Homo sapiens
ttatcaatttccaaattgggcagcttgttgtcctctgcccgtgtggacagacttctgttaggcactggaaaaagcaaattggtgaggacctctgttctgttgacttacataatgacgttggagtcctccttctagttggtcactctgcgcagggtttcacagcacccatggggacagggtgaaatgttcataacatctgggcagcccctgatctgagaagcagcgaatgtggagcagagaggatccctctgtcgtatcccatctccttcatccctcatttccttcgggatcaattcctcccctgctgggattggaagcttcctgggcagcctcttatttttccctaatcatgttttcttccgtgggtctgwtcctttcccacccgtgctccttcttttctgccttgcagtctgctttagatggtgcctgtttcctttttagtttctgaccatcctctgggaaactaaagttcttcaggaggctgaacttctccttccttggagcatcagaaccaggtaatgagaacacctttccaacttcaagaccgagttcacctggtctgttgatttgctgctcagcactgcctacccagtagatg

SEQ ID NO: 430641 - DNA, 647 bp, Homo sapiens
cattctctctttgtctgctgccatccatgtaagacagaacttgctcctccttgccttctgccatgattgtgaggcttccccagtcatgtggaactgtaagtccaattaaacctctttcttttgtaaattgcctagtcttgggtatgtctttatcagcagcatgaaaacggactaatgcaaggcaggaattacaaaattcttrtatgtggaatctaataatgccaaacttacagaagctgagagtagaatggtaattaccagggtctgggcaggggctggagggattggggagatgttggccaaacagtacaaagtttcagttagacaggaggaataagttttcaaagtctattgcacagcatggtgaccagttaataacaatgtattatgtatgtcaaaattgctaatagagtagattttaaacattctcactataaaaaattataggtaggtaaagtgatggatatgttaattagcttgatataatcatttcacagtgtatacatgtatcaaaacatcacatcataccccacaaatgtatatgattattcatttgtttatttatttttgagacagggtctcactctgtcatccaggctggagttcagtggcaccatcatggctcactgcagcctcaacctcctgga

SEQ ID NO: 430642 - DNA, 497 bp, Homo sapiens
atctcccacagaaaggacagggagttttgcttgtatttttaacatctataagggttcctggcacacagctggtgcctgataaatatgtgttaaatgacggaatgaatgaatgtctatgaaataaaaggaaaaatcccaagtattccagaaagatgacttaatggggacttgtccaatcaataagatgagattatgccaatgatgtgttcattggttgtctaataaccttccaccttgggctatgtcgctaatgacaatgcagatggaaacagctggagcaaagaacagttttgtttgcatgcacttagtttttgcaattaatcaggccatgcatgagagagcaagggtggctcagatatatatcaatagagaatccatgtagaccattgaccacatscttggaatgaatatcaaacaaaaacttagccttctctagtccattttaagtagcgcttcatggagtcatcacagaaggatcttattatatgccaaatgta

SEQ ID NO: 430643 - DNA, 469 bp, Homo sapiens
gtgctttggtaccaatttcaggaactatcaggtgagctggataatggggacagttaagcattcacatcattttaccaaattagtcgtattaatctgacatttttacttactcccaacagtagacagaggtatggagaaaacagtgagtgcctagagagcasttaaccacaggaacctatatttgtcttttgtacaaaagttagctgaattatcatcaacaccatcacagctaccatataaccacaagtgcaggggccagcccctacatacccactttctgggcgctgtaataaccctgtgcagaaaggatctcatagatggagaagttgatatgtatctgtacatactttttaatgccaaacaaccattaggtggctggatctagatctgagctcaggttagtttgactcttaaaacttatgctttttttttttttttttttttttagcatgttatgttctttccaacc

SEQ ID NO: 430644 - DNA, 584 bp, Homo sapiens
aggaaacttccttaacatgacaaaggtcatatatgaaaaattcacagctaacatcatattcagtgatgaaagactgaactgaacacttactttcccccaagatcaagaagacaaggatacccacttttaccaattctacttaatatagtactggaaatcctagccagagaaattactcaagaaaaagaaataaaagcatccaaactgggaaggaakaagcaaaactacctctatgtgtagatgacattaccttacatgttgaaaacgataaggattccacaaaaaactgttagaactaataaattaattcagcaacattgcaggatacaaaatcaacatgcaaaaatcagctgtatttttatacactaggcatgaacaatttaagaagcagattaagaaaataattccgtttacaaaatatcaaaaagactaaaatatttaagaataagtttaacaaaggaggtacaagacttgtacactcaaaactaccaaacattattgaaagaaattaaagaagaccaaaatatatggaagcaccttccatgtccatagactgaaaaaattactattgttaagatgacaat

SEQ ID NO: 430645 - DNA, 622 bp, Homo sapiens
catcatgttttatgagagaagttcaaatctactactctttgcatttgtgatttcttccatttctattacatttaccaaccttctctaaatgaaaaagagctatctgtctatagaagccttttttaatggcttatgtttttccatttaaatgtttactctatctggaatttacttcatgacagtaaaatagagtaacagaaagagctccagtccaaatgtcaggcaatgtgtgtactaattctgcccggaacaccttaggtaaatgccttartcctcagtctattctggccccatagcattactccaaagtttggaaagctacgcaaagcttcttagcttcagcacaaaactgaacggtcatcctggcctctgcattacccagagtatcaggtacaaataaagagaaagaaatactgtacttctatttggcaagctaacataaaaacagatctcactttccatgcccttcttgttgaccctcagtttctcccacctgccgggtttggggctttcctcatcctacgccctcgtgctctgctgggaattcccaccctcccctctacccgcactagcagttccactgcgatcagtcttgagacctttaaccctgtggatacccatg

SEQ ID NO: 430646 - DNA, 579 bp, Homo sapiens
ccacatgtcctttaccgagattccccaaatattaacgttacccatgttcacatttgctttatcccctctctctcgtgtgtgtgtatacttgtttttcattttctgttttaaattcagttgcaaatatgatgtccctctmccccttagtacatcaatgtttgcttcctaagaacaagaacattttctctcacataacaacagcataattattaaaacaggaaattcgtgttaattcagtgccattatataatctacagagcgtattcgtgttttcttaattgccccagtattgtcttttgtagcaaaaagtattctgaaaacttctgttgcattgagttgtcaaatatgtttggtctcttttaatctggaattgtctcctaatgtttgtgtctcatgatactgattttttttgaaaagtacaggccagcacttttcaaaattctacagttttgtagaatgacacttaatttgggtttgtatgatgcttcctcaggattagattcagaaatactgctgaggggatgctgagtcctcagcgcactgtatcaggaggcagagttgtccatctggcctatgcct

SEQ ID NO: 430647 - DNA, 618 bp, Homo sapiens
aactcactctgcactgcccacataatgagtggggagttatgttccacttccctaaggtggggagtatgtacataaattacttggaactcttctctatgggagattattctattctattcatttaatcatttatatcaatatggactcatggatatgtatttaatactttgtatcacatcccaagactgtgatttatttggctgctggagttggcccaggttggggcactgggagctctttcagtgggcccctgctgcgatgacacatgcgcccatcactgtgtgtgtttctgggcacttccttcctttctggcactataagatgcttcatgctcatcttctgtcttccttgttccagccctggaatcagccatttctccaaggagccttggttcctcttactggagaatggtgtaaacccaatttctgggtgctgatgtgctccgtgctgctggaactgagaactgtttttaaagaaactagtagatagatatcttyattgtttgcattaatcttcttggagcatggaggtgattctttggagtataaaccataattctctggtttgtttcttaaacaaaaaaaatttaataagctagaagagatgatataggataat

SEQ ID NO: 430648 - DNA, 564 bp, Homo sapiens
tctcaccagcaacgtatgagggttccaatttctccacatccacaccaacacttgctactgcccatctttttattatatccatcccagtgggaatgaagtagtctcgcactgtggttttgatttgcatatccctaatgatgctgaacatcttttcatgtgctaatttgtcatttttgtatcttccttggagaaatatctcttcaaaccctttgctcactttaaaatgggttgcttttctaaagattaaactctgatcagatacatattctcccattctgtgggttatttcactttcatggtagtgttctttggatacaaatttgaactcattaaaattaaaaaatttgtccccattaaaataaaaaaaatcttctgtttctttggttgtttatgctttaggtgatgtatctaagaagccattgcctaatccaaggtcataaatgtgtaygtaatcctatgttttcttctaggaatattccagttttaactcttaaatttaggtctttgatctattttgagttaatttttgtatatagtacaaggtaggagtccaatttcattctt

SEQ ID NO: 430649 - DNA, 621 bp, Homo sapiens
cgtggcaagatacagtaggggaagtagttcatttgaataaaaggaaagaaatataaaggtaatttgtggttattacagagaggttgttgaacagagtggttaagagtaagggccccagagccggacagggcaaacaccatctctgcactagctagtaaatgacttgggcaaggtatttaacctctctgtttttgcatttcagcatctkcaaaatagaggtaaaaatagtacctactactgagaattgaatgattcaatactgtatagcacttagaccagcacctgtcatacaataagttcttaataaatgtgagctgacatcatcataattagctactggttaaacctcttattcccactttgcaagggagtcatattcttttcattttaatctgaatttaaaagtccatttccataaaaaagtttctttacagtttattagcaaatagtaaacattttcttctttaagtaatttgaagaaggtaaaatttttatgagcaatttctttagaattttttttaaaactgatttttcactatttttttactgaagtaaacaattcttgaaggtaaaaatgcgttcacaagatgaacttcaagacaacaagtactctaattttag

SEQ ID NO: 430650 - DNA, 567 bp, Homo sapiens
tctctgtttttgcatttcagcatcttyaaaatagaggtaaaaatagtacctactactgagaattgaatgattcaatactgtatagcacttagaccagcacctgtcatacaataagttcttaataaatgtgagctgacatcatcataattagctactggttaaacctcttattcccactttgcaagggagtcatattcttttcattttaatctgaatttaaaagtccatttccataaaaaagtttctttacagtttattagcaaatagtaaacattttcttctttaagtaatttgaagaaggtaaaatttttatgagcaatttctttagaattttttttaaaactgatttttcactatttttttactgaagtaaacaattcttgaaggtaaaaatgcgttcacaagatgaacttcaagacaacaagtactctaattttagagtaaagagctctggaatatggtccataatatatgtgtaaacaaatgtataaggtgttattttgtgatggaagtattaatcacacctttcatttactctgtcatttaacgaatttttattgagcccct

SEQ ID NO: 430651 - DNA, 567 bp, Homo sapiens
tctctgtttttgcatttcagcatcttcaaaatagaggtaaaaatagtacctactactgagaattgaatgattcaatactgtatagcacttagaccagcacctgtcatacaataagttcttaataaatgtgagctgacatcatcataattagctactggttaaacctcttattcccactttgcaagggagtcatattcttttcattttaatctgaatttaaaagtccatttccataaaaaagtttctttacagtttattagcaaatagtaaacattttcttctttaagtaatttgaagaaggtaaaatttttatgagcaatttctttagaattttttttaaaactgatttttcactatttttttactgaagtaaacaattcttgaaggtaaaaatgcgttcacaagatgaacttcaagacaacaagtactctaattttagagtaaagagctctggaatatggtccataatatatgtgtaaacaaatgtataagstgttattttgtgatggaagtattaatcacacctttcatttactctgtcatttaacgaatttttattgagcccct

SEQ ID NO: 430652 - DNA, 577 bp, Homo sapiens
tattgagggtcaatcaatgattactagtgagaacaagtggatggaggggtagggataaattcataaatcgttctctttagaaatggagtgaacctgagacagggacattatcttgtgaatgggtctgttcagatgtggttacattcttgggcttcttttctgcaatagataaggagataacaggaaggggaaggaaaaactacgctgtcctcagtctggtctttatgtagatagggaaaacgtctctttcagtgtctgttaatctttgagggtttttaactcaaaatactcattgtaccagggaggcatattttagggtgaagtcccttgcattatttcactaaacatcacttttttttttaagtgtagtgttaaatgctacagagaaaaacatgggtgagacaagccagttctctcaagaagctcaaatgggtgagacaggcatggaaacacaatagccttatgatgagatgagttgcccccrtcactgactgaattaaccctgatctcagtcaaggaaaccccagagagagcttaaaaactggattccctgccacagtagagagagagttctgac

SEQ ID NO: 430653 - DNA, 484 bp, Homo sapiens
tccctaatgggtaatgttgagtctttatgcatttttatactcattcctctctcttaatgtatactgtttgctttgcttgtttgcttttttttttttttttctggagatggggttaacatctgtcatcaggctagagtgcagtggtgcaattagagcacactgcagccttgaactcccaggttcaaacaatcctcccatctcagcttcttgagtacctgggattatgggaacacagctaatttctaaattttttgtagtgatggagtcttgctatattgcccaggctagtttcgaactcctggcctcaagtgatcctcctgccttggcctctcttagtgttgggactgcaggcaggagccactacatctagccctgctttctaatacattaatgcttgtcyggattttaaaagagaaaacacaattaactcattcctttccattcacgtcttacttctagccttccattctcagccaatgttttc

SEQ ID NO: 430654 - DNA, 484 bp, Homo sapiens
tccctaatgggtaatgttgagtctttatgcatttttatactcattcctctctcttaatgtatactgtttgctttgcttgtttgcttttttttttttttttctggagatggggttaacatctgtcatcaggctagagtgcagtggtgcaattagagcacactgcagccttgaactcccaggttcaaacaatcctcccatctcagcttcttgagtacctgggattatgggaacacagctaatttctaaattttttgtagtgatggagtcttgctatattgcccaggctagtttcgaactcctggcctcaagtgatcctcctgccttggcctctcttagtgttgggactgcaggcaggagccactacatctagccctgctttctaatacattaatgcttgtctggattttaaaagagawaacacaattaactcattcctttccattcacgtcttacttctagccttccattctcagccaatgttttc

SEQ ID NO: 430655 - DNA, 602 bp, Homo sapiens
tttgctgtatctcataggttttggtatgttgtgtttccattgtcactagtttctagaaattttttgatttcgttcttaatttctttattgacccactggtcattcaggagcatattgtttaatttccatgtgtttagatagtttccaaagttcctcaagttattgatttctaattttatttcactgtggtcaaagaagatacttcatatgatttcagtttttttgaatttttaaagccttgttttgtggcctaacatatggtctatccttgasaatgatccatgtgctgaggagaataaccactttgcagtcattggatgaaatgttctatgaatttctattaggtccatttggtgttgtgcagattaagtcttacgtttctttgttgattttctgtttggatgatctgtccaatgctgaaagtgaggtgttaaagtctcctgctattattttatcagggtctatctttctctttagctctaatgctatttgcttcatatatctgggtgtttcagtgtttggtgcatatgtatttacaatttttatatcctattgcttaattgacccccttatcattatgtaatgacttgctctgcctcttt

SEQ ID NO: 430656 - DNA, 581 bp, Homo sapiens
tatattattttatctgataaaaccatagctactgctcttttttggtttccatttatatggaatatatatttttcattcctttgttttcagtctatttgtgtctttataggtaaagtgtgtttcttgtaggcaacagattgttgggtcttgtttccttattccttcagtcattctgtgtcttttgattgaaagtttagccaatttacattcaacgttattattgataagtactattgccattttattatgtgttttctggttgttttatgctttcttccctcccttcctccttccctctctccctccctctctccctccctttgaaagtggtttcytcttatggcatgttttaatttcttttttttaattttttcagtatctgttttatttgatgttaccatgaggcttgcaaataacttcttataactcattattttaaaccgatgataccttaactctgattgcaaaaatgaacaagcaaacagaaaactaagaactctaaactttaactttatctcacctgctttttaactttttgttgtttctatttatatcttattatactgtctatgtcttaaaaa

SEQ ID NO: 430657 - DNA, 545 bp, Homo sapiens
gtcccagtgaggctgaagcgtagagtggaagtgatcatgattagaaggtaggacagatagaacttagtgactctgtgaggtggtgaaactgcctttgccaagattataacaccctttccccaaataaacccccttcttggctgggaactagactgcttttgtaggactaacaaatttgccacaagattagaaattatggtttaggagtcatgcagctagaggccacaaagttctaaacctccccarttgttcctagggataacatcactattggaaaacctaagattggggcttgagttattttttcaggccttgcactcaatagatcagctagtgtcacccagatcaataaaccgactcatctgatcttctggtccccacccaggaactgactcagctcaagagggcagcttcgactccctatggtttcgtctccaacccgaccaatcagcactccccacttctcaaacccctacccaccaaattatccttaaaaacccaaatcccagaattttcaaggagactggtttgagtaataacaaaac

SEQ ID NO: 430658 - DNA, 608 bp, Homo sapiens
tcttttgttataaggctgggtgtgtgaggcctcagggacgggcctcaggaaacagaatctctctcctgccttcctttcacctgccccaaggcgggactctaatctttccccacttttctgattgtaggtcttaagaccctcctttgcaaagggtcctgcctcataccctgagggaaggaaggcttcggtaaaaacccaagcagactgggttaggagagcttcctgacagctgtacacatggaggctcctggagggctggcacacccagagrgggcttggaaactgcgtgccccttctcccaaacctcaccctacacatctctttctctgcatcctttgcaatatcctttataataaactggtaaacataagtaagtgtttccctgagttctgtgagctgctccagcaaattaattgaacccaaaagagagtcatgcgaccccaacttgaagccagttggtaggaagttccggaggctcaaaattgcaactggcatctgagggtgtagggggcattcttggggactgagcccctaaccagtgggatctgatgccatctcccggtagatactgtcggaactgaattggaggacgcccagctggtgtccac

SEQ ID NO: 430659 - DNA, 557 bp, Homo sapiens
tccagtagtttctttttttttttaacttgatatatttggaaatttttaagggaaaatttctatatggtagaaaaccttttcatgctgtggacaagctaattcttacttaatcttcaaacctgagctctgtcctttttccaaaagtctctttcctaagaacctattccccttcccctctgtcactcgtctgggctcccagggcagcctgggcttgtctcccctgtgtcctgctccctaccatgtgcactgacayactcatcgtctttattttgggggctgctaacttcctgaggtcagcctggtatctgactttgtatcccttggcatagagtaagcattcaacaaatgtctgttaattgtttttgtggtattgaattgtaaaagtaaaaaattctgaagtgcttttctttttctagaccaggtttcagttttatacaaatgccctgcttctgtattcaccaaatatttttagaatctctgttaagactaagtcaccatcctgacctgcagagattcagtctgaacaaacagacatacataaataattgtgtgttaaa

SEQ ID NO: 430660 - DNA, 484 bp, Homo sapiens
cttccacttgggtggagtgaacatcacttcctcttcatcctctgatccagggaatgacctaatggcttaaaacaaagcaaaacaaagcagaaaaaaacttcaaaaacctttcagtgtaacttcaaaatattattgaatttcaccagtttgaaatgttaatcgtataatcagtcagtcacattcctgtctttttgaaggtacagttctcaggatctggctttctgatggaactccttatctcctagactttctgcatccccagaggggtgggggttgcttgcctaattctgtgcttctgctttggaatttagccaatgcctgctatgtagatggtcaacactggcttgttaaatcaatgaatctctaaatacttagccaggttcactgtggagtttttttttgtttttttttttttttgtatgtgcgattccttataattataaatatwtgaacataataaactgtaattattttccccattttg

SEQ ID NO: 430661 - DNA, 626 bp, Homo sapiens
tatactttttacaaaactgcaagattattttccaaggtagttatatcgttttatatttccacgcgcagagtatgagagtttatttgctccacatccttgccaacactttgtatggccagtctttaattgtagtcatttaataagtaggtaggagtatctcattcagttttaaatttaatatccctgattagtaataattttgagcatctttaatgtattgctttctgtgtattttttttkgcgaaatgtttgttccaatcttttttgtattttttaattggttttcttattgagatttgaaagttctttatatatctggatacaaatctttaatcaggtatgtgatttgaaaaccttaaatcactgaattaaattttgtttcttttgaataatttttttctctttttgcaattttttattgtaatgaaatacacataataaaatttactattttaaccacttttaagagtagagatcaatggcatgaagtacattcatgttgttgtctttttaaaaaatactgtagtccaaagtcataaaaaatccatcagagtctgagctctatgagggcagaaactgtatcttattctcaattatatttgcagagcctatactatgcttggcac

SEQ ID NO: 430662 - DNA, 666 bp, Homo sapiens
tttgggattcataaaggatgggaaagttccagataagtaagccaaacatagtaatagataatggttggcttttaaaaatgtaataccatacactacttcattaaaaaaataggagctgaagaaatatgaaaattttacatgaaatttcatttattcaacaaatatttttcaaatacccactatgtgcaagtcactgtagagtccatagagactaaggatgtgtagcactgacaaaaatgggagcactgaggaggtttcattccactgcagggacacacagtgaatcagatgagtatgtaaagcaggtaatgagtcagaaggaaaaataaagcttgcagaaagtgaagcagggaaggtggacggtaatgggatttcatggsggggggctttcatgaggagggggcaagctatttaaaatagcttggttctaaatgccaatgagatatcactcaccaacaagagagagtaattattttaaagcagttctaattcttttaaagtatgtctgtttatccttttttcatttcagaacaacaaagtcaggcgttttgcttttgagctcaagatgcaggacaaaagtagttatctcttggcagcagacagtgaagtggaaatggaagaatggatcacaattctaaataagatcctccagctcaactttgaagc

SEQ ID NO: 430663 - DNA, 472 bp, Homo sapiens
ctttattgcctgtgagtgtttgatgtctaataaaccagattcaacataaaccrtaaacttttgaaatgggtttgagattgggtttttaaaaacttaaagctggcaaaaaaaaaaacaacttttaaaagcccatgtgctacataatatggaactaaactcagaaatgtgcttggaaacacatggaaagaacgtctttacagaagcagcaactagaagtaaaatctctcagcagagggaggaaatagaataagaaataactatagttaggcacagaaggacacaatacactataggaagatttccagtgaagatcatttaattaaaatatgttgcttagaaacgtattttaattgtgttccacctctctcaaaaatttatatgtggaggatgttggagtgatcttaaaaatggtgatgaagatgcctgttcattcataggtggaaataattaggagggggtgaaatccattacc

SEQ ID NO: 430664 - DNA, 621 bp, Homo sapiens
tagaccaggatatggaatcaccaactgtgactatcctcaattcaagaaaccctcatctgctattggtgatcccttttctctcatgccacctcttacacatgaaggaaatctcaacaccaatgtgtttagtaacttcgaggagaaaccaacactgtcaggaatctccgcctctctgagttttcagtggagaactaagaaagtctctttaaaaacctaataccctggccgggcgcagtggctcatgcttgtaataccagcactttgggagccccaggtggcagatcacctgaggtcagaagtttgaaaccagcctggccaacatggagataaccccatctctactaaaaatacagaaaattagctgggcacagtggtgggcgcctgtaatcccaggtactggggaggctgaagcagaatcacttgaacccaggaggcggagcytgcagtgagcccagatcgcgccctgcactccagcctgggcgacaaagcgagactccatctcaaaacaaacaaacaaacaaaaaaccctaatacctcaatcagtttttcacgaactccacagaaattagttaagcacatacatccttcagtttaaaaaaaaaaaatcatttaacagcagtt

SEQ ID NO: 430665 - DNA, 573 bp, Homo sapiens
ttgaaacccagtgtgtatagcacatccaggttcaactaggcaaatctcgagtagccccgtgtggctagtggctaccatattggccagcacaggtctagctactcctgtcacacttgttattgaaattacttgtttgcggccgagtgcggtggctcgcgcctgtaatcccagcactttgggaggccgaggcaggagcatcacgaggtcaggagttcaagaccagcctggtcaacatggtgagaccacgtctctactaaaaatacgaaaatcagccgggcatggtggtgcatgcctatagtcttagctactggggaggctgaggcaaagaatcaacgtgaacccaggaggcggaggttgtggtgagccaaaatcatgccactgcactccagcctgggtaacaaagcgaaactccatctcaaaaaaaaaaagaaattacttgtttgcatcccttttagtccrctttcagacatcgtactcttgaactagattgtgtgttccttatttcccaaaccttgtgcagcgctctgtggttaagaaatgcttgctgagtgattagcaaggaaggaatttaat

SEQ ID NO: 430666 - DNA, 603 bp, Homo sapiens
tcctatctttatttcaagttttgactgtttatcatggcttttggaaggtattatttttaaatttaagtatttcattaaaatagtatctcagttactgagtttttagtgctcttgtatattttgttccygaaatgaatacctcgctcacctgcctctggtcccagctctgaaggaggcaccctgtaagcatttgctactttcctggacattattttaaaatacttcccaagtggtaataaataacttaaaaattttttttaaagtgcctaaagtaattgatacttttaaaggaaaattttaaatatacagataagtagaaagaagggaaaataaaagccatttgtttcacatttctgacacactactgttaacattaaatttttttaatgtttttattttttaaatttaaaaaaaattttatatgctgttatcttttaatactttcaggccttggacaactctccaatattttttgtggctctcccaaaggagatatatgctcaaaaaggagacaaaattatgtttgaaacaaaacttaaaaatatttggatctattatttaccagttatgttaattttggaacataactccaaagcatagtaa

SEQ ID NO: 430667 - DNA, 603 bp, Homo sapiens
tcctatctttatttcaagttttgactgtttatcatggcttttggaaggtattatttttaaatttaagtatttcattaaaatagtatctcagttactgagtttttagtgctcttgtatattttgttcccgaaatgaatacctcgctcacctgcctctggtcccagctctgaaggaggcaccctgtaagcatttgctactttcctggacattattttaaaatacttcccaagtggtaataaataacttaaaaattttttttaaagtgcctaaagtaattgatacttttaaaggaaaattttaaatatacagataagtagaaagaagggaaaataaaagccatttgtttcacatttctgacacactactgttaacattaaatttttttaatgtttttattttttaaattwaaaaaaaattttatatgctgttatcttttaatactttcaggccttggacaactctccaatattttttgtggctctcccaaaggagatatatgctcaaaaaggagacaaaattatgtttgaaacaaaacttaaaaatatttggatctattatttaccagttatgttaattttggaacataactccaaagcatagtaa

SEQ ID NO: 430668 - DNA, 490 bp, Homo sapiens
aggcggtggactcagatgactgccttgctctcagaattgctgttctcaatcttggatttcagtatattgctctgagatgggagtaggaaatagctatgtgaattttgtcactgcatttcctgcaaacacattgccagccttgtatattgcacattgatggtccccctttacataaatctgtgtgtgaggcatttaaaaaaatttttacttgcttgggccaggcatggtagctcacatctataatccccacactttgggaggccaaggtgggaggatcgcttgagcccaggagtttgagaccagcttgggcaacatggtgaaatcctgtctttacagaaaatataaaaattagccaggtgtggtggcatgtgcytgtagtcccagctacttgggaggctgagatgggaggattgcatgagcccaggaggtggaggttgcagtaagctgagattgcaccactgcactccagtctgggcagcagagccaaacc

SEQ ID NO: 430669 - DNA, 585 bp, Homo sapiens
cattgcacatttatttctctcacctggaaaaagtaaacgtgcaaaaaggcataacaaaataaattacctaactttatatcccctctctaaataactatttatgagcttactatttttaaaggcttctttcatttttcccttcaaagggaagcatggaaaggacattcctgaaaactgatatgaagtcaaaatgtcagctttgaagacagtggtggagaagacagctggtcgggggcctcatgattaagcacactgattatgactgagtattttaaagaggacaagataaatggtttttaaagctgtctgttctaccctaaacactctctaaaaaatgaaggycccctaatagctcactgctaatccattcctctgctggtggtttataaggggagatgagattctcatctgtctgcaatggtttatctgaaattatctgaaagcgaaggaccagataaattctacactcttctcaaggcctgtgtaacgggctggatgttctcaggtttctgcatcaccacactcccagcacagtcacgcacggctgaaacctaaggctatagttaatgcctcttgcttcttgac

SEQ ID NO: 430670 - DNA, 593 bp, Homo sapiens
gagagtgtaaagaaatcaggggaaaaaaatacatctgcttgtcttatttctacccactgtcctgcttgaacttcttcatgcccccagtattcctttcataggtgctctggccacagatgtccagtggccccatacacagtagctccacactgttgactgatgactcttagacacctctggataaaaggttctgcagggcccaccttgggtattagtagaatgactgggaatcagaaaaccaactcttcaaatatttatgtaggctgccaaaccagttttcattttgtttgcttttagtggaataaagccatcttttgttacattgctgacttagggaatagtctcattaaccatgctttggggrgtcctggatggagcaggagtcaggaaggggttggtcaaatacatcctattatgatttgtgtcctccctccctcctaatttctccaccctctgttgtcgtggactcctgtaggatgggacagatcttgtctctgtgtatcctctcccgtgtctggcgcacagtggaagtgcttcataaatgtttggtgaatgacattttgaattctgggggatccatgaatgatttatgc

SEQ ID NO: 430671 - DNA, 593 bp, Homo sapiens
gagagtgtaaagaaatcaggggaaaaaaatacatctgcttgtcttatttctacccactgtcctgcttgaacttcttcatgcccccagtattcctttcataggtgctctggccacagatgtccagtggccccatacacagtagctccacactgttgactgatgactcttagacacctctggataaaaggttctgcagggcccaccttgggtattagtagaatgactgggaatcagaaaaccaactcttcaaatatttatgtaggctgccaaaccagttttcattttgtttgcttttagtggaataaagccatcttttgttacattgctgacttagggaatagtctcattaaccatgctttggggggtcctggatggagcaggagtcaggaaggggttggtcaaatacatcctattatgatttgtgtcctccctccctcctaatttctccaccctctgttgtcgtggactcctgtaggatgggacagatcttgtctctgtgtatcctctcccktgtctggcgcacagtggaagtgcttcataaatgtttggtgaatgacattttgaattctgggggatccatgaatgatttatgc

SEQ ID NO: 430672 - DNA, 542 bp, Homo sapiens
ctcagcccagtctagagtgtcagggagggcttctatgaggcatgattttgagctgagtagaacttaaggagcaaaatggttaaaggaagaraggcagaggaaattggaggggccagaccaaaaggtggaaagaaatgtggccatttgggtccctggaagatagctctagcatggctagggtgccaaaagagagtgccaccaaatgaaggtggtgcagtgagcaggagctggtttccacaaggcccagcagggcacagtaaggacttggggtcgatctgaaatacaatgaaatttgagagattccagtcatacatatcatcaattgcagtcagctctataaccaaaaaaaaaaaaaaaacccaaatccacaaatgatgagacattgtccaatttctaatgccattgaaggcagagaaatctaaatcctccagcagctgcagctgaggctctgccatcctgcccaggaatgttcctggttatattaagttaactgaaacagcacagtcagctgcagtcctggctaaatgggctgagtgtggtcc

SEQ ID NO: 430673 - DNA, 551 bp, Homo sapiens
aaatgtgctggtggtgttcataaatttggggcagatggggtattgggcagagtctcactgcacagatgaccattgctccaaatgtgatcactcattggacaacagactgataactaagaatgggtggtcctctccgggtagsagtgagatgtccttaggctgctcagcttcaatgcagcaacctgggactagccaccttgcttacacaaagaggctgccatttctccgtctcactttctgcttggtctcatgtccccctcttctctctagcctgcacgcctatgtcagatgtcttccagtcactccttcagatccactctccattcttgctagcagactccataatccagaagtttggcccatgcccaccacatcaatgagctcccctgccctccagtttctagctgaagtcagctcatgggcagcactagcaggaggacagagggagagaagagaatgcattttgggcttattacttcagctctctccctaggggtcaccatgggctgacgataccctcagccaaaggtcactgctcctgcaagatgggc

SEQ ID NO: 430674 - DNA, 602 bp, Homo sapiens
tttggctgcattcatggggaggtgatgggtcattctctcttgtctccatttcagaagctgaactatgcactggaagaataaagttcctctttatctgggaaaatgacctcactgatcctggaggaagatacacactttgagcagatatatctgttcacactctattcgttttgaaaactcctactacatgctaggctttgtgccagaagctgagaaagcaatgaataaaatatggtcctttccctccaggtgctctgacataccatgctgcacttctacgaggtgaaaagatgaaaggcattctcttctgtaatacagaatcaacacattagacttagccactgccgtgcagtgctacatcactaaatacgtggggaarctttcataccaggagagccaggccttgaccctgcatttacaggctctgagaaattagagacatggtctactccaatatctgagatccagagagtgaaagcccaaagtctgggtgagttaccaccgcatcctgggatagacaatgaccacaaactcctcagggccaggacagaatcctcgggctcagcacctgcagagtccctcacaaataagtttgttttgag

SEQ ID NO: 430675 - DNA, 620 bp, Homo sapiens
attatccacttcatttaaccaacttagagtggatgaggagactaggatggtaccctgtgcctcctccaattctctaaattctgtattaaaatattgttttatgtattgcttatacctgcctacttccaaagataaatgaatactatattcatctctaatgggatactttagtccccagctctttttgatactggtggttataactgaactttgagggtacatagtagcaattattcttaccctatgcatactcccaagtccaatacttggccagaaacagccccttccttctcccaaggagctcaccgcactatcgcctctccttctcaaataagttcctagaatctgatctcctttcctgggcaaatctctatctataactaactaccttacactaaagttgggcaacgtgactgacactgtgaagacagtgtgactgtcttccccactgaccaccacwccctagagggcaagagcttataccccagtgcctagtactgtgaattacacacacaataatgaattaaattcttctggttcaattcttcctaaataccattcatgatcccttctgcaaagattgccctgcaaaaaatatttgttcttcagccttcccaaag

SEQ ID NO: 430676 - DNA, 565 bp, Homo sapiens
taaaattctctctgcctagaaaaggctctagcgacctgccttaatttcttttaagtcatgtgggatttattaataacaaaaccctaaatttgtagcaacatattttaggctctgagaccaattaaaccatccagtttatgtaactatacaactcctgcatgtagtttaggcacagatttgtggttcttcactgaaggtttacttcattacccacaacctctttttcccccatgaactctgtaatctcttcyaattctgcctcaaagtgcccaagcaccaaaaacaaggtcgtaggaacccaggccacatcccatatcccacaccctccagccaaaaggctccagggaaatttttaatttcttcctcacacacactgaatccttcgggtgttaagggaaacacccctgggccatggacagctggagaacatcccacttccaccccaccatcatttgtcatggacagatgtccaacagaagatacactgaggtgccactagatttgcttgtggttgaacccagagaagcctcaacttgttgagaaaaagtaaatcctctctcccacc

SEQ ID NO: 430677 - DNA, 211 bp, Homo sapiens
tgagtcaaataatggctgagccagcaagggtctttgacaccatttagtgaattgttttataaatgaaggttcaagaaagtgaagcaaaagacccaagattttccagcaagtaatggcataccacagtagaaactggctcttcagactcccagaccagtgtctaccctattctacaagggtacsattctcaacactgggccaatatcatggg

SEQ ID NO: 430678 - DNA, 593 bp, Homo sapiens
ggggacatcggcaagtgatcccaccattgtgagcctcagtttcttcatcattaaatggggatgataatagcctttgggttgctgtgaaggttagatgggatggtgttttaaaggaccactgcatgctgttttattctctccttcagcccctgcttgtgaagacacaggggccaagccctggggggacagcatccctggagtgctgtcagtgtcaactgagagagaatatatgagccagggaagcagaggggtagcagcacccaggtccagctggctrgggctgctcacagttactctgggatactgggaaagttatgccaatacatcagggatggatgtgcaacctattcttgctcacactccacatctgctccccctgtcagcttccttaggcagatgctgatgactttggggccctgggagagtgcagacagagagcctttctagatttatcctctgggtgaggctgtggggctcctgggatgcagatggtgttggcctcactgcccctgacagagaatgggatcccaccctgtgtgctcagttacagttcatgccccatcatgatgtgatgattctgcaatgtcaacagg

SEQ ID NO: 430679 - DNA, 629 bp, Homo sapiens
cctgggctggaatgcagtgtgatcacagctcactgcagtcttgaccaccccagctcaagcaatcttcccaccttagcgtccggaatwgctgggactacaggtgccactatgtctggttaatttttaaacttttttttttatagagacagggtcttgctattttgcccaggctggtctggaactcctgggctcaagtgatcctcttactttgacctcccaaagtactgcggttacaggcatgagccaatatgcttggcctaactttttcaaattaatttaagaatatttaagtggaatgccctaagtattataaacttcgggatgatttgatgattttatatcttgtcgaatgctgccattcgtttaatttgatctacaggtgattttcaagattttaataatcccttaaatagccaaaggcataattatattggtggcttagcaaaatgatgttctcttgttactatggaattgttttcaactacttacgagacaatcccctcttgaaagtcgacccatcactgtacctaccttttctccttttggtggtggatatcgtctgttttctaacttctctatttgcttcagtgatgacacatactagggagccaacactagttccctcatta

SEQ ID NO: 430680 - DNA, 518 bp, Homo sapiens
tattttattatccccctgtattttctgtgaatataagtctgtagagataaaatcagcagaaatgcatgttcttaattctaagaatttttctcgtagtttttytggaggggttaaatttttcctctatgctttcactttttggaatattttttgaatggccactcatcttttctcttttattttccattaaaaaattctaatttctgtgagctttttatgactttatcttttacttcttttattctgccataatctttcttgttctcaaatggttcttaaaaatagcattttattttagtttcattgctgtaatatcttctcctatctgtgagcatattaattacagtttttaaagaagttttcttttactccctgcattgccttttttcttacagccttctttgtcccatgtaatggttttggtctcttttcctgaagtagttttcctcacaagtgttggggatcattggctgtcattcatatctaaacgtgagcccctgaaaagctaaatagaagcc

SEQ ID NO: 430681 - DNA, 536 bp, Homo sapiens
ttctctccattcagcctgcgatattttaaatctcctaatcttaggaacatctcatcttgctctcwtctgtgcctgagtcctggattccagcacctggcttgttgatcccccactagagagtgaacctcatcttctgcctattgaaggaagggctgtggcctggcaatgtgggtgggacatttatcgaggcacaaactgcttattgcacagggttgtaaccaatcctcctgttttcagcccaaccttgctcctctgtctttcagggtacctagtacctatgatcagttcctgggcctttctggggtcctgtggtgcaaacaggcttgcctctgtttgccttcctgtggacacttagattcggttttctttgttgactcttccatgcagtttccatggtacaaaatgttattgacatttctcatctgctgttggctctactcctgttctttttgcttttgtatatttttagctccttaattcttttgctgtcattttatggggttttaggaaggagtggagataagcacctgtgttta

SEQ ID NO: 430682 - DNA, 536 bp, Homo sapiens
ttctctccattcagcctgcgatattttaaatctcctaatcttaggaacatctcatcttgctctcatctgtgcctgagtcctggattccagcacctggcttgttgatcccccactagagagtgaacctcatcttctgcctattgaaggaagggctgtggcctggcaatgtgggtgggacatttatcgaggcacaaactgcttattgcacagggttgtaaccaatcctcctgttttcagcccaaccttgctcctctgtctttcagggtacctrgtacctatgatcagttcctgggcctttctggggtcctgtggtgcaaacaggcttgcctctgtttgccttcctgtggacacttagattcggttttctttgttgactcttccatgcagtttccatggtacaaaatgttattgacatttctcatctgctgttggctctactcctgttctttttgcttttgtatatttttagctccttaattcttttgctgtcattttatggggttttaggaaggagtggagataagcacctgtgttta

SEQ ID NO: 430683 - DNA, 536 bp, Homo sapiens
agatgtttgttaaaacctccataaccttaattcagccagttccacatttcaggttctgttactttaaataccccacttctggctattacaagattcttttgcctgtatgggacataaacacaattcaaattagcgtatagccaaactacagaaggtccaggtgactggagccaggggcttcaatatctgctgtctaggttccttttgaagagtctcattgacttgcttaggacacacacccatccctcgaccagtgagggtagttatggggcgtgtaccgtgcttggcataacttggaatgggtgatcacctcttgatttgtcactgtcttcaaggtcatgtaaaaaggcagcaattcccatttggattgctatggtgaagttgggggaggaagggtaattccccaagagaagaggaatgctttcccagaagaggcagaggtgatgggctggmtgagccacacaattccactcaacgtttgcatctgtcatctcatttcattccagcaacaacccaccatgtaatagtagtacttt

SEQ ID NO: 430684 - DNA, 560 bp, Homo sapiens
tggttactctctttcagcaaatgaaaaaaaaaagaaaaaaaaaaaaagaaaagaggcttagggatattcaatgtcatgttcaaggttacacagccaagtgtggcagcacgagtgcttgagcccaagcatgtctgagtgcaaagtccgtgctcttaatattcttccctctcccctgccggtagcccaygatcttcggtgcagtcagtgtaggtgagtgtctagaggagctaaagagggtgagagagagcaccccaggaggagcccaggagggtctctagccactggttctgacattttgctttctctcccggctaccccaccgtcttctgcctgccatcttgtttccacttgagcttctgtcaccactcctccaggcgccacgtggggaggtggactgatctttgttcattacttaggtccaggtgtctgcatcctttctgcccatggttcagttgaagtaaagttggacttttccagaggaaatcttattaggaaatgcactggaaaaacaaatccaaaccagacaatacagaaatacaagagggaggaaatgaatgtga

SEQ ID NO: 430685 - DNA, 604 bp, Homo sapiens
tccatttcctgtgcaatgctacatgctgactctgtgctgggtgctgcagatgcaggtgagaaacaggcagtcctacttcctgactctaaagattgttctctgtccctacgtggagccccaggcctgcttggggggttgggaggtgctctgaagcaggtttgcctccaagtgtcacacwgccctactggaccttaggaaaattcatgaatgtagtgatagttcaggtacgcgtcaaggtgttctacttggggaggtgttgggggtgtaggagcctgatgttgttttgggcattgcactaaataggtgactggcccttgtaaggctggccctgtgatattcccttactacacagtcctgtgagcctggggtctctgggtttctgacagcctgcttcaaatgaggataaaatctgacttcctcattagcatcagtgacagatggcctgcatatcttgactaccctaagtaacaccaaataagaatgatacacacgtttgtgaaggatttcgtacttagagttgtcaaatcgtgtcggttttctacctctgcagtgtctctcccatctatcaattttccccttcccatctctaccgtcctagttcaat

SEQ ID NO: 430686 - DNA, 604 bp, Homo sapiens
tccatttcctgtgcaatgctacatgctgactctgtgctgggtgctgcagatgcaggtgagaaacaggcagtcctacttcctgactctaaagattgttctctgtccctacgtggagccccaggcctgcttggggggttgggaggtgctctgaagcaggtttgcctccaagtgtcacactgycctactggaccttaggaaaattcatgaatgtagtgatagttcaggtacgcgtcaaggtgttctacttggggaggtgttgggggtgtaggagcctgatgttgttttgggcattgcactaaataggtgactggcccttgtaaggctggccctgtgatattcccttactacacagtcctgtgagcctggggtctctgggtttctgacagcctgcttcaaatgaggataaaatctgacttcctcattagcatcagtgacagatggcctgcatatcttgactaccctaagtaacaccaaataagaatgatacacacgtttgtgaaggatttcgtacttagagttgtcaaatcgtgtcggttttctacctctgcagtgtctctcccatctatcaattttccccttcccatctctaccgtcctagttcaat

SEQ ID NO: 430687 - DNA, 539 bp, Homo sapiens
gctggttttctgtctcacatgaacatccttaaatttattcacagtgttaatacaatttgcgggataatttatacttgcattttgtaaatatagttcaggtgtgtgtataatgggacgattattgatgtgtttgtgcagggagaaagagattgcaaatggaacttcaagatgaattctagaagcagcaccgcctctgactgtgaggaaaaataggcaaacctttaattctttctggttcttgatttctttttaagacttgtcagctaaagaaaggctrgtgtaaaggaggcttgaaccaaggctagtgtaattttttctacccgaaggaagccttcaaactgcctggctctgagagaacactgacggtggcgttggatgggaatgactgttcgtcagcatgtgacttctttaaggacagcccatttgtctggaggaattacccacatttcgtggataaggatttgtcctttcttttcttcattacaaaaggtatgatattagactttagtgattgatctctggcctcaaattttccctag

SEQ ID NO: 430688 - DNA, 546 bp, Homo sapiens
gggcaactgtagttaacaacaatgtattctatttaaaaatagctagaagagaggacttgaaatgttcccaacgtatagaaatgagaaatagtggaggtgatggagaccccaaataccygacttgatcattacacagtctatgcatgtgacaaaatatcacatatactccataaatatgtacaaatatgtgtatcaataaaaatgtttgtttaagccaatatgctaagaatggctgagcagataaaaagagctggggtctttagtaatatcactgccttgccacacacgcatacaatgaaatacctacctccagacttttatgtaagatacataaatgtcaatacaataaatgtctttatggcctaagccactatgataagactaaaaaatcaaataaataagaagaatcatctacataccccacatcctgactttcctccttgaaagtaaggcatgtatcctttgagtgccttctctatgcatttgtatgcaaatagttatctctaagtgtgtttataacataaatgtaacagttttataacttga

SEQ ID NO: 430689 - DNA, 582 bp, Homo sapiens
tgaaggagaaaagagaattctaggcagagggaacaggacagaaaagacacagatggaagtagaaaggctatgagtgactaagttggaagtgtaggttgaggtcaggttgtgaaggaccttgaattgagttctgcaggcagtaaggagtcaccaaagatttttgagtaagggagccaagtgctcccctgccagcctgaaacaactgggttacttctaagaagcaatgaactattagctgatgtaaatcatgctatttgggggcctctttgctgcatcagcttagccttaccctaaccaataaaaaggccctcattttacaaatgaggaacctgaagcttagaggagacaagtgacttaaccagcatcatgttaccataactctaccacgtagaaccagggccagacaggaaatctgggcctagatattccatagccccaaaagatgtgatgatggtggcggtggtggcagtggtgatggtaatatgatggtgatgatggagattttttgttttcgataaactggtrtttcaaggttttgtttttatacctcttctttacatttttctattttttaatgtaaaa

SEQ ID NO: 430690 - DNA, 576 bp, Homo sapiens
tggaggagagcaagatgcctttctttcctaaagaatcaaaacagattgttgtgacatgttctcagtcataatgacagattggagccactgtttgtggtacaagtcagaaaacaaagcaacttttttttccctaaaattgtaacctttgattgatttctgttgagatttgggcatctcccagtttgtcagtgatgttgatggagttcacaaaaatcttaaaagccagatgcggacacagagactgatttaaagactggaaaaggaagcctcttggccttgagggcaagttttagggatgcttagtgtgratgctgttcaaatgttgttccctagaaatgagaggataatagaaaaggaatagttggcactccctcatcctgggcagcactctgcttctgaaacaggaatactcctacaaataaaagctatgcaagccatcctgaataaggccggctctgcacaatcaaaccaatggatcatgcccagccggggatctgtgtatcccccgatcagtccatgcaaaggtcagtcctacatcacatctcgtcagaatggctgaggcacagaagattggtt

SEQ ID NO: 430691 - DNA, 466 bp, Homo sapiens
cccatgaccccttcagaaatttcagaataaagacagtcagtcttgagctcagagagttggagtctgtcagtccagaggggcgtcttctcagcattagctccaaaccccagcatttgtgtctccatgaagttgtacttttcatttcctccgcattcttctcyagtcaataggtcatggcacatggtgcctctgggcctggtatgttctggtatgttttattgagagcattctctttggcctctactagaagcttggcacgctttatctcatgttatctttatttcatgaggttgatgtaatcatcccccctcctttttttttgagatgaagtcttgctctggcgaccaggctggggtgcattggcgccgtcatagctcactgcagcctcgacttcccaggcacaatcaagaaacaccctccacctcagtctctcaaatagctaggactataggcatgcaccaccaca

SEQ ID NO: 430692 - DNA, 466 bp, Homo sapiens
cccatgaccccttcagaaatttcagaataaagacagtcagtcttgagctcagagagttggagtctgtcagtccagaggggcgtcttctcagcattagctccaaaccccagcatttgtgtctccatgaagttgtacttttcatttcctccgcattcttctccagtcaataggtcatggcacatggtgcctctgggcctggtatgttctggtatgttttattgagagcattctctttggcctctactagaagcttggcacgctttatctcatgttatctttatttcatgaggttgatgtaatcatcccccctcctttttttttgagatgaagtcttgctctgkcgaccaggctggggtgcattggcgccgtcatagctcactgcagcctcgacttcccaggcacaatcaagaaacaccctccacctcagtctctcaaatagctaggactataggcatgcaccaccaca

SEQ ID NO: 430693 - DNA, 466 bp, Homo sapiens
cccatgaccccttcagaaatttcagaataaagacagtcagtcttgagctcagagagttggagtctgtcagtccagaggggcgtcttctcagcattagctccaaaccccagcatttgtgtctccatgaagttgtacttttcatttcctccgcattcttctccagtcaataggtcatggcacatggtgcctctgggcctggtatgttctggtatgttttattgagagcattctctttggcctctactagaagcttggcacgctttatctcatgttatctttatttcatgaggttgatgtaatcatcccccctcctttttttttgagatgaagtcttgctctggcgaccaggctggggtgcattggcgccgtcatagctcactgcagcctygacttcccaggcacaatcaagaaacaccctccacctcagtctctcaaatagctaggactataggcatgcaccaccaca

SEQ ID NO: 430694 - DNA, 504 bp, Homo sapiens
tagagtccaaagaaatctaggcagtacacataacttgatttatttttatttaaaaatgtactatttttccccttactctttatttccaagcctccaccactctgcattgctggttggttccaactaaattgaaggagaaaaaaacactaatacattcactttgaggtgaagtaatttaatattatccccctgttgcatcaggcagcagtaaaactaatgaagaagggtcaggcttatgttttctagctgtttattaaacccataataaatctaggcccataataaatctaggtccatgctaaatcataaaagcatayggtatatgaatttgaaataatgacaaaataatatgtaatgtctattggtgagtgtaattgctaactggagtgtatattcattttgtaatataagatatacaataattcagtacttgtccccaatagcctgctcccagattggtaaagttatctctttacagaggtaaaggataaaatgctgcctaaa

SEQ ID NO: 430695 - DNA, 556 bp, Homo sapiens
ggtgtccagatatctctttggcatactaatttcattgtctttggatatatatatatatatccrgtagtggaattgctggatcatatgatagctctatttttaattttttgaggaaactccatattgtttttttataatgactgtactaatttccattcccacaagcagtgtgtagggtttccttttcttcacatcgtcacaaacacttggtatattttgattttttgatagtagtcattgtaactagagtgaggtgatgtcttattgtagttttgattttcatatccctgatgattagtgatgttgaacattttttaatacatctgttggtcatgtgtatgtcttcttttgagaaatatctattggacacaaactattgtacattatatatgggcaaactatagtggaaaacctttttaacaataaataatgcaagctgcaaactcatgtagattgcataaaaataagaagtttatcttttttatgctagcaatacatactcttcctcatagaaaaacatcagataatctattgcatcttcacattaaaaatatac

SEQ ID NO: 430696 - DNA, 556 bp, Homo sapiens
ggtgtccagatatctctttggcatactaatttcattgtctttggatatatatatatatatccggtagtggaattgctggatcatatgatagctctatttttaattttttgaggaaactccatattgtttttttataatgactgtactaatttccattcccacaagcagtgtgtagggtttccttttcttcacatcgtcacaaacacttggtatattttgattttttgatagtagtcattgtaactagagtgaggtgatgtcttattgtagttttgattttcatatccctgatgattagtgatgttgaacattttttaatacatctgttggtcatgtgtatgtcttcttttgagaaatatctattggacacaaactattgtacattatatatgggcaaactatagtggaaaacctttttaacaataaataatgcaagctgcaaactcatgtagattgcataaaaataagamgtttatcttttttatgctagcaatacatactcttcctcatagaaaaacatcagataatctattgcatcttcacattaaaaatatac

SEQ ID NO: 430697 - DNA, 572 bp, Homo sapiens
ttttggtcatcacaacaagaaaaggggaaatagtttgatcttcattttccttaaggcttataaaaagattaaaatcgtcttaaaaggaatctaaaacaaatacttcacaataatttagaaagtttatatacacactagaatacattagcagcatgattttatggggagaatcatgccagataaaactaaaaagctccaaacaccacaatctgactaaatgtttgagagatttaaataatattagaccatactattccacatcaggaatgttagcttaaacagtctttgcttgatggtccctctgtcttaaaaaggtttgcagtaaacaaggtactttgggtttgtgacaagcaggcaacacartgtcttgaaatttaatgtgtgtgtttggtataattgactagagctcaggcccagtactgaaaaccattagaaaaagcacaaagaagataaaagacaaactgacagcaaagtgcctttctgtaaaccgtaaggcaatgcctaccaagtaccaaaatgtcttttgtgcaggccgatagcagtctttaccatcactaacttttttttaagtt

SEQ ID NO: 430698 - DNA, 511 bp, Homo sapiens
tgagtgctggggcagggtcttggctcccaatgtgccaggttagcctttgttgcagagtggtatgaggtctgagagatggcaggaggggcagggaacattcaggactcagggcaatggctgcttcctaaccagcacagaagcactgaatattttaacaattggtaagcccatcccagactcggtcccctgaatacatgccttgcttaaggccacaattacaacttaaaacacaccactctcacttcctgcctgagagcttgaccgtagattcacagccgtggactcctctagcaataattatcagaagaagctactttttctcatttgtcagtgagtcaatactygtcagtacaaccatcatagaagtagcagaagtcctcttcctaaaatcatctttgccatgaaggaaaatgcatgcgtggatggaatccatccttttaattgttcagagatgatttgcatgagtgaaccaccccaactgctccttttagcattgaacattcagatcatg

SEQ ID NO: 430699 - DNA, 511 bp, Homo sapiens
tgagtgctggggcagggtcttggctcccaatgtgccaggttagcctttgttgcagagtggtatgaggtctgagagatggcaggaggggcagggaacattcaggactcagggcaatggctgcttcctaaccagcacagaagcactgaatattttaacaattggtaagcccatcccagactcggtcccctgaatacatgccttgcttaaggccacaattacaacttaaaacacaccactctcacttcctgcctgagagcttgaccgtagattcacagccgtggactcctctagcaataattatcagaagaagctactttttctcatttgtcagtgagtcaatacttrtcagtacaaccatcatagaagtagcagaagtcctcttcctaaaatcatctttgccatgaaggaaaatgcatgcgtggatggaatccatccttttaattgttcagagatgatttgcatgagtgaaccaccccaactgctccttttagcattgaacattcagatcatg

SEQ ID NO: 430700 - DNA, 511 bp, Homo sapiens
tgagtgctggggcagggtcttggctcccaatgtgccaggttagcctttgttgcagagtggtatgaggtctgagagatggcaggaggggcagggaacattcaggactcagggcaatggctgcttcctaaccagcacagaagcactgaatattttaacaattggtaagcccatcccagactcggtcccctgaatacatgccttgcttaaggccacaattacaacttaaaacacaccactctcacttcctgcctgagagcttgaccgtagattcacagccgtggactcctctagcaataattatcagaagaagctactttttctcatttgtcagtgagtcaatacttgtcagtacaaccatcatagaagtagcagaagtcctcttcctaaaatcatctttgccatgaaggaaaatgcatgcgtggatggaatccatccttttaattgttcagagatgatttgcaygagtgaaccaccccaactgctccttttagcattgaacattcagatcatg

SEQ ID NO: 430701 - DNA, 529 bp, Homo sapiens
aataattgcctactttttcacaggtagcaagaatcagagcctgggttcaattcatatctctggttcactatcatattcctagtatttggttcagtacctggcacatgaccaacaccacctcagccccaccccacacatacacacggagtggtgggtrgatggaagattggatgggtacatggctggatgaatggagggatgattggaccaacccgaacccaaatgacaccaaaaccacaccaccatactgcctccccagggttctaaaataccatgtaaggcaggctacaaatgatttctacagatattggttaaagccagaggggggcagagactatggatctcagaaagcaaaatccagccttagtgtgaggaactggtgggcaacagagatgttggacaccagaaattgtggtcagacaagagaatgttaggaaaccagaccaaagagtcagagcaaaaagccaaaaattaagagcagtcctaagtggcagtcatggggcaccatccccgcacagaaacagagcct

SEQ ID NO: 430702 - DNA, 529 bp, Homo sapiens
aataattgcctactttttcacaggtagcaagaatcagagcctgggttcaattcatatctctggttcactatcatattcctagtatttggttcagtacctggcacatgaccaacaccacctcagccccaccccacacatacacacggagtggtgggtagatggaagattggatgggtacatggctggatgaatggagggatgattggaccaacccgaacccaaatgacaccaaaaccacaccaccayactgcctccccagggttctaaaataccatgtaaggcaggctacaaatgatttctacagatattggttaaagccagaggggggcagagactatggatctcagaaagcaaaatccagccttagtgtgaggaactggtgggcaacagagatgttggacaccagaaattgtggtcagacaagagaatgttaggaaaccagaccaaagagtcagagcaaaaagccaaaaattaagagcagtcctaagtggcagtcatggggcaccatccccgcacagaaacagagcct

SEQ ID NO: 430703 - DNA, 607 bp, Homo sapiens
aatacaaacacgcatatcttcaaatcctgtgcactggtgtattagtccgtttacacactgctataaagaacttccctgagactgggtaatttgtaaaggaaagaggtttaattgactcacacagttcagcatggctggggaggcctcaagaaaattacaatcgtggcagaaggggaagcaggcrccttcttcacaaggtggcaggagagggagggagtgaagagggaaaagccccttataaaaccatcagatctcctgagaacccactcactatcaccaaactgcctccatgatccaatcacctccctcccttaactcgaggggattacaattcgagatgaaatttgggtggagacacagagccaagccatatcaactggctatgagagaaacatgcatctgcctgtaatctttctaaaggtcagtatcacacacacacacacacacacacacacacacacacacacacactctacctgatgagtcacaaaatccaccttccctgtgacacagaaacaaatcaattgctcaagagaagcagagttcttctgatactaaaaccagacaagagactatcccttggttcttcattataaaaacactctgg

SEQ ID NO: 430704 - DNA, 550 bp, Homo sapiens
atcccttggttcttcattataaaaacactctgggcaccctcagaaacatccttgtgaaaattctctccacaagcggctcaccatcccaggcctggctctggtctcaggcatacagttctttcctgactggaggagcagaacaaggcaaaaacccaggccatgcagacaggtggtactgaggacagccaagatcactttcccctgtgaggggccaagtctctcctgtccatatgactaaatcagctttttccaattaccctggtgcgttttgactgccaacagttacaaggagaggaggtgagaaaaataagaaaaggacaaaaaccataagaaagagatggagtgttcatttattagcaggtggggcatgtcagcagagaatgggattaatgcccttatgaaagagtcttcagagagctgtccrgccctttgactcctttttctatgtatgcacatagcattccttccctctaccaggtaaggatgtaacaacaggcaccatgttggaagcagagagcaagcccttaccagatgccaaatctgccaacac

SEQ ID NO: 430705 - DNA, 547 bp, Homo sapiens
ggcacatattctaaaaacatattcttttattttttgtttatctgggaatgtatttgatatcttgaaaacaaaatacaaatgagagtggttgatggatgaaacaggtagaaaatggacaacctagaacatcctgtgagagagttgtaaggagaggccacctttgtatgtgaccagacatctaacagtaagaactactgtgtcatggagtgcaacctgggcacacatgttatgtcatcttgatttttgagaggtagttttgcttgatatagaacttctagttgacagttttttttttctttcagcactttgaatatatcattgccttctggtctccatttttttccaatgaaaactcaattctaatgcttttcattttgtattcttgtgctcttcctgttctaatctttgcattttcagatacatgcatcttgtttccatagtttcttctcattagtagagaaaaacttatttggtccacatataggataaatatagtgttatttactttcakattttggaaaggtttctggtatcactgttgttgttg

SEQ ID NO: 430706 - DNA, 541 bp, Homo sapiens
gttttgatgcagcatgaatgccctcaccagaagctaagcagttgctggtgccatgtttcttgaactcaccagcctgcagaaccataatctaaataaaccccttttctttataaactacctagtctcaggtactctattatagcaacacaaaacattaagacacccagctaagtacctgggatcaaagcagaattctagtgtgacacagtggaaaggcccttgcccttggtrtgaggaaagcatggcttcctcctgcttatgtgatcttaagcaagttattgacctctctgagccttattttcttacttataaaatagggctaataatgactattgttgcagggctagaattatatataaggactagaattgtaaggactagaattatatataaaatatgtggtgcactacgtgggacatgggacataggagttatttaataaatggtaactgcttatattattataaatgcaggagctgatcatttaagcacagcctcactcctaaataatctgtcaaagcatagatgcaggtactggatg

SEQ ID NO: 430707 - DNA, 510 bp, Homo sapiens
ggtagattcagttattagttattactcagaaccaagatargattccatttgcctgcatgggaacaaagatcagagctggagtgtgtttagaagtcacctaaatattgtactagaattcctcatattcccatttgaagcatctgatgactctgataccaaaggagcatcatttaagtttgtgaagttctttttccacaatgcagtcaatgagttaacactgttctagttcccttggctcagtaacaaattactccaaaacatacaggcttaaaacaatgacaatgacatttgctttgcttgcaaatctttaatttaggaagggcttagcagcatggctggtctgtgcaccactcagtttcagctaaggtgaaggctaggactgcaatcaactgtgagagactccttcacccacatgatgctggctgctagctgagactttcaggactgtcggctagaacacctaactcacggcctctccatgtgacctggtcctgaccctggaccttgtca

SEQ ID NO: 430708 - DNA, 489 bp, Homo sapiens
actcaccctacaaaaattactaaaaaagaattttctaggctaaaatgaaacaattttagacagtaatttaagtgcacrtgtagaaatagagtactgataaagttaactacaaaggcaaacatgaaaggtatttttgcttgcagtttttttattcttaaaagacaagtgcatagagcaataattaggtataatttgtatgacaatggtagcactaagtaacaggaaaggaattcagctatattggtgcaaaggttttggatagtaagaaattaggttgatattaattcaagatagattatttaaaatgctaactgaaatccccaaggataccactaaaaaataacttaatggacataggaaaagaaacaataagataattaaaatgatagaaaatagcattttaacacaaaagatgacagtaatggaggtagaaataggcaaaagcacatgagatacatgttaaaaatggcaaaatgatagacaaatcta

SEQ ID NO: 430709 - DNA, 587 bp, Homo sapiens
taaattagaatgcatattatattggggtcaactagatctatttttgatgtacggatttcaactgaggtctgaatacagtattgatgttgcatttttttgttgtttttggactcctaacatgtctgccatatagctgctcaatacatgttaagtaaataatayattttttgaagtttgcttttgtttatgaaaaatacactctcacctaatatgcctctagtagcaatttcagcaagataccacatgatggggttgctattctatgaacaaagacttccaaaaagaacatgcccttgctgtatttctggatagggtaaaacaatttaggaataggcaggaaaaatttggaagttctcaaaaaggactaccttcttttttagactaaatattgtatagttgttttataacagatgtcttataaaaggtaaactagagtggtaactctcaactgtgaatgatatctaaattacccaaggagtttaaaaaaccaataaatcattttcccttactttggaccttctgaatcagaaatgcttagactaggcaagaggatccatattgaaaaacaaaaccttggaaccacctca

SEQ ID NO: 430710 - DNA, 506 bp, Homo sapiens
ggatttatacgttatttcttatcaaaaaatataaaatgtctatagaatacataaaataatgttttaatttatgagttgtgtgtaatartagataagcatttccaagaggtatcaaagcagctttactttctaaataaattaaaagttacaaaaatacatatttgactttgcaagaaatgaaatgataacattgattgggattgaatagcatgttaaccctcttactttttgagtaaagctcattgagtgaagaatctgtacctagagagagaggagaatccaaaatatgtattttcataatgtttttctcccagtttgcttccaatgatattaaaattgcatggagatagaaaattcagtcagatttaacttctgttaaaaattagccagtgtgggatttatgcatgattcataatttactgtcatataattagtgatggaaaaagacaatgagcctggaacagaagaaaatcatcctgctggtttatgattttttttcagataat

SEQ ID NO: 430711 - DNA, 506 bp, Homo sapiens
ggatttatacgttatttcttatcaaaaaatataaaatgtctatagaatacataaaataatgttttaatttatgagttgtgtgtaatagtagataagcatttccaagaggtatcaaagcagctttactttctaaataaattaaaagttacaaaaatacatatttgactttgcaagaaatgaaatgataacaytgattgggattgaatagcatgttaaccctcttactttttgagtaaagctcattgagtgaagaatctgtacctagagagagaggagaatccaaaatatgtattttcataatgtttttctcccagtttgcttccaatgatattaaaattgcatggagatagaaaattcagtcagatttaacttctgttaaaaattagccagtgtgggatttatgcatgattcataatttactgtcatataattagtgatggaaaaagacaatgagcctggaacagaagaaaatcatcctgctggtttatgattttttttcagataat

SEQ ID NO: 430712 - DNA, 506 bp, Homo sapiens
ggatttatacgttatttcttatcaaaaaatataaaatgtctatagaatacataaaataatgttttaatttatgagttgtgtgtaatagtagataagcatttccaagaggtatcaaagcagctttactttctaaataaattaaaagttacaaaaatacatatttgactttgcaagaaatgaaatgataacattgattgggattgaatagcatgttaaccctcttactttttgagtaaagctcattgagtgaagaatctgtacctagagagagaggagaatccaaaatatgtattttcataatgtttttctcccagtttgcttccaatgatattaaaattgcatggagwtagaaaattcagtcagatttaacttctgttaaaaattagccagtgtgggatttatgcatgattcataatttactgtcatataattagtgatggaaaaagacaatgagcctggaacagaagaaaatcatcctgctggtttatgattttttttcagataat

SEQ ID NO: 430713 - DNA, 542 bp, Homo sapiens
gggacatcctagactcacattcatcagagactgactttctgttgttactattgttccttttcccatatttcttaattactttgacaccaaaagacatctaataagcaaactctcagcaaagaatagaacatcagctttctagggaagtactttgascatggcagagattcaagtcaggatcagagttcctattcaaaaccggcagatcatgtactcaatgtggtaaagagccccaaggtcaaacccaaaatacagtgaattaggagccatagattggattattacgagagttcaagatacctagatgagaacaaagtctctcaatgcttactcactaggcattttcccatttcaggtgtccataggtcaaacttttccactgcgttaaggcttaatactacagcagagctgagcctgtgaaagcatctggtgagatgctagagctccaggtctgtcctctgcaggcagaattctatctgatgcagcatatatatacctgcagttccaagattctgtgctcttcaataacagaggcctactag

SEQ ID NO: 430714 - DNA, 542 bp, Homo sapiens
gggacatcctagactcacattcatcagagactgactttctgttgttactattgttccttttcccatatttcttaattactttgacaccaaaagacatctaataagcaaactctcagcaaagaatagaacatcagctttctagggaagtactttgagcatrgcagagattcaagtcaggatcagagttcctattcaaaaccggcagatcatgtactcaatgtggtaaagagccccaaggtcaaacccaaaatacagtgaattaggagccatagattggattattacgagagttcaagatacctagatgagaacaaagtctctcaatgcttactcactaggcattttcccatttcaggtgtccataggtcaaacttttccactgcgttaaggcttaatactacagcagagctgagcctgtgaaagcatctggtgagatgctagagctccaggtctgtcctctgcaggcagaattctatctgatgcagcatatatatacctgcagttccaagattctgtgctcttcaataacagaggcctactag

SEQ ID NO: 430715 - DNA, 576 bp, Homo sapiens
aatcctttgtgtccctgaatagtatttcattttatggatgtactatactttgtatatcctattgaaggacatttaattgcttcctgtttttggtaattatgaataaagtggctataaacattcatatagcgatttctgtatgcacacaaattttcaaatcagttggataatctaggaacatgattgctggatgatactgtaagactgtaagtaactttataagaaactgttaaactgtcttccagtgtggctgtgtcattttgcattcccaacagcaatgaatgaaagttcctgttggttcacatccttgccagcaattggtgttgtcatatttttagaatttagtggttctaatagttctagtaggtgtgcagtggtaactccttattttaattttcatttctctaatgacaaatgaggtggagcatwttttaatgtgcttatttgtcatgtatatatcttctttggacacgtgtctgctcaatctttcacttttaagttggattgcttttcatcctgttgaattttaatatttaaagttttaagctaaaaagacaatgtgttcttgcagattgt

SEQ ID NO: 430716 - DNA, 584 bp, Homo sapiens
ttattctttatttcatctcaactttcactatcagatttagttaaatgtccttttctgwccgagcactcctgctattttacttacatggaagcttctcacatctctgtccccaaagttgtccctctgaaagtctggtctgttttgtaaggttcggtttaagatcaatctcttttatggggcctttatttactattccaggtgttggaaagtaaaataatgagcagtaacattgttgacaaaatatgtgattgcattcatgcccaaattgtattttagaaataggtagacttatttttaaaaatctgaagaggaaatgtgcagacacacaccctcccacaccccataaaagtgaaggaatattagaaatgcaaatttacaccaaccaataaatggaaagtaaatgtcagatgttttacaggtctgactgtattatagtttacctgcacttggaaggaaatcaattagtatttggataatcatcagataatgactatagatatgcaaatatagtagatttggctatcaaacctcttttaaaaaaaataattaaaaacctggtatatgaaacactggacatgccccaa

SEQ ID NO: 430717 - DNA, 567 bp, Homo sapiens
aagtcttatttcaataaagattaaaatgtgagaatctaaaaacaaaaaagaccaggcacggtggctcacacctgtgatcccagcaatttgggaggccaaggcaggcagatcccctgaggtyaggagttctagaccagcctggccaacatgatgaaaccccatctctactaagaatacaaaaattacctgggcgtggtggtgcacacctgtagtcccagctacatgggaggcagagataagagaatcgcttgaactccagaggcagaggttgcagtgagctgacattatgccattgcattgcagcctgggtgacaagagtgagattccatctcaaaaaaagtaaaataaaaaaataaaagctatgaaattctcaatatcattagtcattaaggaaatgcaaagggagatcacaaagaaatatcaatatacaatcgctgaaatggctaaaaataaaaaataaagattgaaaaccacattttggcaaggatgtggagcagctggatccatcatctgttgctatttgagagtacaaactactttggaaaatgttttttatggagttaaacg

SEQ ID NO: 430718 - DNA, 565 bp, Homo sapiens
atgccattgcattgcagcctgggtgacaagagtgagattccatctcaaaaaaagtaaaataaaaaaataaaagctatgaaattctcaatatcattagtcattaaggaaatgcaaagggagatcacaaagaaatatcaatatacaatcgctgaaatggctaaaaataaaaaataaagattgaaaaccacattttggcaaggatgtggagcagctggatccatcatctgttgctatttgagagtacaaactactttggaaaatgttttttatggagttaaacgtactcttaccaggtgayagcaatagcactcccaggccaagagaaattaaacacacacacaagacttgtatatgcatgtccatggctgctttacttataatagcttcaaactagaaacaatcaaaatgtccaaaaacaattgtatggaaaatcaaattgttgtgagatattcagataacgcatactactcaatgattaaaaaggaccaccgcaacaaaaataagtcacaagcacatatcacattattttatacatatgtgaaattctagaacaggtcaaactaat

SEQ ID NO: 430719 - DNA, 261 bp, Homo sapiens
gtagaacatggacaacatatactatatattaaataaaaaattgtttgggatgaagggtttataacttcaggtggatgctgagcaggtaaytcggcagaataagctttataaaaagccaaagtagatggtgtggtttggagggtgaactccagctttgcaacttggagttcagtgatcagaggcatatttcaatgtctttttaggcaagatacacaacatacctttccaaacccataatgtgtttgagaaagattaaaaact

SEQ ID NO: 430720 - DNA, 509 bp, Homo sapiens
gatgagactggaggacatagtgccaagtaaaatgagccagacatagcaagacaaatattgtattatctcacttatatgtcaaatctaaaaaagttgaactcatgaagacagagcattgaatggtgtttgccaggcccttgagattgtgggaaatggagaaatatggattaaagggtacaaagtttaagtcaggcatgatgmattacctctgtaaatctaatgtacagcatggtgaatatagttaatgatgctgcatggtacacttgaaatttgctgaaagagtatctatcttaagtgttctcacacaaaagatcactccatgaggtgatatattagcttgatggtggtcatcactttacaatgtgtacatatattaaaacgggtttgtactcctcaatttatacaacttttgtcaattgtatgtcaataaagctgggggaaaatgtgttctgattaaaaagacacacaaaaaaaaataacaatgagaagagaaagctcatgggcatctt

SEQ ID NO: 430721 - DNA, 509 bp, Homo sapiens
gatgagactggaggacatagtgccaagtaaaatgagccagacatagcaagacaaatattgtattatctcacttatatgtcaaatctaaaaaagttgaactcatgaagacagagcattgaatggtgtttgccaggcccttgagattgtgggaaatggagaaatatggattaaagggtacaaagtttaagtcaggcatgatgaattacctctgtaratctaatgtacagcatggtgaatatagttaatgatgctgcatggtacacttgaaatttgctgaaagagtatctatcttaagtgttctcacacaaaagatcactccatgaggtgatatattagcttgatggtggtcatcactttacaatgtgtacatatattaaaacgggtttgtactcctcaatttatacaacttttgtcaattgtatgtcaataaagctgggggaaaatgtgttctgattaaaaagacacacaaaaaaaaataacaatgagaagagaaagctcatgggcatctt

SEQ ID NO: 430722 - DNA, 546 bp, Homo sapiens
gacttacaaagcactcactccttccagtatctttcttttattccatactgcctggcaagaaacatctttatttttttaattcccaactcaagaacttcctaagtctgcaaagcccttcctgacacaagttgattattgctgcttcatgccactgccgtctccaaaatttacatttattatagcactaatcacacagtagtataaagatttggagttggttttgttttctatatttctgtctctcttagaacactgattgttgcttgaggggagaggtcgcttcttgttaaactctgtcytcaacaccttctgcagagcttgcataaaaagaaaagagtaaatattttaaaagcactcaaagagttgagctttagcaaaagcaggctgatttgctttagaccaaatcgccctccaagaacaactagaaaaagcatacgtgaaagtttttttaatgttacaatgtactagaataccaaggagataagttttcagagtctaggatccagaagaatagggatgcgcagaggggtaaacactacacttaat

SEQ ID NO: 430723 - DNA, 515 bp, Homo sapiens
ggtaaacactacacttaataaagcatttacctctggaggagtgatttaccagagtgactgagtgtcctggaatctatcagttgtcaccacttaytgaggctgagggacagacacttgaattcaaagcctcccaaagacatagaggccaggcaaatctccccaggtttgggttggcaagaggtaaaattacatcccaggagtagggcaaattgaaaataaataactctcttaagatctaaagctcagttacaaataatctcattctgatttaattacaatgatatatcaataacagagctacctgaagcaaaagtaaatcatctctggaggaagatagcctcaaattttctgtatgtatttccataaacaagcaaaataatcagacataggacaatatataaatgatagaaaaattagcagacaagtttaaactcagaaagtgaataaaatagaattatcaggcaaggactttaaaataactatgtataatatgtttaagaaattatatcaaggag

SEQ ID NO: 430724 - DNA, 572 bp, Homo sapiens
agaaatgaataatctaacaacttcacctggattgactgggatttatgtgactgttaaaattaggtgactaytgggcacttgagataaatgtctttcaggatattacctaatatttgacttagcaataaattctttctgctattatgacctaaattattcttgcagttaacattctacttgtctttggtcatattttacttctctgtttctaaaaactactctcaagatagaccacactgaataaatagacctttgactagaagagcaatatgaagactgattgttaaaataacagaaaaccaatctggtttgggggtacttatattatctgaataagtcctgaaattcacacatatattcaactcacttttttagctaaccctggtacaaattagtatatgacagtggcaatttaccaaatgggtttctgaaatcactgggaagtctaacggtgttttcccagagagctaaattattatttgctaataacagcacaataggaggagttggtttcatatttttttggtggtatttgacttgatttttcatcactttattccaattattggtta

SEQ ID NO: 430725 - DNA, 572 bp, Homo sapiens
agaaatgaataatctaacaacttcacctggattgactgggatttatgtgactgttaaaattaggtgactactgggcacttgagataaatgtctttcaggatattacctaatatttgacttagcaataaattctttctgctattatgacctaaattattcttgcagttaacattctacttgtctttggtcatattttacttctctgtttctaaaaactactctcaagatagaccacactgaataaatagacctttgactagaagagmaatatgaagactgattgttaaaataacagaaaaccaatctggtttgggggtacttatattatctgaataagtcctgaaattcacacatatattcaactcacttttttagctaaccctggtacaaattagtatatgacagtggcaatttaccaaatgggtttctgaaatcactgggaagtctaacggtgttttcccagagagctaaattattatttgctaataacagcacaataggaggagttggtttcatatttttttggtggtatttgacttgatttttcatcactttattccaattattggtta

SEQ ID NO: 430726 - DNA, 572 bp, Homo sapiens
agaaatgaataatctaacaacttcacctggattgactgggatttatgtgactgttaaaattaggtgactactgggcacttgagataaatgtctttcaggatattacctaatatttgacttagcaataaattctttctgctattatgacctaaattattcttgcagttaacattctacttgtctttggtcatattttacttctctgtttctaaaaactactctcaagatagaccacactgaataaatagacctttgactagaagagcaatatgaagactgattgttaaaataayagaaaaccaatctggtttgggggtacttatattatctgaataagtcctgaaattcacacatatattcaactcacttttttagctaaccctggtacaaattagtatatgacagtggcaatttaccaaatgggtttctgaaatcactgggaagtctaacggtgttttcccagagagctaaattattatttgctaataacagcacaataggaggagttggtttcatatttttttggtggtatttgacttgatttttcatcactttattccaattattggtta

SEQ ID NO: 430727 - DNA, 572 bp, Homo sapiens
agaaatgaataatctaacaacttcacctggattgactgggatttatgtgactgttaaaattaggtgactactgggcacttgagataaatgtctttcaggatattacctaatatttgacttagcaataaattctttctgctattatgacctaaattattcttgcagttaacattctacttgtctttggtcatattttacttctctgtttctaaaaactactctcaagatagaccacactgaataaatagacctttgactagaagagcaatatgaagactgattgttaaaataacagaaaaccaatctggtttgggggtacttatattwtctgaataagtcctgaaattcacacatatattcaactcacttttttagctaaccctggtacaaattagtatatgacagtggcaatttaccaaatgggtttctgaaatcactgggaagtctaacggtgttttcccagagagctaaattattatttgctaataacagcacaataggaggagttggtttcatatttttttggtggtatttgacttgatttttcatcactttattccaattattggtta

SEQ ID NO: 430728 - DNA, 540 bp, Homo sapiens
aaaacaatctttttttccccctctaactggagaataaataggcaaatatctatactatcatcaatgagggagaaacttctttaacactgatgacaaaaaataaattggcaaaacaattaattttacataaaatttgtgctcttatttttatggttagccttgacttttaggattggcccttctggactctcagcccaaagcctgggagtttataaaaatctctcctggctgcctgagtctaaaatccaactttgtttctttcttcttttttttttttttttttttttaaatgtgtgatggagtctcgctctgttgctgcctggagtgcagtgacacaatctcggctcaccgcaacctcygcctctcgaattcaagggattctcctgcctcagccttccgagtagctggcactacaggtgtgcgccaccatgcctagttaatatttgtatgttgagtggagacggggtttcaccattttggctaggatggtcttgatctcttgacctcgtgatccacccgcctcggcctcccaaagtgctg

SEQ ID NO: 430729 - DNA, 614 bp, Homo sapiens
cctaaagccttatgaggagtttccagggaatcacctaaagagctttgaaacgtgttccctaaaagytgggaaacacagaggactggtgattcattcatgcctaagaaaactaaggcaagctgtggctgctcagcagaggggctgtgttggatagcttttctctctgagcttgttgagacaaagaatgggtgtgaaaatcccttaagaaccatgcagttgagagttgagttatcttcagctctgcccaaggaggcctggaagcagcaagaaactagaagagaatgccagattcttcggggctgatagagtatcgagtgatcacccagaggagaaatgcctccgcgtaggtcctgggaactgcaggacagagatccccagcaacggcaagctccaaagagaaagaatcagcattagccaattgccaagctgagactctgaagccacccagccaagtatgagctgtcctgtggcctttgctctcctcctacaaatggagagggaaatgagcaaaaaggggaaactggcctccaaagacagtggtgtccatcagctacagacctgaactgatagatggggaggagaagccctgcttttgagtgaagattaaaggattg

SEQ ID NO: 430730 - DNA, 614 bp, Homo sapiens
cctaaagccttatgaggagtttccagggaatcacctaaagagctttgaaacgtgttccctaaaagttgggaaacacagaggactggtgattcattcatgcctaagaaaactaaggcaagctgtggctgctcagcagaggggctgtgttggatagcttttctctctgagcttgttgagacaaagaatgggtgtgaaaatcccttaagaaccatgcagttgagagttgagttatcttcagctctgcccaaggaggcctggaagcagcaagaaactagaagagaatgccagattcttcggggctgatagagtatcgagtgatcacccagaggagaaatgcctccgcgtaggtcctggraactgcaggacagagatccccagcaacggcaagctccaaagagaaagaatcagcattagccaattgccaagctgagactctgaagccacccagccaagtatgagctgtcctgtggcctttgctctcctcctacaaatggagagggaaatgagcaaaaaggggaaactggcctccaaagacagtggtgtccatcagctacagacctgaactgatagatggggaggagaagccctgcttttgagtgaagattaaaggattg

SEQ ID NO: 430731 - DNA, 603 bp, Homo sapiens
gctgttggggcaaatgatcactgtccaccataaaaaataaaaattaaaaatcgtgtttacttacatttacgcttgctttcagatttcttaatggtaaaaggtctgtgtgtccactcaggcttgtgtgatggtgacatttctcagatcagcatttgctggcatcctgccctgcacctgagacccatctgtgatggcagcaaggcctgctgtccmgtgaatagctcatagttgatttctctctgtcaacataagcacagggttgtgggttactatgtggtacactgggccaggatgtccagggaccggggatattggtccccatctcactccattggttgagatatattttgttcattacaactttttcagataataaaaagaaatctcatccttaccagggccagtccctgttgtaagtgctgtttatatattaccatgttagaatctcacaccaaccctttgaggaaactgaggcacagtgtgtaaatacactaccgaagttatagtggcagtggacctgagacttgatctcaggccagcctagttcctaagtgtgttctcacgctaatgcctctggatcagagagggatcagtggatactgt

SEQ ID NO: 430732 - DNA, 575 bp, Homo sapiens
aacttcaaggagacatagatcaacccactattatcagacgttaataccccaccctcaataattgacagaacaagtaggcagaaaaccaataagaataataaagtagacttcagcaattttatcaatcaacttgacccgattgacatttacaggacattgcatcttacaacagcagaaaatttttyttgagaaaatggagaaacaactcaattttgtttcttgagaaataacttgagaaaaatttttagctgttcaaacaaaaatcatagtacgggatttataatatatgtaaaagtaaagtgggttaagagttgttctcaagtacacatggaacatttatagagatggactacattatagaccatttaaaaagtctcaaattcaaaacatttgtcacataaagtatgttgtctggccacaacggaattaaattagaaatcaatagcagaaactagaaaagagaaaaacccaaagtaagcagaagaaaaggaataataaaggtcaaagtgggacttaatgaaatttttaaaatagagaaaaatgaatgaatcaaaatttggggagtttggggggga

SEQ ID NO: 430733 - DNA, 580 bp, Homo sapiens
gagagggcactcaaaaggatctgatgacctgtggttaggcctgtgtgtgtaattgtgattagccggtcaggcgagagcacttgaggatcaggaagccaagaatgacatgtccaagtgtaccaatagaactaaaccttgggtacttgttcccacgaaagtacagaagagagaaaagcaagaccttgtttttaccactcacaggctgcttgttcttggagaatcacctggcctccttagacctcagttttctgtaaaaagaaaagcttcgattagattatttcaaagattcttccagttataaggttatgtattctgggcctccagagtatttttatgtatggttttctaactcttcagatggttgagtgcttctagagcgtccaataatgtggttggttgtgggacacttgcaaagagtaasaagccctggattcctgcccttcagattgataattcaatgttattcatgtcctgaaatgtacatgcaattcagtgctaactaaatatttataaggggtgctgtgcacgatgagagatgcaaaagagtgtaaggcccctacattcaggagtttcagttaat

SEQ ID NO: 430734 - DNA, 605 bp, Homo sapiens
ctctccttaatcctcttcagttttgaatgctttcattttttcccagcttctgtcatgtcagggattggtaggtggtttgttctggagcatggagrggttttagctgtcccaactacctcttgtttatttagaaataaaagggtccccaaggagtaactgcccaaggccaaagtgcttcttggctgtggctctcaaatttggtttattatctgaattacctgggggagtttttaaaaacatagattattggacctcccttttgggaagtctaacttagcagatctagagcctgttttatagaaagcactctggctgattccaaggaaatacaagaataaagctttcatctgtagcagcagtctgcaagatttttttgttttgtttccttcagtaaatatttcaggcctcgtatgccatacagtccctactgcaactactttgccactatgatgggaaaactgtcatagacaatgtgtaaatgactgagtgagctgggttctcataaaatacactgaaatttgaattacataaaattcttatgtgtcacaagatattatttttttcccttaactatttaaacttgttaaaactattcttagcttgtg

SEQ ID NO: 430735 - DNA, 562 bp, Homo sapiens
aaatatatatacgatgaagtttgacttataagtcaggcacagaaagaggctaacaacaataaccaataataaaatagaacaattatagcaacacattgtaatacaagttgtataaatgtgatctctccccccgtccccacccctgcccttaaaatatcttattgtatgtaatattttcagactgtggttgactgagggtaamtgaaaccactaaaagtgcaaatatggatggggggtactgtatagtattaaattgtttagtgtattataattaatctaaccaattctctattatcagtttatttccaacattttctactcaaagcagggctgatccataactaaatatttttacacccatgtgagagtatatctttatgaacaaaccccagatgtagcattgttggatcaattggtatgagtgttgtgattttaatacatattgttaaatttccctccttagagaatgcaccaatttctacttcaaggcatgtatggcagcaatagcatcaagtataatggcaacaccatttcccaacataaaaatatagaatagacataa

SEQ ID NO: 430736 - DNA, 562 bp, Homo sapiens
aaatatatatacgatgaagtttgacttataagtcaggcacagaaagaggctaacaacaataaccaataataaaatagaacaattatagcaacacattgtaatacaagttgtataaatgtgatctctccccccgtccccacccctgcccttaaaatatcttattgtatgtaatattttcagactgtggttgactgagggtaactgaaaccactaaaagtgcaaatatggatggggggtactgtatagtattaaattgtttagtgtattataattaatctaaccaattctctattatcagtttatttccaacattttctactcaaagcagggctgatccataactaaatatttttacacccatgtgagagtatatctttaygaacaaaccccagatgtagcattgttggatcaattggtatgagtgttgtgattttaatacatattgttaaatttccctccttagagaatgcaccaatttctacttcaaggcatgtatggcagcaatagcatcaagtataatggcaacaccatttcccaacataaaaatatagaatagacataa

SEQ ID NO: 430737 - DNA, 551 bp, Homo sapiens
ctggaagtttgagaaccttgttgaacattctgtatcatcaacaggaaataacaagcagttatgttgataggggccacttgtagctactaaggtattagaataaattagtaagacaccagaagtagaagtttatacttttaggaaaaatgatttacacattaagaagaatacagaacagaagtaagcaggctgttttgttctctttttgtctcttctgtggttcttcaatgtcctctgcccgtttacctcacagggttcctgtgagggcagaataagaaagcaaatggaatatattattragatgatcatttgttattaataagggtaagattttattctagagggtcaaatattagtgacattcattcagtcaacattaatatttagagtaccagcacactgattcttctggtgaaattcctccagtatagatatgatttgggttaaaaagtgaagagggttgttcctaggagaagccattttattttgctatatgttattgtaaaatggtgatattaatagtaactacatcacagagttattgtaaatgt

SEQ ID NO: 430738 - DNA, 504 bp, Homo sapiens
tgaagtacaattcacctgtatggcacctgctcctctctctatctatagtcctgtcaattccaactccttaatatcctttgaattcattctaytttccacagttctactgccataacctgcaagtcctcataagctcttaactgggtcactgccccactcagcctcctaaaataaaaagtttgaccatgtcaactcactcttaaaatcctctgatagctccgtttaatgtgacctcttacctctgtagcttcacccatcctcatttctcactcgtggactacgttacgacatgaaaacttctgtaggttactgatttttctctttatctctgttttgcaaatgcttaactggatgaataccagctcttattttgaattcatctctctgtttgaggactaattcataattcctttttttatgatggctgctgcaaggcttgaaaccaaatttttggttctcatcttacaaacacatagacatttactagcatgcattgaatttcac

SEQ ID NO: 430739 - DNA, 504 bp, Homo sapiens
tgaagtacaattcacctgtatggcacctgctcctctctctatctatagtcctgtcaattccaactccttaatatcctttgaattcattctattttcyacagttctactgccataacctgcaagtcctcataagctcttaactgggtcactgccccactcagcctcctaaaataaaaagtttgaccatgtcaactcactcttaaaatcctctgatagctccgtttaatgtgacctcttacctctgtagcttcacccatcctcatttctcactcgtggactacgttacgacatgaaaacttctgtaggttactgatttttctctttatctctgttttgcaaatgcttaactggatgaataccagctcttattttgaattcatctctctgtttgaggactaattcataattcctttttttatgatggctgctgcaaggcttgaaaccaaatttttggttctcatcttacaaacacatagacatttactagcatgcattgaatttcac

SEQ ID NO: 430740 - DNA, 593 bp, Homo sapiens
tttttttttaatgtccagccatagatttatcaccaacaatgggattaatggcagatttggtttttaggtcatttagattagttatcctaggtaaatttaatattcactttgatatccatcttaggtcccctgacataaaaatttatgtctgtgctagaggcctttttccccctctcttttccccaatatagtatttccttagaccttctgttttctccaggttcatttctggaatatattttacaaggcctaaaaaaaaagttccagttttgatgtgtttttatttccattctttaagatacacttgtcactgaatagcaacagactgaccacaacacctttccactggtagctttgaggacacagagtttcttaaggttgaatgggcttatccatcctaccactacccatggccttgaaagctacagatgtaagggatactccttgactgtgatgagtgaaagggacttggtcttacataaaactaaagtaagtgtyttgtggcatgctagcactttgaaatgcttgatagaaaaaaggctttacatcaagtttcatatattatatctccctcttgttgctctataacacat

SEQ ID NO: 430741 - DNA, 451 bp, Homo sapiens
caggtgtggtggcgggcacctgtaatcccagctactcgggaggctgaggcaggagaatcacttgtactcaggaggcggaggttgcagtgagctgagatcrtgccaatgcactccagcctgggtgacagagtgagactccatcacaaaaaaaaaaaaaaaaggtattgttaatagtattagcaccactttaacatgttggttaatagcatgctggtcacttttatggctgtgaaaatgtttcataggaaatgctaacatcaaatgtgcatagccatgattctctaaatgtacagctagaaactccccactttggttaattcctacggtgcttattaagtgctatgtgagatttgacacatgaatatgtaaataataatgcaattataattttgtagggtgctgtattgtttacagttcagggctcataagaaggaagtgagaaagtggtcac

SEQ ID NO: 430742 - DNA, 369 bp, Homo sapiens
gcctgagacctgagctgaagacccagtcaattccgacctgaagtcctttcccaaggcaattatgagataataaatgtgtattgttcgagttgccaaatctgtgcctttttttwaaaaaaaaaaaaggcagcaacggaaaacaaaaacaggctattcaccacattttcttgtcagatgaaaagtaacaggacataatgtgagtgaaagcactttataaaatataaagaccagtgcacatggtgaaagtctaaagcaaattccttaacttcccacccaaacctacttctcccgctcttccctgtttcagtaaatggtaccatcatccagcttctacaagcctaaaacccaggagtcatcatctttatcttt

SEQ ID NO: 430743 - DNA, 458 bp, Homo sapiens
ttcacaatagcaaggacaaggaatcaacctagatgcccatcaacagtggattggataaagaaaatgtggtacgtatacaccatagaatactatgcagctataaaaaagaattaaatcatgtcctttgcagcaacatgaatgcagctgaaggccattatacaaagcaaattagcacaggaacagaaaaccaaacaccaagtgttctcacttataagtgggagctaaacactgagtacacttggacacaaagaggggaagaatggacactagggcctacatgagggtgaaggatgggaggagggtgagaattaaactacctrttgggtactatgctcactacctgggtgacaaaatagtttgtacatcaaaccccagtgacacacaatttactcatgtaacaagtctgcacaggtactccctgaacctaagttaaaagctggaaggaaaataaaaaagaa

SEQ ID NO: 430744 - DNA, 567 bp, Homo sapiens
caagtaatggacatcccagttcatgccccatcgcatggggtgtggttatgaggaacatgagggagacccgaagaactagatccaggtatcacttcttcctggtgtgaagggtctggagactgacrttagaatttattgttacaccattatattaaatttctttaggaagtttatattctccttattaaagaatatggggccagccatttcccacaaatcctccacttgactttataagcttagtaattagcagtgccaagatttttgttgtccagagtaaataaaactaggtaaacatcatcttagatatttgaatcatctctgtgtcatattaaatatattatttctctgggtctcagttttttaacccatagaattaagaagttcaagcagataagtcctacaaagccctttcaactgtaaaattctgtagattccagggcatgatgggaatcatagcctcatgtagttgccgaaatggtgcttcttatcttggacatagacaatgtcttagagttctttacctgaagcctcacaaaacatttagctatatatgtttacctgctc

SEQ ID NO: 430745 - DNA, 460 bp, Homo sapiens
ctagaacaccatgaaattgagaggaagcttactgcattcctacttaatttatatacacagaaaaatttctaggttttatggacaaaagactaatttgaattatgaaaacagaatmaaggcccctcaatcaatttctagacttaagccagtttacagacccagaaccccttgaatgaaggggaggctgggtccccttgtgaaggggatcctactacactatcgacaatttatgctgttaatctttctcccatcctcccccaagaagatctccagccttttaccagggtaactgttcactggggaaagggaaatgatcagacatttcggggactactggacactggctttgagctgacatggattccaggggacccaaaatgtcattgtggtcctctagttaaagtagggttttatgaaggtcaggtaattagtagagttttagctcaggtacgacttacag

SEQ ID NO: 430746 - DNA, 487 bp, Homo sapiens
gtggaaggtattggataagtatactacattccttatttccttgtatcctcttcttcaaactattcccattttagagctaaagyctatgaagcttagaaaaattaagaaaattttcaaagtcatccagctagtaagtggtacgccttctaaatggactgtgttgacactattgcccagaaagttaaaattaaattaattcaatgagataactgtattaaaacaaattttaatttgggatgtttaacacatacagttaataaacattaagcaccataaaagttaggtataacacattctaacggtttttgttactgtttagagaagggaggaatgggctagcctattaattaaacaaaaatggctttacttgtatccatttaatttgtttatgatcatgattaatattttatttgaatgcagggttccatgaaaaataagtctgaaagccactgatctggtctaactctcccataatataggtaaataa

SEQ ID NO: 430747 - DNA, 487 bp, Homo sapiens
gtggaaggtattggataagtatactacattccttatttccttgtatcctcttcttcaaactattcccattttagagctaaagcctatgaagcttagaaaaattaagaaaattttcaaagtcatccagctagtaagtggtacgccttctaaatggactgtgttgacactattgcccagaaagttaaaattaaattaattcaatgagataactgtattaaaacaaattttaatttgggatgtttaacacatacagttaataaacattragcaccataaaagttaggtataacacattctaacggtttttgttactgtttagagaagggaggaatgggctagcctattaattaaacaaaaatggctttacttgtatccatttaatttgtttatgatcatgattaatattttatttgaatgcagggttccatgaaaaataagtctgaaagccactgatctggtctaactctcccataatataggtaaataa

SEQ ID NO: 430748 - DNA, 487 bp, Homo sapiens
gtggaaggtattggataagtatactacattccttatttccttgtatcctcttcttcaaactattcccattttagagctaaagcctatgaagcttagaaaaattaagaaaattttcaaagtcatccagctagtaagtggtacgccttctaaatggactgtgttgacactattgcccagaaagttaaaattaaattaattcaatgagataactgtattaaaacaaattttaatttgggatgtttaacacatacagttaataaacattaagcaccataaaagttaggtataacacattctaayggtttttgttactgtttagagaagggaggaatgggctagcctattaattaaacaaaaatggctttacttgtatccatttaatttgtttatgatcatgattaatattttatttgaatgcagggttccatgaaaaataagtctgaaagccactgatctggtctaactctcccataatataggtaaataa

SEQ ID NO: 430749 - DNA, 572 bp, Homo sapiens
tgaccttttattagattttaagttgtctttcatagacaattatatcatattcaaataatgatgcattgatagctcctttcttaattgtatattcctttcttttacttattctgttggttggaactttcagatgagtggaactagtagattattttgtctttcttcctacttttaataaaaatgcctgtaatgtttaattgaaagaacatattttaaaggcaacacagatttttcttattcaaagagattctaagagcatacttgatttgattttgcaaatggaataattatcaattaatttatctcttataaaacaaatcatccctgtacttattgtttactttaggaaaaacataccagtatctgctttttttaaaaccagttctatcaatatataactagaatatcttcttattgctaacaacaggagcactgggattaaatctatttgaggtacagcattgaaactgaacacagcactttaatttcccagttacttacttttctagctrtactccaccatccatgttgcagtacattttgacagaagtctgtttgtctacctatgctga

SEQ ID NO: 430750 - DNA, 474 bp, Homo sapiens
tatatttcctatagttatcaatactgtgtacttcatgtttaacattaccccaattctgtgatcttttccaatattcaaaagtaaagcaaaacctttcaatagctgtttcacccagaacaagttgtctaagaatgataactactgttagttactttgctgaaatgaaatgaaacttaggtgctacctagagtagactttggctgctcgttggtttgaayagctctcaagcatcacatttcactgcagctgcagtgtgtgctagaggcttatggcatggttagcagctggactaagcttcgtcagataaatagctacatgactgtgatgcgatccatgtcaggtgctcccagcccagtgtttcgacaggcaggcactgtcagccagccatgaagagcccgtctgttgcacatgcattgtggtggggtctccagtaaggatgctaaaagacatctagttggcaaatgcaggaggagg

SEQ ID NO: 430751 - DNA, 474 bp, Homo sapiens
tatatttcctatagttatcaatactgtgtacttcatgtttaacattaccccaattctgtgatcttttccaatattcaaaagtaaagcaaaacctttcaatagctgtttcacccagaacaagttgtctaagaatgataactactgttagttactttgctgaaatgaaatgaaacttaggtgctacctagagtagactttggctgctcgttggtttgaacagctctcaagcatcacatttcactgcagctgcagtgtgtgctagaggcttatggcatggttagcagctggactaagcttcgtcagrtaaatagctacatgactgtgatgcgatccatgtcaggtgctcccagcccagtgtttcgacaggcaggcactgtcagccagccatgaagagcccgtctgttgcacatgcattgtggtggggtctccagtaaggatgctaaaagacatctagttggcaaatgcaggaggagg

SEQ ID NO: 430752 - DNA, 659 bp, Homo sapiens
tacacaaatgtcagaaggaaactggttcacacattagcttctttccccaaatttctctctggtttggtggaatcagaacagaggtttgacttctctgatccattgtttttaacagcagtagttctagcttttatttagcagtctccagagtccaggtctagtttctttccaaaaaatgaggttggtgacctcaggacagtargtgtaatttcctggaatgacagtgaaattcattttgatattgataagaattagaagtaacctattctttagcttctgtcttggctgtcttggtctgtttggttgctatgacaaaatatcatagattgaaagcttataaacaacagaaattcgtttctcatagttctaaagtctgggaagtccaagatcaagataccagcagatttggtatccactttctgcttcataggacccactttctgcttcatagtatagggccttttcactgtgtcctcacatagtggaagagacaagtaagctctctgaagccctttataagggcattaatcccattcatgagggcactaaccttattacctaatcacctcctcaaaggcaccaccttctaataccatcaccttgggggttagcatttcaacatatgaattttaggggtacacaaatattccaactatagt

SEQ ID NO: 430753 - DNA, 582 bp, Homo sapiens
acaggtctcgactatacataaagttttcttgcatcataaaattcaaattatatgaacatttacaaaatggggattttttcttcttacttcattgagttgatataaaaataataaaataagagagtaaaacaggagttacaaagggcagagagcagggtgggagtggggagatgtaagtcaaagggcattaagttgcagttatgtagsatgaataagtctagagatgtaatggatagcataagaactataatcaataatattgtattgtataatgaaaatttgccaggagagtaattttatcactaaaaaagagctatgtgatggacatattaatttgcttgataaaagtaatcattttactacatatacatatatgtatatcaaaacatcacattgtctaccttaaatacatataataaaaacaaaaataataaaataagattatgtctgttagagtgcatcataaactgaaaagtgtaacacaaatgtatggcactgccatggtaagtattaattacaacaaagggatggatttctaatggaattttaggcagcgtgacagcaggtactttggttcagaag

SEQ ID NO: 430754 - DNA, 569 bp, Homo sapiens
attgcactcttcgggagtcacaaggcccctgtctgggtctttcacttttagttctcattaaaacaggaagctttgctactttaatcctaactaaactttttccttggtaaatacaactaggtattctaactcttacaaaataatctatacaagcagtttcatatcctctccgaatttgtcatctgcctagagcagtattgctaaatctcctcaaaacgcaatgaaatgaaaacagctgagcatttgaatgcatttaacttatactattatttttrtttttgtttcacagaattaaatttccatcagctttgttctaaaaagcagcggaggggggatggcaacacaaattcatctgcataaaggggtccaaattatctaggaattaagctgccattctgcgggaaataacttaccaaataccatggtgccctgggagagagagttcactgactacttgcaagagccatgtctatttaatttgtattcaatatgggtgcctcttcataagtcgagaaaaaaaagtacctattctatgagtacaaaagcagcatactcaccagagggtggct

SEQ ID NO: 430755 - DNA, 569 bp, Homo sapiens
attgcactcttcgggagtcacaaggcccctgtctgggtctttcacttttagttctcattaaaacaggaagctttgctactttaatcctaactaaactttttccttggtaaatacaactaggtattctaactcttacaaaataatctatacaagcagtttcatatcctctccgaatttgtcatctgcctagagcagtattgctaaatctcctcaaaacgcaatgaaatgaaaacagctgagcatttgaatgcatttaacttatactattatttttgtttttgtttcacagaattaaatttccatcagctttgttctaaaaagcagcggaggggggatggcaacacaaattcatctgcataaaggggtccaaattatctaggaattaagctgccattctgcgggaaataacttaccaaataccayggtgccctgggagagagagttcactgactacttgcaagagccatgtctatttaatttgtattcaatatgggtgcctcttcataagtcgagaaaaaaaagtacctattctatgagtacaaaagcagcatactcaccagagggtggct

SEQ ID NO: 430756 - DNA, 531 bp, Homo sapiens
agttagtcatgagtttgctaaggtctctttcctacccttcaccaagaacagtggcacagatcctgtgttcaactccatgaatcctcctgatccctttccctagaattgaacccaactttgttaaccctcagatgcaggtaaatagacctagggtttcccactgtatcataattgctacttgccacataattaattatggactsatgtactaaactaccaaaatacttatttagaaagaaaatcatttttcttcttgtttttgtctttacccttctaatctcagaaacaaagattcattagttggtaaaatagaggttaatgtgacttaaggagagaattagcttctatgaaatatgaatttggatatcttttagtataacacatacatatatattacattacgcagcataatatattataaataagaacatcctatgattgagtactttctagtggggtgtgttgcaacacataagtcttagcaattttaagactggatgtcactcaaacctaaaacatcttttccataac

SEQ ID NO: 430757 - DNA, 531 bp, Homo sapiens
agttagtcatgagtttgctaaggtctctttcctacccttcaccaagaacagtggcacagatcctgtgttcaactccatgaatcctcctgatccctttccctagaattgaacccaactttgttaaccctcagatgcaggtaaatagacctagggtttcccactgtatcataattgctacttgccacataattaattatggactgatrtactaaactaccaaaatacttatttagaaagaaaatcatttttcttcttgtttttgtctttacccttctaatctcagaaacaaagattcattagttggtaaaatagaggttaatgtgacttaaggagagaattagcttctatgaaatatgaatttggatatcttttagtataacacatacatatatattacattacgcagcataatatattataaataagaacatcctatgattgagtactttctagtggggtgtgttgcaacacataagtcttagcaattttaagactggatgtcactcaaacctaaaacatcttttccataac

SEQ ID NO: 430758 - DNA, 531 bp, Homo sapiens
agttagtcatgagtttgctaaggtctctttcctacccttcaccaagaacagtggcacagatcctgtgttcaactccatgaatcctcctgatccctttccctagaattgaacccaactttgttaaccctcagatgcaggtaaatagacctagggtttcccactgtatcataattgctacttgccacataattaattatggactgatgtactaaactaccaaaatacttatttagaaagaaaatcatttttcttcttgtttttgtctttacccttctaatctcagaaacaaagattcattagttggtaaaatagaggttaatgtgacttaaggagagaattagcttctatgaaatatgaatttggatatcytttagtataacacatacatatatattacattacgcagcataatatattataaataagaacatcctatgattgagtactttctagtggggtgtgttgcaacacataagtcttagcaattttaagactggatgtcactcaaacctaaaacatcttttccataac

SEQ ID NO: 430759 - DNA, 583 bp, Homo sapiens
tagcctttccaagaagtttatgtttctaagtcagatctctttctccacctcatgctcctctttagcttaaaatttttcctggttcctttttttccacttacagggagaatgttcagatctcttactatgccactcaaggtctgacacgatctgggtctaaattcctttctagttgcatttctgtcacaccttcctttatttccttagtatatcctgagacctgctactccaaaagaatgcctctgcaactttatccgctttgtggggcraaatcctattcatttttctgggcccaacacaagtgtgactccttgtgagaaactttttgatatttattgaccaccttcttgtcacgctgtccactctggtcctgatcccttccactctgaggtcctgttgtgctgcattcataaacccagcagaatccatgttgcattttgcaatatagtaacttgcatcatcatatactgcattgtaatataatataatttcagggcctcctttgtcagactctcagctcttcaaagaaaacagcgtattttattcatctttgtgtatgcagcactagcagggtgcctggcac

SEQ ID NO: 430760 - DNA, 583 bp, Homo sapiens
tagcctttccaagaagtttatgtttctaagtcagatctctttctccacctcatgctcctctttagcttaaaatttttcctggttcctttttttccacttacagggagaatgttcagatctcttactatgccactcaaggtctgacacgatctgggtctaaattcctttctagttgcatttctgtcacaccttcctttatttccttagtatatcctgagacctgctactccaaaagaatgcctctgcaactttatccgctttgtggggcaaaatcctattcatttttctgggcccaacacaagtgtgactccttgtgagaaactttttgatatttattgaccaccttcttgtcacgctgtccactctggtcctgatcccttccactctgaggtcctgttgtgctrcattcataaacccagcagaatccatgttgcattttgcaatatagtaacttgcatcatcatatactgcattgtaatataatataatttcagggcctcctttgtcagactctcagctcttcaaagaaaacagcgtattttattcatctttgtgtatgcagcactagcagggtgcctggcac

SEQ ID NO: 430761 - DNA, 573 bp, Homo sapiens
ttttgtaactgtccctgttattcttattctcttgtgcttcgatctacagccaacggtttttttggttttttgtttttgagacagagtctcgcttcttcacccagtctggagtgcaatggtgtgatctcagctcactgcaatctctgcctcccaggttcaagcaattctcctggctcagcctccccagtagttgggattacaggcatgtgccaccacgcctagctaatttttgtgtttttagtggagatagggtttcaccctgttggccaagctggtcttgaaaactcctgacctcaagcgatccacccacctcggcctcccaaagtgctgggattacaggcgtgagccaccatacccggccccaaccctttatttctcatatgtattattcaaactttttagaccatgacccacagtaagaaatgccttttacattgtaaccctatgtatacacccacccacccacacatttaaaagtttgataaaacattctatatgtgtgawgcaatcttttacaaactattttctaaactatttgccttttaaaaagtgattgttacaaaacttattata

SEQ ID NO: 430762 - DNA, 653 bp, Homo sapiens
tgctagagtactgaagtctaaacttgaacaatccaaaccaaatcagtaaacatttgttatttcttttgtttaaatctcaaaggaacacttaagggaattgtaacactgttccaatcttttgatattaaatcaagtgagccaatgaacaagttgtgagcttttttgcattttatgggaggaggtggtctgtctcacttaccttgagaatcttgggatgattgttcctggggctagccattgcccctgcattgggttgagggccatttctcggggaagagccgagcattgggaggaatgcagaggataaaggttctctgatcatagtgccgcccacctctatctctagaaaaggttatattcaaagaaaaacacaattttcccaccaaagcaccactcggcatgaagggaagaacccagagactcgaagaggaccaggttcacactcctgaagatggcagattatgtctcrtgcaataagccgagatctgacagccagaggatgactaggccacagtctgccatttcctgttgttgacttttctgttcaccatcccctctggttttctcccagttagtccttatcctccttttgctaggtggatacaggtttcttctgagggccaaagcctgggccctattgctctggttgccat

SEQ ID NO: 430763 - DNA, 501 bp, Homo sapiens
tatataggattttatactatttatggtttcaggcacrcactggggctctggaacatgtcccccatggataaggggaaactactataatgctatttagcagatcaaatgagattatgtttatgaaaatcttttaaagggatttgaagacagcctgccctggctgcatgaggtgatggcattatttgttgttgttattatctgttttggctcatgcagacgtattagttcaaattccattttcttggttattggatattttttagactgttgaggtcaggaaacaagttatcttcagcttcgagaggtgttattatatatacggtttcattagcagtaaaaaatctcattgtttcaagtaaacacttcatttaaaaatacaattgatttttacgaaatagaaccatactactactacattttttttccccactattcatgctggacttctaaatgataaaaaaggaaaaagatatatgaatagaattttaatcacatggtaaa

SEQ ID NO: 430764 - DNA, 586 bp, Homo sapiens
catttgcttatctgaaaaggatcttttttctcctttgcttaagaagcttagtttggctggatatgaaattcttggttgaagttttttctttaagattgttgaatatatgcctcatactctcttctggcttgtagggttttagctgagagatccactgttagcctgatgggattcccttggtaagttacctgccctttctctttaactgcccttaacattctttctttcatttcaaccttggaaaatctgatgattgtgtgtcttgggggtgaacttcttgtgtagactctgcagggggttccctctatttcctgaatttgactgtggccctctctagcaaggttggggaagttttcatgaatgatatccctgaaatatgttttccaagttgtttctttcttcccctcccattcagggatgccagtaatttgtagatctggcctctttacataatcccatacttcacagaaggtttgttcatgcctttttttctgactgtcttagttgtgggagccagtcttcaagttctgaaattctttccttagcttggtytattctgctgtcaattcttgtgtttgcattgtga

SEQ ID NO: 430765 - DNA, 607 bp, Homo sapiens
ttagctaatattgtagtttccatctgtcccatgcaaattcctttcaaactgatttgaaaccaaccgactcctaagaacagactggataagaatgcagcacttttctatagttattgaacattgaatatctgaataagcaatactagtttcacattcagaatcttcagtattgctagtgaaatccaaaagcaaaaagtgctgaagtctyatttttatctagagacatcttggtggtggtcactatggcaatggcaataagttcttagatcgtaagattttcagaaatttgaattcttagtcattttcaggaaaaagttaaattgagcagttgagggtttttaaagctttgcacacatgcatgttaatacagaaaaattaattttttaattaatcaaattcaagttagcagcccttaagacatcataaaaaggtagagtactgactctgtgcaaccagtcatcacatctggaaaaacatgcaatgggctggtcttagtgattctgagatatggaaatccaaggaactggtcttcctaggatagtggaaatttagtcactaaaaacataccagcacttcttgtaggtgttcacagtcctatttttgcttg

SEQ ID NO: 430766 - DNA, 575 bp, Homo sapiens
atccaaccctacctcacccaggaccttcaccgccgctccgaaagaaacgcgcaggggaggaacctgcgagacctaaggcccgcctcggagtcagccccattggtcagacctatcccaccggaagcgatgaccgcggacaggaaattcccggcgtgctgagagcgcatgcgctaagtcctgccgcgagaagggcaggctgggtggtcggcggcttccgcctgtgagagccgggggagagccgggtggactaggcttctcctgggcgggctatggggagagcgcccaggagggcgggacgaggcggggcctggacagggtggggtttttcggaggagttgctctgagaggtgcagccggtttactcccgccctgaagttcccaagggcttccggctctttaacgttctaaataccygtctgtgaatattagaggaaaagcgggtgcttagaggcaaagctactgtttgttagcaattctttcttactgtgaggcgtttttagaaccgccgctctgcagatgctgcatgatgggtttttaacttcgttcagcctcagttttttcatcagttaaatgga

SEQ ID NO: 430767 - DNA, 533 bp, Homo sapiens
agaggtgcagccggtttactcccgccctgaagttcccaagggcttccggctctttaacgttctaaatacctgtctgtgaatattagaggaaaagcgggtgcttagaggcaaagctactgttygttagcaattctttcttactgtgaggcgtttttagaaccgccgctctgcagatgctgcatgatgggtttttaacttcgttcagcctcagttttttcatcagttaaatggagctaatgtctacctcaaaattgtgagcactaaatgagagagatcgcctggtgtgcacgttcagaacatagtgcacgcatggcattgggtaagctcccacgtgatcagtggtggctgttattatttggcagatgaataattggccagtgtaaagaggtcattcgatttgctaggattacagctaagaacagagagaagactgaaatatgagttctgtctttccgttatacgagataaaaacaacgaagcaaaaaaaaaaaaaaattaaagtttctctgataggtgggagaattttgctgttt

SEQ ID NO: 430768 - DNA, 533 bp, Homo sapiens
agaggtgcagccggtttactcccgccctgaagttcccaagggcttccggctctttaacgttctaaatacctgtctgtgaatattagaggaaaagcgggtgcttagaggcaaagctactgtttgttagcaattctttcttactgtgaggygtttttagaaccgccgctctgcagatgctgcatgatgggtttttaacttcgttcagcctcagttttttcatcagttaaatggagctaatgtctacctcaaaattgtgagcactaaatgagagagatcgcctggtgtgcacgttcagaacatagtgcacgcatggcattgggtaagctcccacgtgatcagtggtggctgttattatttggcagatgaataattggccagtgtaaagaggtcattcgatttgctaggattacagctaagaacagagagaagactgaaatatgagttctgtctttccgttatacgagataaaaacaacgaagcaaaaaaaaaaaaaaattaaagtttctctgataggtgggagaattttgctgttt

SEQ ID NO: 430769 - DNA, 536 bp, Homo sapiens
agagaggtctgtaatctaggcgtctgagaaaacaaggctatagattccaatattagagacaacagggctctgggaagattaaggttgagttttctggatctgcagaatagagtcactgaggwccaattgcaagatcagaggagatgaaagaacaagtcagggcatgcttaggaaaagagaataccagggataggttttaggcaagagtcacactgaggaagggcaggttcttggcgtcgctcaggaagaaatccaaaagcaagcctgtggtggaagaaagcagctctacggaggcattggcggtgttacaaccctgcatccactccggcagggcagggagccctccgtgggttgtgctcccagagcagcagcctaggggtggcttgtagtcacttttataattcacttttaatggcatgctaattaaggggcgggttattcagagatagctagaaatgggcagtaacttccatctgtttccatggcaaggggtggggacttctcgtgatgacatggcattggcaaactgtcatggc

SEQ ID NO: 430770 - DNA, 536 bp, Homo sapiens
agagaggtctgtaatctaggcgtctgagaaaacaaggctatagattccaatattagagacaacagggctctgggaagattaaggttgagttttctggatctgcagaatagagtcactgaggtccaattgcaagatcagaggagatgaaagaacaagtcagggcatgcttaggaaaagagaataccagggataggttttaggcaagagtcacactgaggaagggcaggttcttggcgtcgctcaggaagaaatccaaaagcaagcctrtggtggaagaaagcagctctacggaggcattggcggtgttacaaccctgcatccactccggcagggcagggagccctccgtgggttgtgctcccagagcagcagcctaggggtggcttgtagtcacttttataattcacttttaatggcatgctaattaaggggcgggttattcagagatagctagaaatgggcagtaacttccatctgtttccatggcaaggggtggggacttctcgtgatgacatggcattggcaaactgtcatggc

SEQ ID NO: 430771 - DNA, 536 bp, Homo sapiens
agagaggtctgtaatctaggcgtctgagaaaacaaggctatagattccaatattagagacaacagggctctgggaagattaaggttgagttttctggatctgcagaatagagtcactgaggtccaattgcaagatcagaggagatgaaagaacaagtcagggcatgcttaggaaaagagaataccagggataggttttaggcaagagtcacactgaggaagggcaggttcttggcgtcgctcaggaagaaatccaaaagcaagcctgtggtggaagaaagcagctctacggaggcattggcggtgttacaaccctgcatccactccggcagggcagggagccctccgtgggttgtgctcccagagcagcagcctaggggtggcttgtagtcacttttataattcacttttaatggcatgctaattaaggggcgggttattcagaratagctagaaatgggcagtaacttccatctgtttccatggcaaggggtggggacttctcgtgatgacatggcattggcaaactgtcatggc

SEQ ID NO: 430772 - DNA, 573 bp, Homo sapiens
tttttattaagattattttttgccaggcatggtggcacacacctgtagtcctagctacttagggggatgaagtgggaagatcccttgagcccaggagatcaaggctgcagtaagccgtgattgtgccactgcrctcctgcctgggcaacaaagtgagatttggtatcaaaaaaaaaaaaaggacaataataacaatattagtgttatcaaagtagtgtagtggttaaacacgggaactctacaaccagctacttaagtcaaaatcctgacttcactacctactagttgtgtgatcttgagcaagctatcaacacactcggtgcctcagtttcctcacctataaaatgggtatatgagtactcacctcatatgacaactttaagcattaaatgaataagtacaattcttttaatagtaactttaccctgtcactgttacaatcatattttgctgacattatgcaaacgttctcttagattttgttgtatacagtgcatatttgatctttcttactaactcgaaactgactatgcaaataaaagtttggtattttaaggtctagtgctgtccttg

SEQ ID NO: 430773 - DNA, 546 bp, Homo sapiens
aacacttagcaagatttgtttacttcttttccttagatgaagatcaaatgaacaaattcccactcaatgttataatagaaggagacaaaggaaaaagagcaattgtattctattgctgaacttttcccctgtattgagacttgatgtccaaaatttcacagttttgttccatgggactgactcatgcataggataaataggattttccctaggaaaacagtagaatgtaatggtgctataggtatgtattttcatgcctttaagccttttataatgtggttgactatctttataagagaagraagcaccacactaaagattctccctaagcttgatgtaatgataaaagatgttgggtgtgttttgtttattttctttctaagcactacccagatttaaatacaagttgttataaaattatgaaaggatgaattaaattgcttacaataggatggagacacagtaaaggcagaaatttggaaaaaagcaaggaaatccttaatctatgtattcttcccaaactatccctccccttgttttttaaaa

SEQ ID NO: 430774 - DNA, 546 bp, Homo sapiens
aacacttagcaagatttgtttacttcttttccttagatgaagatcaaatgaacaaattcccactcaatgttataatagaaggagacaaaggaaaaagagcaattgtattctattgctgaacttttcccctgtattgagacttgatgtccaaaatttcacagttttgttccatgggactgactcatgcataggataaataggattttccctaggaaaacagtagaatgtaatggtgctataggtatgtattttcatgcctttaagccttttataatgtggttgactatctttataagagaaggaagcaccacactaaagattctccctaagcttgatgtaatgataaaagatgttgggtgtgttttgtttattttctttctaagcactacccagatttaaatacaagttgttataaaattatgaawggatgaattaaattgcttacaataggatggagacacagtaaaggcagaaatttggaaaaaagcaaggaaatccttaatctatgtattcttcccaaactatccctccccttgttttttaaaa

SEQ ID NO: 430775 - DNA, 579 bp, Homo sapiens
tttaaatttagtgattccaaaaaaacatggatttatgccataaattacctctccctcagttctgaatactgcagagcacgtctttgagcaaacatagagtatctgggaccacagtagttcgctctataggtgtgccaatcggtaatgatccatggctgcataccctgctctgtaataccccagccgtcagccaaccagaaagccccagagacttctccggccatctgaaaacactgccattagagaaggttctgcctggctgttttcttctcttcccgggaaatatggccagattattgctgacctatctggaggcaacaggaacatggtaatctgttcttattctaatggatcttccataacgtttcccacaaagaattactaaccattcatgaccttmatcaaataacggtaaggctgccgccttttccctcagccatctttcacaatctaaaaatatgtcagggtagaataaactttgtagagtttctgtttttctttaagaaattgactgagatgcagaaatgatcttcttcgccaacattcttagtattggaactgatttgatagttgttgcat

SEQ ID NO: 430776 - DNA, 557 bp, Homo sapiens
agatggggtctccctatgttgcccaggctggtctcaaattcctgggttcaagctgtccttcctyctcagcctcccaaagtgctgggattacacaggtgtgagccaccttactcagctatccagtaaatataattttgactactgtctccattcctaattatggtcctctgaattcagcctctcttacagcatggctcccagaaaggagcacaggacccaggaatgtctggtcagaataaagcagtgaaggattacatctccctcattcgggggtgctaattgtgtgaaggtgcatgaattccttttggggaatgttgaacttgccaaccatttaattaaaccactagatagttttgtgtttttttgtaagccatatttttcctttcccaaaaatattttattctgtatcacttgacttgctttgtagcaaatgaaaatttgctacaaaatttatgaaaatttttgaaaattacaaaattttcatttgctaccttcatcacttcatccactgataaaaatatgaagaacgacagacttaagaatagagccctggcctc

SEQ ID NO: 430777 - DNA, 557 bp, Homo sapiens
agatggggtctccctatgttgcccaggctggtctcaaattcctgggttcaagctgtccttccttctcagcctcccaaagtgctgggattacacaggtgtgagccaccttactcagctatccagtaaatataattttgactactgtctccattcctaattatggtcctctgaattcagcctctcttayagcatggctcccagaaaggagcacaggacccaggaatgtctggtcagaataaagcagtgaaggattacatctccctcattcgggggtgctaattgtgtgaaggtgcatgaattccttttggggaatgttgaacttgccaaccatttaattaaaccactagatagttttgtgtttttttgtaagccatatttttcctttcccaaaaatattttattctgtatcacttgacttgctttgtagcaaatgaaaatttgctacaaaatttatgaaaatttttgaaaattacaaaattttcatttgctaccttcatcacttcatccactgataaaaatatgaagaacgacagacttaagaatagagccctggcctc

SEQ ID NO: 430778 - DNA, 557 bp, Homo sapiens
agatggggtctccctatgttgcccaggctggtctcaaattcctgggttcaagctgtccttccttctcagcctcccaaagtgctgggattacacaggtgtgagccaccttactcagctatccagtaaatataattttgactactgtctccattcctaattatggtcctctgaattcagcctctcttacagcatggctcccagaaaggagcacaggacccaggaatgtctggtcagaataaagcagtgaaggattacatctccctcattcgggggtgctaattgtgtgaaggtgcatgaattccttttggggaatgttgaacttgccaamcatttaattaaaccactagatagttttgtgtttttttgtaagccatatttttcctttcccaaaaatattttattctgtatcacttgacttgctttgtagcaaatgaaaatttgctacaaaatttatgaaaatttttgaaaattacaaaattttcatttgctaccttcatcacttcatccactgataaaaatatgaagaacgacagacttaagaatagagccctggcctc

SEQ ID NO: 430779 - DNA, 510 bp, Homo sapiens
ttggcacatagtgtaaacaaaacctcatcttatttattggtttttatttttaccaaaacagaaagatgggaaattgggcatgctatgtatccatttgattttataaaattcatcctaagccttcatatgaattaaacatggatgacaccaactgactgcccccccacatagaattaactactttctcatttgtgtttccactgtatgctaaacagattgtttcattcaataagcatttattgagtctctactaggtgccaagccctgaactaggaaaatgggcatataagagtgaataagtcagttactgatcattgtccttattgaactcaccagtgaagagaaatagaaaggcataatgsaaatgtttgcaaattaacagggaggcttaatgtggtcttttggttcagggaactccctgagaataagcatctagactaagacctgaaggatggtgtggtgccagctgaatgaggagggtaggggagagacatcacatatgtcctggaa

SEQ ID NO: 430780 - DNA, 548 bp, Homo sapiens
tggatcatatccttttcttagtttccagagctcatcacaatgactggcatatggtaaatgaatattaatccaaggggaggaaggatggaagctagaaggaaaggaaggaagaaaaggagagaagaaggtggaaaagaagaaggaaggaagaggaatgaatttaagaatgaacgattcaatacaaacatagaagaaaacttttttgagtatgagagatgggtggtgttaaccatttagaaaggtggagaggtggtgtcttagctaacggtttagaatctgggtctttaaatgaagccttaacttattctttaccctcaggcaaatagcttkgctctcaggacctcagttttctcttctgcaaaaaagctgtcatctctagctctgaatgcaataattttataaaagtagctttcaaatgaatgtggggacagatttctgtcatccagagcacaattggttgcaaattgcagtatgattcttgtggatgctccatgtgaggaaaggatcatgggaagagtctgtattcaggaaggtaagtgcccatatac

SEQ ID NO: 430781 - DNA, 497 bp, Homo sapiens
ggtaactcagtctgtttccctgtttcattactccagtgttggcaggtaaaatgtatattatatggtttagaactttgaagaactttttgtgggtgtctatgcttaagacaattttagtattagtagacattaattatagtcagcagtttggggaacaagctaggaatatatggagccagtgggcttgttcataattttttaaaattggggttttctgcagggaagatgcaagaaaagaggccagatgggtgttatacagggacagagaaatctcaacatcttagcatttatgatgttgttgaaatagttagccagtgagggaagagtggagaggctgaagtccactgtcacctgmagggtcttgacccaagctatggaattttggagagttctctccacacatctgggcctcacagtcttctgttgtaagatgaatgagtgagcctgcatgaagcccaaggcccctcagttccgaaattctacaaggtcaggaagac

SEQ ID NO: 430782 - DNA, 357 bp, Homo sapiens
ctcaaaagtcttttacttggaaactgctgagcctggcgagcagtgactatcagcagttaccatctgacagttattctgtggcttaaggaaaatggcttgtggtcgcagtccaattcctgctggacaggtatccgcatcataagaaaccaccactaaatttggcacctagacraactattattggcagcagagaaagaaggcctgaatcagcattcggatttgagagccctgaccatctaacctggtcactccaggtcaggactgagagtggcgtgtttgcagggtttaaagtgggaacatttaagggattattgcctgatgccatttgacggtctatgaataaaatgattattcaga

SEQ ID NO: 430783 - DNA, 357 bp, Homo sapiens
ctcaaaagtcttttacttggaaactgctgagcctggcgagcagtgactatcagcagttaccatctgacagttattctgtggcttaaggaaaatggcttgtggtcgcagtccaattcctgctggacaggtatccgcatcataagaaaccaccactaaatttggcacctagacgaactattattggcagcagagaaagaaggcctgaatcagcattcggatttgagagccctgaccatctaacctggtcactccaggtcaggrctgagagtggcgtgtttgcagggtttaaagtgggaacatttaagggattattgcctgatgccatttgacggtctatgaataaaatgattattcaga

SEQ ID NO: 430784 - DNA, 357 bp, Homo sapiens
ctcaaaagtcttttacttggaaactgctgagcctggcgagcagtgactatcagcagttaccatctgacagttattctgtggcttaaggaaaatggcttgtggtcgcagtccaattcctgctggacaggtatccgcatcataagaaaccaccactaaatttggcacctagacgaactattattggcagcagagaaagaaggcctgaatcagcattcggatttgagagccctgaccatctaacctggtcactccaggtcaggactgagagtggcgtgtttgcagggtttaaartgggaacatttaagggattattgcctgatgccatttgacggtctatgaataaaatgattattcaga

SEQ ID NO: 430785 - DNA, 552 bp, Homo sapiens
cttgttaacccacatattgttgagtccacattagggattctgatttaataagtcaatggtggagcctaataatttgratttctagcaagtctcaggtgatgtcaatgatactgattagggaacacattttgaaaccactggcatagaagacttgtcttttatttccctgttgtgctgaatactgtccctttacccttccagatctactttctactgttctccacattgctctgaattccaggaggctggctgtccctgagcaatatgagtgaataatccccttctcctttggttactaattggtttgaactaatggaggatactaacagaggggaaagaagagaatggcattggttatttattccccaggccccctctctgccctgtcactgcagattgactgcctccctaaagaaggacacagaaaatgtcatgaggccctctccagccttccatcattgttctcttgacttgagtcttacacctacaggtggtaacagtttccattgcctttagccctgggttcctggaaattccttactgtgttcccag

SEQ ID NO: 430786 - DNA, 555 bp, Homo sapiens
tgatctggccttgaaaaccttcccagtcaggcaatcatctgacccctaactgtatccagttcatgccactgggctgctcctgctatctgtcttgtaaaagcactgcattaatagcttgaacatcagatggcctctaagattcatctctgacatcaatcagactgatggggaaaagttgcccatggggaaactgattaactgggaccacccaagagccccagacatgactactacactatgttgttgaaatttgggttatttttcattgttgttttgcataactaaatttgagtcctgagaatgcaaatctgcagcattttaataccccaaaggaaaacacaaattcgaccagatcaaaactgaattctcattctctgtctcattgcatggacaaatcttccatcttctcagtcactatatagtcccttcttgcagctctcaactcctagcgygcacacacacacacacacacacacacacactcatactcacacttgcactcagtaactggatataatagattctgcctccttaatgatgccctactttcattca

SEQ ID NO: 430787 - DNA, 531 bp, Homo sapiens
tcattaggcagaaagtggtaatggacttttaagatgagacaattcataagaatgagtgatggtatggagttgaaaaagtgtgaagcttaagaagtagcagacctggaacccaagacacatgtgtcaagtgaagcacaatggaaccttggaggyggcggttgcagtgagctgagatcatgctactgcactccagcctgggcaataaagtgagactttgtctgaaaaaaaagggcagggaggtgggtggaggaaattaaactgaaataataaaggacatccattatgtgtcatgcaaagaaaaagagggaaccagtggagatttttctaaacattcttaggtagaatcctctgatcttaggtataatgaattttgatatataacaaccattccaatcaagacatgcaatatttgaaataccctataaggtactttcatgtcccttctaagtggagccctcctcaccctcggaggtaactatcaattagttctgcctatcttgaactttatataaatgacattcaacagtctgc

SEQ ID NO: 430788 - DNA, 570 bp, Homo sapiens
atttccatatcttacaaaactaaacaaataattttaacacctacagaggttaggtatctgcttcacctaggggagagagggcagatagccctgagtaaccatggtttgaattctctgacatggctagggagtctaagtgtggaatccaatgaaagctgttttataggytgaccagtggcctgcagctgtatagtggcctgattaaaaaaaaaaaaaaaatgtgccccaaaatagaaataagtttggacaggctgttttactaattagaaccataaaatatgaagagattcaggttgtaggaagcagaagcaaagctcagaggaagcctatagacatttaatagaaagagtaaaagccatgaagaaaccgtagtcaaaacttttggattagccaaaacttttggattagccaaagttttaaggtaaaataaagctaagaggaaaagaaaagatctagggacaaagacaagtagcaagaagtatttaaaaggaaattcaacaaatataaggggacatcaaaaaatttgtgggaaaatggaattaaaaggtaaaaataaaaactataaacttt

SEQ ID NO: 430789 - DNA, 556 bp, Homo sapiens
tgatgtctgtttttgaactttgtttagttctatagttcatacttgcacaaataacacaatgttataatcactgtggctttataatrtcttactctctgctaataagtcatccaaccttgtttctgtttatgtgtagctcttactgttcctttgcatgcttgtatatattttacaattaacttattcattttcattggaaacaaaaccaaaaatatcaggagatgattaggatcaccctaaatctgttgtccaaattatgtaacattggcatatttttaatagtgattcttctagtctattaacagaatatatttccccttttatttgttttatttaattcttctcctttgtgttttgtagtgttgtgaaagatgtcttgcatgccatttattggatttattactatttgacattttagttctattttaaatggcattttaaaatgcattattgatataattttgatggaatatggaaatacaattgagttttttatatgaatttgccttcagcaacttgttaagttcatttattaattttaaagggtggctgtcaa

SEQ ID NO: 430790 - DNA, 556 bp, Homo sapiens
tgatgtctgtttttgaactttgtttagttctatagttcatacttgcacaaataacacaatgttataatcactgtggctttataatgtcttactctctgctaataagtcatccaaccttgtttctgtttatgtgtagctcttactgttcctttgcatgcttgtatatattttacaattaacttattcattttcattgraaacaaaaccaaaaatatcaggagatgattaggatcaccctaaatctgttgtccaaattatgtaacattggcatatttttaatagtgattcttctagtctattaacagaatatatttccccttttatttgttttatttaattcttctcctttgtgttttgtagtgttgtgaaagatgtcttgcatgccatttattggatttattactatttgacattttagttctattttaaatggcattttaaaatgcattattgatataattttgatggaatatggaaatacaattgagttttttatatgaatttgccttcagcaacttgttaagttcatttattaattttaaagggtggctgtcaa

SEQ ID NO: 430791 - DNA, 556 bp, Homo sapiens
tgatgtctgtttttgaactttgtttagttctatagttcatacttgcacaaataacacaatgttataatcactgtggctttataatgtcttactctctgctaataagtcatccaaccttgtttctgtttatgtgtagctcttactgttcctttgcatgcttgtatatattttacaattaacttattcattttcattggaaacaaaaccaaaaatatcaggagatgattaggatcaccctaaatctgttgtccaaattatgtaacattggcatatttttaatagtgattcttctagtctattaacagaatatatttcccctkttatttgttttatttaattcttctcctttgtgttttgtagtgttgtgaaagatgtcttgcatgccatttattggatttattactatttgacattttagttctattttaaatggcattttaaaatgcattattgatataattttgatggaatatggaaatacaattgagttttttatatgaatttgccttcagcaacttgttaagttcatttattaattttaaagggtggctgtcaa

SEQ ID NO: 430792 - DNA, 627 bp, Homo sapiens
gagttttttatatgaatttgccttcagcaacttgttaagttcatttattaattttaaagggtggctgtcaacatccttgtttttatttttgtaattacataatctgcaaatagcaacactttgtttcttccttttcctttcaaagatttcccattttaatactttttttggataggatacagaatatttcatagataatatttattaagaaagattgtttttattcactataaattggtttctattcaaatagtgttgacatttataaaacgatttttctccatctactgtgataatcatataatttgtatttattgtgttaatattgtaaattatattaattttcaattactaagacttttctgaaataagcttaatgagattgaaaaatagtatatcctcattttactatatgtcaattagatatcaattttacattaataactcattgaagatttttggattcatgtgtaagagagaaattggctaagacttttcattttttttttttgttattttcctttcaggtttccrtatcaaagttttgctagggcctcatgatgcaagtcgagaatttttctttttttctcattctctgggaaaagaaaagaaaacactgcatgacat

SEQ ID NO: 430793 - DNA, 561 bp, Homo sapiens
tattcgattttaaatataccatcttgttagttattgttttgtatttgcttcatccacttttygttttttgtttttcatttttctgttttttaattaatcagatatatttataactttattttatctccattattggcataatctatctatctatctatctatctatctatctatctatctatctacctacctacctacctttgatttttaatggttatcctatagctttaaaataccttttcaattcattatggcctacctttaaaagatccaggaatctgactaccgtgtatatatctaaaataaaggaaatcagtatttagaaaagatattttcactcttatgtttgttttctacagcactattcacagtagccaaaatatggtttcagactaagtgccatcaacagatgaatggataaagaaaatatggtacatatgcacaatggaatattattaagccataaaaaataacaaaatcctgtcatttgcagtaatatggatggaactataggtcattatgttaagtgaaataagccagacacagaaagacaaatattac

SEQ ID NO: 430794 - DNA, 561 bp, Homo sapiens
tattcgattttaaatataccatcttgttagttattgttttgtatttgcttcatccactttttgttttttgtttttcatttttctgttttttaattaatcagatatatttataactttattttatctccattattggcataatctatctatctatctatctatctatctatctatctatctatctacctacctacctacctttgatttttaatggttatcctatagctttaaaataccttttcaattcattatggcctacctttaaaagatccaggaatctgactaccrtgtatatatctaaaataaaggaaatcagtatttagaaaagatattttcactcttatgtttgttttctacagcactattcacagtagccaaaatatggtttcagactaagtgccatcaacagatgaatggataaagaaaatatggtacatatgcacaatggaatattattaagccataaaaaataacaaaatcctgtcatttgcagtaatatggatggaactataggtcattatgttaagtgaaataagccagacacagaaagacaaatattac

SEQ ID NO: 430795 - DNA, 566 bp, Homo sapiens
gcttagtagtctttgtaaggcttgcgcttcctctattttaccactcctagaatttagtcctccagaggtgctaatttagagtgagggatatttcttagggatctttcttagtgggtcttgggttgcaattacagtttttcctccatagcgacatttataaaaaactctgttctgtttttcagctgctttctgagtgacttcttagtctcttgggctgttcaattgggtggcaaatgctgcaagggaaaaactggcraatagtgttgagtttaattttctgcttcaccatctcagggttttgtttttaatgctggttcttgtaaccttaaaccctgacatttttcttcccagcccagtgagattacctaaggtctggtgggttctcaggcttttacgatctatccctctacctaacttcttagttttctgcctaaacacaagaatcactaaatttctcagccaaaaagcaacatgcagatgttgggctcaactcaatgagcttctatattctcctttcctcgataatttggctcttcacttcttagttgttgagcagctcctaaaag

SEQ ID NO: 430796 - DNA, 566 bp, Homo sapiens
gcttagtagtctttgtaaggcttgcgcttcctctattttaccactcctagaatttagtcctccagaggtgctaatttagagtgagggatatttcttagggatctttcttagtgggtcttgggttgcaattacagtttttcctccatagcgacatttataaaaaactctgttctgtttttcagctgctttctgagtgacttcttagtctcttgggctgttcaattgggtggcaaatgctgcaagggaaaaactggcaaatagtgttgagtttaattttctgcttcaccatctcagggttttgtttttaatgctggttcttgtaaccttaaaccctgacatttttcttcccagcccagtgagattacctaaggtctggtgggttctcaggcttttacgatctatccctctacctaacttcttagttttctgcctaaacacaagaatcactaaatttctcagccaaaaagcaacatgcagatgttgggctcaactcaatgagcttctatattctcctttcctcgataatttggctcttcacttmttagttgttgagcagctcctaaaag

SEQ ID NO: 430797 - DNA, 604 bp, Homo sapiens
gcggggctttgggtgttatcaattggacgaattcctgggaattacggatattgctggccacagtatctcatcagttaactgcattcttggatgtgctgggagtcagcttgcacaaattaagtccttgaggaaggggctgccagtgaaagaggcaagatggagtctgtctggctctcttagccaagggagagtcagttcaggtggaaacaaggctaggtgattaaaggaaaagggagagtctaaaaacagggttagtaaaaacaagggtgggcattacattaacatcatagctyttcctactttttttttttttttgagacagagtctcactcttgtcacgcaggctggagtgcaatggcatgatcttggctcactgcaacctccccgtctcccgggttcaagccattcttctgcctcagcctcaagagtagctgggattacaagcgcccactaccacacctaactaatttttgtagctttagtagagctaaaaacatgggatttcactatgttggccaggctggtctcaaactcctgagctcaggtgatccgcctgccttggcctcccaaagtgctggtattacaggtgtgagccacagtgctt

SEQ ID NO: 430798 - DNA, 608 bp, Homo sapiens
gccatcaagtattatagcattgtggtcatgaatgattaaatagataggagaagtataattctcaataaacaccaaatgaattgtttagatgaaactcaaagtttgccaattgaattttttgaaaggcacataattctttatttggttttatttcttctccatcccaaaagaatattgaaygatggaacttgggcagcacaaatgccttggattcttagtcctcagtgttactttgttttgttttaattggctcttttaaagggactgtgtggtcaagaggcaaacacagagcaaacagagggagggagaagggggcagtctgcaccggcctgggttttgatctcccatctattacttattagactgagatttctggcaattttattgaacttttggatacacggtttcttcatctttaaaatatggataattattgcaatttcaggagcttagcgactattgcattaaatcataaatgtagagtatttatcttgacaaatagtaagtgctaataaatggtcatcctcgtacactcatttcttttcctaaatccagagtttctaaaatccaagagtcccttaaattcagaatatcatctctaaagaata

SEQ ID NO: 430799 - DNA, 600 bp, Homo sapiens
acagcttttaaaagcagacaccatgttaaaaatcacatgggtagtctatgggcaagaaaccacaacacaaagaatgtttgactcctttctttaaagactcatgagagaagcagagagtctggattcaagttctaagttctttgttctattttttaaaaaatayatatgcagatcaaaatcccgggcatagatagagacttactccaaagcctattggtcatcattctgatagcccctagcacacaattctctaattctgtatctatgcagctctctctcccactgaagggcttcttcaggcaggggctatgtcacagtggcagaagcatgcatttcaaaactgggccgaagcaaattaacatccaggcttagccagttttaaacactactttgtccacagttttaaattctcaccatggctgcttcattaataaaaatgggtaaaatcatgtctcataactcaatccagaatgagataacgtgtgcaagacacttaacagaatgtctggttcttggagagcaatcaaaaccaccagctagtatgtgctatttttatttccaggactgagtcctagagcatccagtaaataataataaata

SEQ ID NO: 430800 - DNA, 600 bp, Homo sapiens
acagcttttaaaagcagacaccatgttaaaaatcacatgggtagtctatgggcaagaaaccacaacacaaagaatgtttgactcctttctttaaagactcatgagagaagcagagagtctggattcaagttctaagttctttgttctattttttaaaaaatacatatgcagatcaaaatcccgggcatagatagagacttactccaaagcctattggtcatcattctgatagcccctagcacacaattctctaattctgtatctatgcagctctctctcccactgaagggcttcttcaggcaggggctatgtcacagtggcagaagcatgcatttcaaaactgggccgaagcaaattaacatccaggcttagccagttttaaacrctactttgtccacagttttaaattctcaccatggctgcttcattaataaaaatgggtaaaatcatgtctcataactcaatccagaatgagataacgtgtgcaagacacttaacagaatgtctggttcttggagagcaatcaaaaccaccagctagtatgtgctatttttatttccaggactgagtcctagagcatccagtaaataataataaata

SEQ ID NO: 430801 - DNA, 600 bp, Homo sapiens
acagcttttaaaagcagacaccatgttaaaaatcacatgggtagtctatgggcaagaaaccacaacacaaagaatgtttgactcctttctttaaagactcatgagagaagcagagagtctggattcaagttctaagttctttgttctattttttaaaaaatacatatgcagatcaaaatcccgggcatagatagagacttactccaaagcctattggtcatcattctgatagcccctagcacacaattctctaattctgtatctatgcagctctctctcccactgaagggcttcttcaggcaggggctatgtcacagtggcagaagcatgcatttcaaaactgggccgaagcaaattaacatccaggcttagccagttttaaacactactttgtccacagttttaaattctcaccatggctgcttcattaataaaaatgggtaaaatcatgtctcataactcaatccagaatgagataacgtgtgcaagacacttaacagaatgtctggttcttggagagcaatcaaaaccaccagctagtatgtgctrtttttatttccaggactgagtcctagagcatccagtaaataataataaata

SEQ ID NO: 430802 - DNA, 615 bp, Homo sapiens
ctactttgtccacagttttaaattctcaccatggctgcttcattaataaaaatgggtaaaatcatgtctcataactcaatccagaatgagataacgtgtgcaagacacttaacagaatgtctggttcttggagagcaatcaaaaccaccagctagtatgtgctatttttatttccaggactgagtcctagagcatccagtaaataataataaataacaaatgctaatcaaatttaagtgcatacatgaasgaactttgagtcagaagtgagttcagttcagtggcttaccctgtagtagttaacggacttggacaaacctatctcgctgtaccactggagtccttatttattaaagtcataataacagcttatttctcacagagatactatgatagcaaatatgaatgtgtagttgaaagttctttgtaaatctctataagtgaaggctataaatatcagttaagaattactctttgtctctgccagcattctcacttgctggttttcaaacctagaagaacacctttcaactgccttctgaatatatatgcaggaattcaagatagaatattctaacatttggttaaacccctaaaggggtaattcttaaaata

SEQ ID NO: 430803 - DNA, 496 bp, Homo sapiens
attctcttgtagtccctataatacatttctacatttgttaaagatttattttttatttcaataggtttttagggagcaggtggtgtttgggtacatgaatatgttctttagtggtgatttctgagataaaaccgccttccatccagtcattcaaaaggcaggatctgggtggtagaaaattattcatctcaggcttaaaaatcatttgagacccaacccagcctaagctcccttcaggctccaaaggttttcttggctatacctgtacaaggaaactggaagggttatctattttgattattctctgtcgttgtagggagaggcagggcaatttatccaagaacacacaaagccggattgtttaatcaaattaaaagggagtaagcacactagagcttgagtctcaatgaaagcaacagcaatggtttcttatactccaaaaatattttgaagcatacaaaatrgattcatatagttttttctttttttatcgatt

SEQ ID NO: 430804 - DNA, 541 bp, Homo sapiens
tgacacagatatggagaatgaatttgacaacttcttgccaccttcactcggttatcctagtcccagcccccattgtctctcaccgggatggctgagttttcctcttaactggtctcattcctctgctgtcccttacccacacaggatctactggaatatttcccttgaaaatttttactagcataaagcatgcatgcagagaagtgtgcatacaataagcatacggcttgataaacttttacaacttgagcacccccagtaaccagctccagatgaagaatcagaccctgtcccaccatcctcaggcttcctcctactcccygccagacacagcccctcttaacatcaaccattgcctgacctctcacagcacaggagagttttgcccacttttctactttgtataaatggaatgcagtgtgagatctttagtatctggttttccccccacttcacggtatttgtgacattcctgcccattgacctatgtgaaatcctttagaaaacattcatcctaccatgtcactcccctgccccaaac

SEQ ID NO: 430805 - DNA, 609 bp, Homo sapiens
ggagaatgaatttgacaacttcttgccaccttcactcggttatcctagtcccagcccccattgtctctcaccgggatggctgagttttcctcttaactggtctcattcctctgctgtcccttacccacacaggatctactggaatatttcccttgaaaatttttactagcataaagcatgcatgcagagaagtgtgcatacaataagcatacggcttgataaacttttacaacttgagcacccccagtaaccagctccagatgaagaatcagaccctgtcccaccatcctcaggcttcctcctactccccgccagacacagcccctcttaacatcaaccattgcctgacctctcacagcacaggagagttttgcccacttttctactttgtataaatggaatgcagtgtgagatctttagtatctggttttccccccacttcacggtatttgtgacattcctgcccattgacctatgtgaaatcctttagaaaacattcatcctaccatgkcactcccctgccccaaaccctaccctggctttttatgacattcagattaaaactcttacctttctgcacagacgcccacctgttttggctcccactcc

SEQ ID NO: 430806 - DNA, 413 bp, Homo sapiens
caggccattgctggctttgaagatagaaggggccatgagctgaggaacacagtctctagaagctggaaaaaataaaaaagactcttctctagaacttccagaaggacacttccaggggacagagccacagccaggaacaggcacactgaagaacattcctgccaacaggagccacacttctcatccgctcaaggtggaaagaacaggtgtcccactcrgtctttaagcccctccccaccaccgcaaggccagacagtgcatgaagcagtactgccttcaaaaacagaaaatggcaatgtctgcaatactacaaaacctcagtgaaagggaattttcagaaaccatgtttctgaggttaattgaattttgaggtcaacagataacaatgagacaccactttgggtttcaatcac

SEQ ID NO: 430807 - DNA, 413 bp, Homo sapiens
caggccattgctggctttgaagatagaaggggccatgagctgaggaacacagtctctagaagctggaaaaaataaaaaagactcttctctagaacttccagaaggacacttccaggggacagagccacagccaggaacaggcacactgaagaacattcctgccaacaggagccacacttctcatccgctcaaggtggaaagaacaggtgtcccactcggtctttaagcccctccccaccaccrcaaggccagacagtgcatgaagcagtactgccttcaaaaacagaaaatggcaatgtctgcaatactacaaaacctcagtgaaagggaattttcagaaaccatgtttctgaggttaattgaattttgaggtcaacagataacaatgagacaccactttgggtttcaatcac

SEQ ID NO: 430808 - DNA, 635 bp, Homo sapiens
caccaccgcaaggccagacagtgcatgaagcagtactgccttcaaaaacagaaaatggcaatgtctgcaatactacaaaacctcagtgaaagggaattttcagaaaccatgtttctgaggttaattgaattttgaggtcaacagataacaatgagacaccactttgggtttcaatcacccattgcctgtgaagggtcagcacccacytgaacctttcacaactaaggatatggcagacccggagggacatgagtcctgttaaaagtcccattggaggacacaacagatgtcactgcagaaggggcagaggatggggtggaacctcacactccactctccccagagcttgcctttaaaaggaacaaattaagtcctgtgatcaggtggcggttgtgctatttgtctcttttccctaactactgggatccagggaagagggaggggatgtgtgtgtgtagacacattgtgtgtgtgtgtccatatatgacacacacagagcacaggtacatgtgttctggttaactcaggtgttttggaggtagccagtgtgtgagaacatttatgctctgacacattcttcgtagtgagtctgagtaagggtttcgatgtataacccgcacagattgaacatgaga

SEQ ID NO: 430809 - DNA, 557 bp, Homo sapiens
tagaggaatcctttgtcctctcagtggcatagctagtatttcttccatggctagctgattaatggcagacaaagcagcatgcctattgcacatatctatagcacaagctatagtaacaagacttatcaatatctcaatgctatagcaagaaaaagcattcagggagaattatgcaattatttttctgtagtttctgactccttgatttgggaaagttagtagctgaatgctcagagagagagagaaagagaagggttgtaactatatagagggttaggttaagccttgtggattagctgcagttggacaggagcttggtagaggaataatagactttccatgttctttcattcaggcccactggctatttcattcaccgctttttaacttacatttcatgacttttctagaattaacagggcaaatggttcaaaatactgccagttaatttgtagataattttaaattctctcatcattgtgagataytgtggtacagtgaaaaaagtactatattttgaagcaaaacattgagaccctcttttaccatgtactaac

SEQ ID NO: 430810 - DNA, 559 bp, Homo sapiens
tgttgtaatgaaagtcttttatgtcctggttggtgatttataattggtttcatcaagtataaaactcagaagtataaatgtcaagagttaactgatacagcttaattggtcatttccaattttgatgtcagtctattgacctaccggctaaaagggcattgtagagtattagttggcatttgtttttggagtcctttatgatttctttcttattagtgttcacagcagtgtaccattaaagtttttggcttcagtacacattctgattattcctgaacctgcatagtcacaataggaagggtagtgttgattcaaacaaaattcagatccatgtatttttggcaggtatagtgtgttcttctgcaccaactcacrtattccattttgtgcctttacaaaactataggaatagtttagtgattgcctaaaattttcctagtaaattgaatgtttttctacaaaaatgtcttaaaaatcagaagataatatattcagtaaatttattttatgtacctattatattgtctagtactttaatatgtataattatttatggttt

SEQ ID NO: 430811 - DNA, 473 bp, Homo sapiens
taaccttcacatcacattgagtactctatgaagaatcagttacatgggctggacttttgatcagaccctcatagaaaacagctgagcatgatgggcctggcattctattgatgattaccaatacagtcatgtattgcttaaaaagcacctggccaagttatacatattataaaggctttttggtattctcrttgagatggattgagaaatattttatatatattttttgagaaacgttttatgtatgaataatagatgggcaatatgaaatcacagtataaaatttagttttctttcaactagtctcaaaatttcatgcccattacaaaattaaaactaagaaaaaaaattagccatgtttattttttctttttctgttgtcagtgttcttttaacaccttagctcttcagggtgctctccctgcagctatatttttagatgtttcccagtttctctcctcatcaggatcatt

SEQ ID NO: 430812 - DNA, 473 bp, Homo sapiens
taaccttcacatcacattgagtactctatgaagaatcagttacatgggctggacttttgatcagaccctcatagaaaacagctgagcatgatgggcctggcattctattgatgattaccaatacagtcatgtattgcttaaaaagcacctggccaagttatacatattataaaggctttttggtattctcgttgagatggattgagaaatattttatatatattttttgagaaacgttttatrtatgaataatagatgggcaatatgaaatcacagtataaaatttagttttctttcaactagtctcaaaatttcatgcccattacaaaattaaaactaagaaaaaaaattagccatgtttattttttctttttctgttgtcagtgttcttttaacaccttagctcttcagggtgctctccctgcagctatatttttagatgtttcccagtttctctcctcatcaggatcatt

SEQ ID NO: 430813 - DNA, 534 bp, Homo sapiens
ccaatggcttttctgtttggccatgtcaagtctacataaaatttactcattctccttggtgaatgactagctttgttcaattagatagcctccattcttttctgaaaataaactgttatttcatcctaagtaattaatatctgaattttkgtatgttttggaatttctatgtttatatctgtaataaaattaagatatatgtacatcttaatttattgagtcaatattaatatatttctgaaataattcaaagattaatagcactattttataacaacattatagacaatattggtagatgcatcattcattgttatttggatgacttaaattatatcagaattactaaataagaattaaatattgataaaaatagagggaaagagtatcccatactgtgccatctttgaggtcacagctcatgaaagagagaaaactgcaaaacagactttatctttgggtattatttcacaacaatcttatcttactttgttctgtggttggcaggccgtgtgctatagaggccaacagcca

SEQ ID NO: 430814 - DNA, 649 bp, Homo sapiens
gtttgcatcttactgatagcatgttgacatttctgggggctaagatgatttcagcattcaactttgtttttccatgcttctatctatctatttatttatttatttatttatttatttgagatggagttttgctcttgttacccaggctggagtgcattgatgcgctctcagctcactgcaacctccgcctcccgggttcaagtgattctcctgccccagactcccaagtaggttggattatgcatgcctggctaattttgtatttttagtagagatggggtttcgctatgttggtcaggctggtctcaactcctgacaacaggtgatccacccatctcagcctcccaaagttctgggattagagttgtgagccaccgtgctggccctgttttcacatgcttctttcttcctcccacacaaactttatttaacttacatgccactttaatgaaattacactaatattacccacgattttcttataacagaataagtaatctttcttctgcctctgtattcctgtctctgcagaatttcatgatttactatgtccttcttcaaagtatctcatttcttggtttttattagtcatttttctgttttgtcacacttcaaagacaaatsaaaattatcccttaaagtttggttt

SEQ ID NO: 430815 - DNA, 560 bp, Homo sapiens
tcattgtcaatatatagaaagacacttaacttttgtatgtctatcttgtatcctatgactttgctgaatttattagttttagaaactttttgtagacttttttcaatttcctacatagacaataatagcacttgcaaatagggataggttttttatttttgttctttctttctgatctgtttgtgttttcttgccttattgcacaagctagracctcaactctactatactgaataacagttaagagaatagacatccttgccttcatctgggtcttagattggaccagccctgcatcctgaaatacactgttcttgatgatggtgtataattatttttatatattgctaaattatatttgctaatattttgctgaggatttttgtatctacactaatgagggatattgatctttggctttattttttcatactgtctttggtttgtgtatcatagtaattctagcttcataaaatgaattgagaagtgttacctctggaagagactgagattttctgaaagacattgagtagaacttggtgttacttcttttttgaaca

SEQ ID NO: 430816 - DNA, 501 bp, Homo sapiens
ggatttttgctgttcttgaaagaggcttttttccccttaaaataattaatttattctcataattgtaattcctatacttggagaaaggctctatcaactcaaggttaaaagatttcaaagtatcaataaaaggaaacaattgtattctttttcattgatttatttaataaacatttcttgagtacctagtatatgtggtagaagctaaggatagaaaatctatgagaaatttaagatttagaaagagagagaggcaaacaaatcaatgattttaggacagtgagataatatagtatttatgataatataattcctggggagtataaaaacatggaaaagagaaactcagtatgggttggtaaatgttcaacaactagttctttggaggaaaaaaaagcaatttgaggcaggtgtccattcccctggtgtaaatacctctactatggataatttggggcatcartatgatgccactgaacatagaggtgggaaagaaacctg

SEQ ID NO: 430817 - DNA, 566 bp, Homo sapiens
ccttccatctcagcctgttgagtagctggggctrtaggcacatgccaccatgcctagctagctttttgtatttcttttttggtagagatggggtctcactgtgttgtccaggctggtcttgaattactgggcttgagcatttctcctgcctctgccttccacagttctggggttacaggcatgagtcactgtgcctggccaccagagctaacttttttttttgaatcagaattacacatttttatttacttgatgaaagggaaggtagattaagttcatgtataaaaaaacaaagcagcttgtgattcgtgatgtgtagggtttcttttgaaatttgtttccttaggaagtttataatctgatcattttcttctcttggcttcattgatccaaactttgaataggacactcctctgtttgggttttataggttctttcaattcagtgtaaattttagggtcaatgcattaatttctgcaagtttcctggggttttgattgaaattatgttgaatatgtagactaatttgggtatcagttacatcttaacaatgttacatcttctga

SEQ ID NO: 430818 - DNA, 566 bp, Homo sapiens
ccttccatctcagcctgttgagtagctggggctgtaggcacatgccaccatgcctagctagctttttgtatttcttttttggtagagatggggtctcactgtgttgtccaggctggtcttgaattmctgggcttgagcatttctcctgcctctgccttccacagttctggggttacaggcatgagtcactgtgcctggccaccagagctaacttttttttttgaatcagaattacacatttttatttacttgatgaaagggaaggtagattaagttcatgtataaaaaaacaaagcagcttgtgattcgtgatgtgtagggtttcttttgaaatttgtttccttaggaagtttataatctgatcattttcttctcttggcttcattgatccaaactttgaataggacactcctctgtttgggttttataggttctttcaattcagtgtaaattttagggtcaatgcattaatttctgcaagtttcctggggttttgattgaaattatgttgaatatgtagactaatttgggtatcagttacatcttaacaatgttacatcttctga

SEQ ID NO: 430819 - DNA, 566 bp, Homo sapiens
ccttccatctcagcctgttgagtagctggggctgtaggcacatgccaccatgcctagctagctttttgtatttcttttttggtagagatggggtctcactgtgttgtccaggctggtcttgaattactgggcttgagcatttctcctgcctctgccttccacagttctggggttacaggcatgagtcactgtgcctggccaccagagctaacttttttttttgaatcagaattacacatttttatttacttgatgaaagggaaggtagattaagttcatgtataaaaaaacaaagcagcttgtgattcgtgatgtgtagggtttcttttgaaatttgtttccttaggaagtttataatctgatcattttcttctcttggcwtcattgatccaaactttgaataggacactcctctgtttgggttttataggttctttcaattcagtgtaaattttagggtcaatgcattaatttctgcaagtttcctggggttttgattgaaattatgttgaatatgtagactaatttgggtatcagttacatcttaacaatgttacatcttctga

SEQ ID NO: 430820 - DNA, 632 bp, Homo sapiens
aattaaaactacatgctctggagttacactgcctgggtagaagtctttgcttagctgtgagaccttgaacaaagttcttaaattctccatgtctcagttcctttatctgtaaaatagagatactaacagtttccacattatagtgttgtggtgagtataaatgccaatatatttataaagtactatgaacagtacgctagtcaatacatgtgaataaccacaataaattttatttttttgatgttattttattgataaaataactcagaagcatttgtgccatgagtaaatgctcccatttttagcttccaagtcttctttacaataaaaatgtgttagtgtttcaaatatcagaccactgcctctcaatgtgtccatcaataacacgttgctcctttccccataccacttctagttgattttctactcagttatgattcattttcttagagttatgcctcaagtgarcatagggttaggtacagagcaaaactgaatgactctcttaatagtagagcagacaaattttaatatatggcctttccagacattgatttgagctgattaattttttaattctctccagatacttgatcaggctgtcaataattgagatggccaactaatgggct

SEQ ID NO: 430821 - DNA, 592 bp, Homo sapiens
cattgttagtaaggactttcaaatttttatcttgttctaaattagtttaaataaagttactgattctttgctgaccaatggttttcacgctgcttcttgtgagtaaaacaaatggggtgaggcgaaaatgtactctttcctccctcatttatatttctaaatgacttgtgaataggtagatatatcctaggaaagacatcaacattattatcaaattacatatcacctatttttttcaatgaactttcccacattttctagagtctccttaaaagtaggatcatcattaaaatataactaaaawgtgttatttaatacatctttcattttttaatgtcacaagtaatcatgcaccttatattagaataatttccatcttctaactccagctgttcaaaatggcatgaaattcatttaaaaacttatagaactattggactgagatttctttaaataaaagttttgtgacaaataaagttatatctgcctagtcttcagaacaacagaatgcctactgggaaatgctagctgggagtcaacccattggatacatttaatttacacctggctacttctcttcacaaatcatctc

SEQ ID NO: 430822 - DNA, 560 bp, Homo sapiens
gagagagacttcatatgtattatcccagtttcaatgatattgcagtggctcatggcataaccaaattaacttagaatattgttgtccagccaatactctatattgggagcaggactcctgtggctggcaccatctatttcatccttgggratcctttgactcagtagccacagatacattgctgtttttctagggtatggggtttgtgacctctggctgactcagtcttggctcacacaatggtgactttaaggcatccaccttaatttggggcattagctgccgcaatatcttatatctcttaagttctcccagtttcagcatcaaggatagggaagtttctctgcacagtgttgataacctcaagaatttacctaggtttctttgggtctctttctcaattttctagtgggtcaattttatcagaattctagactcaatccaggccattaagagcccaaatactagtcaatgcctcatctgtggttttccacaggagtttttctgtctcagaaaaatctcctcaagaggagtaaagcttccttatagcagcaaagtcc

SEQ ID NO: 430823 - DNA, 585 bp, Homo sapiens
ctacccagtgcaaatcttagtattagttgttacagtgctgcaggtctgagactggactcgattccagtctggaattctcagacaaggaactcgttccatttagaggaaaattctggcatctgtattttacctatttttgttatttagcttgcratgacctccttgattcctcctcattaaaaggcaaagaagtgaaggactgtctatcgcccagtggcccatataatttgcaaacatctttgttactgattcttacagacttctctcaaatatttatcttcctgaaatttttcaacattcttggatgagtgtgtatatcctttgatacttattggggatatggacccttagttatgtttctgtgtaaataagcgaggtcgtggtacagggacagagaggaatcagagagcagggaaggagagagacttcatatgtactataagtttcaagtgatgtggtggtggttcatggcataacccaattaacttggaatatttaataggcctgcagggctctcatcttttctcttccagaaagccatgactttgtcagcatcccatcctcatcactaacattataaaaatc

SEQ ID NO: 430824 - DNA, 602 bp, Homo sapiens
ttagttgttacagtgctgcaggtctgagactggactcgattccagtctggaattctcagacaaggaactcgttccatttagaggaaaattctggcatctgtattttacctatttttgttatttagcttgcaatgacctccttgattcctcctcattaaaaggcaaagaagtgaaggactgtctatcgcccagtggcccatataatttgcaaacatctttgttactgattcttacagacttctctcaaatatttatcttcctgaaatttttcaacattcytggatgagtgtgtatatcctttgatacttattggggatatggacccttagttatgtttctgtgtaaataagcgaggtcgtggtacagggacagagaggaatcagagagcagggaaggagagagacttcatatgtactataagtttcaagtgatgtggtggtggttcatggcataacccaattaacttggaatatttaataggcctgcagggctctcatcttttctcttccagaaagccatgactttgtcagcatcccatcctcatcactaacattataaaaatctctgaagggtctgagatttttctctgctcacaacttaac

SEQ ID NO: 430825 - DNA, 585 bp, Homo sapiens
ctacccagtgcaaatcttagtattagttgttacagtgctgcaggtctgagactggactcgattccagtctggaattctcagacaaggaactcgttccatttagaggaaaattctggcatctgtattttacctatttttgttatttagcttgcaatgacctccttgattcctcctcattaaaaggcaaagaagtgaaggactgtctatcgcccagtggcccatataatttgcaaacatctttgttactgattcttacagacttctctcaaatatttatcttcctgaaatttttcaacattcttggatgagtgtgtatatcctttgatacttattggggatatggacccttagttatgtttctgtgtaaataagcgaggtcrtggtacagggacagagaggaatcagagagcagggaaggagagagacttcatatgtactataagtttcaagtgatgtggtggtggttcatggcataacccaattaacttggaatatttaataggcctgcagggctctcatcttttctcttccagaaagccatgactttgtcagcatcccatcctcatcactaacattataaaaatc

SEQ ID NO: 430826 - DNA, 506 bp, Homo sapiens
aacagtgtctgttaatgttgaatttactttcagatattccagacaattatgtcccatgatgaataactgaatggaagatgtatagctgaaataatttataaaatttcttaatgaccattgttttacttatagtcatgtaaatattcatatcctgatactcattcccagttttgagacatcctgaaacatttcaaattttgcatttatagtgaaactttaagattttatatcgcttttatacttttagacattgaagagagcctcamaaaattaaatgtaagactttggttaattatcaaaaggtttggagtcactgatttatattatacagaatttacttctattctaaccctgcattagaaatttcaaagcatctcgcctttcttctttttcaaagaggtagactgaagatgaatacatgtccctttctctgccctgatgcacagatgttctttctttatttctttgtcatagtttttttctctctctcttgcgttcagatagat

SEQ ID NO: 430827 - DNA, 581 bp, Homo sapiens
aacaaaaccagacttagggatgatccaggagttgaaattatcaaacagggactatgactaatgtattaaagaacctaataggaaaaagtggacaatctgcatgaaaggatggagaattatggcataaaaattgaaagagcaggaaagagcaaaatgaaggtgagaagtgaaaggaaatattatcacagatcacaaattctgcaataagtggataaatttaccaacaacaatcccaaatatggtgcagctaagaacagagtttcagaatccaagaagcgaaattgatcaaactgaaaggataaaaagataaatccacaactatgggtttttctgatgaccagaactcctctgtctgtagttgatagaatgagtcgaaatcagtaactatatagaaggcctgaacaacatcctcaaacagtttgacataaatgataattatagaatactccacccaataacagcagaacatggaagaaaatacttacaaaatacacatcataaaggactgatatgcaggatatataaagaattctcacarttcaatgatcaaaaccatataacccaataaaacaagttgcaaa

SEQ ID NO: 430828 - DNA, 521 bp, Homo sapiens
aagaaaattaaaaaaattaaaatcagagtaagatatcactgtagacctattagagcaaaatgaaaacagaacaaacaaacaaaatcatgaccttaccaagtccgagtgaaaatgtggagcagttggaacactggtacattgctggaagggatgcaaaatagtactgcaattttggaaactgtttaatagttccttataaagttaaaaatacaaatatcatatgacccagcaatacaatttctaggtatttactcaagtagaatgaacatgtgtttctacatacaaagttataatgaatatttaagtgtgaatgaatacccatacwtgccaaaaactagaaacaacctaagtgtccatcaactgctgaataagtaacaaactggtatattcatacaatgacatactacttagcaataaaaaggattgaactactgcccagtgaaaaaatacactcaaaaggctacatgctgcacaattacatttatacaacattaaaaaaataaaaacgtaggaacagaaaa

SEQ ID NO: 430829 - DNA, 511 bp, Homo sapiens
agagttgaaattctgtataattaattacaccttatgcagataaaaagaaaggaagcgtaaaagcaaaccactctgctagtgaaagtatgaaaaaatattaaaagcttatttgttatcagtagtttcataaccactgccaagctttgttctaagattttgaatatattggattgactttcactgaakaaagagtaattgtaatacttttcagcttgtgagaccttacatctaagtctcactgagaactttttgatcactaattaaagctgctaaacagttagtgtacttctattgaatagaagcattttcatgattgatgagacagagccaccattaaaatggggtacagcaatccacagatagaataaaattacttataaagggaaatgactccacattcaattgaaacagcaggtccagaaaacatgtaagaaacaattaattatataggctgaaaattgtccaaatccctggaaaactgtccaaggtcagtttcccttcaccctaaaat

SEQ ID NO: 430830 - DNA, 511 bp, Homo sapiens
agagttgaaattctgtataattaattacaccttatgcagataaaaagaaaggaagcgtaaaagcaaaccactctgctagtgaaagtatgaaaaaatattaaaagcttatttgttatcagtagtttcataaccactgccaagctttgttctaagattttgaatatattggattgactttcactgaataaagagtaattgtaatacttttcagcttgtgagaccttacatctaagtctcactgagaactttttgatcactaattaaagctgctaaacagttagtgwacttctattgaatagaagcattttcatgattgatgagacagagccaccattaaaatggggtacagcaatccacagatagaataaaattacttataaagggaaatgactccacattcaattgaaacagcaggtccagaaaacatgtaagaaacaattaattatataggctgaaaattgtccaaatccctggaaaactgtccaaggtcagtttcccttcaccctaaaat

SEQ ID NO: 430831 - DNA, 574 bp, Homo sapiens
cataagactaacttttgaagtaagtgctaaaactatttatatatactagacaattttctcaagatttgtcctttttgtctcttagactctcactaaaactccgtcatcaagttgtaattcacacatgtagacaagccttcagcctctccaaacatttttaaaatctgtaaattcaaracatttaaaaagaagacacatgatctcatctggactgctgcttgatcttgtttgatattcttcagcactctactttttataacgggtcaatagcagacgggcggtaactgatctccttatttcagagctgaaaacacaaggcactttgcgttgggtgcagttctattctgttatgctactcccgtttgtcagtaggtaaaaacttttcccattccccagaaggcagtacttctatgaatagttgctttagacaagcattcattgttcaaagggtttgattcctcactgagcaaaagctacagcattataaagatgccagttgaaatttttttaagcttgaattttttaaagctagaaaggaaccctcactgttggggaagtcatgaaagaaaacccc

SEQ ID NO: 430832 - DNA, 574 bp, Homo sapiens
cataagactaacttttgaagtaagtgctaaaactatttatatatactagacaattttctcaagatttgtcctttttgtctcttagactctcactaaaactccgtcatcaagttgtaattcacacatgtagacaagccttcagcctctccaaacatttttaaaatctgtaaattcaaaacatttaaaaagaagacacatgatctcatctggactgctgcttgatctkgtttgatattcttcagcactctactttttataacgggtcaatagcagacgggcggtaactgatctccttatttcagagctgaaaacacaaggcactttgcgttgggtgcagttctattctgttatgctactcccgtttgtcagtaggtaaaaacttttcccattccccagaaggcagtacttctatgaatagttgctttagacaagcattcattgttcaaagggtttgattcctcactgagcaaaagctacagcattataaagatgccagttgaaatttttttaagcttgaattttttaaagctagaaaggaaccctcactgttggggaagtcatgaaagaaaacccc

SEQ ID NO: 430833 - DNA, 574 bp, Homo sapiens
cataagactaacttttgaagtaagtgctaaaactatttatatatactagacaattttctcaagatttgtcctttttgtctcttagactctcactaaaactccgtcatcaagttgtaattcacacatgtagacaagccttcagcctctccaaacatttttaaaatctgtaaattcaaaacatttaaaaagaagacacatgatctcatctggactgctgcttgatcttgtttgatattcttcagcactctactttttataacgggtcaatagcagacgggckgtaactgatctccttatttcagagctgaaaacacaaggcactttgcgttgggtgcagttctattctgttatgctactcccgtttgtcagtaggtaaaaacttttcccattccccagaaggcagtacttctatgaatagttgctttagacaagcattcattgttcaaagggtttgattcctcactgagcaaaagctacagcattataaagatgccagttgaaatttttttaagcttgaattttttaaagctagaaaggaaccctcactgttggggaagtcatgaaagaaaacccc

SEQ ID NO: 430834 - DNA, 574 bp, Homo sapiens
cataagactaacttttgaagtaagtgctaaaactatttatatatactagacaattttctcaagatttgtcctttttgtctcttagactctcactaaaactccgtcatcaagttgtaattcacacatgtagacaagccttcagcctctccaaacatttttaaaatctgtaaattcaaaacatttaaaaagaagacacatgatctcatctggactgctgcttgatcttgtttgatattcttcagcactctactttttataacgggtcaatagcagacgggcggtaactgatctccttatttcagagctgaaaacacaaggcactttgcgttgggtgcagttctattctgttatgctactcccgtttgtcagtaggtaaaaacttttcccattccccagaaggcagtacttctatgaatagttgctttagacaagcattcattgttcaaagggtttgattcctcactgagcaaaagctacagcattataaagatgccagttkaaatttttttaagcttgaattttttaaagctagaaaggaaccctcactgttggggaagtcatgaaagaaaacccc

SEQ ID NO: 430835 - DNA, 589 bp, Homo sapiens
gtgtattaatgttccatttccctgatattctcctcatcactgaatattaaacttttccattttatccaacttatgtatattattattgtctyaattgggagttttacaaatcactagtgaggtcgaatgttttttagtgtatgtattgatcatttgtacctttttctgtaaaatctgcgcatataatttgctcatttttttctcttggcattttcctactgaaacataaaagctttctgtgtattctgtttattactcctttgttgcaggtaaactgtaaaaatactttcttccagcctcgagcttgtcatttgccaatatttatgatgtctgtttattaagagttttgtgttgtatgtagcaaagtcattcaacttcttctttatatattttacattttatatcttgtttaggaagatatctcaatccctaaattcaaaaatatttttctatattttttctactactttttaaaatatttagctcttaatctattagtactttttatatagtgtgaggtagctattgaaatcaaattttgttttaaaatagatgttcatctccaatttactaaaagcttgcttttact

SEQ ID NO: 430836 - DNA, 573 bp, Homo sapiens
gacttcaaactttcaatattttaaataaatattcagcaaacagtcttctgtgtatttcttatataagtgtgtgaagtttctctaagtgtttctaaggtatataccttaaagtatgtcaatggtcagtgtccatgctgtccaataaattatttgaaatataatccctttgtgcatacaatgtacctttgtcaaatattataccaacataatattctatcagcactgtacaaataggcctatttttacattctgccaatactaaattattttgaaaaaagttaattgtttaatctcgcatatatatataaatctataatatatgcagattttgaaagaataagtgaatatcacagtctcaccaccatattaatgagttagaacactactggttcctaagaagttgtgagttcctacaaaattatagttatcctctagagtcaattttttgttcattattctctttttccatatatatttagctgtctgaatatgtatgtctagtttkgaaaccctaagtagcaagaataaaactagatgaataataaaaatggaattttacactattagtggaaa

SEQ ID NO: 430837 - DNA, 645 bp, Homo sapiens
ctcacctttaagaacacacatagtttaaaatgaagggatggacaaagatatcccaagcaaaagtgagcaggagagaatatacttatatcagataaaatagtatttaagtgaaaaactggcacaagccaaaggttattatgtattaataaagggatmaatgtatcaagaggatatactaattattaatgtgtttgcactcaacattgttgcactgaaatattttcaatataaatttaaatgtagtttatattttaaatataaaagaaaatattaacagaacttattatgggaggaaaaaaatagctatatggtaatggtaagaaactttcttaccccactttcaacaattaatgggtcatccagacagaaaatcaaaagaaaacagtggacttgaagaacactatagaccagatgcacctaacaaatatatagagaacattccatcaacgtgcaacagagtaaaaacattattttcaaatatggatgaaacattctttaggatagattatatgttaggccacagaataaatcttaacaaatttaagaagaccaaaatcatatcaatcaaactataataatgtgaatctagaaatcaataataggaaaatctgtaaatatgtggaaattaagcaacacacttataga

SEQ ID NO: 430838 - DNA, 490 bp, Homo sapiens
aaagttgtctttctaacgacagaacactgcttcattttcttacaagtaatttcctgagagtgaggaggaattgatggtgggggcggggtggctttcagaaataataagaggttatgaaatttttgtctcaggaaacacttattgatgggactgytcaacagtattcactggcaaatgaaaaaccagttatactggttctgtaatttgccaatgatcctccaggacatcaacacttaaactaacagtatttaaaatcttgccaagactgagtattattaatacttgttatctatgccaatgtgatacgtgaatttttaaacttctttatattctatgtttattttattattaggtaaagtgagaatgttctattgtgtttgtttattgttattttgattggaaaagagtaaggctagaagaaaggacacttagaagattgttggcatagcgcaggttgagcatccctaatctgaaaatctgaaatccaaaa

SEQ ID NO: 430839 - DNA, 617 bp, Homo sapiens
gtgttatgggatgaattgtgtccccaaccaaaagtatatatatatattttgaagtcctaacccccactactttgcaatgtgactttttatttagaaatagggttattgcagatgttactagttaagatgaggtcatactggagtagggctggcctctcatccaatatgactgtatcttcataagcacatggccatgtgaaaacagagacacagggaacaccacaggasatcaaaagcagagaagtgaattaagtgtctgcaagccagggaacaccaaagattaccaggaaaccaccagaagctacaaagaggtagcccagaattgtgagaccataaatttctgcctttgtgatactttgttacagcagtcctagaaaactaacattgataaggagattcaagaagctttaaatgttgttgagaaacagttaccaggaagggagacaatgaatatagagaaagagggactattgatggagtatgttcctggaagagaagacaggaaatactacctcagagaatggccctgggaggaaagacacttcttgaattttattgagaggaaaaaaggaaggtgaggtaattcctacctatgattcccattttctctaaaattt

SEQ ID NO: 430840 - DNA, 584 bp, Homo sapiens
aaccgcaaagaaatcaggccataagagaactgtttgccattgtaaataatgctacagygaatgtgggagtacagatatatcttggcatactgatttcaatttctttggacatatatccagaagtggaattttacaattattatttgtcaattaaaaatacaattaagtctttaaaaaagaactgtgcttgacttgatttgtcagtttttcaagtcctgaaagtgctagcattagtgcttatggaaactgttacgatagattttcatcaaattgagccatttgaattctgaaagtctgatctctttttccagggttgttagatatagccactgtaataaaaaatcgtataagtggaattgttttaatattccaaagtcaagactaaaaagtgcatatatttagtcagtagagtgtagcctcagtacaattttaaaagcttctgatggatatgcgaaagaacaatcccattcagctgaaatacatgatttgattcctgtctagatttctgaaaatattcctcctgggccagtgagagtagccacattagaggttttccaaaaagttagatttagtgttgcaatata

SEQ ID NO: 430841 - DNA, 584 bp, Homo sapiens
aaccgcaaagaaatcaggccataagagaactgtttgccattgtaaataatgctacagtgaatgtgggagtacagatatatcttggcatactgatttcaatttctttggacatatatccagaagtggaattttacaattattatttgtcaattaaaaatacaattaagtctttaaaaaagaactgtgcttgacttgatttgtcagtttttcaagtcctgaaagtgctagcattagtgcttatggaaactgttacgatagattttcatcaaattgagccatttgaattctgaaagtctgatctctttttccagggttgttagatatagccactgtaataaaaaatcgtataagtggaattgttttaatattccaaagtcaagactaaaaagtgcatatatttagtcagtagagtgtagcctcagtacaattttaaaagcttctsatggatatgcgaaagaacaatcccattcagctgaaatacatgatttgattcctgtctagatttctgaaaatattcctcctgggccagtgagagtagccacattagaggttttccaaaaagttagatttagtgttgcaatata

SEQ ID NO: 430842 - DNA, 584 bp, Homo sapiens
aaccgcaaagaaatcaggccataagagaactgtttgccattgtaaataatgctacagtgaatgtgggagtacagatatatcttggcatactgatttcaatttctttggacatatatccagaagtggaattttacaattattatttgtcaattaaaaatacaattaagtctttaaaaaagaactgtgcttgacttgatttgtcagtttttcaagtcctgaaagtgctagcattagtgcttatggaaactgttacgatagattttcatcaaattgagccatttgaattctgaaagtctgatctctttttccagggttgttagatatagccactgtaataaaaaatcgtataagtggaattgttttaatattccaaagtcaagactaaaaagtgcatatatttagtcagtagagtgtagcctcagtacaattttaaaagcttctgatggatatgcgaaagaacratcccattcagctgaaatacatgatttgattcctgtctagatttctgaaaatattcctcctgggccagtgagagtagccacattagaggttttccaaaaagttagatttagtgttgcaatata

SEQ ID NO: 430843 - DNA, 507 bp, Homo sapiens
tatggagattccttaaaaaactaagactagatctacctttgatccagcaatcccactgttgggtatctacccatagggaaagaagtcattatatgaaaaagacacttgcacatgcatgtttatagcagcacaatttgcaatcgcaaaaatgtggaatcagcccaaatgtccattaatcaactagtaggtaaagaaaacattatacgtacatatatctatatatatakagagagagatatgatatacacatatacatatataatacacatcatgtatatcatattccatatataccatgcacacacacacacacacacacacacaccatgggataatactaagccataaaaaggaatgaaataatgccatttgcagcaacctggatggtgttggagaccattattctcagtgaattaagtcaggaatggaaaatcaaacattgttctcacttataagtgggagctaagctatgaggatgcagaggcataaaaattatataatggactc

SEQ ID NO: 430844 - DNA, 514 bp, Homo sapiens
gatttatagctgatgagaatgttgtttctctgaaatcttattaaaagcactaaaatgtgactagtgaatttatgacctaattaattgttatgtgccactaacagaactrtggtgcttaaatgaaatataaatatttttaaaagaacaatgtgaatttgtctctttttccctacagtcctgcagagagttaggtcacaatgccacctggtctgcaaaaaaacaagctctattggggaaatttataaacagaggaacagtgtttgccacattcttttctcccttggagaagcacgtaagggtgaaaacacaatgggaaattgtaaagaacactgttctccaggaaggaaacctgtcctctcttcctctaattttttataggactagggtgagagtgcccttgagaatgtttaaaaaggggtggagcagtagtcagattagggaccagctcttcagggggaggtttattcgcaagacctgaaacactgtttgtgcaaatgacttgtttatacagtga

SEQ ID NO: 430845 - DNA, 479 bp, Homo sapiens
cacctggtctgcaaaaaaacaagctctattggggaaatttataaacagaggaacagtgtttgccacattcttttctcccttggagaagcacgtaagggtgaaaacacaatgggaaattgtaaagaacactgttctccaggaaggaaacctgtcctctcttcctctaattttttataggactagggtgagagtgcccttgagaatgtttaaaaaggggtggagcagtagtcagattagggaccagctcttcagggggaggtttattcgcaagacctgaaacactgtttgtgcaaatgacttgtttatacagtgatgataacacctggaggcctggggaactgatagctttactktccattccactagggtaaaggggagtcacagctcccagctagctcattgccaagacaccagaaaatatatctgctgtgattttatgtttgagcacaaaatatttgtctctgcaattgcccaggata

SEQ ID NO: 430846 - DNA, 537 bp, Homo sapiens
tgtagttttcatttataaaagcaattccttcattgtgccttcttgaaaatttctgcygtaatgttagaacaaatttctcaacttcttcatgacatcattgctatggtgtgtgttcttcaacaattgatatattttactactcctttggaagtcttttcctatactacttttgtgttgacagtgtgtccattcttttttcaattactcatatataactgagttaaatttttcttatgtaggttcttgggaaaaggagaggaaaataactcctggggttttcaaagggtttctcttcactgctgctacagagatagattcactcctctgcctaatttttgtgtatcactccattacttcctgcaagacacatccaagtgggcttctttcactatccacactgtaggaaattccagttcctatactgattggtgcaaacaagaaataaaggtttcgtaagtgacagtaagaacttaccttcaggaatcacatttttgtaggttttctgagattagccacaactgagtcccctgcatttgt

SEQ ID NO: 430847 - DNA, 537 bp, Homo sapiens
tgtagttttcatttataaaagcaattccttcattgtgccttcttgaaaatttctgctgtaatgttagaacaaatttctcaacttcttcatgacatcattgctatggtgtgtgttcttcaacaattgatatattttactactcctttggaagtcttttcctatactacttttgtgttgacagtgtgtccattcttttttcaattactcatatataactgagttaaatttttcttatgtaggttcttgggaaaaggaraggaaaataactcctggggttttcaaagggtttctcttcactgctgctacagagatagattcactcctctgcctaatttttgtgtatcactccattacttcctgcaagacacatccaagtgggcttctttcactatccacactgtaggaaattccagttcctatactgattggtgcaaacaagaaataaaggtttcgtaagtgacagtaagaacttaccttcaggaatcacatttttgtaggttttctgagattagccacaactgagtcccctgcatttgt

SEQ ID NO: 430848 - DNA, 537 bp, Homo sapiens
tgtagttttcatttataaaagcaattccttcattgtgccttcttgaaaatttctgctgtaatgttagaacaaatttctcaacttcttcatgacatcattgctatggtgtgtgttcttcaacaattgatatattttactactcctttggaagtcttttcctatactacttttgtgttgacagtgtgtccattcttttttcaattactcatatataactgagttaaatttttcttatgtaggttcttgggaaaaggagaggaaaataactcctggggttttcaaagggtttctcttcactgctgctacagagatagattcactcctctgcctaatttttgtgtatcactccattacttcctgcaagacacatccaagtgggcttctttcactatccacactgtaggaaattccagttcctatactgattggtgcaaacaagaaataaaggtttcgtaagtsacagtaagaacttaccttcaggaatcacatttttgtaggttttctgagattagccacaactgagtcccctgcatttgt

SEQ ID NO: 430849 - DNA, 613 bp, Homo sapiens
caagtccactgacaaggggtggttttaagtaaatgtggatagccgcattaaaagtcaagaggggctgtgaataatgagtttattgttggttttctaaatttgaaaattttagttggttatatttagggcttgactgagaacattcaaagctgttctcatttgggtaacattagggtgactactatgcacagtatatccaacagtaattaatctgtatcagaatcgatacatcccaaattgaaagcaaggagtaatactttgatcagttattgcccataattatgttaatgataaattaaagtcaatgtattctaatataattccaattaacatgaaaatattaacaaggtctcagaattatctatgagaatscaaataactagtctgccaaaaattttggcaagaatttctataaagaattatggtgagctgaaagtcaagaagatctgccaggatttaatgtcattggcattagtaagaaaggctaaacagttaaatataatgtatggggaggtaaggcacaccaatattggaatggcatatctttgagtaccattgaactgtatcttataatgctcataattatatgccacctagaggatgacgggtttaa

SEQ ID NO: 430850 - DNA, 530 bp, Homo sapiens
atagcatgtcatggacacttccatataagcttttatagacaattgactgaaaaatattcctaaaataacagattttagtttctgtaagcaaaatgcacttacagtttcatctccatgctgattcaatatttatgtcatcacagagaaggtttcgtatccatatgtttatttatttttaaatttttacctccatagactgtgaataactcaggtggtcagggaaggtaaatttgtttcacaaagtttcaagcccacagatgaaaatcctggcacttttagctttctcttcactgatagccagagggatcaatggaagtgaatgactaaatcaataggaaaccatcatcattactgcgtaaaaaaataagctctaaactgtattcttggtkatggtggctcatcaccatcatttcatctaggaagaataacatggtgacatattttgatatctccattacattttctggaacaacactatattatctaaacgtgcttggactgatgtaaactaggggaaccagtgatcttgc

SEQ ID NO: 430851 - DNA, 574 bp, Homo sapiens
tgtttgtctgtctgcactgaatggttaagcaagagttacagaaatgggagtgggaaagacatctggaggtgttgacaggtattgcatgggaaatgcagaaactgagaccatctcctgatatttccagtagtttttttgcttttgttaaggtgaatatagatcaaatcatggtcagagctttctggtgtgggatggcagatctggcagagagttaaatttaaggcacttgcaacagttgaatgagccactttttcatgtaaaggtgagatggcacyggagagctgggcaagctacaagctggaatatactctttctattttataagcgaggttcataggacccctttttacctttgttcgtcattgaatctgagttggtacaccccaaaatgaaatagtatgccagacagtcataaggtcttcaggatcaggagttcagttttgacaagagcccagtagcaagctaatagctgcttttcaaatgaggtgtacctggtacgtgtatatcctgtatgttaaggaggtgatctgtccaaaatcccaaagggctcctgtgaatggaagctgcttacgtt

SEQ ID NO: 430852 - DNA, 595 bp, Homo sapiens
gaaaataactcatagtagaatttaaagtgctaaagcagtgctcagagcaaattcattgcctccgtgacttttctttaagcaagtatgcagtggctcacgcctgtaatcccagtactttgggaggccgaggtgggtggatcacatgaggccaggaattcgagaccaccctgccaacatgacgaaaccccatctctactgaaaatacaaaaaccagccaaatatggtggcatgtgcccgtaatcccagctactygggagcctgagacacgagaatcgcttgaaccccgcaggcggagtttgcagtaagcctagattgtccactgcactccagcctgggcagcacagcaagacactgtttccaaaaaaataaaaaataaaaaagtatgtcagaatgctaactgtccaccaaaaaaaatgaatttcttcttttttaggaatacaactaggctatagatagagtagatagagagatatagtgagatagagataaatgcctctctatatatacatatatatagtctaagtatatttttatacacacagctagactatatacatatatatatgtatctatatagtttatatatagacttcag

SEQ ID NO: 430853 - DNA, 596 bp, Homo sapiens
ttttgttgcttgtgctttcagtgtcatgtcaaagaatccattgccaaatccaaagtcatgaagatttattcctataaattcttctaagagttttatggttttagcttataygtttgggtaattgatccattttgagttcatttttatattcaatggtgtagtaggcatccaacttcattcttttgcctgtggaaatccagttgccaccatgccatttgttgaagagactattattttttgtttgtttgtttgttttgagacggagttttgcttgttgcccaggctggagtgcaatggcacaaccttggctcactacaacctcctcctccctggttcaagtgattcttctgcctcagcctcccaagtagctgggattacaggcatgcaccaccatgcctggctaattttgtatttttagtagaggtagggtttcaccatgttggtcaggctggtctcgaactcctgacctcaggtgatccacccacctcggcctcccaaagtgctgggattacaggtgtaagccaccacacccggcctgaagagactattctttgtcccatataatggtcttgacacccttgttgaaaatcagtcag

SEQ ID NO: 430854 - DNA, 610 bp, Homo sapiens
aatgtacacacccatcccttttaaagaggaaaatgaacacaaccattaacatgacccaaagatattgcctctttatagcatataaaaataagaagcaacagtatataggaccaggcgcggtggctyatgcctgtaatcccaacactttgggaggccgaggtgggtggatcacgaggtcaggggatcaagactagcctgaccaacatggtgaaaccccatctctactaaaaatacaaaaaattagccgggtgtggtggtacatgcctatagtcccagctacttgggaggctgtgctaggagaattacttgaacccagcaggcggaggttgcagtgagccgagatcacgccactgcactccagcctgggtgacagagcgagactccatcttaaaaaaaaaaaaaaaaaaaaaagcaacagtatataaacttaaaactgcttagtgaggccaaggtagggagattgcttgagctcaggagttcaagaccagcctgggcaacataggaagaccctgtctctataaataattttttaaagaattaaccaggaatagtggcacatgcttatactcccagctactcgggaggctgtggcaggaggattgcctgagcc

SEQ ID NO: 430855 - DNA, 610 bp, Homo sapiens
aatgtacacacccatcccttttaaagaggaaaatgaacacaaccattaacatgacccaaagatattgcctctttatagcatataaaaataagaagcaacagtatataggaccaggcgcggtggcttatgcctgtaatcccaacactttgggaggccgaggtgggtggatcacgaggtcaggggatcaagactagcctgaccaacatggtgaaaccccatctctactaaaaatacaaaaaattagccgggtgtggtggtacatgcctatagtcccagctacttgggaggctgtgctaggagaattacttgaacccagcaggcggaggttgcagtgagccgagatcacgccactgcactccagcctgggtgacagagcgagactccatcttaaaaaaaaaaaaaaaaaaaaaagcaacagtatataaacttaaaactgcttagtgaggccaaggtagggagattgcttgagcycaggagttcaagaccagcctgggcaacataggaagaccctgtctctataaataattttttaaagaattaaccaggaatagtggcacatgcttatactcccagctactcgggaggctgtggcaggaggattgcctgagcc

SEQ ID NO: 430856 - DNA, 517 bp, Homo sapiens
ttttctttgcagtgcagaagctttttagtttgacatagtcccatttgtttgtttttgctttaaaaattttttttgcctttgcttttggtgttctatacaaaaaaatccttaccaaggccaatttcaaagagcttcttccctatttttttcttttaggagttctacagtttcaagtattacatttaagtttttaatgcactttctgttgatttgtgtgtgtgctgtaggatgtgttcaatttattcttttgcaggtggatgtccagttgtccaaacacatttttttttgagacagagtctcactccaacacccaagctagagtgtggtggcatgatcttggctcactgcaacctgtgtctcctgggttcaagtgattcttgtgcctcagccctcccygcatagctggaattacaggcatgtgccaccacatccagctaatttttgtatttttagtagagatggggttttgccacattggccaggctggtctcaaactcctggcctcaagcgatccacc

SEQ ID NO: 430857 - DNA, 634 bp, Homo sapiens
ttttttagttttcagtgtacagatgtttcacctacttggttacttttattcatatatatttgagatggagtctcactcactctgtcacccaggctggagatctcggctcactgcaacctccacctcctgggttcaagtgattctcctgcctcagcctcctgagtagctgagattacaggcatgcaccaccatgccyagttaatttttgcatttttagcagagacagggtttcaccatgttggccagtctggtctcgaactcctgacctcaagtgatccaccctcctcagcctctcaaagtgctggaattacaggcatgagccactgtgcccaactattttatatatttttgatgctattgtaaataggattgttttcttgatttcctttttggatattttattgttggcacaaagaaacgcttctgggttttgtatgttgattttgtaacctgcaactttactgaagtaatttattagttcttagagttctttggtggagtctttagagtcttccgtatataggatcacttggtcccatggaaacagttttttagctcttccatttgggtctttgatccattttgaattaatttttgtatatgatatgagataagaatccaatttcattcattt

SEQ ID NO: 430858 - DNA, 604 bp, Homo sapiens
agtgtggacattttaataatactaattctttcaatcaatgaacacaggatatctattttatttttgttttcttcaatttcatcaatgttttttagttttcagtgtacagatgtttcacctacttggttacttttattcatatatatttgagatggagtctcactcactctgtcacccaggctggagatctcggctcactgcaacctccacctcctgggttcaagtgattctcctgcctcagcctcctgagtagctgagattacaggcatgcaccaccatgcccagttaatttttgcatttttagcagagacagggtttcaccatgttggccagtctggtctcgaactcctgacctcaagtgatccaccctcctcagcctctcaaagtgctggaattacaggcatgagccactgtgcccaactrttttatatatttttgatgctattgtaaataggattgttttcttgatttcctttttggatattttattgttggcacaaagaaacgcttctgggttttgtatgttgattttgtaacctgcaactttactgaagtaatttattagttcttagagttctttggtggagtctttagagtcttccgt

SEQ ID NO: 430859 - DNA, 609 bp, Homo sapiens
cttaaaaaaaaaaaaagaacaggactagaaaacttaattttttttgacatatctaaaaaaggggacaagaacagtagcatttgttctccccatggggacaggaatgaagagggaggagggaagagggacttgatttcttctgttcacaagaraatggttggaggggattcttcagagtttttcaggggatgggacccaaatgtagtgcccagactggtcctcaatgatttgtttgattttgttataaatctcttccagtgagtcaccctgtacaatggctaaagtgaagaggaaaacaaaattattactgtggtccatagcacatcccccaaacccagcaatcctgcctctcccaacaatcctacaagtcccccctccaccccctcacccctcacatgaaggacatgttcccaggagtatgggtttgggcttgggttcactggctggctgcctgtgtgttcagggcagtaagggcaaccaacaaggtaccccaagtccagggcttgaagtcaactcactgagacagtgagactaagtagtaatgaccagaaaaatgtgtttattcaaaagatgtttattgagcacccactatgtgccagaccttgcagt

SEQ ID NO: 430860 - DNA, 609 bp, Homo sapiens
cttaaaaaaaaaaaaagaacaggactagaaaacttaattttttttgacatatctaaaaaaggggacaagaacagtagcatttgttctccccatggggacaggaatgaagagggaggagggaagagggacttgatttcttctgttcacaagagaatggttggaggggattcttcagagtttttcaggggatgggacccaaatgtagtgcccagactggtcctcaatgatttgtttgattttgttataaatctcttccagtgagtcaccctgtacaatggctaaagtgaagaggaaaacaaaattattactgtggtccatagcacatcccccaaacccagcaatcctgcctctcccaacaatcctacaagtcccccctycaccccctcacccctcacatgaaggacatgttcccaggagtatgggtttgggcttgggttcactggctggctgcctgtgtgttcagggcagtaagggcaaccaacaaggtaccccaagtccagggcttgaagtcaactcactgagacagtgagactaagtagtaatgaccagaaaaatgtgtttattcaaaagatgtttattgagcacccactatgtgccagaccttgcagt

SEQ ID NO: 430861 - DNA, 570 bp, Homo sapiens
agattggttgcagagtagtcaattttatgctatgtgttttttaccataataaaaatatgtttttaaaaaatgaaagcaaaatagtcttccagacatttaaaagctgaaataactaatcactcaaagatctacattacaaggaagtcctctgagcagaaggaaacttacaccagatggaaatatgaatctatacaaatgaataaagaataccagaaatggtaattatatgagtaattgataagatttttttcrtattattacaatctctttaaaagatagtttattgcttaaacaaaaataataacattgtattctgcagtttataacctgtaaaagtaagatgcatgacaagaacatataggccaagaagagagaaatggaagtataccataagtgaggtggtataacatcacttgaagatagactatgataagttaaacatgtatactatgtaccctaaaacaaccattaaaatagcaaaacaaagagttttttttaaaaatgagataaaatcaaatcataaaaatattcaaataatctaaaataaggcagaaaaaggaaagacggatc

SEQ ID NO: 430862 - DNA, 570 bp, Homo sapiens
agattggttgcagagtagtcaattttatgctatgtgttttttaccataataaaaatatgtttttaaaaaatgaaagcaaaatagtcttccagacatttaaaagctgaaataactaatcactcaaagatctacattacaaggaagtcctctgagcagaaggaaacttacaccagatggaaatatgaatctatacaaatgaataaagaataccagaaatggtaattatatgagtaattgataagatttttttcgtattattacaatctctttaaaagatagtttattgcttaaacaaaaataataacattgtattctgcagtttataacctgtaaaagtaagatgcatgacaagaacatataggccaagaagagagaaatggaagtataccataagtgaggtggtataacatcacttgaagatagactatgataagttaaacatgtatactatgtaccctaaaacaaccattaaaatagcaaaacaaagakttttttttaaaaatgagataaaatcaaatcataaaaatattcaaataatctaaaataaggcagaaaaaggaaagacggatc

SEQ ID NO: 430863 - DNA, 388 bp, Homo sapiens
ccaaaaagggatatatgcatgaaaataagcacmcaaaaaagatgacttatgagtcattagggaaatgcaaacgaaaaccccaaggagataccaatacataattcttagaatagccaaaatggaaaagattaaccataccaaatgctgacgaagatgttgaggaactggaacttcatggtggaaatataagatagtacagacggtttggaaaatagtttggcagttttctaaaatgttaaacttgcccctatcatgtgatccagccatttcaatcctatgtatgtactcaagagaaaaggaattatttatccatacaaaaacttgcatgtaaaagctgatagcagctttatttataatagttaaaaactggaaacagccaaatgtccat

SEQ ID NO: 430864 - DNA, 629 bp, Homo sapiens
tgagagaccagaatgaactggattgagggattacaaagaaaaaatggttgtgatggatgtgttcactccgttgactgtgttgatggttttagctatgtgtgtgtgtmtatatatatatatatatatatatatatatcaaaacaattgtacagtttaaatattcatagtgtttcatatgtcaattgtacctcaataaaactgttttccaaaaaatgttatggtaggttttgtaggagaaagatgtgaagagaaaaaagggaacaaaatctgagaaacaaagaattagacccaagagaaggaaagagaatcccttataggagcatgtagaaacctaggtcttatggttaggtaccacaagatagaatgatattcgtattctcttttagaaggcctttatttatttttttactgaataggtgaagaactacttcagaattcccattcttctattgattctttttctttcctctcattttccagtcttgctgaataattttcttaaaacatccacttccaacactggagaggaatgtaatcttatttctaattgactatttctaatatgacatatttctaatctactatgactaatgtaatagtcaaaggcagtgttttacctatttagcata

SEQ ID NO: 430865 - DNA, 617 bp, Homo sapiens
tcttatggttaggtaccacaagatagaatgatattcgtattctcttttagaaggcctttatttatttttttactgaataggtgaagaactacttcagaattcccattcttctattgattctttttctttcctctcattttccagtcttgctgaataattttcttaaaacatccacttccaacactggagaggaatgtaatcttatttctaattgactatttctaatatgacatatttctaatctactatgactaatgtaatagtcaaaggcagtgttttacctatttagcataattgtttctagttgaagagggtgttttattccttgaaggtcctaatggctcctattcttaattgaaaaatatgaagcttcttgatagggtacaagggaatcatttaccttaccttggtttataagcagtctcagttttcttagattaagaaataattatccaggttattcctatcagattttccctagctagcttcttaccattgaaaattttaaatttactcaagagaaaaatgtatttttrtatacaaatacagcagcatcaattacaatagtaaaaaccctgcaaattcactaaatagctaacattaagaaaatcattata

SEQ ID NO: 430866 - DNA, 634 bp, Homo sapiens
caactgcaaagcaaatggttgcaaccagggttaaggtttttcaggtagatcctgaaactaagaatcaatgaaaaagtgactttatatgtgcacagttttcataccctgaaatggaaaaatgatcattattattaaactagaaggtcagtggtgtctgtatttgcgttataacaatttacagttcttattcttttaaagaatcaattatgtaccccatatttctamtacatagtgaattctcacaatttgctatatttggcaaacatactctttgttttctatgaaactaactccaaggagctgagattccagtaaaacctggaaatgaatagtatattccttagagatgtaaacctctttagagcaatctccagggttctctatgcaagttgacactaaatttataatgataattctagctggccttcccacccacctctagcaattatgcaaagaaatgcccaattttatgttatattgttgttttttaaaacagctttatgaaggtgtaatcaacctacagttaaatgcatatatttggaataagtgtacaataagctttgattacacatacatacttatgaacccattatcgcaatcaggataataaacatatttaccacccccaaaaggt

SEQ ID NO: 430867 - DNA, 519 bp, Homo sapiens
taatggttaggtaaatggtcactttttgtaaatattctgtgtgtgcttgaaaaaaatgtgttttctgcagtttttaggcactgtgtatgtacatatatgtacagatgttccttgacttacgatggagttatatcccaataaattgatcataagttgaaaatatcgtaaggtgaaaatgcagttaatgctggcaaaatggcaggcatctacaacttatgatggtttaacttaatggtattttgattttataatgatgtaaaggcaatatacatttagtagaaaccataaccctgtcataagttgtaaggagctcccagacttacgatgtggttacatcctgataaacccgtggtaaagtcaaaaaatcataagacrgagaccacctatatacacacatgtataaatttagattaagtttgttcattttatttgaatcttctgtatcaaaactcatattttgtgtacttactctatcacttactgagatgaggtgctggaatatccctttatggtttgaat

SEQ ID NO: 430868 - DNA, 603 bp, Homo sapiens
gagattttgctgaaagtggactgaatttcagagagcatagtggaagggttggaggagtcggggagagatagaaaaagaggacagaagaggggatatatggagacttttgggaatagagtgctggaaatgagggtgacctgacaatctggggttcttttgtttactgctaataagtgggggataaagagcacaataagattagtcctagtggactaagggtagtattggcaaggctttgagtgtttgtgaatagggaggattcggtttcyggggctaatgcaaatgtgtcctgtttttgtcagtgagttgcatcttcattctaccatcttgcagtagcgtttttgagaatacaaaatgaacatgtttagatatttgtcttatctttaatgaacaggaatatagataatattttgcagtatcactttgagatgtaatttaacgtattatatttgttctttttagaatggacaacaaattgtggcagaaaaagctttggaatatttagctcaacattcagaagaccaggaacaagttcttacagctgtaaagtaagtaacctacatcctgtggaagagaaagtatttcctctgcttatcttgctct

SEQ ID NO: 430869 - DNA, 603 bp, Homo sapiens
gagattttgctgaaagtggactgaatttcagagagcatagtggaagggttggaggagtcggggagagatagaaaaagaggacagaagaggggatatatggagacttttgggaatagagtgctggaaatgagggtgacctgacaatctggggttcttttgtttactgctaataagtgggggataaagagcacaataagattagtcctagtggactaagggtagtattggcaaggctttgagtgtttgtgaatagggaggattcggtttccggggctaatgcaaatgtgtyctgtttttgtcagtgagttgcatcttcattctaccatcttgcagtagcgtttttgagaatacaaaatgaacatgtttagatatttgtcttatctttaatgaacaggaatatagataatattttgcagtatcactttgagatgtaatttaacgtattatatttgttctttttagaatggacaacaaattgtggcagaaaaagctttggaatatttagctcaacattcagaagaccaggaacaagttcttacagctgtaaagtaagtaacctacatcctgtggaagagaaagtatttcctctgcttatcttgctct

SEQ ID NO: 430870 - DNA, 603 bp, Homo sapiens
gagattttgctgaaagtggactgaatttcagagagcatagtggaagggttggaggagtcggggagagatagaaaaagaggacagaagaggggatatatggagacttttgggaatagagtgctggaaatgagggtgacctgacaatctggggttcttttgtttactgctaataagtgggggataaagagcacaataagattagtcctagtggactaagggtagtattggcaaggctttgagtgtttgtgaatagggaggattcggtttccggggctaatgcaaatgtgtcctgtttttgtcagtgagttgcatcttcattctaccatcttgcagtagcgtttttgagaatacaaaatgaacatgtttagatatttgtcttatctttaatgaacaggaatatagataatattttgcagtatcactttgagatgtaatttaaygtattatatttgttctttttagaatggacaacaaattgtggcagaaaaagctttggaatatttagctcaacattcagaagaccaggaacaagttcttacagctgtaaagtaagtaacctacatcctgtggaagagaaagtatttcctctgcttatcttgctct

SEQ ID NO: 430871 - DNA, 561 bp, Homo sapiens
ctggctgatttttaaatttctgtagaaatgtggtctcactgtgttgcccagactagtctcaaactcctggattcaagcaatcctcccgccttggcatcaaaaatgctgggattacaggcatgagccactgcacctggctgggaagcattgtttrgtcctatgattggtcttttagcaagcctatacctctggactgtgaacttcacaagtgcttctcaggtttttttctcccccattaagtgggacaggatggctagagtggactgaatttgagtatttcccttctccgagatcagttaggctctgatataccccagaaggtcaggctgtggttaagcagtttctcttgagggcaagacttgttaagaacagggtgctctggcatgttttaaagtgttttgtttcctctgccccctgcaagatgcataaagagattttgctccaatattcactgagtagctaaccaagctcctggaggcaaaactcacaaaactgtggaggcctccttatgactgggtcctcctgagtcttttaattcagacttgtccacactgagcctcc

SEQ ID NO: 430872 - DNA, 526 bp, Homo sapiens
tgtgctcctaaacttggtttagaatacttaatttttttttttttttttttgagatggagtctcgctctgtcgcccaggctggagtgcagtggcttgatctcagctcactgccagctccgcctcccgggttcacaccattctcctgcctcagcctccctagtagctgggactacaggcacccgccaccacgcccggctaattttttgtatttttagtagagayggggtttcaccgtgttagccaggatggtctcgatctcctgacctcgtgatccacctgcctcggcctcccaaagtgctaggattacaggcgtaagccaccgtgcctggcctagaatacttaatttatttctgagtgtgattgaccaaaaatgaactatatacaacaatatggatgaatctcacaaacataatgttgagcaaaagaagctagatattgaagaatacatattgtgttgttcattttatttataattttttaaatgggcaaaactaatatatggtgttataagtcaggataatggtta

SEQ ID NO: 430873 - DNA, 568 bp, Homo sapiens
cggcaggcacttcaataatctgatttccataaagagaactttcccggccataaagattttattgaaactcccagcagcctgataaaagcataattccactgaccacaatctacctaggaatagctccaggatattaggctgaaactcggcaaagctatcccttctggaaggctgttctgcaccccttccccctttctcctctctttcaaggggtgggagcagcctccatttggctccactgtggactatccatactctgtggggaaaaagttagtccaaccctgaaaacaggcccagcttttcaggcctgggacacagaaaaakgaggctctgggccaggcagtacagcagtgtgtgacacccctgcagctgctgggcctgccgtggcctgttccagacttgctgcttctaaaggatatttgggaccatgagcccctgactgagactcagtcttcaattggagtccctggggagctggctagagtcctgaatgtcagagaaagactcttgactctattcattaacatacctggaactgaatccttgcaccactgtttactggctatgt

SEQ ID NO: 430874 - DNA, 576 bp, Homo sapiens
atggtgtattatatttttgatgtgttgttgaatttgatgtgctgatattttgttgagaaattttacatctatgttcattaaggatattggcctgtagtttttgttgttgttgttgtatcctcatctggttttggtatcagagtaatgctggcctcatagaataagttaaaaagaattctttcctcttcaactttttttatattttgagaattagggccagtgtttggtagaatttagcaataaagccatccagtcctgggcttttctttgttgggagatgttttattactgatttagtcttgctacttgtttctggtctgttcaggttttctctttcttccccattcaatcttggtgggttattwtatgtgtccaggaatttgtccatttcctctaggtttttcaatttgttggaatatagttgttcataatagtctctagtgatcctttgtatttctgttttatcagttgtaatgtctcctccttcatttctgattttatttgtttgggttttctctcttttttccttagtctagctaagagtttgtcaaatcctttaagaaaaccaacttttca

SEQ ID NO: 430875 - DNA, 576 bp, Homo sapiens
atggtgtattatatttttgatgtgttgttgaatttgatgtgctgatattttgttgagaaattttacatctatgttcattaaggatattggcctgtagtttttgttgttgttgttgtatcctcatctggttttggtatcagagtaatgctggcctcatagaataagttaaaaagaattctttcctcttcaactttttttatattttgagaattagggccagtgtttggtagaatttagcaataaagccatccagtcctgggcttttctttgttgggagatgttttattactgatttagtcttgctacttgtttctggtctgttcaggttttctctttcttccccattcaatcttggtgggttattttatgtgtccaggaatttgtccatttcctctaggtttttcaatttgttggaatatagttgttcataatagwctctagtgatcctttgtatttctgttttatcagttgtaatgtctcctccttcatttctgattttatttgtttgggttttctctcttttttccttagtctagctaagagtttgtcaaatcctttaagaaaaccaacttttca

SEQ ID NO: 430876 - DNA, 576 bp, Homo sapiens
atggtgtattatatttttgatgtgttgttgaatttgatgtgctgatattttgttgagaaattttacatctatgttcattaaggatattggcctgtagtttttgttgttgttgttgtatcctcatctggttttggtatcagagtaatgctggcctcatagaataagttaaaaagaattctttcctcttcaactttttttatattttgagaattagggccagtgtttggtagaatttagcaataaagccatccagtcctgggcttttctttgttgggagatgttttattactgatttagtcttgctacttgtttctggtctgttcaggttttctctttcttccccattcaatcttggtgggttattttatgtgtccaggaatttgtccatttcctctaggtttttcaatttgttggaatatagttgttcataatagtctctagtgatcctttgtatttctgttttatcagttgtaatgtytcctccttcatttctgattttatttgtttgggttttctctcttttttccttagtctagctaagagtttgtcaaatcctttaagaaaaccaacttttca

SEQ ID NO: 430877 - DNA, 567 bp, Homo sapiens
agaaagtctgcatctatctcaatagttacagcaaaaatgccaaggaagaatttcattgaccagatttttattaaccaatcctgggctaatgattatggccaagaagagggaggactccaattagccaggcctagttcatttacccaaccctctgaatgtgaaaaatgggatggttttcctcatctgaatcatatgaactaatttgggagggatgattccccaaacagatactgggtcagatgaaagcatatgaccattatagtgagggttgaattatctctttccacaagtwtgttagaggcactcctcctactagttatgatcccactcctagagcttgaaaaaaaacctagtggagtaccatccacaggactctgaggcaaggtggccaagtagcttggaggacacatttcgaccaacaatgtagggtaacaaattaccttaagcagccaaagacagcatagccagaggaacagtctagattgtggccaatgaggaaataaaaatatttactctagataaatcaggccaaataaaggctataaggagactagtggtaaggtctac

SEQ ID NO: 430878 - DNA, 574 bp, Homo sapiens
tgtaatcctttttatcagttgctaggtttgcattactagtattttgttgagcattttatagtctatatttattcgactgtagttttttttttcctgagatagttttggttttaatatctaggtaatactggcctcataatatgagttggmaaatgttccctactctcataatttggaagatattgtgaagaattcatattagtttttctttaaatgtttggtagaattcaccagtgaagtcatctgagcctgggtttgtctttgtgggattttaaaaattattagttcaatctctttattttttacagtctattcagaatttctatttcttctcatatcattttcagtcattgtctttttataaatttgtccacttcatctggattgtctaatttatcagcatgcagttgttcatagtattcccctatagccctttttatttctgaaaggatggtattaaaatccctgctattgtttcccattttagtaatttgagtcctctctttttctcttggccagcctagctaatggtttgtcaattctattgacatgtttgaagaactatttgttttaa

SEQ ID NO: 430879 - DNA, 574 bp, Homo sapiens
tgtaatcctttttatcagttgctaggtttgcattactagtattttgttgagcattttatagtctatatttattcgactgtagttttttttttcctgagatagttttggttttaatatctaggtaatactggcctcataatatgagttggaaaatgttccctactctcatawtttggaagatattgtgaagaattcatattagtttttctttaaatgtttggtagaattcaccagtgaagtcatctgagcctgggtttgtctttgtgggattttaaaaattattagttcaatctctttattttttacagtctattcagaatttctatttcttctcatatcattttcagtcattgtctttttataaatttgtccacttcatctggattgtctaatttatcagcatgcagttgttcatagtattcccctatagccctttttatttctgaaaggatggtattaaaatccctgctattgtttcccattttagtaatttgagtcctctctttttctcttggccagcctagctaatggtttgtcaattctattgacatgtttgaagaactatttgttttaa

SEQ ID NO: 430880 - DNA, 516 bp, Homo sapiens
ggtttctggattagcttcgaggaataacttgggaagggtcatgctcctcagactttgacatggttgcttggggatcttaggggcttcaggctgatgatttttgagcctgtaagagaagtcatcctatttccagtgttttgaaccccttccttctcctatgacttcccacatccccagatgagctggtgagcagcaccacctcccagtcatgaccctgaacctcatcagtcccaagatttgactgagtttcatcctgcctgtctcaagasagagcaacattcctgaagcactgcagagagtgtgggggtggctataaggagctggagaaagtggccagaaatttgggattctgacaacctttcatcagaagtcacctcaggtgaggaaaaataacctcagttaccatgtgggggcagcagaggccagttaaaaaacctggagcctggactaggcgttcctgggttaaaaggtttcggtctgtgcggggagtcatgtcgagtctgctcagtcccaggc

SEQ ID NO: 430881 - DNA, 552 bp, Homo sapiens
cctgggctttggatgcccagttcccatgcaagggttttggtgagcccctaaacttgaacacctaggcttttcttggggattgaaggaagtgccagtccaccaagttctgccagaagaggggcatttggtggtgatgggtgttaccaatgttccctgtcttatttggttttaagaagatagcatggctacctggctgatctgtgaaaggtgagcttgtctgtttagtgttgaactcattaaaacttccaactaagttaatctcttagaattattatagtctcagaatcttataataatatctttttttccagttaaccaaaaaggcctttgagaaattttggaaagtagaagtataaaaggaaaaaagtcccagagcacttagtcttttttttttcccgtggtaaaatgtacataacataaaatataccatttcaactatttttaagtgtacaattcagtggaattaagcacatttgcagtattgtacarttatcaccactatccatttctaaaacgttttcatcctcccaaacagaaactctgtgcccatta

SEQ ID NO: 430882 - DNA, 316 bp, Homo sapiens
cacacagcaaatttgtgaccaagcagggactagtcccagcctggatcctccccttggttcccagactccagctcttttgttgaaagaccttccttgggcagtrtacatgaaaactgcccagagatctacctagaatttgccacagagttcaaaagactagtgagacctagaaacagacacatagaaagcagagggaggtgatccaagaggagaaaaggaaaaggagagcaggaaggagcagagtgctcagaggcagttggaggaagtatctgggcaagctcccctctccactgactttcggcccagggtcccacct

SEQ ID NO: 430883 - DNA, 562 bp, Homo sapiens
acatacccaaaaggagagagactaatacaatagatccccaagtacccaactagtatgcacattttaagctattaataaacaatgccaagtttttatcttacacaaggtttttagttatttatattcctatctgctacatatgagatttacactattttttatttatacagagtaattgtacatatttatgaggtacatgtgatatttcgatatgtgcattcaatgtgtaattttcaaatctgggtaattggaatgtccatcacctcaaacatttatcctttccttttcttgggaacattccaaatcttctcttctagctatcttgaaatatacagtacattgttgttaactatagtcactctactgtgcaactgaatgctagaatttattccttctatgtaacagtatttttgaacctagtgatatggttttgctctgtgtccccacccaaatctcacgtccaattgtaatccccaggtgattggattatggtgggtggtttcycccatgctgttcttgtgatagtgagggagttctcacatggtttgatgatttaaaagtg

SEQ ID NO: 430884 - DNA, 468 bp, Homo sapiens
ttccttcttaattagtctaagctagtggcctgtctattttattaattttttcaaaaaaccaactcctggatttgtttatttttttgaatggtttattgtgtcttgattttcttcagttcagctctgatttttgttacttctcatcttctactagctttggggttgatttcttcttgcctcttgaattctttcagttgtgaatctaagttgctaatttgagatcttkctaactttttgttgtatttagtgctatgaatttcctgtttaacactgccttaactgtgtcccagagattctggtgtattatatcttcgttctcattattttcaaagaacttcttgatttctgccttaatttcattatttactgaagtcattcaggagcatgttgtttaatttccatgtaattgtatggttttgagcaattttcattgtattgacttgtatttttattgtgctgtggcctgag

SEQ ID NO: 430885 - DNA, 465 bp, Homo sapiens
ttgtgaggtgccatggaagtggggcctgcaggctgttgctgctcagccctctggattctgcctctttcctactattctactttcccactttgctgaagctgcagctacttttgccagaaatcccaagtatctaaggctccagggtctctgtgcacgcctgagctctgctgaaactccacatagctctgactgtcagactgaatrctgaaggccctggtggagtgggttcacaagatctcctgacctgaggtttgcaaagatctgtgggagaagcatggtttccaggggtcactcattcactcattacttccctgggcatgggaggatcctttggctctgtgttgctcccaggtgggctgttgtcctgtctcacttttctcccttccctgtgggtcaagttgtttccttgattaatcccaatgggcatacctggatgtttcagttgagcatattgtatttactcac

SEQ ID NO: 430886 - DNA, 512 bp, Homo sapiens
ggtaggttatttcctggcaagcccaggaacctcaaaatattttggggaccttgagaagagaggaattcatacaaatctacaaatattacaggcaaagtttgatgatgagtcttcagtttggctttatagcctcaagaggcttccaaaagtccaatctgtaattccttattaaaagttccagacttaaaagagactgtaagatcaattactgtttttttttgtttttttttkttttttttttttgagacaggttctcactgtcacccaggctggagtgcagtggcgcgatcttggctcactgcaacctccgcctcccgggttcaatgattctcccaccccagcctcctgagtagctgggactacaggcacgtaccaccatgcctggctaattcaatcaccattcttgaagcacttatgtaaataatcaggccaaattttatgaaaataagttattttgtaaataaattggtcttactgtgattatctttggtagaaatgggggtgactgtaga

SEQ ID NO: 430887 - DNA, 415 bp, Homo sapiens
tagtatcctcctggttcatccatgttattgcaaatggcaggatctcctttttatggctgaataatattcgtgtgtgtgtgtgtgtgtgtgtgacactttctttattcattcatctgccagtggacacttaggtcgatcccacgtcttggctattackaataatactgcagtgaacatgggggtgcagatatttcttcaagacactaatttcattactgttggaaactccccactattttccatactggttgtaacaatttacatacctaccaacagtgtacaaagattcccttttatctatatcctcaccaaaacttaccatttgtctttttgataatagctatcctaacaggtgtaaggtgatatctcactgtggttttgatttgcagctccctgatgactaataatgttgagc

SEQ ID NO: 430888 - DNA, 616 bp, Homo sapiens
ggtctcatagcaagtaagtgacagaactggtctgaagactatgttctatttttatttatttattttgagacaggatctcactctgtcacccaggctagagtgcaatagcgtgatcacaactcactctaacctttacctcttaggctcaaaggagccccccatttcagcctgcacaatagctaggaccacaggcatgcaccaccatgcctggctaattttttgatttttttttttttctgtagagatggagtctcactgtgttgcccaagctggtctcaaactcccaggctcgagcgatcctcccacctcggcctccmaaaatatttggattacaggcatgagccactgcacccaacctgttctattttttacagtaccagaaaccagagaaagagggcaggcccacacacccaaaaaggatgtccaagggagagaaaaaagaataagagtgaatttaaagatttctgctgaggaagaagaaatctggaagaccttcaagttagtgtcaagcttggtcttgcatgaaatataataatgataagaaagggctcctgttctcatggagcttattgggtagagggcaccaaagatataatggctgctacccagccattct

SEQ ID NO: 430889 - DNA, 633 bp, Homo sapiens
tcagtttattttcttcttaagtaactagaaccatgttggttgcttgcaactaaaaccctaggtgatacagtgagcaaaattaggggtgttaaattcaagaggagtgggaggtctaaaagtcataaaaatatctgccaaacagagaagagaaaagaaagacattgcaggctgaaagaactacataagaaaatatataaagtagacctgggcttgaaatatctatagagcaaaaagcatattgcttgggcttgaacactggcttcatacagagaaatactggaagatatagttgggtaataaacagtcatggatgctcagtgaagggctttgaaatttaacctggaatgagtaattatttttgatgaagtctagtctgttaacagtatacatggtaaaattataaaagagaaactagtatcaaggaagccagtcagcatactattgtaataatgcaggtatgatgtaattagatctaaactaaaatatttataacagatctcaaaaaggaaaagataaacagatgtagagaacaattaagtcttaaaagtttaataakaatcccttgtaggagagatcttggtgtctcatagtagctgacaggaccacattatagaaaagataaaatagctgatc

SEQ ID NO: 430890 - DNA, 526 bp, Homo sapiens
tctttctgaaactttcaggtggtatacataggaattgggtgttataatgtgatttaccacttagacttggctacaaatgattatctaaaatttacaggctaacttttatagcagatagctacatgatttaataggagttgttttaycattaatattaagtgctcctagtagtgactagaatttaatcatcatgctatattgctttgatttttggcatgctgggaaatatatctgtctattggtcaaattttgttggaaataacttaagagcttgtcagttctcctgtgtgtgctgtgagcttgcatttaaaattgcttgatattagtgtaatatcagtggaagtttggacatttgttttggtatacagtaatattataatcatatttgctgtattcgtacttgatttgaagtcacttttaaaagggggaaaacaaaagtagagattatttctatttgtttatttttaattactgtcttttttctgacatttcatatcccagtgtgtataaatacaaaatattaccc

SEQ ID NO: 430891 - DNA, 526 bp, Homo sapiens
tctttctgaaactttcaggtggtatacataggaattgggtgttataatgtgatttaccacttagacttggctacaaatgattatctaaaatttacaggctaacttttatagcagatagctacatgatttaataggagttgttttaccattaatattaagtgctcctagtagtgactagaatttaatcatcatgctatattgctttgatttttggcatgctgggaaatatatctgtctattggtcaaattttgttggaaataacttaagagcttgtcagttctcctgtgtgtgctgtgagcttgyatttaaaattgcttgatattagtgtaatatcagtggaagtttggacatttgttttggtatacagtaatattataatcatatttgctgtattcgtacttgatttgaagtcacttttaaaagggggaaaacaaaagtagagattatttctatttgtttatttttaattactgtcttttttctgacatttcatatcccagtgtgtataaatacaaaatattaccc

SEQ ID NO: 430892 - DNA, 498 bp, Homo sapiens
aacccatcagacatagtgagacttattcactctcacgagaatagcacaggaaatactggccctcatgattcgattacctcccccctgggtccctcccacaacacatgggaattctgggagatacaattcaagttgagatttgggttgggacacagccaaaccatatcaaatacttaaagtgccttgtcacattgcttaccatcatttagcacccctaaattgctggaaatgattatgtaggcatttcacattcttctcatgcatctactattgatttgattagggctggttatcaccatcttgattactcctctgtcaaatattacttgtacattcatgttgcyagtagattttgtgatttatgtttatattttcttttcttcacattccctcacaagtttcaagtatcaccatgactctatatttagagtactacaatgttttagacactgaacaacacttttccttttcttagctcaaacttgtacaagctgacgg

SEQ ID NO: 430893 - DNA, 596 bp, Homo sapiens
ttctatttttatgtccatgtgaatccaagatttagtacccaattataagtgagaacatgtgatatttggttttctgtttctgcattaatttgctcaggataatggcctccagctccatccatgttgcttcggaggacatgatttcattctttttatggctgtatagtattccatggtgtatatggactacactttatttatccaatccactgttgatgggcacctaggtggattccatgtgtttgtgattgtgaatagtgccatgatgaacatgtgagtgcgtgtgtctttttggtggaatgatttattttcctttgaatatacacccagtagtaggattgctcagttgaatggtaggcgtgtttttatttgagaaatctccaaactgctttctgcaggggccgaattaatttacattcctaccaacagtgtataggtgttccctttactctgcaacctcaccaaaaatttttttkgactttttaataacagccattatcactggagtgagatggtgtctcatattggttttgattcgggtctctcagatgattagtgttattgagcattgttttttatgtttcttggccacttgt

SEQ ID NO: 430894 - DNA, 606 bp, Homo sapiens
tttctgtcagtccctcttctaccactagtgatggctctccttctccccggaagacagttaatgttcttctgatcttcttcctttatcaaaacaggttctcagaaaaatatttggtgaactcatacacaataagaggttgataacagtttagagaaggtggtgagaacaggttaaaagcttgttgtatgctaaatgccaggcttatttgtacatttgaagatacttgaaarggacaaatagttgagcaaaatcctaccatctcaagttaccatttactgagcatgtactgtgcatgtaccctgatacatatgtcatatatataagtgtgtgtgtgtatatacatataagtttgtgtgtgtgtatatatatacacacttacatatgcatgtgtgtgtatatatgtgtgtatatatatacatacacacacatatatatatacattgcacagcttgctgtgcaaaggagttagccaccatatatatacacacacacttatatatatgtgtatatatatatacacatacacacttatatatatgtgtgtatatatatatacatacacacacacatataaacacattatctcatttaaccctcataacctta

SEQ ID NO: 430895 - DNA, 562 bp, Homo sapiens
gtgactaaaattataattctttaaaataatctcaatttttaaaaatttttctgtgcagttagaacagacacatgaagatatccaattagcatgtcctacagattgttttggagcaatgttagccagtctaaatttttttgtgattctatgattgtaagaaacctatgcacagacttttgataatgatgaaaaggaatcttggaaaactgattgtgctacctgaaatagtcatgctgcaattaataatttccaagtcttctatcattaaccaatgttgattttggagctggaatatagactttataaactaaaccagcctattagtattttattccattygtaatattaaacttagtttaaaagcaagtttaaaaaaaggagtacactgagaagccctgaattttttcctagaagacattcattttcactctcatgatatttacactgaaatgtaaagtttagaacagtgaataatatgacttactagttatgatatctgtaaaactggtaatgtttatgttttagaaaatgatcacaaaatgtttattaaaaatctaactga

SEQ ID NO: 430896 - DNA, 603 bp, Homo sapiens
catggggaatttcagctaaaggctgttgcccctgagtggttaacatatgcaaggacataaagaatttcgtcacataggagtcaggagtgaaagcatatttttaattgacaaaaatgttttcaattgttgatcaaaatgattgtttttgctgtgtaatttttctccagggtcacttttcctctagggattctgcagtcaacttatatcatgaatagtccaaaggactgatcattttatggaaaaatttctgcttgtctatttttgtttgtggcattaactgccacaaaatgatagcaatgctttatagaagctggaaattttaccccagggtaccacctaggaaaaggacaaatcatatttagwtaattccttgtttgcagctaataaaatctactccaaaacctatcagtgacatgaactattgcatattaaggcagtttccaagatttgaattcaataagtagtgagctgaattagaggctgtaattgtgtctgatgaagataagcttttcagctttctaataggttgttatggagcatccagtttctggactcttctctaacttcatattctactccttctaccaccatataaatgggaac

SEQ ID NO: 430897 - DNA, 654 bp, Homo sapiens
gaaaatcttaaatgttgaaaaagtagttctgcagtaaaaatagaatggcttatcttttcttgactatgacatcgtcacagcattacttttattatggtgaggtaccctatgggcctataggactgagtgacttcctactggccatttgtgctttagatgcttatcttgttccgttactsgcacttcaaatatatctatcctaccgaagctataaagaacacatacccaattatatactgccaagatttttggatgagagagaatcttccattcaaagaagttacctaggacttcccttctatttctctgcttcagttattcatctctgttacgtttttcttagctcttttatctaatgtctttgagtttattcattaaattatgtagtagtcattaatcatattcaccaaatatttcgagttcttccccattttgactctgttatgtttttttgttagctttttaatctaatgtctttgagtttattcattaaattatgtggtagtcattaattatatccaccaaatatttcaagttcttccccattctgagtacacagagccatttctgggctctggtggagttggatgggactgacttgatctggccaatgaagctgattcttctttggaagtgcaagaccctccaaagcca

SEQ ID NO: 430898 - DNA, 654 bp, Homo sapiens
gaaaatcttaaatgttgaaaaagtagttctgcagtaaaaatagaatggcttatcttttcttgactatgacatcgtcacagcattacttttattatggtgaggtaccctatgggcctataggactgagtgacttcctactggccatttgtgctttagatgcttatcttgttccgttactcgcacttcaaatatatctatcctaccgaagctataaagaacacatacccaattatatactgccaagatttttggatgagagagaatcttccattcaaagaagttacctaggacttcccttctatttctctgcttcagttattcatctctgttacrtttttcttagctcttttatctaatgtctttgagtttattcattaaattatgtagtagtcattaatcatattcaccaaatatttcgagttcttccccattttgactctgttatgtttttttgttagctttttaatctaatgtctttgagtttattcattaaattatgtggtagtcattaattatatccaccaaatatttcaagttcttccccattctgagtacacagagccatttctgggctctggtggagttggatgggactgacttgatctggccaatgaagctgattcttctttggaagtgcaagaccctccaaagcca

SEQ ID NO: 430899 - DNA, 451 bp, Homo sapiens
agaaacaatctgataaaatgaaattcaagacaaaaaaatgccatgaggggcagtatgtactgctaaaaggaataataaaacaagaagatacaaccataacaaacaagcctgcatgtttgtgacctagaaattacagtaacaaaatatgtcaagtaacaaatgagagaatgcagagaaaaatatatgaattaactatcatggccaggaatgttaatatgaattaactatcatgcccatcattgatggtgataatcttagcactttgggaggctamggtgggtggatcacttgagcccaggagttcaagaccaacctggacaacatagtgaaactgcttctacaaaaaataaaaaaatgtggaggtgggtgcctgcctgtagtcccagctacccaggaggctaaggcgggaggatcacctgagcctgggaggtcaaagctgcagtgggctgtg

SEQ ID NO: 430900 - DNA, 451 bp, Homo sapiens
agaaacaatctgataaaatgaaattcaagacaaaaaaatgccatgaggggcagtatgtactgctaaaaggaataataaaacaagaagatacaaccataacaaacaagcctgcatgtttgtgacctagaaattacagtaacaaaatatgtcaagtaacaaatgagagaatgcagagaaaaatatatgaattaactatcatggccaggaatgttaatatgaattaactatcatgcccatcattgatggtgataatcttagcactttgggaggctacggtgggtggatcacttgagcccaggagttcaagaccaacctggacaacatagtgaaactgcttytacaaaaaataaaaaaatgtggaggtgggtgcctgcctgtagtcccagctacccaggaggctaaggcgggaggatcacctgagcctgggaggtcaaagctgcagtgggctgtg

SEQ ID NO: 430901 - DNA, 616 bp, Homo sapiens
tcatttctacagcaccggtaatactaatactctatttaagtttcgtggtgggctyaagggtgttcattttgtgattatgcatcaaatcttatatattgcatgtatttttttgtatttgatgttacataataaaaaattgaggaaaatgtttccacattctaagatcaaataggttggtcttacaccttcattccttgcatttaaagcatcaacacttatggggtttattttcatgtattatagagaggtgattctccatgttttttaaattaatatattaaatttttattgcagcataacaaattgcaacaaacttcgcagcctaaaacaacattcgtttataagcccataactttgtaggtcagaaacccaaccacagtgtgactgagttctctgctaaggatctcacagagctcaaatcaacatgttagctgagctgcctttctttctggaggctctggtgaagaatccatttccaagttcattgaggtttttggcagaattcaggcccatgtggttgtagaaccgagcttcacatttactggcaggttgtcagctgggggctacttttgcctcctggaggcttcaaaggagaatctccctcttctggaatcct

SEQ ID NO: 430902 - DNA, 550 bp, Homo sapiens
  misc_feature (1)...(550): n = A,T,C or G
ggagcaccacctagttataactcaaacttattacaagaactaatgaatagactcctttaccagttacttcctagcaaagaaaaaatattaaacatgtgcctagaagtcaaattcatcctaaagaagataaaataatacttctgctctgtgtgggggtatgttgccatggngagaaaccatacatgtrgtggcagagggcaaaggcgatatctctgatccttcctctcaattttgctgtaaacctaaaacttctcttaaaatataaagcctttttttaaaaaaaacaataacatttccaagacaaaaaaaattaaaaagtaaagcttctgaatctgaaggcttaggaactagcatttgtttgtgggagtagggcacagcctccattcgaattcagaatgaacttttgagtataatcttggtggatacacacaacaaagttattttcctagctcctacagctcaactttttttcatgaactatagaatattntaaaatctacaataaacacatctaatgtggtggtatggcattatgttaatttggttataa

SEQ ID NO: 430903 - DNA, 597 bp, Homo sapiens
tgcaaagagacgacaagcatccagcacatctatgtgctccagagatggtccaaactctggtgtcaacaaaaaggataaaaggagcccagggaaagtctttaatgaagacagaaatatccacaagcccttcaactcagatgcccttatgagagttgccacagtgtrttaagtggcctgtggatctttccatgaagcagcctcaagtaggaggaactgagtgccatttcttaagggcactggaagtatgttggtagcatcacaacatactgggaaggagacccagcaaatcatgtggtcctgaaggtgccaatgaatgcatggagggaaggagctagaacagctgactggagtttccctctgatggtactcaggctgcttccttcagaaaaccttctctggtccatgggctggcctgagctgggcatctgtgagcacctaaggctgcaaactctcattcacttattatccaatgttttattctgcccctgttataagccaagcactaagctaggtgctagggatagaaagatgaatttatcctctgaggtcttaaactcacaaaacaggaatcacaaaggtatcaacatgaagttataa

SEQ ID NO: 430904 - DNA, 607 bp, Homo sapiens
tgggcagggcaggcatggtgaagaccttctcccacagcctgggcacccctcccaccttcccyagggtcctcaagctcactgctcatggatagctctggaggcatggggtggggtgtgtggccatattgcatgggcaggagagggatgtgggtcagtgcaggtgtgagacccaggacctttctgcttcagaggctggtggtagtggggtggggaagagtcaaagggatcccaccagaggctgctcctcaacctgccttcccagcctctttcccacaaatctccacagtcactagcactgtgggcacaaagagctcctcgtagttttcccagcattcttcaccccaggtctttgctaactgcgcacagcgcctgttcctccctcccttcttggcctagtgagcaccacccttctgtgtaatctaatccaagggtagccatagcattagcatctcctgggaacttgttagaaatgtaaattcttggtccttacccccacccgctgatcagaaccttggggatgggacccagtgatttgtgctttaataagcctgcaggtggttttgacgcatactcaggtttgagagttcttcgtgtaggcagcggttct

SEQ ID NO: 430905 - DNA, 589 bp, Homo sapiens
gtgtgagctaccacaccaggcagccaattcttttatcagaactcaaatagcatcacctcttccctcccaaaaatatttaagtggtaccccatcacttcttacattaagaaccatactcttatcatgacttcaatgtctttgaagaccctggtgcctctcttgcttaattttctaatatttcccacatcagaatttacactcaagcatttgtaatycccttaacatgtcatgctgttatactcctgtattttagcaaacatgggtattttcccttttttcacctgaaaaagtattggttataaggaattatctctgctaggaaatctattacattatatatttctcccagtgtatcttgtttaggcttctataggtataatactacatggtcatttgttttcaaatgctaataaagtgagctccctaaggagacaggctatgccttaatgagtacctaacacaaagctgttgcttagtgtcaggtactgtactaggtcattaaggaatagatagaatgagataaacggacccttaaacaaattaagaaatatatagaagtaccttgggaatatgtatacctaagctttct

SEQ ID NO: 430906 - DNA, 589 bp, Homo sapiens
gtgtgagctaccacaccaggcagccaattcttttatcagaactcaaatagcatcacctcttccctcccaaaaatatttaagtggtaccccatcacttcttacattaagaaccatactcttatcatgacttcaatgtctttgaagaccctggtgcctctcttgcttaattttctaatatttcccacatcagaatttacactcaagcatttgtaatccccttaacatgtcatgctgttatactcctgtattttagcaaacatgggtrttttcccttttttcacctgaaaaagtattggttataaggaattatctctgctaggaaatctattacattatatatttctcccagtgtatcttgtttaggcttctataggtataatactacatggtcatttgttttcaaatgctaataaagtgagctccctaaggagacaggctatgccttaatgagtacctaacacaaagctgttgcttagtgtcaggtactgtactaggtcattaaggaatagatagaatgagataaacggacccttaaacaaattaagaaatatatagaagtaccttgggaatatgtatacctaagctttct

SEQ ID NO: 430907 - DNA, 648 bp, Homo sapiens
actacataaaaatctgcccttgatgtctacaatctccttagaagcatattgatgccagtataattacagttactgaaatcacacatatcagtcttcacgcaagattatgagcaactgtaggtacaaaataaaagactaagatctaagtattttcactaatatgcatttttgmaaattagaaatgtaaaagagatccaagtatcttgattaatccatatttttgaaaatttcaacttatgagttttttgcatatatacatatttcatttaatattactttgctcatcgttgattcaatacaatgctctgactagtttcctaagatatttgtatgtgtgtgtatcttgtgaatgttttccacaagttttagggactagcatactccctcatttaatgactgccaaagctagcgtggcagatagtgtagtgctgtaaattttctaccaaggagctttcatgtaccatctacaaacattctcagccaatgagcagttcatcacccaaggtgatgtgagcatgttctacaatgtgtatttttacaccacagtggccttactttctgtcacttattttgtactctccaacagttttgatttctaatacctgacaagagttgtgcagaagagaagttatatctgccacaaggaac

SEQ ID NO: 430908 - DNA, 648 bp, Homo sapiens
actacataaaaatctgcccttgatgtctacaatctccttagaagcatattgatgccagtataattacagttactgaaatcacacatatcagtcttcacgcaagattatgagcaactgtaggtacaaaataaaagactaagatctaagtattttcactaatatgcatttttgaaaattagaaatgtaaaagagatccaagtatcttgattaatccatatttttgaaaatttcaacttatgagttttttgmatatatacatatttcatttaatattactttgctcatcgttgattcaatacaatgctctgactagtttcctaagatatttgtatgtgtgtgtatcttgtgaatgttttccacaagttttagggactagcatactccctcatttaatgactgccaaagctagcgtggcagatagtgtagtgctgtaaattttctaccaaggagctttcatgtaccatctacaaacattctcagccaatgagcagttcatcacccaaggtgatgtgagcatgttctacaatgtgtatttttacaccacagtggccttactttctgtcacttattttgtactctccaacagttttgatttctaatacctgacaagagttgtgcagaagagaagttatatctgccacaaggaac

SEQ ID NO: 430909 - DNA, 471 bp, Homo sapiens
gtagatgaatctgaaaattagactgaggaccccctaaggaaatggaaccttttgatctctggccttgattgacagctatttgagtgaacaaaaacctggaagtatttctctaaagtttcagattagatgctaattyttgttgttgttgttgttgttgttgtttgtttttgttttttaacatggacaagctttgcctcttccttaatggatgacattttcctaaaagatgtattgaatttaaaatgccattgattgtaaaacctaacatctcttgtacaactgggacgagaaaagtagccagttaaattatggaacagcgttaattatagcatgcctccagatatgtgagatattacaatgggagaaaattgtgcttcttacaattgatgctataagtagggtaatatttacattgggttatatattgtaattgtttaagccatgcactttggaatcagagagatctgggtt

SEQ ID NO: 430910 - DNA, 471 bp, Homo sapiens
gtagatgaatctgaaaattagactgaggaccccctaaggaaatggaaccttttgatctctggccttgattgacagctatttgagtgaacaaaaacctggaagtatttctctaaagtttcagattagatgctaattttygttgttgttgttgttgttgttgtttgtttttgttttttaacatggacaagctttgcctcttccttaatggatgacattttcctaaaagatgtattgaatttaaaatgccattgattgtaaaacctaacatctcttgtacaactgggacgagaaaagtagccagttaaattatggaacagcgttaattatagcatgcctccagatatgtgagatattacaatgggagaaaattgtgcttcttacaattgatgctataagtagggtaatatttacattgggttatatattgtaattgtttaagccatgcactttggaatcagagagatctgggtt

SEQ ID NO: 430911 - DNA, 538 bp, Homo sapiens
taacttacagcacccttcttacatatgactctacctcctgacctaaacacacaccaaaggcaatttcaaagactaggcatactacttccccagcttcttctatcttaccctaagatgatttccaaaacaacccacttaattgtgtggaacacttcactttcctttttttcctcaattttaggttttgggttctctagaattttatccccaggagaaatataagaaatccataatttaaaagagaagaaaataaatgtgcacttagtgtaactataaaatatttgtgttgaggttggattacatttagagtattttaaaagaaaagtatcttccactttaaatatatgctatttkgtttaatgctgaaaaaaattcttaaaaattaattgatttatgacttacttacttcgagtataattagtgtaattttattaaatttaacactcgcttttaatccccctattccaacattagatatcaggtaaacccactctcatgagaatattagttaccttgttctaccttcattattgtcttt

SEQ ID NO: 430912 - DNA, 489 bp, Homo sapiens
agactaggcatactacttccccagcttcttctatcttaccctaagatgatttccaaaacaacccacttaattgtgtggaacacttcactttcctttttttcctcaattttaggttttgggttctctagaattttatccccaggagaaatataagaaatccataatttaaaagagaagaaaataaatgtgcacttagtgtaactataaaatatttgtgttgaggttggattacatttagagtattttaaaagaaaagtatcttccactttaaatatatgctatttggtttaatgctgaaaaaaattcttaaaaattaattgatttatgacttacttacttcgagtataattagtgtaattttattaaatttaacactcgcttttaatccccctattccaacattagatatcaggtaaacccactctcatgagaatattagttaccttgttctascttcattattgtctttgtggagtgttataattattt

SEQ ID NO: 430913 - DNA, 568 bp, Homo sapiens
ataaaataacattttaatgttaattttaacaaataatacaaagagatttcagaggattcctgattcccagtggggtcaccttttttcgttttgttttgttttattgttttgttttgttgttttttctctayttctggaactctttcttattaaccttttcataggttattatattatgccattatgcattaaataatgtttgttaatattgtttataaagttctttatcaatgctaaaactatttgcaagggaatagcccattgctgcctaaaattggattttttaaaatttggggctaaaaacaagtcaaatgtggtccaattcacctctctctgtcaagctcacctttggccatctccactgagaagccaagactctcaggtcatccatagccatttttgattcaattgcttatacatctttttccagagtgagttgttattttcttcactttcaactgagagataaacttcagagtatttgattgttactttcctgatatttcttcttggctggctttggctttggggttcacccagtgcaagttcatagaggtggtgagtcatc

SEQ ID NO: 430914 - DNA, 585 bp, Homo sapiens
gactttgtattgcctggggccacttggttgtattcacccaatggctggtctggtctggagggtccaggatggttttagtcacatttctgtgaccttactggaaatagctagatgccagattcagctggactccacagcctcttcatgtagtcgcagggcctctccacataattwttaaataaggcattttatacggcagctagcttcttctaccatgtatgttccaagattcgggaagagaagctgccaatcttttaaggcctggtccagaaactgttactggggtacttccaccatattctatccaactattcacagacacagaatccttgctgttgcaacctgttagctgtgttgccttacagtcaaattgaaatagaaggagacacagaatccatgtctaaataggaggagagacaaagactttgtggccatcattaacctatcacacttacctgcccggagtggtgcataagtaatactaaacttggctcaatatctcacattctccttagtgctcgatgcctcgatgcttcacgaggtcctgaccttctctatgataccccttttgcctttcttcttctg

SEQ ID NO: 430915 - DNA, 417 bp, Homo sapiens
tctatccaactattcacagacacagaatccttgctgttgcaacctgttagctgtgttgccttacagtcaaattgaaatagaaggagacacagaatccatgtctaaataggaggagagacaaagactttgtggccatcattaacctatcacacttacctgccyggagtggtgcataagtaatactaaacttggctcaatatctcacattctccttagtgctcgatgcctcgatgcttcacgaggtcctgaccttctctatgataccccttttgcctttcttcttctggctaactttaactcacacttcaaattctagctcagacatcatcaactcctgccccaagcccctaaatagactccaatttaatatcatcctgatttcatgcctatctcacctcctgccatactttactggga

SEQ ID NO: 430916 - DNA, 573 bp, Homo sapiens
ataccccttttgcctttcttcttctggctaactttaactcacacttcaaattctagctcagacatcatcaactcctgccccaagcccctaaatagactccaatttaatatcatcctgatttcatgcctatctcacctcctgccatactttaytgggacaatctgttgccttcaccaccttgtcagctctgtggtgggaaaaagtatcatgttttattcatttttgtatttctagagtctagcacaatacttggtgtaccaatgtacccaggatgatctgaatgactgtcatcactttaaattttattgaaaatgtaccaagattattatatgaaataaattaattttagttcaaatgaccaaggcacttcaacagaaatatttagttttcaaatattgttaccagattaaatggtaaaatattaatttttataaagatgtgaacaatcttttaaaatattcaatcatgagactttatatatcttcatttaattacaatatccattttttttccttttgagggttgagttggcatagctagactgagaaataatttttacaagttagacatcac

SEQ ID NO: 430917 - DNA, 571 bp, Homo sapiens
tataactaaacccatctctatagcataattattcctttatgtaacaacatgtgttcagtgcatttgataatcagtcactgtcttggctgctggaaatcaatagcatagtcatccttcttcaaagagctttcagtctatttataaagattttcttatgtcaaacagataagcattatttaaatgcttatagtaggcatagtctcattgttatatagataaaagataatacaacatcattttatgtgaaaagaatatcagaaatttgcacaaaaaataartgtgccacacagttaatttctaaaagcaccattttttgtgaattttgtgatgtttattgttttgtgagctttttaaaatccctaatccatcatggtttattttctcattctaaataaacattcacttctgtacataattttgtattcttgttcttaaagtattcattgaaactctagaaacttgtgaccccacacagcctcagtccagctctggtacaacactgttatctgagatgatctacacaaagtcacaacatagtaccttgcatgaaataggaggttaaagcatggca

SEQ ID NO: 430918 - DNA, 528 bp, Homo sapiens
ctgggttaccttcttgggagtttccaatcacagtatttttstaagctgataaatacataaccttgttttatgtgtgtttctgtttaaagacaccttatttaacatatagtgttgattcattagcatagaacttaatttcaacggcactataactcacccctaaagggagttcatgcaacatgcattttctccataaggcacatcacagccttttgagcttaggaacactagacagtactttagcactacatttaggggtcattttaaacagcaaaattaccaacgaaaatgcaaaaaaatgtggcactaaataaactccaaaaaggtcaatggtttttagtatcacagctgaaacaaaaaggcagagcatcattttgtttaacgttaagctggtaatgtatgcagtaagagactgaattttttttgctgctctgagcatgtccatgaatgaccatgaaagaaccatgaatatggatcttaaagttacaaataaattttagcttgtaagcagattcatgaatatggaat

SEQ ID NO: 430919 - DNA, 499 bp, Homo sapiens
tggcactaaataaactccaaaaaggtcaatggtttttagtatcacagctgaaacaaaaaggcagagcatcattttgtttaacgttaagctggtaatgtatgcagtaagagactgaattttttttgctgctctgagcatgtccatgaatgaccatgaaagaaccatgaatatggatcttaaagttacaaataaattttagcttgtaagcagattcatgaatatggaatccatgcataacaaggatagactgtatttgcatgttatctgaagaaatttatatgtatttgaaaytgtatgctccatatgtttccaactttataatataagatatttcttggaaggatatactgatgatttaagaaaaatagtcaatattaataatatgatttcaggaaaagataatctgagctttctagttataaattttttcaaaaacgccttctgttaactagagagtaccccaatgtaagtattaatggccaatactacctattaagga

SEQ ID NO: 430920 - DNA, 549 bp, Homo sapiens
aaataatccatcagagtttggcatatggagtttttggaaaaaaatagatggctaaatattagaataagccccttttccaaaccataataaagttctgtcttcgggatggcagtaccataaagaggagccagtttcattgtcaatgtgtctctccttctaagaaggctttacttttagagaataaacacaaggcaagaaaatwttcttccttaaatccctgtagtttctgacacccctaccctcagtagccacatatatactatcccttttctcccaaccccactttaatgacagtgttgtctttaatttgcaagctaaacttaattcagcacctatatacatcctaattaaggcaggaaatgtaattctgtccttacaactattgggctcagaaactgatttgatagcttaaactataacaacaagggtgtctgggagaatgaaccaagtcactgccttcacctcagccctgatgaatatgcctcatttttatttctggtttacttcctcagtttctgcatataactacaggttcattccaggactaat

SEQ ID NO: 430921 - DNA, 528 bp, Homo sapiens
aatatttcacacctaaggtgttgttttcttcatgcagaggcagcaatcggttggaaaatagacaaaacacaaactaacacacttttttttttttactcttaagacttaagctaatttgctacatagtgattaatgctttaatcaggattcttgggtttgaaaattaatcatttcatcaacagaatgtagaatttatatggatggaaaaatgctataaatcacaagaagaagyactggaacgtttagacattctgaaattattaatttttcaaagaagcctctgtccacctttcctttggagtcttctctgctaaagctccaatccattaattagtagctacattgctctgagtaaattatttgacttctctagcctttttgtctttataccttaaaatgcaatattaaaattcataaagtgactcctcctcttgttagcaggagcagcacagtcctttgcaaagggtcatgaacacagggaggcttattcattaagagccattattatagcagtatgccatatagccc

SEQ ID NO: 430922 - DNA, 554 bp, Homo sapiens
ttccagtgtggttataacaattaaatgaaattaattaacaagtaaatgaaacctgtggtgtgtagcatagcatctgtgagttacatgtcattcaattcatggtagcttctgtaattataagatgtctagaaaggtaggctgtcaggtcaggcggggtggctcacacttgtaatcctagcactttgccagtccaaggtgggcagatcacttgaggtcaggagttcgagaccagcctggccaacatggtgaaaccccatttctattaaaaatacaaaaattagccaggcatggtggcgcatgcctgtagtcccggctactcaggatgctgaggcaggagaatcgcttgaactcaggaggcggaggttgcagtgagccgagatggtgccactatactccagcctggatgacggagccagaaaggtagkctgtaagacccctttgtttagacttccttgtactttgtaaggagctcatctctccgacctgactgttacatatttgcaatgtgactgcccatgtgccatgcctcatgcttatagtcctgcctatggacc

SEQ ID NO: 430923 - DNA, 584 bp, Homo sapiens
ttttttgtaaagatgccgtttcaccatattgcccaggctggtctgaaactccagagctcaagtgatccacccacctcagcctctgaaagtgctgggattacaggcgtgagccaccgagcccagcctaactttttatttctaatgcattatctggcttataatctaaaattattagtgaatgcctttatattgtttttaaaagtacctacagtgtaccttctacacttagaaatcactgtattagaaagaagtttgcctatttaacatgagtaagtcaactgtggcacaattcatttataatatttagccattacrggtgtctgtaaattaagttcccagaatcgcttttgtatcattttcataagctctagtgttttctacattttgtagccagtttttactggtattggtagatgatctcttttattacatattgttctgaaatactattattctataaattatagtatactctagcaaaatgtattatgctatatatactatattatactattgtacactataccacaaattagttatgttataatataagactatattatgctatcgtatactgtactaaa

SEQ ID NO: 430924 - DNA, 629 bp, Homo sapiens
tgtgttaaacatgctacttcagtttgcccatttaggagcagactatattttatgtttaaatgagtagaaacattttaaacacattttcatctaatttggttatctggaagatgtatctaagataaggaatccctttgagttttagaaatttgyaaacatttattgaccaagtacttcattagaaaaacaagaaaagtttctgagcaagcacttctagtgcatgtaaatgtagttgctcatacatgatgtatacttagcattctgtaaatatatattcaaaaattatacacagaaatgagaaatgtataatagttgagaaaatattatataatattttagttattttaattgttaagtgactatttcaaaaatactgattgagtaaagtttttttcatttcagttttttaagtttttgtaatagaataattcaaatgtctgagtttaagaatttattctggtacatagtttgacaactgtcataattagaaaaagttatacagacatgaacagacaaaaagccatcattggctgttcttacttaattaagatagtcatttattatttttagaaataacctatttaaaaatttgctgtaatatggctagtaaatggacatctttcttgata

SEQ ID NO: 430925 - DNA, 629 bp, Homo sapiens
tgtgttaaacatgctacttcagtttgcccatttaggagcagactatattttatgtttaaatgagtagaaacattttaaacacattttcatctaatttggttatctggaagatgtatctaagataaggaatccctttgagttttagaaatttgcaaacatttattgaccaagtacttcattagaaaaacaagaaaagtttctgagcaagcacttctagtgcatgtaaatgtagttgctcatacatgatgtatacttagcattctgtaaatatatattcaaaaattatacacagaaatgagaaatgtataatagttgagaaaatattatataatattttagttattttaattgttaagtgactatttcaaaaatactgattgagtaaagtttttttcatttcagttttttaagtttttgtaatagaataattcaaatgtctgagtttaagaatttattctggtacatagtttgacaactgtcataattagaaaaagttatacagacatgaacagacaaaaagccatcattggctgttcttacttaattaagatagtcatttrttatttttagaaataacctatttaaaaatttgctgtaatatggctagtaaatggacatctttcttgata

SEQ ID NO: 430926 - DNA, 634 bp, Homo sapiens
tttctttaatcacttataatgctggttttaaaagatgatatgtatatttttaatcatctattttaccactagctgctaaagagaccttttatgtttgtgaagtgtgcaaccctctctagaattttcyataggagatctattcttagaactttaaattgtgtgtgttttattataaataaataaataataaagctttgtatttagaaataatttcaaacttacaaagaatttccaaaaatagtacaaagaccatccataatcctttacctcaattcacccaatgttagcattttgccctatttgctttataatttgatctctttctgttatataaaggagatgataagtcaaataagcaacaagcatctgaacatttgcaaaagtattgttttctatcaactttatcataaatgatataagtcaatgcatcctctggttttgtgacaggtcagatgcttcgctccaatatcactctaggaactgttcctttttctgcttcttacttcactcagtaatctcctttatacaagtttttctcgtgtatagaatcaggccttggatcagttatcatatctttatagcttcctttaatcagaatagtttcttagcctttctatgtcttacatgacattga

SEQ ID NO: 430927 - DNA, 634 bp, Homo sapiens
tttctttaatcacttataatgctggttttaaaagatgatatgtatatttttaatcatctattttaccactagctgctaaagagaccttttatgtttgtgaagtgtgcaaccctctctagaattttctataggagatctattcttagaactttaaattgtgtgtgttttattataaataaataaataataaagctttgtatttagaaataatttcaaacttacaaagaatttccaaaaatagtacaaagaccatccataatcctttacctcaattcacccaatgttagcattttgccctatttgctttataatttgatctctttctgttatataaaggagatgataagtcaaataagcaacaagcatctgaacatttgcaaaagtattgttttctatcaactttatcataaatgatataagtcaatgcatcctctggttttgtgacaggtcagatgcttygctccaatatcactctaggaactgttcctttttctgcttcttacttcactcagtaatctcctttatacaagtttttctcgtgtatagaatcaggccttggatcagttatcatatctttatagcttcctttaatcagaatagtttcttagcctttctatgtcttacatgacattga

SEQ ID NO: 430928 - DNA, 546 bp, Homo sapiens
atgacaggtgagagacctgagaatatccaggaaaagggcrtttcagatatgccaagggcttaacaagaaggtccatctggagtcactgaagaaaagaatgtaggccttgctaggccaatattcaaatttggattttcttctaggtgaaattagaagctattggagaattttagagagccaatgtaatcagttaagtttttaatacataattcaggccattatttggagaatagattgtagataagcagcattttaataagcaggctctttctgtcatctggcagaaaagtgatggtaacattgactagagtcgatggcatgggcatgaactaggttagtgggctaggaggttgcgagaagaaattgaatttgagaatatctgggatggtggtgaattacaggatattttgaagcactggatctgaaattgagcaagaaaagagtcaagtgttaatttcaaatctgttggtttgcaccattttctaaatagagtactcagtaagtacgtagtaactaaataactcattttcactcattggtaggagt

SEQ ID NO: 430929 - DNA, 560 bp, Homo sapiens
aagaggaaagaaacaacatacaaaggaactccaatatgtctggcaacagacttttcagtggaaacctcatagtccagaaaagagtggtatgacatatttaatgtacagaaggaaaaatagcctttagcataaatagtgtatttggtgaaaatgtctttcaaacaggaaggagaaataaagaccttcccagacaatcaaaagctgaggkatttcaccaacagcaggcctgctctacaagaaatcctaaaggtagttcttcaatctgaaagaaaaggatgttaaaaagaaagaaaaaatcatgtgtaggtacaaaattcattggtaatagtaagcacacagtaaaacaggatactataacactgtaactgtggtgtgtaaactactcttacctaagtaggaagactataagatgaaccaatcaaatataataacaacttttcaaaacatacacagtaaaatagaaacaacaaaaaattaaaaagaagaagaacaaatttaaagtgtaaagtttttaattagctttctttttgcttgttattttgtttggttatgcaagtagt

SEQ ID NO: 430930 - DNA, 521 bp, Homo sapiens
taatatgcatttatacattttgctttttgaccaattttttattaatatagtttatccactcataactgttatrttatctgttgttagcctacctagatgtttacgcttacaaaaatatgtatgttgtattgcctattttattgtataaagtggcccatgatgtgttccatcatgtttttatgtttctcaaacaaatttccttttaaaaatgtaaataaatacatctttaaaatttttatttcttcagaattatattttttgaattttgatgtgtcaggattttaacattcaggattacggcatcagggttgtgtctttcaggattgtgactggcttttaaacattaaaatatatgaacatatataacctactacagtgccaagaaacagtatatttttcataaatactactttccttccctttatagcaatataacttaattttgtgcttaatttgcaggatttatgccaagctgctttttataattctgtagcaaaaatatgtgaaatgcactgtggtgt

SEQ ID NO: 430931 - DNA, 521 bp, Homo sapiens
taatatgcatttatacattttgctttttgaccaattttttattaatatagtttatccactcataactgttatgttatctgttgttagcctacctagatgtttaygcttacaaaaatatgtatgttgtattgcctattttattgtataaagtggcccatgatgtgttccatcatgtttttatgtttctcaaacaaatttccttttaaaaatgtaaataaatacatctttaaaatttttatttcttcagaattatattttttgaattttgatgtgtcaggattttaacattcaggattacggcatcagggttgtgtctttcaggattgtgactggcttttaaacattaaaatatatgaacatatataacctactacagtgccaagaaacagtatatttttcataaatactactttccttccctttatagcaatataacttaattttgtgcttaatttgcaggatttatgccaagctgctttttataattctgtagcaaaaatatgtgaaatgcactgtggtgt

SEQ ID NO: 430932 - DNA, 629 bp, Homo sapiens
gacttccaccaaacctcctgcagtaatagccaaaacagtgtttatcttatgcctggcactsttctacccactttacatgtatcagtccgtctgttctcacaacagtccaacagtcctatgagtccaagactaatagtatcccattttacagctgaggaaactgagcaacagattgaacagttaatacatgatggagcagggacttatagtctggcaatctggcttcagagtctgtactctttccttctctggtacacagatgtcaacagcatcattcttcagataacctgtgcagaagctactcaataatataactcagttaaatttcctccaacatgcatttcattcatcatagttacaggtactcacatctccttgatgtctggccacttaattttactttctatttctttacctcctacctcttcctttccccacattttcaggttcgcatttttttaaatgttacttttttaagacacaaggatttcaacattatttaaagaaagaagaaactattccatcatcgaaatctgtggggctcagcaggacagctagaacaatatcctttcgccacacccttagtctggaataggcattagttatttgagaaatcagccaggattctt

SEQ ID NO: 430933 - DNA, 629 bp, Homo sapiens
gacttccaccaaacctcctgcagtaatagccaaaacagtgtttatcttatgcctggcactcttctacccactttacatgtatcagtccgtctgttctcacaacagtccaacagtcctatgagtccaagactaatagtatcccattttacagctgaggaaactgagcaacagattgaacagttaatacatgatggagcagggacttatagtctggcaatctggcttcagagtctgtactctttccttctctggtacacagatgtcaacagcatcattcttcagataacctgtgcagaagctactcaataatataactcagttaaatttcctccaayatgcatttcattcatcatagttacaggtactcacatctccttgatgtctggccacttaattttactttctatttctttacctcctacctcttcctttccccacattttcaggttcgcatttttttaaatgttacttttttaagacacaaggatttcaacattatttaaagaaagaagaaactattccatcatcgaaatctgtggggctcagcaggacagctagaacaatatcctttcgccacacccttagtctggaataggcattagttatttgagaaatcagccaggattctt

SEQ ID NO: 430934 - DNA, 629 bp, Homo sapiens
gacttccaccaaacctcctgcagtaatagccaaaacagtgtttatcttatgcctggcactcttctacccactttacatgtatcagtccgtctgttctcacaacagtccaacagtcctatgagtccaagactaatagtatcccattttacagctgaggaaactgagcaacagattgaacagttaatacatgatggagcagggacttatagtctggcaatctggcttcagagtctgtactctttccttctctggtacacagatgtcaacagcatcattcttcagataacctgtgcagaagctactcaataatataactcagttaaatttcctccaacatgcatttcattcatcatagttacaggtactcacatctccttgatgtctggccacttaattttactttctatttctttacctcctacctcttcctttccccacattttcaggttcgyatttttttaaatgttacttttttaagacacaaggatttcaacattatttaaagaaagaagaaactattccatcatcgaaatctgtggggctcagcaggacagctagaacaatatcctttcgccacacccttagtctggaataggcattagttatttgagaaatcagccaggattctt

SEQ ID NO: 430935 - DNA, 600 bp, Homo sapiens
acaagtacttagaactaagtacttaggataaaatatataaaatactatgcttgaaatagtgtttgctattatatgttaaaaagtaaatgtcagtgattatttaagttgacaggaaacatgtttgcattctcaaaataagtttaacagtaacaaatgttatttgcaatatgtatatagattttttaaatgaggacttcgagaatatctgtgaatcatcccaccattattgtatctcatttatgaaacagaatcagtgaaaagcccagagaaaaagaaggtgaatccatgtaaaagctgaaagaaaaaasggagagaaatatagtaagaaccaagtgaataggggctagataaataaaatcttacagagggagggttaggctatttggcaaaaagaagcttaagagagtgttgaagagaaactaggtaaagataactgggaaaatgaaccatgaaattcaggaggtattgctagaattctgatttagattccttttaacatacttcaggagataggagtaaattataaaagttgttctcaccctacctgttgttttgcacaacactctaatctaggaaaaaaccaagtaagtctaaaatatc

SEQ ID NO: 430936 - DNA, 600 bp, Homo sapiens
acaagtacttagaactaagtacttaggataaaatatataaaatactatgcttgaaatagtgtttgctattatatgttaaaaagtaaatgtcagtgattatttaagttgacaggaaacatgtttgcattctcaaaataagtttaacagtaacaaatgttatttgcaatatgtatatagattttttaaatgaggacttcgagaatatctgtgaatcatcccaccattattgtatctcatttatgaaacagaatcagtgaaaagcccagagaaaaagaaggtgaatccatgtaaaagctgaaagaaaaaagggagagaaatatagtaagaaccaagtgaataggggctagataaataaaatcttacagagggagggttaggctatttggcaaaaagaagcttaagagagtgttgaagagaaactaggtaaagataactgggaaaaygaaccatgaaattcaggaggtattgctagaattctgatttagattccttttaacatacttcaggagataggagtaaattataaaagttgttctcaccctacctgttgttttgcacaacactctaatctaggaaaaaaccaagtaagtctaaaatatc

SEQ ID NO: 430937 - DNA, 452 bp, Homo sapiens
aaaaaatagacagatcaatggaacagaaaagaaagcccagaaacatacccatataaatattgtcaaataatttttgacaaaggagcaaaggcactacaatatagagaagacagtcttttcaacacaggttgttggaactactggacatctacatgcatagaaaatgaatatagatacagattttagatccatcacaaaaaaattaagtcaatatgggtcataaacytaaatgtaaaatgctaaacaataagactcctagaagatgacataaaagaaaatctgtagaaccacggctttgttaagtactttttggatgctacaccaaaggcaccatacatgaaaggagtgattgataatctggatttgattaaaattaaaaacatttgttctgtaaatggcatcatgaaaagaataaaaagacaagctgcagagtgggaaaaataattgcaaaa

SEQ ID NO: 430938 - DNA, 452 bp, Homo sapiens
aaaaaatagacagatcaatggaacagaaaagaaagcccagaaacatacccatataaatattgtcaaataatttttgacaaaggagcaaaggcactacaatatagagaagacagtcttttcaacacaggttgttggaactactggacatctacatgcatagaaaatgaatatagatacagattttagatccatcacaaaaaaattaagtcaatatgggtcataaacctaaatgtaaaatgctaaacaataagactcytagaagatgacataaaagaaaatctgtagaaccacggctttgttaagtactttttggatgctacaccaaaggcaccatacatgaaaggagtgattgataatctggatttgattaaaattaaaaacatttgttctgtaaatggcatcatgaaaagaataaaaagacaagctgcagagtgggaaaaataattgcaaaa

SEQ ID NO: 430939 - DNA, 669 bp, Homo sapiens
gtcataaacctaaatgtaaaatgctaaacaataagactcctagaagatgacataaaagaaaatctgtagaaccacggctttgttaagtactttttggatgctacaccaaaggcaccatacatgaaaggagtgattgataatctggatttgattaaaattaaaaacatttgttctgtaaatggcatcatgaaaagaataaaaagacaagctgcagagtgggaaaaataattgcaaaacacatatcagataagtgactattatctaaaatatacaaagaactagagctagaagaggtcagttaatgttgtttaaggaaagaagctacctccataacataaaagtacaaagtgaagtagcaagtgctgatggagaagctacagaaagttattcagaagacctagctaagatcattgayggaagtggcagcactaaaaaacacatttccaatgtagatgaaacagccttatattggaagaagataccatctaggactttcatatccagaaagtcaatgcctgccttcaaagcttcaaaggaaaggctgaccctcttgtcagggtctaatgcagtggtgatgctaatttgaagccaaagcttatttgccattctaaaaattttagcgcctttaagaattatgctgaatctactctccctgtgctctctaagcct

SEQ ID NO: 430940 - DNA, 570 bp, Homo sapiens
ttataccttatatggagctgcaggatctagcttaaattcactgtcatgaactaagacatgtacaattaaactggatactgagggtgctggatcaagggaatggaatgtaatgcatattacagcaaagactgcaagagacagtgctaatactttgcaaggatagcccataggaaacttgragcaagagatggtccacattaagtgacttataaattctgaaattgttatagtagatggggaagaaagaaagaagcagaccaaaaagttgggtttgcaaaactagacaatattatataaagccagaacatccacaaactgacaaaaatggatactttttattagagaaatgagaaatgtactaatagtggggaatagtagttattgaaaagcttagtggtagctctcctccacaggccagcaatcacagcaggcgataccatttcagaattaggttcattgacagcaagggtatgatggaataattatagaagtcagatggcagatcttaattctagaaacaagatttgtgaaattaatataagtggcaaagttagagtggcagacaaagag

SEQ ID NO: 430941 - DNA, 570 bp, Homo sapiens
ttataccttatatggagctgcaggatctagcttaaattcactgtcatgaactaagacatgtacaattaaactggatactgagggtgctggatcaagggaatggaatgtaatgcatattacagcaaagactgcaagagacagtgctaatactttgcaaggatagcccataggaaacttggagcaagagatggtccacattaagtgacttataaattctgaaattgttatagtagatggggaagaaagaaagaagcagaccaaaaagttgggtttgcaaaactagacaatattatataaagccagaacatccacaaactgacaaaaatggatactttttattagagaaatgagaaatgtactaatagtggggaatagtagttattgaaaagcttagtggtagctctcctccacaggccagcaatcacagcaggcgataccatttcagaattaggttcattgacagcaagggtatgatggaataattatagaagtcagatggcagatcttaattckagaaacaagatttgtgaaattaatataagtggcaaagttagagtggcagacaaagag

SEQ ID NO: 430942 - DNA, 614 bp, Homo sapiens
ttttcctatgtgagcatacatacagagttaggcacaaacggatgaaagaagaaagaaatagccaagggaaaaaagtttggaaggggacagccctggtattttcagaagagtaatgagagatgagacttarttcaagtggtggtgaatagaaggatgtccatatttgtcaggaggctggaattcaaggctaaatcccagaagagatgctaagaatgtaaagcaaaaaccaagaaatatttagaagaaaaagttaaaattatgttaatgaaaaggagtattttatttttagtaccaggaatcttaaagagaaggaggaattttacaaaagaagatttaaacagctggattatataccatagagaaatcaaaaatcatgatgacatgacatccaaacatcgttcaaattttcaagttacaagtcctgaaatgtttcccctagctgttgcaacagttttctttagagataatcattttaaagtgtctctctagtttggtgcataaacattaaagcaatttcctcatttattagctctccactatggaccttgtaccatgctaagggtttagatagattaaaaagatggtagatagacagattaaatagaagatagata

SEQ ID NO: 430943 - DNA, 614 bp, Homo sapiens
ttttcctatgtgagcatacatacagagttaggcacaaacggatgaaagaagaaagaaatagccaagggaaaaaagtttggaaggggacagccctggtattttcagaagagtaatgagagatgagacttagttcaagtggtggtgaatagarggatgtccatatttgtcaggaggctggaattcaaggctaaatcccagaagagatgctaagaatgtaaagcaaaaaccaagaaatatttagaagaaaaagttaaaattatgttaatgaaaaggagtattttatttttagtaccaggaatcttaaagagaaggaggaattttacaaaagaagatttaaacagctggattatataccatagagaaatcaaaaatcatgatgacatgacatccaaacatcgttcaaattttcaagttacaagtcctgaaatgtttcccctagctgttgcaacagttttctttagagataatcattttaaagtgtctctctagtttggtgcataaacattaaagcaatttcctcatttattagctctccactatggaccttgtaccatgctaagggtttagatagattaaaaagatggtagatagacagattaaatagaagatagata

SEQ ID NO: 430944 - DNA, 527 bp, Homo sapiens
catgatttcaggtgtgcatttctgatcatgtcatttccccaaaattaacattattgtaaacaaaacccatttgcataatttggtcattaaatgctttttatctgggagagtaaatagtaattgcagtccccaaggtaaagtcttatatgggtaaccggcaaaaatggtgtcctttgtttcttctataaacagagaaattgcatatagctaaaaagagtaagtttcttaagaaactcaggctaattttttatgcagctcaattttggcaaaatgtaatatatcttaataagtgttctttttatcagccatttatcataaatttatttagaacactaaattttcttgatatatgatttttagggtataacttatgtaacatggttatatattcatcattactattcattcccaawaaaaggaatgaataaataaagactgaactttaattctttcttttctctgccaatgtgttcttgaaccagaagtttctacctccaaaatcaattcttaaattcaggcttttgtct

SEQ ID NO: 430945 - DNA, 614 bp, Homo sapiens
ttttcctatgtgagcatacatacagagttaggcacaaacggatgaaagaagaaagaaatagccaagggaaaaaagtttggaaggggacagccctggtattttcagaagagtaatgagagatgagacttagttcaagtggtggtgaatagaaggatgtccatatttgtcaggaggctggaattcaaggctaaatcccagaagagatgctaagaatgtaaagcaaaaaccaagaaatatttagaagaaaaagttaaaattatgttaatgaaaaggagtattttatttttagtaccaggaatcttaaagagaaggaggaattttacaaaagaagatttaaacagctggattatataccatagagaaatcaaaaatcatgatgacatgacatccaaacatcgttcaaattttcaagttacaagtcctgaaatgtttcccctagctgttgcaacagttttctttagagataatcattttaaagtgtctctctagtttggtgcataaacatkaaagcaatttcctcatttattagctctccactatggaccttgtaccatgctaagggtttagatagattaaaaagatggtagatagacagattaaatagaagatagata

SEQ ID NO: 430946 - DNA, 577 bp, Homo sapiens
tgcttttttctttgttccctgtttctctcttacctgtacctcattcctaatctgtggaaacacattgttacataaaatatttatatattatttttcatctcaagctctgctttgaaaggaaaatccagcctaagtaaatagaagaaaaactcagtggcggtaccctttaatttatcgccaccacatactctaggaaatacagcacaaaccatgttgtggaatatgagtccattagattagcaycttgcctctaaaaaaaagagcaagaagaacatggggaaagaagcaaattattcctcttcatccataatgactgtcaaaaaccctaaagtttggaggaagtaaaaatccacttcaaaaaaagtcaaagaaatgaatcattaaggtatgtaatattaactgtaagtactgcaaaaatgttcaggccaaagggacactgacaggattcttcctggagaaggctttatggcaaaggggttgggtgtgtcttgaaaaatggtttacatgaacagagactacaagttattctagaattggagtttagaatgagcaaatggaagcattttatgcatagttg

SEQ ID NO: 430947 - DNA, 598 bp, Homo sapiens
taggttcaatttctggttccagtttaaacaactccttttatataatagcttcctagaacttaacagatgcttaaggcaggaatacaaatgaagagattcaagagctgtcggacacattggctcatacctgtaatcccaacactttgggaggccaatgctggaatatcacttgaggtcaggagtttgagaccagcctggccaacatggcaaaaccccatctctactaataaataaataaataaaataaaaaattaactggacgtggtggcttacacctgtaatcccagcacctcgggaggccaaggcaggcagatcacttgaggtcaggaatccaagaccagcctggccaacatggcaaaaccccatctctactaaaaaaaaaaaaaaaaaaaaaaaaaaagtmcaaaaattagctgggggtgatggtgcatgcctgttttcctagctacgtgggtggctaaggcatgaaaatcacttgaacccaggaagtggaagttgcagtgagccatgactgcacctctgcactccagccagtgcaacagagtgagattccattaaaaaaaatatatagagagagagattcaagacctatttctag

SEQ ID NO: 430948 - DNA, 598 bp, Homo sapiens
taggttcaatttctggttccagtttaaacaactccttttatataatagcttcctagaacttaacagatgcttaaggcaggaatacaaatgaagagattcaagagctgtcggacacattggctcatacctgtaatcccaacactttgggaggccaatgctggaatatcacttgaggtcaggagtttgagaccagcctggccaacatggcaaaaccccatctctactaataaataaataaataaaataaaaaattaactggacgtggtggcttacacctgtaatcccagcacctcgggaggccaaggcaggcagatcacttgaggtcaggaatccaagaccagcctggccaacatggcaaaaccccatctctactaaaaaaaaaaaaaaaaaaaaaaaaaaagtacaaaaattagctgggggtgatggtgcatgcctgttttcctagctacgtgggtggctaaggcatgaaaatcacttgaacccaggaagtggaagttgcagtgagccatgaytgcacctctgcactccagccagtgcaacagagtgagattccattaaaaaaaatatatagagagagagattcaagacctatttctag

SEQ ID NO: 430949 - DNA, 626 bp, Homo sapiens
tcttggtcattcacccactacaggaatgttgtggatagctgcatgtgattggcaaggtgaagttttagcattccaggatctcagcatcccagaaaatacatctttattgagaataacatgacttaaactatgaatatctggcaattaataagcatatggtcattgttacttttcattcccttcattttgagaggcagtatgctgttgtacagtgagttttaacatatccaggtagacagcaatctgagttctgtggaggtgcctcaggctgatgcagaggaaagtaagggagtgagcaagtacaactctatgccactgtcttccacatatccctgagctctgactctcttttattttatggtttagtatgagattgcacaggggaataaaaggctggaaggaggtagggagagggaggagcgtttaaggccattagaagaggagaaaaaacattggcttcaaataagaaatctaaatttttgttctgactttgctacyttctcattttgtgaaatgggcacattatttaactttttgtgcgtccgtgtcctcaatcttgaaacaagaatggtcatacctaccctttggttaaagagaagctttaataaaataacgtatgtaaaggg

SEQ ID NO: 430950 - DNA, 626 bp, Homo sapiens
tcttggtcattcacccactacaggaatgttgtggatagctgcatgtgattggcaaggtgaagttttagcattccaggatctcagcatcccagaaaatacatctttattgagaataacatgacttaaactatgaatatctggcaattaataagcatatggtcattgttacttttcattcccttcattttgagaggcagtatgctgttgtacagtgagttttaacatatccaggtagacagcaatctgagttctgtggaggtgcctcaggctgatgcagaggaaagtaagggagtgagcaagtacaactctatgccactgtcttccacatatccctgagctctgactctcttttattttatggtttagtatgagattgcacaggggaataaaaggctggaaggaggtagggagagggaggagcgtttaaggccattagaagaggagaaaaaacattggcttcaaataagaaatctaaatttttgttctgactttgctactttctcattttgtgaaatgggcacattatttaactttttgtgcrtccgtgtcctcaatcttgaaacaagaatggtcatacctaccctttggttaaagagaagctttaataaaataacgtatgtaaaggg

SEQ ID NO: 430951 - DNA, 608 bp, Homo sapiens
cacacatttcggtataggctaagctaacaacaaaacctttcaacattctgtggctctagcaaaaatataactcattctctctaaggaaataagtggatgggttcatagactccttcaatcttgttactcttagtccccaagggattctcatggctagctcagcaattttctgcattttagtcaaggmaaggggaaagaacatatgttgaaggtaaaaattttccttttaagcaagtgatatggaatttatacacatgacttctgtgcattttctttcttcaagaatgtagtgacaaggccacatctggctgcaaaggacgctgacaggtgtatccaaaaaaattccattactctctggaagaaggttagaatggattttggtagacaacaagcaatcctccctaccctgagagtatatatatccaccatgagtcaaatttcattctatagtcaatctaaacatctagattttccatttttttattttttttaaattattattatactttaagttatagggtacatgtgcacaacgtgcaagtttgttacataggtatacatgtgccattttggtttggtgcacccatcacctcatcatttacattagg

SEQ ID NO: 430952 - DNA, 608 bp, Homo sapiens
cacacatttcggtataggctaagctaacaacaaaacctttcaacattctgtggctctagcaaaaatataactcattctctctaaggaaataagtggatgggttcatagactccttcaatcttgttactcttagtccccaagggattctcatggctagctcagcaattttctgcattttagtcaaggaaaggggaaagaacatatgttgaaggtaaaaattttccttttaagcaagtgrtatggaatttatacacatgacttctgtgcattttctttcttcaagaatgtagtgacaaggccacatctggctgcaaaggacgctgacaggtgtatccaaaaaaattccattactctctggaagaaggttagaatggattttggtagacaacaagcaatcctccctaccctgagagtatatatatccaccatgagtcaaatttcattctatagtcaatctaaacatctagattttccatttttttattttttttaaattattattatactttaagttatagggtacatgtgcacaacgtgcaagtttgttacataggtatacatgtgccattttggtttggtgcacccatcacctcatcatttacattagg

SEQ ID NO: 430953 - DNA, 544 bp, Homo sapiens
aaagtgctgttactcttggtattgcaaaccctcacacttctcttagcactcagatgccccaacttgtgcctccacttaacacctgtgttcccacctaccccctcattccacacacatacacacttttcagtagctcattctgctgagatgtgtttaaccatcctgagttagttatataaaaccaacaagatgcccaaatctttagattctgtctctatcaattacataaactgggtctatggtaatatttttttgcgatcatgtaacatatgcaaaaactcttttctgcctattttttacttaaatttgaactttaatttgtctaccttctctctttgtgagtcaattacaagttcaaataagtctcaaaagacagtaccataaattgatgcaatactcagtgaaacaatgggcatttaaagtatcctatataatactaccaattcatagaaagtcagctaatatactttatatacatataaatcattataatgatcttcctaggctaatttgtgcrcgcacacacacacacacacacacacac

SEQ ID NO: 430954 - DNA, 544 bp, Homo sapiens
aaagtgctgttactcttggtattgcaaaccctcacacttctcttagcactcagatgccccaacttgtgcctccacttaacacctgtgttcccacctaccccctcattccacacacatacacacttttcagtagctcattctgctgagatgtgtttaaccatcctgagttagttatataaaaccaacaagatgcccaaatctttagattctgtctctatcaattacataaactgggtctatggtaatatttttttgcgatcatgtaacatatgcaaaaactcttttctgcctattttttacttaaatttgaactttaatttgtctaccttctctctttgtgagtcaattacaagttcaaataagtctcaaaagacagtaccataaattgatgcaatactcagtgaaacaatgggcatttaaagtatcctatataatactaccaattcatagaaagtcagctaatatactttatatacatataaatcattataatgatcttcctaggctaatttgtgcgcrcacacacacacacacacacacacac

SEQ ID NO: 430955 - DNA, 622 bp, Homo sapiens
gtaaatgaacagtgccagaatgaacaccacaaaccaaaackctcagcatctttttccaactgatataactctaatggaataataaataagtatgttttgtgcagagagaaagatggtatatcagtcaacactaggagtctgaatgaatgtacataatatggcatcgtctttttgttataggtttatcttcacttattttctcatcatttgaaatgaaacttcatcactactatgtatatttttcttcctctgtttgtcattgttctttcttgttttttctttcttgttttaaataattgtgattgtgttttctatgaaatgactgaaagtattatgacctatacaaaataatcaatgtattacacatacactgtcatcagtggtagttatatttatcaagatggaatatgatgcacagaaattacctgtgacatttattttgaaattcataaaaaagcttgtagctcttgtgataatgataatatttctcctaaatctttaatttggaaaaaaatcaatcatttacttaaatagtaggagtatatgaaggattgaaaacaactgcaataaacagtttaataaagaatttttaatttaaacatggtgaacagtagagaaaaaa

SEQ ID NO: 430956 - DNA, 622 bp, Homo sapiens
gtaaatgaacagtgccagaatgaacaccacaaaccaaaactctcagcatctttttccaactgatataactctaatggaataataaataagtatgttttgtgcagagagaaagatggtatatcagtcaacactaggagtctgaatgaatgtacataatatggcatcgtctttttgttataggtttatcttcacttattttctcatcatttgaaatgaaacttcatcactactatgtatatttttcttcctctgtttgtcattgttctttcttgttttttctttcttgttttaaataattgtgattgtsttttctatgaaatgactgaaagtattatgacctatacaaaataatcaatgtattacacatacactgtcatcagtggtagttatatttatcaagatggaatatgatgcacagaaattacctgtgacatttattttgaaattcataaaaaagcttgtagctcttgtgataatgataatatttctcctaaatctttaatttggaaaaaaatcaatcatttacttaaatagtaggagtatatgaaggattgaaaacaactgcaataaacagtttaataaagaatttttaatttaaacatggtgaacagtagagaaaaaa

SEQ ID NO: 430957 - DNA, 622 bp, Homo sapiens
gtaaatgaacagtgccagaatgaacaccacaaaccaaaactctcagcatctttttccaactgatataactctaatggaataataaataagtatgttttgtgcagagagaaagatggtatatcagtcaacactaggagtctgaatgaatgtacataatatggcatcgtctttttgttataggtttatcttcacttattttctcatcatttgaaatgaaacttcatcactactatgtatatttttcttcctctgtttgtcattgttctttcttgttttttctttcttgttttaaataattgtgattgtgttttctatgaaatgactgaaagtattatgacctatacaaaataatcaatgtattacacatacactgtcatcagtggtagttatatttatcaagatggaatatgatgcacagaaattacctgtgacatttattttgaaattcataaaaaagcttgtagctcttgtgrtaatgataatatttctcctaaatctttaatttggaaaaaaatcaatcatttacttaaatagtaggagtatatgaaggattgaaaacaactgcaataaacagtttaataaagaatttttaatttaaacatggtgaacagtagagaaaaaa

SEQ ID NO: 430958 - DNA, 516 bp, Homo sapiens
tgtgctgtttcctcctcaaagattttaagaagaggttgtagcttttcagaagaggttgtagcttggaagaaatggtgacaagactttgggactgatagatctacaagagaaaatgaaatatgtgtctctaaattaatgaataggagagaaaagctagccaatcagaatgcccagtttgagctgttataattgagaaatatgtttctgtgatgtttgataccatatatattttggtgtttatttgttattgtaatttagcctaatataactagtatggaaatgtgcagactgaagtggggtattgctctgacaaaacgtaaatatatggtcctgaggagcaatcaatgatatattttgccagaaagctagagatttcatgttatgcaagtggcaacatacacrgttaaaatattgtctaacattttaggaaaacaggctatgtgtcttttgagcctctaattttaggaaagctattggaaagaaacaaattttagtgccttcttttggcttcttgat

SEQ ID NO: 430959 - DNA, 516 bp, Homo sapiens
agtggcaattttaaagtatgtcttaattttcatctgtgcaaatgtgaatttcaaagccatgtgagaaattcatagaatatgaactatgaaattgtttcacattgaatagaatgtgttacattatcaatgcaaatatatcactcacatatctctccataataaaggtcaccacaagccaacgcctgcataacctgtgactctgctgggtaaacatttatatttcccacasagaacacttaacctcagtctatgaaaggtgactttttccaattcagtatattaaaatattacctccaggcttttctgattaccttgaactgtattctgcatgaactggttgcttttctatagctcattgtttccaccaataccacggaacctgaattcaggctacgcattagcaactagagttaaccatcctcatatgcaacactgagcattgatctctcaaaatgtagcaagaatggttaaccagtcaatacacagattatcccagttgctcatgcggaaagtctc

SEQ ID NO: 430960 - DNA, 516 bp, Homo sapiens
agtggcaattttaaagtatgtcttaattttcatctgtgcaaatgtgaatttcaaagccatgtgagaaattcatagaatatgaactatgaaattgtttcacattgaatagaatgtgttacattatcaatgcaaatatatcactcacatatctctccataataaaggtcaccacaagccaacgcctgcataacctgtgactctgctgggtaaacatttatatttcccacacagaacacttaacctcagtctatgaaaggtgactttttccaattcagtatattaaaatattacctccaggcttttctgattaccttgaactgtattctgcmtgaactggttgcttttctatagctcattgtttccaccaataccacggaacctgaattcaggctacgcattagcaactagagttaaccatcctcatatgcaacactgagcattgatctctcaaaatgtagcaagaatggttaaccagtcaatacacagattatcccagttgctcatgcggaaagtctc

SEQ ID NO: 430961 - DNA, 516 bp, Homo sapiens
agtggcaattttaaagtatgtcttaattttcatctgtgcaaatgtgaatttcaaagccatgtgagaaattcatagaatatgaactatgaaattgtttcacattgaatagaatgtgttacattatcaatgcaaatatatcactcacatatctctccataataaaggtcaccacaagccaacgcctgcataacctgtgactctgctgggtaaacatttatatttcccacacagaacacttaacctcagtctatgaaaggtgactttttccaattcagtatattaaaatattacctccaggcttttctgattaccttgaactgtattctgcatgaactggttgcttttctatagctcattgtttccaccaataccacggaacctgaattcaggctacgcattagcaactagagttaaccatcctcatatrcaacactgagcattgatctctcaaaatgtagcaagaatggttaaccagtcaatacacagattatcccagttgctcatgcggaaagtctc

SEQ ID NO: 430962 - DNA, 584 bp, Homo sapiens
ggggatagagaaaataagtccattcttctgttttgctcatttacctttatttcacatcaggttatctgaatgagagaaggaaatcagactagttttacttatcaaattattgctgcagatggatttttttttttttttgagatggagtttcgctcttttttgcytaggctggagtgaaatggcatgatctttgctcactgcagcctctgcttgccaggttcaagtgattctcctgcctcagcctcctgagtagctgggattacaggtgcgagccaccatgcctggctaatttgtattttagtagagacagggtttcaccatgttggccaggctggtctcaaactcctgacctcaggtaatatgcccaccttggcctaccaaactgctgggattacaggcgtgagcctggccagattctacacatacaagttagttacataaaacataaaggtcactgtggttaagaacagagggagaagagcaaaagcagatatcaaaatgtgatttactaggttgtgttgttaagtaagagttactatttaatatgattttgtaaccaaagtagaattgcctaaactacatat

SEQ ID NO: 430963 - DNA, 605 bp, Homo sapiens
aattatcttcccttgccaggaatgatctcttctctgtatacctactcaaatagtataaaaccaaattagggtcccaggtcagactgcagagcccacaaaagcatgagttgtaacaatttgcttatttggtgccaaaatcatagatgatttaccacgagatcaaaatgtagtcatttcattgaaaaattaatatattatgcagatacgaagtccacaaaatttagtggmctttttttacagttatgtactgtgttagtctgttctcacgctgctgtgaagaaatactcaaggctgtgcaatttataaaggaaaagagttttaattgactcacagttccacagggttgggaggtctcaggaaacttacaatcatggtggaaggggaagcaaacacgtctttcttcatatggaagtatcaaagtgaagtacagactggagtgggggaaaagcccctaataaaactgtcagatttcatgagaactcactcagtatcgcaagaacaatgtggggaaaacagcccccatgattcaattgtctccttctggtcctgcctttgacatgtggggattattacaattcaagatgagattttaagtgggacatagc

SEQ ID NO: 430964 - DNA, 553 bp, Homo sapiens
taatatttctttttccctctagatgcacaggttttaaagtagcagtctttaaaagataagcaaactgagtgactaaaaaataaggaggggatatcttttcatttttagccatttttagtaaatggctgaaaggtgacatatatttccaaaggtgacatataatatttgttcattcgtattttaaaaatagacctaatgctgttaaaaagaataaaaaaggttgcatattttggaaagaaatgtrtaagtataaatgtatatttttaaaaaatgtatatatttcctaaaaatatattgaatatgttgaattctgaaatccagagattttattttacatagttttcagggaagttgaacttcaaagactgatggtctgtaaaaaaggaattgtccagtctatgattataagtttgacacccactgtcaacatcctataattgcaaatatagaattatgaggttattaaaagaggatggatatggtattataattcacagttaaaggttaaaaccaagtgctcatgaagaagaaaaaaaaatattatttcatggat

SEQ ID NO: 430965 - DNA, 602 bp, Homo sapiens
gcgcagttcaacctataacagacacttagtgccatgatatatataaaaggaacaatatgtgaataaactgaatgctgagcatgtttaaatgttggcatatcaaattaacaaagtagaatgtggagcaattaaaattgtaaagatgaagagcctccaaagtgaaattatttatttaaagaaactttttttttactggtacaactatgaaagctacatatatgtgataaatggttgatggaaatatacataagtaaatctaattaggggattaaggccagaaattgggatgaatcattaacattccttttaagatgtttatttaatagtaatgtgaatattgaaaagggaattattgtggtaaaccactgaacctatattttttttccttggggagagcctgattcacaagcagaaacctcattaagccactcccartgatacctaaatcaaaagcagtcactcaggagcaagaggaatatagttctaatagcaggaacacaaattgagcacattcaatatctgagaagaatgtttcattctcttgaaaactacctacacacataaaaactcaatacaggtggcagtagccagtgtgcacaggg

SEQ ID NO: 430966 - DNA, 569 bp, Homo sapiens
gaaaatctgtaatttcaaaaatattaggaagattcctgagtaaagaaagcaaaaatttcatttagacgtattctttccttttctcctaaatcttatctcttcccatttctcttaatcatatctcatgaagcgtaatcttatgaaggtatagtgaaaggagaaaggacaaagaaaatgtgaatgagttgggcattattgaagggggcctacctaacacaaaaatttttgcaaaactactccttaaactagacttgaaatattgtattggcacatgttttatgtcagaagctatccattggtcattaatctatgctaaaattttgcaayctagtccttcttctgtgttctctgtattgccccccgtaacctctacagtcatttagaaagttataggagagttctgttagctattatcatggacaattacttgattgactaaatataaaagaaaattaaacttctttctcaagaattctaaaattatatttagaatttgatttaataaacatttgctgagtaccagccatctttatgactctaaactgaaaatgcagaaaataaataggtac

SEQ ID NO: 430967 - DNA, 588 bp, Homo sapiens
ttatgaaagcaaaagtcccagttcacttttagagtcaccgaatagctctcaagtcggaaaagcctaccacaacaagcaacctgatgcacaaatgtggggaaataatgtagccrttagaaagtttgaaactgaggctgctgggaaggcgaataaatcattcatatagacctggactctagaagaagggatggctgactttgaatgtgaatgtaaacggtgatttcagttgccattgattcactgcaatgaaaattttattttacgaaaagtaattgaattgagtacagaaacaactacagttgattacattttctagagtattgctatttgtgttgtgaagctgatatcttagcaaattagcacatctgtaagcattccccttgggcttgctaactggacatgaagcaactgatagttggtgctgacacaatagattaaactgaaaattttggaaaccataaaagtcatgcaggcattatcaagaatcagcactctttcttactataaagtttgtaactcttttggaatcattccaccatgccattcttttctgtgccttggttcaaggaatggaaaacccaacattca

SEQ ID NO: 430968 - DNA, 616 bp, Homo sapiens
cacatctgtaagcattccccttgggcttgctaactggacatgaagcaactgatagttggtgctgacacaatagattaaactgaaaattttggaaaccataaaagtcatgcaggcattatcaagaatcagcactctttcttactataaagtttgtaactcttttggaatcattccaccatgccattcttttctgtgccttggttcaaggaatggaaaacccaacattcataaatctgaaagtactggaagttgcactactcccagctttggagtcttactcatctctaactcattcaacccagaaacctctacattttgcccttactacagctgtacatatttggtggaaatagtatatccctgcaaytcacattagagacatattctaaaaccatagtgaatgattttgagctagccagtaaacaaattgaagtttgttaaaattcattctggtgttctaaatgaatctcctcccacctcctccatctacagtaatcatgtggattaaacagcaagaatagttttgttcaatacgttcaccctgtggcaatgtagctgattacattagaaataacctactaatgaaactactacacaaattatcatcctgaactat

SEQ ID NO: 430969 - DNA, 530 bp, Homo sapiens
agaatataataatctctgattgtcaacccaccaaatatccttacaaagaagacacttttattattgcaattttatagaaaagcaaagtgagcctcagagaggcaaagtgactttcccaaggagacagagatagcaagaggcagatgtaggttttgaaagtactgtgatgtaactccaagcctgttgcttttttttttttttttgagaccgagtcttactctgttgcccaggctggagtgcagtcacgtgatctcagctctctgcaagttctgcttcctgggttcataccattctcctgcctcagcctcccaagtagctgggactacaggcacccgccaccacgactggctaattttcttttttttttttttttttttgkatttttggtggagacagggtttcactatattagccaggatggtctccatctcctgacctcatgatcatccctcctcagcctcccaaagtgctgggattacaggcgtcagccactgtgtctggccccaagcctgttgctttttagtcaatac

SEQ ID NO: 430970 - DNA, 574 bp, Homo sapiens
caacccctcccaggtccccagttccccatctgcatcggagactgtggccagtgygggaatccacaaggcccttcagcctccaatgctctgggacagaggcctcgtccacggggaggaaggggtcagagtgacctgagtccctactcaggagcgagtctaatccactctccatcggggcctgtggggaagggaagatgaagaaacggagcctgcacctggctatgtgggcgcagtagattaaggggaggatgagggttcctgagagtgtgtcatgtggcagagaccctgcagcacactcaggaagggctctggaaggatccaaggaaattttccaagaagagggcagagtaagtgacagagaccctcaaccatggatttcactgaggtgcccatgatgacatagggagaacgggggtgtctgggcaggaagaatatcgtcagggtgaaatgaatggtgatgagcttcgtgtcagagctcctgtggagggaggggcctggcccacatgaaaaggtctctgatcctaccccagcccccagcccctgttctccaggatgacactgtgggaattccatc

SEQ ID NO: 430971 - DNA, 574 bp, Homo sapiens
caacccctcccaggtccccagttccccatctgcatcggagactgtggccagtgtgggaatccacaaggcccttcagcctccaatgctctgggacagaggcctcgtccacrgggaggaaggggtcagagtgacctgagtccctactcaggagcgagtctaatccactctccatcggggcctgtggggaagggaagatgaagaaacggagcctgcacctggctatgtgggcgcagtagattaaggggaggatgagggttcctgagagtgtgtcatgtggcagagaccctgcagcacactcaggaagggctctggaaggatccaaggaaattttccaagaagagggcagagtaagtgacagagaccctcaaccatggatttcactgaggtgcccatgatgacatagggagaacgggggtgtctgggcaggaagaatatcgtcagggtgaaatgaatggtgatgagcttcgtgtcagagctcctgtggagggaggggcctggcccacatgaaaaggtctctgatcctaccccagcccccagcccctgttctccaggatgacactgtgggaattccatc

SEQ ID NO: 430972 - DNA, 574 bp, Homo sapiens
caacccctcccaggtccccagttccccatctgcatcggagactgtggccagtgtgggaatccacaaggcccttcagcctccaatgctctgggacagaggcctcgtccacggggaggaaggggtcagagtgacctgagtccctactcaggagcgagtctaatccactctccatcggggcctgtggggaagggaagatgaagaaacggagcctgcacctggctatgtgggcgcagtagattaaggggaggatgagggttcctgagagtgtgtcatgtggcagagaccctgcagcacactcaggaagggctctggaaggatccaaggaaattttccaagaagagggcagagtaagtgacagagaccctcaaccatggatttcactgaggtgcccatgatgacatagggagaacgggggtgtctggrcaggaagaatatcgtcagggtgaaatgaatggtgatgagcttcgtgtcagagctcctgtggagggaggggcctggcccacatgaaaaggtctctgatcctaccccagcccccagcccctgttctccaggatgacactgtgggaattccatc

SEQ ID NO: 430973 - DNA, 552 bp, Homo sapiens
aaagaatattgaacatgtagaattttagtacattaatagtaagagtacaaattgctttaatcaattaaggaagtgtattggaattatctagttaaaaagaggaggcacayggctgtgacccttcttaattatgtacttaattatgtaccctagagataaatgtctacttatgtgtcatgatacactcacaactgttataggaatgctgttcctattagccaaagctataaaataccaaagtccacctacgaaaaaaataaacatagtgtggtaaatagactcagtggaatattacaaggtagtaaaatgcataaatgaaaataacaaacagcaccatacttcaattttcaagcataaagtcaagtaaatgaagtattatttgaaaatgtgtgcatggttatttcattacataaaggtcaaaaggagggtacatttattatttaggaaaacacacctaagatatctttgtaaaatctgtaaaatcaatagtactgtttcccctctttcattccttatcttgaaaatgcttgtctctttttctgccatggcttt

SEQ ID NO: 430974 - DNA, 499 bp, Homo sapiens
agaccaataacaagttcagaaatttaatcagtaataaaaaccctactaactaaaaatagcccaggaccagayggattcacagccaaaatccaacagccatacaaagaagaactgataccgatcttactgaaacttttggaaaaaatcaaggagtgggggcttcttcctaactcattctatgaagccatcatcaccatgataccaacatctgtcagagacataatgaaaaaaagaaaactacaactaaatatccttaatgaacatagacataaaatcctcaacaaaatgctagcaaattgaatctgtcagtgcatcaaaagttaattcacatgatcaagtaagctttatttttgggatgcaaggttggttcaacctacaaagtcaacgaatgtgattcacctcataaacataattaaaaacaaaaactatatgatcatctcaatagatgcaaaaaaagctttctgtaaaatccaacatcccttcatgataaaaactgtca

SEQ ID NO: 430975 - DNA, 499 bp, Homo sapiens
agaccaataacaagttcagaaatttaatcagtaataaaaaccctactaactaaaaatagcccaggaccagacggattcacagccaaaatccaacagccatacaaagaagaactgataccgatcttactgaaacttttggaaaaaatcaaggagtgggggcttcttcctaactcattctatgaagccatcatcaccatgataccaacatctgtcagagacataatgaaaaaaagaaaactacaactaaatatccttaatgaacatagacataaaatcctcaacaaaatgctagcaaattgaatctgtcagtgcatcaaaagttaattcacatgatcaagtaagctttatttttgggatgcaaggttggttcaacctacaaagtcaacgaatgtgattcacctcataaacataattaaaaacaaaaactatatgatcatctcaatagatgcaraaaaagctttctgtaaaatccaacatcccttcatgataaaaactgtca

SEQ ID NO: 430976 - DNA, 567 bp, Homo sapiens
aacagagaaaaagagacctgagcccagcctctcacctgggctctgcaattttttttttattacttaatgtctcatgatgtgacttttacagaatttctaaaaaaaaaaaaaaacctcttcctccgctagcaggattccctctagtctcctcattgaacgatttcagttttcctgtgttctatggatttaaacattgctcctgagtcatctgggagagagttttcctgcatcctgagagctcaggatctgcaaggaaagtggtccccagtacagaggtcactgaggcctgtgtgctctctgtgcagcctgggacacaggagaacatgasccacctcccccggagatgagagtttcacggatccaccagctgaggacccaggctccgtggatgagggttagtcatcaggggagcctcaatgtcagaagcacaaaggggtgaaagtctggggctgcctccccttcatgccctcagccacttcacctggagtttcatcgtccatttaatctctaggtagctaattattcgtataggcagcaacaggtagaatgtgatacacacacagaaaa

SEQ ID NO: 430977 - DNA, 567 bp, Homo sapiens
aacagagaaaaagagacctgagcccagcctctcacctgggctctgcaattttttttttattacttaatgtctcatgatgtgacttttacagaatttctaaaaaaaaaaaaaaacctcttcctccgctagcaggattccctctagtctcctcattgaacgatttcagttttcctgtgttctatggatttaaacattgctcctgagtcatctgggagagagttttcctgcatcctgagagctcaggatctgcaaggaaagtggtccccagtacagaggtcactgaggcctgtgtgctctctgtgcagcctgggacacaggagaacatgacccamctcccccggagatgagagtttcacggatccaccagctgaggacccaggctccgtggatgagggttagtcatcaggggagcctcaatgtcagaagcacaaaggggtgaaagtctggggctgcctccccttcatgccctcagccacttcacctggagtttcatcgtccatttaatctctaggtagctaattattcgtataggcagcaacaggtagaatgtgatacacacacagaaaa

SEQ ID NO: 430978 - DNA, 580 bp, Homo sapiens
ataccgtgtgtgtatacatatagtgcttatgtacataataggtaaatatatacacaaattaacatatatatgtatacatacatagaatttgtttttctatatacaaaccctataacatatgtaactagagagttttaccatatgtatgtaattcagattgaacattaagttgtatactcattcattttttttcttaacctctcagttcttgataaatatttctttgaatcaccaaatatatacaaatttatgttgtatatatttcaataacccatggttagatgaatgaaagtttacaattattttatcattttttataccgtctctctctcttttttttttttttaacacagatgagtctcactatgttgcccaggctggtcttgaactcctgggctcaagtgatcttcccacctcagtctcccaaagtgctggrttacaggtgtgagccaccgtacccagcacttaataccttcattaaaacataaaacttcactattttcaaaaaagttttgtattatgttacattttgtggactattaatgtttctaatagataattttaacagcatgtctttctt

SEQ ID NO: 430979 - DNA, 334 bp, Homo sapiens
atcaggacctgaactcagcacgatagatatctacagaactctccacacccccaaaccagaatttacattcatctcatcaccacatggcacatgctctaaattcaatcacataattggaagcaaaagactcctcagcaaattcagtttgttacaactgaaattggcacaaaccactctctgaccacagcataatcaaattagaaatcgagactaagaaactcacttaaactcatacaattacatggaaattaaacaacctgctcctgaatgacatcagggtaaataatgaaattaaggcagaaawtaagaagttattacaagctaatgggagcaa

SEQ ID NO: 430980 - DNA, 550 bp, Homo sapiens
ttccttacttaggtaaacacctgaaattcatagtttataacattggttaacagggaattaactttaagtgatgactgtcacagtgttcataaataatctaggtaaactattaaataagtttatcaagtaaatgcaatggaataaatgcctataaacaaacttgtcacataatttacaatctaaagttatattaaataatagatattaattgaytagctgggtaatttataatttaaaaattacaggaaaacatttttaaaaaacaattcttattaaaagataaatatctgtgtttaattcaaagcttttttaaaagttatgtataaaacaagataaatggaaacaggaaataagagatgtaaagacagttataaatataaagaggaattttggtaaaaaagatgaaaaggaaagtaattttacacaagaaagtcttatgtagtgaatttttgtcctgaaataaaataactgatagttcaagaaagagggatatttaggacaaaacaggcagtttaagcatgttgtaagtggtctctgtaagtcacaataa

SEQ ID NO: 430981 - DNA, 592 bp, Homo sapiens
tccaccatgaccaatcattggccagggttgcccccaccgtccccagagcagacaagaccatccctgagattaggcgcaattcccagtgagagaacacaacccaggatyctggacaagcaaaaagagaagagtcaaaacgtggtaaaatccaaataagctctgaactttagttaatagtattgctccagttaatcttttagtttctacaaatgttccatggttatataagatgttaacataataagaagatgggtgaagaggatacaccaacatcacatagtactatttttgcaactcttctggaagtctaaaattatttcaaaattctaaaaaattgttgtaaaaatacattgaaaatagaattgaataaatgagagaatggagtgataaattgttatgcaatattaggaaagacttaagaggaatgtttccaatgtcagtgtagtcctcaaacatactaataaagtagtttcagtggttcaatttttagtgggttgtgaagtgaaaggaggttaaagaggcctagatctctctttctgagaactacatttacaagagaagatacgtgatatagttaaatgaaacagtgtgt

SEQ ID NO: 430982 - DNA, 588 bp, Homo sapiens
ctggttccttccaggaacattccttctaatgctcccagaaaacaaattgggctggtttcaccatgacaactacaaatctaatccaacatgaagagttagaggcaggcaatttgttgtgtacaattcaagagttaccaaaaaattcttcggatctgggggccttccacccctcttaggtaagttatacacgtccttttgattctaaggaaaactgctcgtaaaatatttgggagctcttgggacatcaaacagctcttagaggagtgcattttaatggtttacttgtaaaagaatcagtaaaagaagtagaaacatatggttcaaattcctctgaattctgcaaggtattgttgtagatgtcttttttttcttttttcctgagggtctccacgcttctttgagcgcttatcctaaaaatactccaaataaccactacatgtactggcmcagcaagtgagacatcacatggtaacatgggtcttgctgaggttgcagacctgggtcctagcagacactgggttcattgagaagtgtggggagaaggaaagaagcaagaatgtttgggaatcctgagtaattagggtgcag

SEQ ID NO: 430983 - DNA, 552 bp, Homo sapiens
acacaaagcagtcccatttcacccattccacccccagttctccccaaagacaaacattgtcattaacacttctaggaaattcttctcatcttcactttcatatttttggtactatattcatgttgcaatttttaattgattagctgtaggcattaacttttgaattccccatcactaaccctcttcccatcttcctaacacataatcactttgaagactccttttgttcagttttgggaaattttcttgcattacgctttgaagctttcctccccccgttctgtttctggaactcttgtaggtcagkagactggccttgagaataaaccctataatttgttttattctttcgcttctatttccctttgtctttttgttctacttgattttagcttctaaccattctgttgctttcttgttttattttatttgggttttttaattttttgcctgtctttaattttgaggttcttgtggtctggttacttttcatggtattctgtccttgttttatagatgtaacatcttctcatatatcactcagtatagtaa

SEQ ID NO: 430984 - DNA, 590 bp, Homo sapiens
tgtgtgctgaagacgggggccaagcccacaggacctgactcacagatgtttttgaggcctgatgccctgtcttgtaatgagggccctacattgaaaatggtctggaatttatagactgcgaattacccaaggttcagatgacattgttcagattctcctcagaagggttcgacacaggttgacagagttctaaaggcatcatctgtgggtatggcacatctgcatttcagcacaattagacccccatgtacctgaaccatgtagaaaatgtcaagcacaaattctcacagttatcatgactagggctgtctcatcagaatacagaggtaatgctgaaattataaagtttaacatgttaaccataaccattttctttcaacttcagacaggtaaatgagaccaagttgtgctgcatcatctttcttgcataaaccatacctataataatgtgcaattatttaaagcagaactcttgcaaagcaatgtaggtacagaattttgctgaagtttttgaaataaacttttttcaatactttgctgttgtttctctcattccsaatttgagaagaatttccttaaaacttggctgt

SEQ ID NO: 430985 - DNA, 505 bp, Homo sapiens
cagcagttcccaacattttggtaccagggaccggttttgtgaacaattttttcatggatgagagggatggtttcaggatgaaactgctccaccgcagatcatcaggcattagttagattctcataaggagtgcacaacctagttcactygcatgtgcagttccctttgggttcctgctcctatgagaatctgatgccgccactgatctgacaggaggcagagctcaggtggtaacgcttgtttacctgacgctcacctcctgctgcgcagcccggctcctaacagattggtactggttcgtggcctgggggctggggaccccaactgtagtggacagctgaatctgagcccaccctctgagtaaaccaagtgtaggtgccagtcctgtgagcaaagataccttcagaattttccagccccagccatttaagtgtccctagctgaggccctgtctgctgtgccttttctgaattcctgacccacatctcttgggagcactaaaact

SEQ ID NO: 430986 - DNA, 583 bp, Homo sapiens
aggtggggagagcaaagctgttcccagccmtggcgtagctgcctggacacaccaagggccttgtctgaagtctgggtagcccagatcctggagttaacaggagaaacatgagagcagcctctttcacaggctctcctccagtcataaatgtgccatccagttccccacaaataaagcacaggccatcttacagagaacttgtcatcagaagaaagaagtgccggactccttgctgggctctggggagctcactgctgggatggatggagtagagtctgcaggcagcagcctcacaaagcccagaggcagggtcactaagagccaggagaaaggccccaggccctgtgatgactcccattctttaacgcatgtgcttcattgtgcatcttggatggcagccctggcatccaacaagatccaatcagtcagtaaaaacgtgctcagcaatttccgggagcccaggtgactctggaatgcctcgaggaaatgagacccttcccctgcagttcctaccaaaggaaaaaaaatctgaacacattgtgcaatgggagctgagggcatgctgcccaggtggggcaggaaa

SEQ ID NO: 430987 - DNA, 512 bp, Homo sapiens
agtcaatatagtttcctggataatattatcacaaatttttatatcccttacttttttctgcattttacgaaacaagaatatatcaatttaaggaacagaaccacaaagcacataagaaaaaggagacagaagcatgttttgagatgaaccatctactatttaccaaagagttaatttaagcatgaatatgttcccaaaactgtaataaaatacatattatatacacaaattatgattctggtgttaactatttacttccttaaaacattaacaaagcactgagctaaagaggccycagggagtatctgaattccagtctggttccaggtccccctcttcttatgcatcaattctctttctgattacaacccacccagtgcacaaagaatcatgaactgatctcttctttaaatcagagctgtacaaccaattaagaaagcttcagactgctactgcgcaaaccctccattctcaaaataaatactgcatttctcaaccataaatatatatgg

SEQ ID NO: 430988 - DNA, 592 bp, Homo sapiens
tgaggccatctctcctctctatctactgagtctggggtctttataggcacaggatgggggcagggtgggctgtaggtagttttggaaaaggcaacatttgactggtaaaaagacattattcagaaagaaccaatcaggagagagcaggcaaacaaaaatagaagttctcactttgggctatgggtttcaggctacttttgcttgaagatggggtttcactggggacccacccatgtctgcctagaattcctttgcctcctgcctctatgaacatgatgtgagaaaaggagaacagaggctggaactcagggccagttgtgagagaggaggtagagtagccctgaataccttgagatgttgaaatagacataaatggtgtgtgggagcccagggtgagtgagttttacttaagaatggagagtggggttactttggtagctgaaaaacttggttttgcccagtagctagtatctgggttrtcttcccagatatagttttttttttttattaaattatgttcactcactcaggagatatatgttttaagaacacgactacaaaacccatgaagccaccacttaggttaagaaat

SEQ ID NO: 430989 - DNA, 592 bp, Homo sapiens
tgaggccatctctcctctctatctactgagtctggggtctttataggcacaggatgggggcagggtgggctgtaggtagttttggaaaaggcaacatttgactggtaaaaagacattattcagaaagaaccaatcaggagagagcaggcaaacaaaaatagaagttctcactttgggctatgggtttcaggctacttttgcttgaagatggggtttcactggggacccacccatgtctgcctagaattcctttgcctcctgcctctatgaacatgatgtgagaaaaggagaacagaggctggaactcagggccagttgtgagagaggaggtagagtagccctgaataccttgagatgttgaaatagacataaatggtgtgtgggagcccagggtgagtgagttttacttaagaatggagagtggggttactttggtagctgaaaaacttggttttgcccagtagctagtatctgggttgtctkcccagatatagttttttttttttattaaattatgttcactcactcaggagatatatgttttaagaacacgactacaaaacccatgaagccaccacttaggttaagaaat

SEQ ID NO: 430990 - DNA, 578 bp, Homo sapiens
cttaactgtttccaggagtttgcagagccttctccttcctggcttccttctctgccttgggggtgcctgtggccacaggagccctgagcagggtttgcactcccagtctggggatgaacaggaggacctgtctgatgggagcagctgccaagcaagggtggggatgggagagaacccccaaacagagcaggygtggcgtccgggtgggccagatgagcaggggtccaaggtcagggttcacaggctcaacaagaagcttcctcttggaaacctaaaaaaggaatcaggaccgagggacataaccacagagacaccaaaggcccagacaacaggctcaggcgggagcgtagctacttgtggtcataaagctctgaatgctgctttagtctccaggccccagggcctgagccttcaggaccaagatctggagctcctgccctgctataccaaaggtgctgctgtaaacactgttctggttctaactgtttaatcccacgccaactctaggaggcaggtgctatttaatatcatctccagttaccaaggaagaaactgagattcagaaagagaaaggcacc

SEQ ID NO: 430991 - DNA, 589 bp, Homo sapiens
gtctcagaatattataataaaaagttgtaatcacataccttcaatcaatattccaaagtaacagagacatgtcactcacagaattaggagttgggccacttgggttggacaaggtcaggtcacaattctcaatttgtacagctgatcagagccagatctcctgaytcctggtgcgtctctccctcaggcctcggtttccacgtccataaaatgggatagtttgcttgtgctccctccagacctgataattcttctacccagggttcacatatcttgactcagtttgaagcagaacattcagacaggtagtactgtcagagaggaaatggtctgccctgtaaggcaggactgtgggtgcgagaatctgcgctggagggcaccaggtggaaatttcatagggaagattcagattgcagattggacacttcattcctctcacactgtgaacttctacaggtccctgaattacagaccccattcctgggacaaagcttaaaagaaagaaacaaactttaaagaaatataggaaggtgcctttgttactataatgattatggatatctgttgtaaaaataatacttattgagcc

SEQ ID NO: 430992 - DNA, 589 bp, Homo sapiens
gtctcagaatattataataaaaagttgtaatcacataccttcaatcaatattccaaagtaacagagacatgtcactcacagaattaggagttgggccacttgggttggacaaggtcaggtcacaattctcaatttgtacagctgatcagagccagatctcctgattcctggtgcgtctctccctcaggcctcggtttccacgtccataaaatgggatagtttgcttgtgctccctccagacctgataattcttctacccagggttcacatatcttgactcagtttgaagcagaacattcagacaggtagtactgtcrgagaggaaatggtctgccctgtaaggcaggactgtgggtgcgagaatctgcgctggagggcaccaggtggaaatttcatagggaagattcagattgcagattggacacttcattcctctcacactgtgaacttctacaggtccctgaattacagaccccattcctgggacaaagcttaaaagaaagaaacaaactttaaagaaatataggaaggtgcctttgttactataatgattatggatatctgttgtaaaaataatacttattgagcc

SEQ ID NO: 430993 - DNA, 589 bp, Homo sapiens
gtctcagaatattataataaaaagttgtaatcacataccttcaatcaatattccaaagtaacagagacatgtcactcacagaattaggagttgggccacttgggttggacaaggtcaggtcacaattctcaatttgtacagctgatcagagccagatctcctgattcctggtgcgtctctccctcaggcctcggtttccacgtccataaaatgggatagtttgcttgtgctccctccagacctgataattcttctacccagggttcacatatcttgactcagtttgaagcagaacattcagacaggtagtactgtcagagaggaaatggtctgccctgtaaggcaggactgtgggtgcgagaatctgygctggagggcaccaggtggaaatttcatagggaagattcagattgcagattggacacttcattcctctcacactgtgaacttctacaggtccctgaattacagaccccattcctgggacaaagcttaaaagaaagaaacaaactttaaagaaatataggaaggtgcctttgttactataatgattatggatatctgttgtaaaaataatacttattgagcc

SEQ ID NO: 430994 - DNA, 519 bp, Homo sapiens
ttgcctaaaatcagctctcgtttctccagtggtctgcacacatcacagtgggaaccactgctgcactggccttggcgggttccttgcccatctccccaccagacagtgagtccctggaggacagggacgagctttcatctctgcctcaccgtgtcagtaaatctggtgccttgtgcataatatgcattcaataaatgtttgatgaatgaatgtctctctcacgagcacaagtgaaataccacagcaaacacaaatatctgctattttctctcactttgattcccaacctctgataaactcttaagcactcaaacatrgaatcaaaacataaataagtaccaaacatgtgtaagtgaagtgcagcccatttttctacctcttaaaacttttttcttaagtaactgttatttatttagttcccctaatgttaaggggaaagaagttaaatgatttaaatttgtaaataattctttaaaaataacttaactggcggggcgtgatggctcatgtctgtaatcc

SEQ ID NO: 430995 - DNA, 612 bp, Homo sapiens
tgttatttaaatatttagaggcctttgtagccttgcaggctatttttaaaatgacctttaaaaccatttgcaaagaagacaaaagtaatggggggaaagcataaccttttaatgtttccttcattagtggcgttccctaccttggatgcattgccttgctttgatagttcataatgtaggatacatcaaagacccaaataatggagaacaatggggaccaatttttttaaagctgattttgcattattgctgctgccattaggtgtcagatggaaaagatccctttcttttaaataagctggactcatgattgattttctaygtgtggtagacccccttggtaatgctggtgtgtaaagaaagacctgctatgcattcatatgtgaattgggcttatccggtttcctacgactttgcttttgtacagcaagtttatttttgagaggagagagtcaatctgcgttatatctgactcaataataacaagaaaccaagttgcagtaagagtctgctctattccttccttcattcagtcaatcctccgttcaccatttctccaaaacataccagtccgtctttgactgtattttgagggtctggacccagaacagg

SEQ ID NO: 430996 - DNA, 599 bp, Homo sapiens
ctgaaatgcctcaattaatgtgaagccacaattgattatgtttttaatatacaaatattggtgctaatggatttataagacattgtgatggacttagaattgtaagtctttactatcaggcagcctttaggaagcagctactaacatgtttataaaggatgcatacactgggaaattgtggtcaaaatgtcaaacagtaaaacagcagagttcaagctggttcacatcaatatttattttaattttgtaaacacttatttgggtgattttttttatgaaagcctaagctttagagaaacacctttatagatcaattttttaaaagcatttggtcacatagaactacttgaaactattgtccaaatagcctgctaaagcagatgtgctgcttaattttttttaaacccagtgcatgattgaaacattttctgtgtcacctagttatctgtggtcagaagtgtttgttgttaataatactttattttgaattcataaatgatttgtggagattcatggagtgggttcttttcaggcttctagtaattcattgtatcgtttgcctaaattgtattrccatgctggctgtataactgagccat

SEQ ID NO: 430997 - DNA, 561 bp, Homo sapiens
tgtcctgtctcactttatcctccctatcctctagggtggtagctgccaggattcccattttgcagacgtgagaatgactccacacagctgggaagtgagtagaccaccacacatcatgtgttcactgcatcctgggcctgtgctttacatggttaattcagttatctgcccaatgttgtcttagtctgttcaggctgctataacaaaatgccactgactgtgtggcttaaacaacagaaactcactttctctccattctggaggctggaggtctgagatcatgctgccagcatggctgggttctggtaagccctcctttccyggcttgccaatgcctgtcttcttgctgtatcttcacctggtggagagagagggatagtgagctctctggtttctcttcttataaggacacaaattcgatcatatctgggccccatccttaggaccccatctaacccttattacctccttgtaggctctttctccaaatagggtcacactgggagttaaggcttcaacataggaattttagggggacccaattcagttcatagaaactcc

SEQ ID NO: 430998 - DNA, 630 bp, Homo sapiens
gaaaaattcattgcattgacacttttatcaataaaaatgaaagaatgaaaattaattaataattcccagccaggcacggtggctcacacctgtaatcccagcactttgggaggctaaggcaggcagatcgcttgaggccaggagtttgagaccaacctgggcaatatggtaccctgtctctaccaaaaaatataaaaattagccaggcatggtggtgcacctgtagtcccagctactcaggaggctgaggtaggaagattgagcccataaggctgaggctgaagtgagctgacatcatgccactgcactccaccctgggtaacagagtgagactgtctcaaaaaataaataatamcaataataattcccagctcataaaaactaggaaaagaacaagaaagcaaaacaaaagaaaacacaaagaaaaaataaaggaaaaagctaaaattaatgagaaaaaagaatatataagataaaattaatgaggtagagaatagaaaaacagtagatctaatgtacaaatataaatcctggtttttggagggaaaaaagtagataaaccactagttaagttactcaagaaaaaggaggagtgaatacaaaaatagaaaataagaaaggacacagggg

SEQ ID NO: 430999 - DNA, 561 bp, Homo sapiens
aacctctgaacctgttttgacactgcaaactcagtggatgacatgccagcccagtgagtctcatttaaatgtaaatgtgtcataaacttttgtaccatgctctttaaaaaatgccagctacttgaagggataatgcatgtgaaactgatttacatattaaagtagtgaaaaaggaccttgtaataatcaagcttgaattcttttattttaaagttggaagctgaaggtgttcctgaagtatctgaaaaatatgaaattagctctgttcccacttttctgtttttcaaggtaaggataaaggtggtacaagagattatccatttgtagggtgccatggggctacctattttgtttctttaccctctctctaatccccraatattaggtgtttggctgtttctggccctccacctttcttctgatagtctcatttttgcaccgatgctgagaaagaagaccatgccagctgcttgccagcatcttagaaaagtagcatggactgtgtagggccagcagccagaatcagagcttcttgatcaaaattcagatatgtggctgtgg

SEQ ID NO: 431000 - DNA, 544 bp, Homo sapiens
atataaaatgtataagagccccaagaccatagagaagggttttctaatgcccacagttaaaagtccttaatgccaatgtgttgcttcaaaatggcctttcttgtttaccacctataaggttgggtggaagagaacatccttcagaaaatttctgtgtgcagtttctctctgaggttgtcaaaccctcccaactctaccccatccccscaaaaccccaggtgattttagggtttaccctatcttgctcctgtgatgccataggcccttctgccacgaggcaaaacctcccctcccatagaaagagacacactggcgaggggagtcaggaaatttgagttctaacacctgctaattacctacacctttatgcccaaggtgtctataaaatgaggaaattggaacagatgatttctcaggtcctttctagctcggtgattcagactctactctctcctatctgaaattctgcaatgagaatgttccgtctttgccttaacataaatgtccacgaagggatagcatattaatgcatatttaggagttt

SEQ ID NO: 431001 - DNA, 578 bp, Homo sapiens
agttaaaagacttaaagctcccaaagaatgtgtccatgtttatatattttaaaatatataaaagaaaagccaaatcacttaccacttaatttctaagttagtgtttctgagggatggaaaaaaaataactaaaagttttggaccagagaatttttttttaattttttatttattttattttatttttttaaattcagatttggggtcagcagtggcactgaggttttggttggattccatctcatcctttttttctctgagttttgttttcttttttcctctctgctataactctctggtgaaatggcaaggaactaacagtgrtaagaaaaagtgagaaacagatccgtgtagcagtaatgacggaaactaaaaagcgactgcacccctgagacatacgccaattacaacacagagaaatacgatgccatgacatctgttgggcctgttgtttaccaagtcgaggtggcaaatatttgttgggcatctcctatgcgtaatgcatcctagacgcctattcacggacctcaagacatttctagtagagataacttattctgaacagcaattctcaaaaa

SEQ ID NO: 431002 - DNA, 605 bp, Homo sapiens
cctccagctttggtgtccaatcagctagggtcacaggacaggaccaaagtcttagacttgcccctcaagagaagctggagggatagtgtttgtgtgtgtgtgtgtgtgtgtgtgtgtgtgtgtgtgtgtgtgtggtgatggggcttkaggggttgttggaggataatttcacatcaggaggtttagctgggaggctatgttagctgtgtctaactcaattagatcatattgttcccaattactggtttctctggtctaattattaatagtagtactgccttctaatttcacagttttgactgggattatctgtgggtatcaggtacatggtaggaagaaattctaaaaaattctagaaccttctttgtatgcttgggggaaagtaagttggataggttttagaaagaagaaagaaagaaaaacaaactagccctaagttatagtcagaaggtttattatgttttgtttcagactaaataaagacttgttcttaaaaaaaagagcatgaaacaattcagatttttttgaagctgaccatttccttttgttaatttactttagttaaatgcaaatgaacataaaagtaaatttcttgttggcccaat

SEQ ID NO: 431003 - DNA, 556 bp, Homo sapiens
ccccttttgcttgctattctgtcctatttttccttagaattcgggggctaaataccaggaagctgttggccagtgtaaagtgactagtgcggccgttgggtgtcaggcttcctgggaaagggctctctaacaayccccgactttacagagttaggagtgttggtttgcctggaaccagcttccagttttcctgtacttctgggctgaaccaagcattgacagagaggaaagccattcagctctggggtcccgacaacaagttggttgatcctgcagccatgaatggaactctcaaaaacaggttgcccaagcgagacttgcccatctatcctatctatcctgacccttgcctcctgggttctaatgcctgtcagacaaacttcctctcgcctctcttctccgaggctagtcctgcttctaaaaaccactccctgtctctggtgcttttctagtttctcctgtaagaatgatttctagtataaacttcaggactctgttaccttctttaggcacctgggctcaccaatcagaaagacataatttttgcccaaagccc

SEQ ID NO: 431004 - DNA, 605 bp, Homo sapiens
cctccagctttggtgtccaatcagctagggtcacaggacaggaccaaagtcttagacttgcccctcaagagaagctggagggatagtgtttgtgtgtgtgtgtgtgtgtgtgtgtgtgtgtgtgtgtgtgtgtggtgatggggctttaggggttgttggaggataatttcacatcaggaggtttagctgggaggctatgttagctgtgtctaactcaattagatcatattgttcccaattactggtttctctggtctaattattaatagtagtactgccttctaatttcacagttttgactgggattatctgtgggtatcaggtacatggtaggaagaaattctaaaaaattctagaaccttctttgtatgcttgggggaaagtaagttggatagkttttagaaagaagaaagaaagaaaaacaaactagccctaagttatagtcagaaggtttattatgttttgtttcagactaaataaagacttgttcttaaaaaaaagagcatgaaacaattcagatttttttgaagctgaccatttccttttgttaatttactttagttaaatgcaaatgaacataaaagtaaatttcttgttggcccaat

SEQ ID NO: 431005 - DNA, 371 bp, Homo sapiens
ttgacatactgttcttctctcatggtggtgggtgayaattttgggaggctaatgagaacattagcttgatgtagttagcagagctaaagtccaagctagtatcctcactgagagggatgaaacacaaatggataattgtgatggtaaatttttcaaagggactgtaatgagcaggggacagttttggtcatgtgttctcagctttgtttgggaacagccatctcatctgttttataacaataaaaccattggcttgggcatcacctattgtggtaaattcctgaaaatgtgcaaaggcctgcattccatatgtttcaaaataaaaggcatgggcacgtaaatgatggtgatttttttccttcttcaggaaa

SEQ ID NO: 431006 - DNA, 600 bp, Homo sapiens
atgaatcaagtaatcatgttttgggaaggtgaagggtgtatgataaacagatatgtgctgcatctctgaattcagataaaacagatatgattttctatcaccattgtcatctgatggccattattacaatggatcaagtacctaattacacatgacatttttaggccctattaaaaatgatttatcaaaaagcgtctgtgttctgagatctaaagcataatctcatgaccttaagttcatttaggacttgataatttggaatcaaatacaatccactttatcaagtgttttctgagcatatacatgacactgctagggttgtgggaagcctgcaaagataagttagacaccgctgtcctctaggaggaaggaagcagcacatgttcactaaatgcctatttgtcctgtgccaggcctgtgctcagctccatgctgggtcttcattttatgtgttgtcttataatctagttgggaaagcaggtgcatatcccaatgactctaataccagctaagctctgataagtaaaatactagatctggggaaactcctcrcaccaggtgaaatctaagctgaactttgacagatgggcagaataatca

SEQ ID NO: 431007 - DNA, 621 bp, Homo sapiens
cttgaatgttcaatataccatcatggatataaatacagcataatggacagtataatttagccaaaacaattgagaatatttcagcaygaagcagaaatactgaccttaaccatacctgaatcatatgtgcaatttaaatcaataataaatatccagtatgactataaataaaatgttaataataaatgatttcctattaaataccagtcagcttttatatatctatttctcacataaataggttggttttggcaattcttctaaaagacattgattccaggtttttacaattaaaaataatagtgaaataaacattctttacacatctccttgcatacacacatcaagaattcttctagaagatcacatccagagactaggttagtgtgtaagcaaatattttttgagtaccttctctggtccagggcttagggaaaaggaaagtgtcttgctttcatggagcttataatctactaaaggatctaagaatgacaaaagaaaatgaagatattattttattctttcctttgccacctcttatatttttgcaaattgatgctataaaaccgtatttttaataggcccacccaagtgcactgaaaactattaaggcaaactact

SEQ ID NO: 431008 - DNA, 638 bp, Homo sapiens
gcttctggcaccttcagaatcttcttcattggcttcttctccttctctgatgcatggatttttcccaagtcctctatgtcctcagcgtcctcaagttctttcagtgacaccattctttgaaggaactcatctgatcccatcccaggatgttcytccctcacttcaatttggatgatatcctgtgccaatcttctcttcctacatgtgctgtaccagctcatgagtagctgtgcctttgggggaagagtgggcactgtagactcagcaaagggtatgcctaagaaatgatctaagtgggaaagcagaatttagggcaaaatggggcagacaaaacctcactgaggacacctgaatcgtaaaataccaggtagggccagtggttgcatagatatgagtcttttaatctgatttcaaatactcagtctagtactgtgttctaccatccctataaccatgtgtacttgccagcaacatagcctggctttggcttcagatgatctttgagctttggtacaggaagttagtgatgcctggcttccttaaaagagaataaaatcatgtcctttgcagcaacatgaatgtagctggaggccataatcctaagcaaattaacacaggaacagaaaaccaaataccac

SEQ ID NO: 431009 - DNA, 638 bp, Homo sapiens
gcttctggcaccttcagaatcttcttcattggcttcttctccttctctgatgcatggatttttcccaagtcctctatgtcctcagcgtcctcaagttctttcagtgacaccattctttgaaggaactcatctgatcccatcccaggatgttcttccctcacttcaatttggatgatatcctgtgccaatcttctcttcctacatgtgctgtaccagctcatgagtagctgtgcctttgggggaagagtgggcactgtagactcagcaaagggtatgcctaagaaatgatctaagtgggaaagcagaatttagggcaaaatggggcagacaaaacctcactgaggacacctgaatcgtaaaataccaggtagggccagtggttgcatagatatgagtcttttaatctgatttcaaatactcagtctartactgtgttctaccatccctataaccatgtgtacttgccagcaacatagcctggctttggcttcagatgatctttgagctttggtacaggaagttagtgatgcctggcttccttaaaagagaataaaatcatgtcctttgcagcaacatgaatgtagctggaggccataatcctaagcaaattaacacaggaacagaaaaccaaataccac

SEQ ID NO: 431010 - DNA, 446 bp, Homo sapiens
cacagtcattgaatggaacataaatgcataaatgtgacctttgcattcacacttcttgttttcattttctgtttttagttagctctttattccatcrtcttctgaatagggtttaaaatagacacaatttatgaacatgccatatgaatagttgacaataagaaacttgagtgaggaaacaatgaagataatttagataagcatttttaaaaaccagccatttaaaaaaaattcaggtgccaaggtagtattttatttaataacaccaggcacattctgtagcatgcagggcagaaaaatttaaaacaataacatcataaatactaaaatgcatcatgaaatcctgtcaggaaatattgatgtaaaccccgtgaaagcattgagcgtgcagagtaataactgtgtgatcctcctaagctccattagaaatcaatctttgcttataa

SEQ ID NO: 431011 - DNA, 514 bp, Homo sapiens
ttttggaatttaatcaataaagtaaaatattaccagccattttttcaaaagataattcctgtcttccctgaaaattcaattttcttaaaaaataggcatcttgcaaagctttgggagcttactgggatttgtctgagaacattttgcagctttgtagacaagacaagtatctgagtctggactccattccatgtgctcctttggtgatctattcagcttagctctcaccaacccagggtggcaacttacaataaaaagcaagaagttgaacagaaagaatataaggaattaatttcagcattaaaaagtacataaataatataagtgctttattatttatagtttattcacatataatatttcatttgaacagtttatatgtgcagttatatgtccagcaccaagtgctggacttaatcatgcttartgcactgcactaagtgctggagatacaaaggcaagaagacaaatacatgctgtctacatggggcttgtaatcaagtgtgaaagattg

SEQ ID NO: 431012 - DNA, 514 bp, Homo sapiens
ttttggaatttaatcaataaagtaaaatattaccagccattttttcaaaagataattcctgtcttccctgaaaattcaattttcttaaaaaataggcatcttgcaaagctttgggagcttactgggatttgtctgagaacattttgcagctttgtagacaagacaagtatctgagtctggactccattccatgtgctcctttggtgatctattcagcttagctctcaccaacccagggtggcaacttacaataaaaagcaagaagttgaacagaaagaatataaggaattaatttcagcattaaaaagtacataaataatataagtgctttattatttatagtttattcacatataatatttcatttgaacagtttatatgtgcagttatatgtccagcaccaagtgctggacttaatcatgcttagtgcactgcactaartgctggagatacaaaggcaagaagacaaatacatgctgtctacatggggcttgtaatcaagtgtgaaagattg

SEQ ID NO: 431013 - DNA, 600 bp, Homo sapiens
tgtacatatatcttattggtctgtccttccaaagaaccttaatacacccagaaatggatttgtcatttctgcttgcaggacttcagccaacacctatccaaggttttatgcagtatttgatcacttagaccaggggtccctctctagagcaaagaaaatgtaagagtgggcctatgaccacaggatcctctggtaatatcccatgccataacacccataagttgctacttctgaaggggcattgaaacacttgctgaaggcacagttgaagtgtcgtatcagagggacagcatcgaatttgcagtataggcacagaatcagatcttgatatagtactgggtttcaagaytaggaccaagaaatgtaagcagtagtggttgcacttaactatcactcccattgattcattggaggtctttatgctactcattcctacacctctgggctttgcagggataaaagtcttggtttctaacaacggaacacttttgccagggaacccagcaagagtctcattgaattctatgctttggctcttgccagggcactttgggtttcatgtgtccagggactagcaggcaagatgagaagtcactctct

SEQ ID NO: 431014 - DNA, 600 bp, Homo sapiens
tgtacatatatcttattggtctgtccttccaaagaaccttaatacacccagaaatggatttgtcatttctgcttgcaggacttcagccaacacctatccaaggttttatgcagtatttgatcacttagaccaggggtccctctctagagcaaagaaaatgtaagagtgggcctatgaccacaggatcctctggtaatatcccatgccataacacccataagttgctacttctgaaggggcattgaaacacttgctgaaggcacagttgaagtgtcgtatcagagggacagcatcgaatttgcagtataggcacagaatcagatcttgatatagtactgggtttcaagattaggaccaagaaatgtaagcagtagtggttgcacttaactatcactcccattgattcattggaggtctttatgctwctcattcctacacctctgggctttgcagggataaaagtcttggtttctaacaacggaacacttttgccagggaacccagcaagagtctcattgaattctatgctttggctcttgccagggcactttgggtttcatgtgtccagggactagcaggcaagatgagaagtcactctct

SEQ ID NO: 431015 - DNA, 548 bp, Homo sapiens
catttgtcaatttgggcttttgttgccattgcttttggtgttttagacatgaagtccttgccatgcctatgtgctgaatgatatkgcctaggttttctcctagggtttttatagttctaggtctaacatttaagtctttaatccatcttgaattaatttttgtataaggtataagctgacagctctttcaaggtctgcctctactccagacagccacctcccctcaggtcaggtatttctagggcatcttacaagaagttactagcagggcagggatacaaaggcatgttgaatttggatgcatgttgcaggacaactttgatgagcaattgttgcttcagagctccctgctaggctagtcaaggctttgtcaggcttgcaatttggctctccttctgccaatctccctcttctccttcctttcacaggtggtgtgatatatatctcatccctgatatacatcttttgcctaatcctgtttatgcatctgctttcagagaacccaacctgtgatgacaaagttcatgctcgaagttaatatagaggtc

SEQ ID NO: 431016 - DNA, 548 bp, Homo sapiens
catttgtcaatttgggcttttgttgccattgcttttggtgttttagacatgaagtccttgccatgcctatgtgctgaatgatatggcctaggttttctcctagggtttttatagttctaggtctaacatttaagtctttaatccatcttgaattaatttttgtataaggtataagctgacagctctttcaaggtctgcctctactccagacagccacctcccctcaggtcaggtatttctagggcatcttacaagaagttactagcagggcagggatacaaaggcatgttgaatttggatgcatgttgcaggacaactttgatgagcaattgttgmttcagagctccctgctaggctagtcaaggctttgtcaggcttgcaatttggctctccttctgccaatctccctcttctccttcctttcacaggtggtgtgatatatatctcatccctgatatacatcttttgcctaatcctgtttatgcatctgctttcagagaacccaacctgtgatgacaaagttcatgctcgaagttaatatagaggtc

SEQ ID NO: 431017 - DNA, 548 bp, Homo sapiens
catttgtcaatttgggcttttgttgccattgcttttggtgttttagacatgaagtccttgccatgcctatgtgctgaatgatatggcctaggttttctcctagggtttttatagttctaggtctaacatttaagtctttaatccatcttgaattaatttttgtataaggtataagctgacagctctttcaaggtctgcctctactccagacagccacctcccctcaggtcaggtatttctagggcatcttacaagaagttactagcagggcagggatacaaaggcatgttgaatttggatgcatgttgcaggacaactttgatgagcaattgttgcttcagagctccctgctaggctagtcaaggctttgtcaggcttgcaatttggctctccttctgccaatctccctcttctccttcctttcacaggtggtgtgatatatakctcatccctgatatacatcttttgcctaatcctgtttatgcatctgctttcagagaacccaacctgtgatgacaaagttcatgctcgaagttaatatagaggtc

SEQ ID NO: 431018 - DNA, 577 bp, Homo sapiens
ggtggtgtgatatatatctcatccctgatatacatcttttgcctaatcctgtttatgcatctgctttcagagaacccaacctgtgatgacaaagttcatgctcgaagttaatatagaggtcttcctgtcccaggcactttgagagccgcaggttaccctgcagacatgaccaggtccaagaagactgcacacaaccagtcctgaaaaatggcacagaaatggtgtcaagaaaccacaattacgaagatatgaatctcttaatggggcgtaacatgcactttgtcaggaagcacaacaagaagagcctggagaagatgkaggccaacaatgcaaggccatcactgcacatgccaaggctgtcaaggccctcataaagctcaaggaggttaagcccaagatgtcaaagggcatcagtccgaagcttgatggacttgcctacactgcccatcccaagcttgggagtatatttgtgtctacattgctaagtggatctactggccagaggccaaggccaaggatcaaaccaaggcccaggctgtgcctttagcttcagctgcagctgcagttccagctcagg

SEQ ID NO: 431019 - DNA, 659 bp, Homo sapiens
catctgttataatgggagcatatgaagctgtggtgaatagggaaatatattaacaaaggctgaaatattaatcaaacagtataagttatatctcagtaagatttttaagctatgaaactgtataaggaacttatttattgcaagaaatatctcagaattatattgggaaaggttctaatggaacaaaagtccaccaaaaagatctcactattaaaattatgggctgtaagtaattctgaattaattcctttgttggggtggtagggtgggagtmgcacaggataattttcttttttaaattggtagaataaaataataataagagaaaggagggcagaaggagacatttctggcaacaaatgtggccttagcactttgaaggaaatgcatttttttgagcacttgtttagtatcttggcctgggataggtgaacttttcttttaaaatctgttttgcattcatgttattaaaaaaaattaagtgctgattcatctagaagatatttttaaccatattggcacgcactttctcaccttgacatatatagcatattttctggaaatgtgagcaaagcacattttctgctgcatacaataatacaatgcagtgcaatgtaattcatgtccctgagatagtgtgaggtaccaaaggcaaacaa

SEQ ID NO: 431020 - DNA, 598 bp, Homo sapiens
ctcttttctctataaactacccagtctttgatatttcttaatagcagtatgagaatggaataatacaagtaatgaggcttataatccttccagcaacacagttctttgacatggggagtctagacttacagaaagcttgtagttgtgtggtattgtagaaaacttactgggctggagtgagcacatttggattmtagcaccttctctgcaatttattgtgagatcttgggtataatttgattacataagatctaaggatttaaaaaattttgtttagtttatatgacatttgagaccactctccaacagaattttctctactatgttcttcttcattccttaccccatacccctcactttttgtcatgccatctgaatctcactacttagagccttaatgagaagtttttgagggcttaatagccttttggctggggacctaggatgtccaattctgctgtctgaatacctctttttcctatgaatttctcaaaggaaaattataaaaggaagctactttaaaaaattatcaaagatgcttatttcccaaacccttatgtagtgtttttaggtttcctggacaggttgcatcacttaa

SEQ ID NO: 431021 - DNA, 494 bp, Homo sapiens
gcaaacatatgtcaaatcttaacaaattatacactttacatatgtgcaatttattttatgccaattataccttaataaagctamtaagaataattccaaaagccacaagtctatccctaagatagcatgcagcctgaaaattgtgcactagctgtgtccatctgtaattaggaattttcacttttcctgaacctttctcatctccttcttagtcattatcacactttctgtaatggccattaattgttccataaatgacttgcattcctatctctagatccagctcaaaatctctctgtctggaaattcatctccaccctggtttctgattctcaccattagtaagttttttaaacctaagtccatcctcctctaagaagcttagtcatcctactcccataattaatctctttcttctttgtgctcacatgccatctattatcgtagttagggtagtctgcctagtattagtgccatttatgtgcatatgtaaa

SEQ ID NO: 431022 - DNA, 494 bp, Homo sapiens
gcaaacatatgtcaaatcttaacaaattatacactttacatatgtgcaatttattttatgccaattataccttaataaagctactaagaataattccaaaagccacaagtctatccctaagatagcatgcagcctgaaaattgtgcactagctgtgtccatctgtaattaggaattttcacttttcctgaacctttctcatctccttcttagtcrttatcacactttctgtaatggccattaattgttccataaatgacttgcattcctatctctagatccagctcaaaatctctctgtctggaaattcatctccaccctggtttctgattctcaccattagtaagttttttaaacctaagtccatcctcctctaagaagcttagtcatcctactcccataattaatctctttcttctttgtgctcacatgccatctattatcgtagttagggtagtctgcctagtattagtgccatttatgtgcatatgtaaa

SEQ ID NO: 431023 - DNA, 620 bp, Homo sapiens
ctaataaccatgacaaaacattacagaaggtgttaaccagaataaccagtttagagaggaacataaatgacctggtggagctgaaaaacacaacatgagaacttcaaaatgccatcacaagtatcaatatactaagtggagaaaagaatttcagagcttgaagactatcttgctgaaataagacaggcagacaagattagagaaaaaagaatgaaaaagaaagaaaaaaactccaaaagctatgggatcatgtaaaaagaccaaacctatgactgattgaggtacctgaaagagatggggagaatgaaaccaggttggaaaacatacttcaggatatcttccaggaggactttcccaacctagcaagacaggccaacattcaaattcaggaaatccagagaaactcagtaagatactccatgagaagatcaacccaagacacwtaatcatcagattctccaaggtaaaaatggaataaaaaatgttaagtgcagccagagagaaaggccaggtcatctattaggttggtgcaaaagaaactgcattttttcccatttaaaagtagtgacattttaaaatttgccattttaaagtaatgacattacttttaaatagcaaaa

SEQ ID NO: 431024 - DNA, 540 bp, Homo sapiens
ttaaggatgggggtgcatagggtatggtgagtttctagaagaaatattcagtagttggagcaaaccttatcttagtctgactctcctgcaagctgataaaattgtataggcagagcagctttagagaattggagcaaatgattgaggaccaagaagctcttaggaacttgagaatcccttctctgtcagcaccaccgttctttataaagctccttatgggtatgaagccaggtgatgctatcagygtgccaagacagaggcaaacacgtactcattttttttccaacatgtatctcatcacattcaacttatttataattgtggacagcagcctatgtagggatgatagtcagggcctccttctacatgaactcccactaaatccccaatattcccttatttataggcaaccacataaattattggcaaacgggagcaattaagagtgaaagaagatgcgacaattatgctgggaaaacaggtgtcaaccaggaggtatacagtcatcctgttaataactcctgggcctttaagtataat

SEQ ID NO: 431025 - DNA, 634 bp, Homo sapiens
tctcatttgaattagttagttttgatcttcagcccctcacccctgggctgggtgaaagtgagggcaaggttgtcatgagaacctgtggaataagcastccaggtactgggttcaggagattccttccctccacagacaaggctgtacacagacagggcttactttgggcatattatgcccaaaaccttcttgctcaattttaaggtcaaagagaagtccccggacttgcttggaattcacctaaagcaagagaataaaaactttagccttaaattataaagcccctagagagagaatgaaatttaagtattctggtttccataggaaacatcatccctatggtgaggcggataatttggactgcattagtctgctgccttaagttcagataacacactttatttggtctccaggttcagaagcaactttctgatgaggatttggtctctgtagatctgccctgagggcagactctgtgacagcatatttctcattgtaatttaacaaattggctttctggttctatgctttgatctcagagaacttggttaatgtgtggcagcccctgagggacagtattacattaggaatgctgacagattccccttacaaacctattaacctaaagctccat

SEQ ID NO: 431026 - DNA, 515 bp, Homo sapiens
gcattgtgtctttaaattttgtttttctatatgcttctgctgtatgacttcttttycccagttatgtggataagctttagacagtctgagagtctctttattttggctgctaagttttgagtgtatgtatgtatgttttctctgaagaatgctggtagttttatcccccttatccacaggggatatgtttctagacccccagtggatgcctaaaaccacagatagtactgaaccctatatataccatattttttcctagacatacatacttatgataaagtttaatttacacattaagcatagtaagagattagcaactaataaaataagacaattataacaatatgccagcatcattacccttgtgctttggagccattattaagtaaaataagagtgacttgaacacaagcactgtgatatcacaatagtcgatctgataactgagatggctgtaaagtgactaatgggtgggtagcatgtgcagagtggacatgctagacaaaaagataatt

SEQ ID NO: 431027 - DNA, 386 bp, Homo sapiens
aatcaaataaaagtaaaatttggaataccagatttgtgagggagattaaagaagttggaatcttattctggaagaaagaaagcattgttgaaggtctcttatccttcaagtatttaaggggggaaggaggtaaaacatktttgagcatacgctattgttagcaccttattttactaggtgctttttaagtgtttgttttacttagtgaataaagtgttccacataagaaagaatgagtcaacttttattgccattgaatgggactccctttagatataatgttagcttaagaaagactggaaacttttggggggatggtgggcagatgggagggaatcaagttaggtaaggatagctcctacctaaatgcaaaaatgcattcacag

SEQ ID NO: 431028 - DNA, 584 bp, Homo sapiens
aatttataatttttgctattaaatagtcttatgaatatattccttggattcactgccccctctaccttcatcacttcaattggttcatacaagttgcattgagaagggcttccatatagtgagctttctgakacacaaagaacttgaaatgtctttgagatactgtctagtctagacttgttctattgtacaatatatctggcttgctagctgccctcacctccccaatggcataccctctgtacaggctctagctgcacaaccttgaaagataagatatggccgtttcccggtgaggctttaagctattatgatgattaatgatactgatgctcaattctgccattatgaatagtattaacactaatgctatcagtgctgatatttaaataacattaatatttttgatattaacatttactattactatcaatgttaatccctagagtttctgttgccatgaattttgaagtctctgatagagtctttcttacccttgggggcccatggttttcttaggatgttgtttcttatggtttctactgctttctaaagctgtgaaaaaggagagtaaaacaagtgtg

SEQ ID NO: 431029 - DNA, 542 bp, Homo sapiens
catgtctaataatctattggaaaagaaaattagaaaaatgaaayacaaactcccaaagaagataaaacaaggtggaggcatgggggacagatgggacaaacagaaaaagtgagtggcagatttaagcctagataatttagcaatgttataatatgtcagttgaagacaaagattgtgagactgtcaagaattcaaaactcaattctatgctacttataagagacatactttaaatgtaagtcaaatgtagtaggatggaaatagctgtacaatgcaaacactaaccaaaagaaagctgatatacttgcattatatccaacagaaagcacaaatcccaaagcattgctacagttaaaaaaataagcatttcgtaatgataacaagctttaatttataaggaagatgtaattaataattctaaatttggaagaagttcatgtgattctgagactaagaaggaggttaagaatagtgaagatttagggcaattttgcacaatctttttgaatcacagacttttggagaatctaatcaatattatt

SEQ ID NO: 431030 - DNA, 531 bp, Homo sapiens
atctagaatttgagagtagtggagaatggggtcttcaaaaagtcaagagagaaatttgaagatgttacagactatgttggtgaactgattaattgtgtaatctaggataactagggaagaaactaaagatggaaggcatattttgtggtgattgagaatatgagctttacacttaggcagacctaagacacagggagtgcattgctgatcaacttaaattacctcctgaagccaaagttttcccattttcccaatggggaaaatacttacctgtgaatactgaatgaaaaactgtatcttttcttagtaaaagtcattattaataacatagacaagttgaaaaattgaagattaggttggattaaacactaatttttatatgagagagtatatgggagaactggacaggaagaatttaaagtcatatggatgatttcrgaaatggtaccattttgaatttttaaaattcagaatatggccatacgagtaaaatcccaaactggaaataaaagacattagaataatcaaaaa

SEQ ID NO: 431031 - DNA, 570 bp, Homo sapiens
gtggttagcactcaaatgttacttatctatgtcacatatatataatatctgtatatacagacataaatgttgtatatatgcaaagatatatgcattgataaagatttttgtcattaaaagaaaaagttgggctctcagggaagcaattcctgtgtcatttcatatacattctgcagtctatatagtccaaattaagaaaaattcatgaataagattgtatccactttcatcttggtacattacaggacgtatgtctcagccaccattatgtaggaaaaacaaagaagaactctatcaagtattagaagtgtatgatatccaaaatcatattttgccactaactgtggacaagtcacttaataattctgtgtctcagttttcacaactagagatagatgttctgggtttacttttaaaatctgtaaggtgaagtttggggtagatttcctaccccagagatacagaaatgttgtaatatttagctagctagatctatctatctrtctgtctgtctatctatctatctatctatctatctatctatctatctatctatcttacatttaacag

SEQ ID NO: 431032 - DNA, 575 bp, Homo sapiens
tggcaaatatcattctatttctgtttctaagggtttgactattttagaaacctcatataagtggaattattccatattagtatttttgtgactgtattatttcacttagcataatgtcctcgaggttcatccatgtggtagcatatgacaggatttccttcctttttaaggctgaataatattccaggtgtgtgtgtgtgtgtttgtgtgtgtgtgtgtgtgtgtgtgtgtgtgtrtatcacattttctttatccattcatttgctgatgaacatttcggttgcttctacctcttggctattgtgaataatgctgcaataaacatgggtatgcaagcatctctttgtgttttcaattattttggacatataaccagaatggggatcattgaatcaaatggtcactttatttttaatttttgttggatctctatactgttttccaaagtggctgcaccactttacaatcccacaaaatgtgcacaagggttgtaatttttcaacattttcaccaacacttgttattttgttttgttttgtttagttgacaatggccaacctaacagatgtgaggaa

SEQ ID NO: 431033 - DNA, 575 bp, Homo sapiens
tggcaaatatcattctatttctgtttctaagggtttgactattttagaaacctcatataagtggaattattccatattagtatttttgtgactgtattatttcacttagcataatgtcctcgaggttcatccatgtggtagcatatgacaggatttccttcctttttaaggctgaataatattccaggtgtgtgtgtgtgtgtttgtgtgtgtgtgtgtgtgtgtgtgtgtgtgtatatcacattttctttatccattcatttgctgatgaacatttmggttgcttctacctcttggctattgtgaataatgctgcaataaacatgggtatgcaagcatctctttgtgttttcaattattttggacatataaccagaatggggatcattgaatcaaatggtcactttatttttaatttttgttggatctctatactgttttccaaagtggctgcaccactttacaatcccacaaaatgtgcacaagggttgtaatttttcaacattttcaccaacacttgttattttgttttgttttgtttagttgacaatggccaacctaacagatgtgaggaa

SEQ ID NO: 431034 - DNA, 575 bp, Homo sapiens
tggcaaatatcattctatttctgtttctaagggtttgactattttagaaacctcatataagtggaattattccatattagtatttttgtgactgtattatttcacttagcataatgtcctcgaggttcatccatgtggtagcatatgacaggatttccttcctttttaaggctgaataatattccaggtgtgtgtgtgtgtgtttgtgtgtgtgtgtgtgtgtgtgtgtgtgtgtatatcacattttctttatccattcatttgctgatgaacatttcggttgcttctacctcttggctaytgtgaataatgctgcaataaacatgggtatgcaagcatctctttgtgttttcaattattttggacatataaccagaatggggatcattgaatcaaatggtcactttatttttaatttttgttggatctctatactgttttccaaagtggctgcaccactttacaatcccacaaaatgtgcacaagggttgtaatttttcaacattttcaccaacacttgttattttgttttgttttgtttagttgacaatggccaacctaacagatgtgaggaa

SEQ ID NO: 431035 - DNA, 593 bp, Homo sapiens
agataatggccctaagcagacgaggcctgagagcctccacgaaccgtacagatggtttcttatgttctctagccttccacaggatttgtctcaccctgagcaactttgtgtcatgttaatcaaatagaaggaactacgaatgaagaaagaaagaagcagcagcaacttaccatcactgtcaccatcacatgtcactaaagttagtggcaggcaaagcatgaggctaatactaatgcaagttcttttccacatagatggtgaatatctccagctgcccccagctatacttgcatctggttatattgggagctgtctaaaagaggtacacaaaatgcagcttttaaaaaaggcagctgtggaggagaagcccatcagaaaagcattagagcacaaataaaggctgagattaatgcatttactaaataatttagttgaagaatagaagaggaagagttatagggaaaagaaaacaatatttaagcacacaggcaaaaaaaaaatctctgtgragggaacaaagtagattatattttaaatattaagaatattccctttagctgcccttatgttataggcaaattgtttatatgcta

SEQ ID NO: 431036 - DNA, 558 bp, Homo sapiens
gaggactcacactacctaatttcaagtttgattataaagctgtgataaaaacagtatagtactgaaattttatagatcaatgaaatatagttcagaaatagacctacacawatatgataaattgattatcaacaaaggtgcaaaggcaagtcaatgaagaaaggatagtctttatcaactagatatttacatgtaaacaacaatggacctcattccataccttctaccatacacaagtatcagttcaaaagggatcatagctctaaactgaaaatcaaaaaccataaactggctagaaaagaatatagggaaaaatatttgagaccttcagttaggcaaagctttgttagatattacactaaaagcacaagccataaaggaaaaagcggtaagttggactttatcaaaatgcaaaacttctgttcttcaaaagacacaattaagaaaacaaaaagataagccataggctgatagaaaatatttgcaattcatatatttgataatggacttgtacccacaatatataaataactctaaactcaataataagaaaacaac

SEQ ID NO: 431037 - DNA, 550 bp, Homo sapiens
ataacagtaggcagatctgaaatatgtatctgaagatatttacatttttagtagaaaattraagtgaatgactgcctacatatgtagtgtggcagagctggatatgatttttgaaacataccatacaaataccataagcatagactgttggcaagagttgcatgagtgcatatcaagaagctggcaaaaatgtgtctgacaaattatttcatgtactagcttgatcaaaaggtatttgaaatgaacttaggtgtggagctgagaaataaacagataaaaatgcaaatatggacaatagaaatagctataaaaggaagtcatttgatgaaggagagatccaggaatttctcataaacattaagatgatgaaatatggggaacaaatgttatcacaggtctacagacaaatacactcaagtcagataacaaagtaaacaatatagaaaaggaaatgaatctcattagatgccattgcaaaggtacaatttagacttgattgaaatagactcatgactaaaatccatcactaagaaaatatgcaatgtttaaa

SEQ ID NO: 431038 - DNA, 550 bp, Homo sapiens
ataacagtaggcagatctgaaatatgtatctgaagatatttacatttttagtagaaaattaaagtgaatgactgcctacatatgtagtgtggcagagctggatatgatttttgaaacataccatacaaataccataagcatagactgttggcaagagttgcatgagtgcatatcaagaagctggcaaaaatgtgtctgacaaattatttcatgtactagcttgatcaaaaggtatttgaaatgaacttaggtgtggagctgagaaataaacagataaaaatgcaaatatggacaatagaaatagctataaaaggaagtcatttgatgaaggagagatccaggaatttctcataaamattaagatgatgaaatatggggaacaaatgttatcacaggtctacagacaaatacactcaagtcagataacaaagtaaacaatatagaaaaggaaatgaatctcattagatgccattgcaaaggtacaatttagacttgattgaaatagactcatgactaaaatccatcactaagaaaatatgcaatgtttaaa

SEQ ID NO: 431039 - DNA, 648 bp, Homo sapiens
tacatacatacatacatatctatatataggtatagacataggtatagattttattttaagaatgtccatcatgggcaaatgaacagagagagagtagaacagagtatataagagcacatatttttggaatcaaatgcagcaagctcaagctccatctctgccaagaacaagttgtgtgrctttggccaaattaccctcccgaagccttatttccatcaactgtagaatgtagataaagacattacctaacttataaggttgtgcttgttaagtagtgaacttacttcagtgcctgaaagagagtaagtacccttaattattagctcttgcaactattattcatagggacccttctgtgtatggatccactgtgaaaaaagtgaaaaaagaaaaaaagtctactgtgggtaggttcaatttctggaacacagtttagccagcgaatggcacctttgtgccaaggaatgagcatccctccctttgggcacaaaatcctataggaggtcccaatcattaggggtaattgcaaagcagacagactcagtagaactgaacgtaccatgaaaggaggagcagtgaaatgaaaacacagacactttgcaatctagaatgttctatcttaaaatgttgaaagagaaagcaattatt

SEQ ID NO: 431040 - DNA, 522 bp, Homo sapiens
ctcccacagatggcagactccaagaataggaggaattcgatgcagcattgctgacttgaagatggaagggaccacatgacctggaatatggacagtctttaagagctgagagtagacctcagtttacaaccagccagcaaacatagacctcagtactacaactgcagggaattgcactcagccaacagctgaatgaggctggaagcagattcttccctagagcctccagttaagaaaccaaccctgtgcacacctgaattttggtctcataatacttgagtagtagagaatttagccatggtgggtcagacctctgacctatagaaactatgaaataataggtccgtgctgtttaaagctgtgatgtttgtggtagcttgccatcatgcattctcatctagaatctttattaaaggaaratctgtttccaagatcattcaggttgttggcagaactcatttacagctttgagcagtctatcagctggagaccacctgcagttccttttgggcagccttttaa

SEQ ID NO: 431041 - DNA, 600 bp, Homo sapiens
gtaaaaattatttcaatgagctttctcttaatatgtagcttaatgtttagccctggggtaatttgagttgcaaaagatagttggaatggtgagtggagagctgagttattttgaaacaggagaatatgagtcgtaagagctattgtaagaccccaccacagggaagcctcaagcaagaattgraacatacgtgggaaccaagaaatagagattagagggagagcttatcacatttgcaaatgcaaacattgtgacctacaaatgcatttagaagcaagggcttatcccttttccagactctaagcactgggaaacaggtgatagtgataccacagcactaagaatgtctcctcctacttggcctggtgttgctgggccaaagccaaagcctggatccctgctccctccaggtccatctacagtgccctctgccacctgtcacctgctacagcccatcaggtgttctccgtccagctgctttcaaggtccaaagtaattggcagctgagttcagtacctgagaaattgtattgccttttctctgtgtctgggacttattttattgcattaaaaaaatttaacagtcttaacttggctcaga

SEQ ID NO: 431042 - DNA, 517 bp, Homo sapiens
tctgctactatagacctaatggatgagggtcacatatgcatcatagtatgcctatgggcatactgaatttaaaaataaaaaaaaatctgatgttatctgatttatctatttttgtttttattgactgtgcttatgatgtcatattcagaaaattatttccaaggcaaatgtcaagaaggatctcccctatgttttcttctagtaattttaccatttcaagttttatgtttaaatctttaatccacgttgagttagtttttgtgcatggtgatagagatccaatttctttcctttttttgttgttggtgcttttgtttttttgtttgtttgttttttgcatgtgggtgtccaattttcccaataccatttgytgaagagaacatttttccccattgtgtgttcttgctacccttgcagaacattagttaagggtaaatgtgtgggtttatttctgggttctgaattctgttccattggttcacgtgactgttttctatgacagtgccatattgttttg

SEQ ID NO: 431043 - DNA, 517 bp, Homo sapiens
tctgctactatagacctaatggatgagggtcacatatgcatcatagtatgcctatgggcatactgaatttaaaaataaaaaaaaatctgatgttatctgatttatctatttttgtttttattgactgtgcttatgatgtcatattcagaaaattatttccaaggcaaatgtcaagaaggatctcccctatgttttcttctagtaattttaccatttcaagttttatgtttaaatctttaatccacgttgagttagtttttgtgcatggtgatagagatccaatttctttcctttttttgttgttggtgcttttgtttttttgtttgtttgttttttgcatgtgggtgtccaattttcccaataccatttgttgaagagaacatttttccccattgtgtgttcttgctacccttgcagaacattagttaakggtaaatgtgtgggtttatttctgggttctgaattctgttccattggttcacgtgactgttttctatgacagtgccatattgttttg

SEQ ID NO: 431044 - DNA, 517 bp, Homo sapiens
tctgctactatagacctaatggatgagggtcacatatgcatcatagtatgcctatgggcatactgaatttaaaaataaaaaaaaatctgatgttatctgatttatctatttttgtttttattgactgtgcttatgatgtcatattcagaaaattatttccaaggcaaatgtcaagaaggatctcccctatgttttcttctagtaattttaccatttcaagttttatgtttaaatctttaatccacgttgagttagtttttgtgcatggtgatagagatccaatttctttcctttttttgttgttggtgcttttgtttttttgtttgtttgttttttgcatgtgggtgtccaattttcccaataccatttgttgaagagaacatttttccccattgtgtgttcttgctacccttgcagaacattagttaagggtaaatgtgtgggtttatttctgggttctgaattctgttccattggttcacrtgactgttttctatgacagtgccatattgttttg

SEQ ID NO: 431045 - DNA, 421 bp, Homo sapiens
gctactgggatcttatcgtttaccttttctccatgggagaagttccttctagttcccagctgatatctagtgggggatgaaatgatggaggccaggtgttctcttctctatgtggttatcctgagtttctgtgctcaccaggatttctgttactcctaagatgtacttcagtgctctcccttagttattttccytaaaatatagttgttcattcattgctttggctctcatggtggggaggaagagcagtaggggcttccagtagaccatcttgctgatgtcacttctcagacatagtgaggttttaataaagctaaacagattaaaattaaagtttttttttgttctgagattttgtcctttgtttctctcttggacattaaatttactcctttttatttaaataatggtatcaagagat

SEQ ID NO: 431046 - DNA, 544 bp, Homo sapiens
tggtggggctggcactaagttctaattcaaagtttcacactcacttccctttctgttccccaagcaggcagtttctgtctcctacygtcctgcctggggttggggtaggggtggtttaggcaatgtgagattgtccttcctaccctctccagtgcatctgtagctcttcagaaggtgcttttttgtgtggatagttgttcaatttgatgttcctgcagagggacaattactgggagattctattcagtcaccttgctttgccccttgatatggttcggctctgtgtccccacccaaatctcgttttgaattatactcccataattcccacaagttgtgggagggagccggtggaagataactgaatcctgggggccatttctcctatattgttctcagggtagtgaataagtctcatgagatctgatggttttatgaggggaaactgctttcacttggctctcattctctctcttgccaccgccatgtaagaagtgtcttttaccttctgccatgattgtgaggcctccctagccacgtggaat

SEQ ID NO: 431047 - DNA, 412 bp, Homo sapiens
cataaaaccagtgcactttgggaattacttttctaggatttcctaccagttataaatgacattgacatttgtcatcttttttttctttttctaaaaagaatagctgaatttaattcacctattataaaatactcaaaagtaaattgcmttggtggccacttctgaattatagctacatttcattatgaccccttctgctcccttccattttgctactgatgtcattcttgttatcaggctgtgcccctaccaggagttcatattgggttgacagggttatctatatttttgttcttgatttttaagtttcatcatcttgcattaaattgttccacctggatttggggttcatctctgggccctaaggatctgctatgaccaatcctctttttgtaggtgggtctctggctta

SEQ ID NO: 431048 - DNA, 412 bp, Homo sapiens
cataaaaccagtgcactttgggaattacttttctaggatttcctaccagttataaatgacattgacatttgtcatcttttttttctttttctaaaaagaatagctgaatttaattcacctattataaaatactcaaaagtaaattgccttggtggccacttctgaattatagctacatttcattatgaccccttctgctcccttccattttgctactgatgtcattcttgttatcaggctgtgcccctaccaggagttcatattgggttgacagggttatctatatttttgttcttgatttttaagtttyatcatcttgcattaaattgttccacctggatttggggttcatctctgggccctaaggatctgctatgaccaatcctctttttgtaggtgggtctctggctta

SEQ ID NO: 431049 - DNA, 505 bp, Homo sapiens
tctcagttgaaggcaataagactatctttctctaactttaaatgctacattcttttttgagttacccaagcagtgggtatcattgttccctaatacccattagaatttataatgtgtttattcacagatccctctctcttcctggagtcccggattgacgttcatgcgtggctagggtgaggacaatgtatgattgcattccgaagtgcccctctgccctcacctctgaggatctgttcctgagttagcttcgctcagttctcttctgtgaggaggacgtctcactcgtgagggcttctcagttgtttatataaatagactttgcccaccccagattaccaggcacacctgcacatgktcaaatctgacgccactgagccctcccttctgaactctgaccgagtgctcatgtatattgtatccctgcatgcctttgaactataataataattaaatagcacttggactatcacatgaggtaaatgacaacagacagaatgaggca

SEQ ID NO: 431050 - DNA, 556 bp, Homo sapiens
aaggaaattacataaaggtgggggtatgtctgaaatcagacataattgagttcagatcccacatctactgctactaattgtgagaaccatggcaagttatttaatttatatgatcttcttttcttttgttttcatctggtagaaagggataatttcaaatacagtcatccctcagtacccatggtgagattggttccaggatcccaacagacaccaaaatctgcagatgctcaagtctctgttataaaatggcatagtatttgcatataacctacacacctcctctcatacattttaaatcatcgctaaattacctatcatgtctgacacaatgtaaatgctatgtaaatagttatttgtactctattgtttaggggaatcgtgacaagaaaaaaagtctgtacatgttcaaatacaaccatcccttttttctttttcaaatatttttaaatctacagttggttgaaactacagatgcagaacccatggatacatagggccaaatggatcttcaaaattaaaagcagtarcataaattaaaaggtttaataaatgc

SEQ ID NO: 431051 - DNA, 545 bp, Homo sapiens
ttaggagaagttgtccttggatccatttgccaaggatttgtttaggtggcatagcagacagaggacattgtcttacagagcattaaagaatcatcataggagcagcaracaattttattactgtaaaatttggtggtagtgggttttctatcccattttagtatttaatatacatcatctgccttctgggattaatgtctaaatgatacattgaaattcttggagatgccttagaaatgtctgtcaataggaattttttttctactttttaaggctatgttaatctcatagtgaaatttcctagttaaacagtaaaaaatagaaaatttatccaaatagtctggatgaactggttttaccttctcatgacaaaatggtaggtgaccaaacagtaggatgggtaaatgcagttctacttttatctattaaaaattagcagttgttctttaaaaagaagcaaattttataatttctaagtgccacctgcctgctgtttgcatttgtgcctcagggcccaaagaagcaagagataagcagtaatgtgt

SEQ ID NO: 431052 - DNA, 634 bp, Homo sapiens
ttctaaaagtactctgtaatctcagaaactagaaatttcaaacgctggtgcctatatggttggaccttagatatttgttcaaattcccacctacttgctcctcctagtggctgctactataatagcactttcattcatttacrtctaacactttcaatcaatattttcaaagtacttaacgttatgtatgtgaattttactttataactattcaattacatgaggatttccatgtaaattctatttcctagaagtaattaaatttatgccaaggttaaacaaatttaatattaaccatgactctctcattatcacaggctaaatacatacatgtatttatgcatacactgtaatttcaaataaatgctcctgtattaaaactttttaattgatttcttttgcttaaagaagtaattttcataataaaaagttggaaaaattaaaattacatattcatcactccttgtcaaaaagttttctcctgttttaatggaattcaaactatacctctttgcccacctctactccctcgacatattggtccccaaaaactaaaaacaacaacaaaaacactaagaacaaatgtgaacaaatctgtgctatgcactgaaaaccttgttgcaagataacataa

SEQ ID NO: 431053 - DNA, 607 bp, Homo sapiens
aaaaaaccaaacccagaacgcctgtgctgaacatgtatagacttttgtgtgagttatttttttcttaaacaatacagcataacaactatttacatagcatttarattgtattaggtatcataagtaatctagagattacttaaagtatgcaggaggatgtgcatattttatatgcaaacagtatgccattttataaaagggacttgagcatctgtggattttggtgtctgcagagagtcctggagccaattccccacagatacagaggtataattgtactctaaattagaggttttgcttatgacctttgattaaaactttacttttgtaaaaatcaagtttacttgtcttttttttgctcagttattagctttctctctgaagtatataggagtcattctcttccctctcttgcatgaatctgttaggaagaagattgtagttatttttttttcattaaccttttcagaagacaaacagatccctgataagggaataaaattttaaacacatttttaaaacaaattttaaatgttaagcaaatgtgaaacattgggctagttttctttgttcattaatttctaggctcagacaacattttgcattg

SEQ ID NO: 431054 - DNA, 661 bp, Homo sapiens
tccaacataactttaaaggctattcatgacacccagattcaatcttttatctcatttggaatactgatagataagttattccctgaattatcttacagacatcataccagagcaagcaagtatgatttgtaagcaaaattgattttcaacaagagacctgtagaggtgacatattcttctactattcacatgaaaattgtgtagccaaatgtttggaagggtctcagaaatttagcacatttggtgtgagaaccaaaggcacagtcaatgaattccatctgtttccaggagaagactcattactgggtgttactggggagcattaggccccagggagaggattttcctgagacttttatttcatggtgctgtatggaaaaaaaagaacacacactccttgtgatatttgttatatctttgacactaccccaactaaaaaccaaataaacagaaaacaaataaaaaagaaatagactgaacagagttatagaagaagtgactgaacatttaggcagaggctacttacactgaagttaagaaaaaaatactgcyttgcaagttgcttgaatgtacagagtttacattatttttcccagagatggctatgtgagtactgttttgataatttcctggtagatagaagttgtattttattttaata

SEQ ID NO: 431055 - DNA, 610 bp, Homo sapiens
aaatcactttatatttttggtttatgtgtctattctaattatatttctcaaattgggattgttgtgtcaaagggcatgtgtgtttgtaattttgatagatattcaaatactcttccttatagttttacagcaccttccttcttaaattaacaatgacaataggtagaagcgtattttcacagctttgctgacaattgttttgattttggcctacttggtatgtgagaaatatatctcaatttagttttaaattgcatttcttttacaagaggaatattgagtatcttttcgtgtgttgaaagactctttctctgaatgatttgagttttgccttgctattatcaattactagaagggtttgtattaagcatattaamcttttgtgatacaggtagcaaatactttttctcagttggatattttcacttttatttttacttttttatggtattgaattgtcaagcaatagtttttgatttttaacgcactaaaatcagaatgtcattattttttaccacaaactctctgaattaaaaattcactgtggtgaatttacatacgtgccatagcataaacattaaagtaactaatgagaactggttagagaatg

SEQ ID NO: 431056 - DNA, 452 bp, Homo sapiens
gaatgataactttttttatgtatatgttgattttcatgaggttggaattcatccaaatggagaactcacacaggaagtaggagatacaaagggagagcttaggggtgagattcagaccacatacataggttcttattggcctgcaagagtataggtggtagatgaaactattacgtgcttgtgtgttttgtcatctaagaatgcgttgcaattaaaagccaaggagataaaaataaagcctaagatagcactcacatttaggtggcaattttaatggagatctatttatcaggaaatttaagaattcatttgtgtgttttgaaagattatatcaaatctactggtctagaagccaaggctttcaagggtctagggctattttcacatttctttcttagtcgtgatgataaaccacaakttcactaaaatcgccatcctgatattcactgtgc

SEQ ID NO: 431057 - DNA, 533 bp, Homo sapiens
cactcacatttaggtggcaattttaatggagatctatttatcaggaaatttaagaattcatttgtgtgttttgaaagattatatcaaatctactggtctagaagccaaggctttcaagggtctagggctattttcacatttctttcttagtcgtgatgataaaccacaatttcactaaaatcgccatcctgatattcactgtgctgtttttttmttgtttcgatgattcttctttttgtgataatccaccaataaatttcttatccaagaacacaggacagcaaatctctactgctggggactgtagcaaaagcaagacctccagtggcaactgtaagcagaaactatctttgggatctgtcttataatgcatgcaaatgttgtcagtgttattttttgtccaaaagcagctcaaaagccaacttctccataaattttctccactcacctagaccttagtaatctgccccactttaataaactgcgttttgctcttatacttccttttcttgtttgttgctaaatacctgttt

SEQ ID NO: 431058 - DNA, 538 bp, Homo sapiens
ctaggattaaaggtgtgagccaccatgcctgtcctaaaaattcttaatctctcagattctaactcttgccacacatcctccttaagatggttcccagtgggatataakgagtttctaggacctgacagcagtcagggagggaaacatctatccactggccttggattgcaacacctgcttccacatgctggccttattcttacaaagcctggtcctataaggaaccctacctggagaagtccacggcacccactgcagctgatgggtgatcttgctaccatttgttcttgtctcctgtgtgcctagtcacattatgagcttctcttagataactatacccaggaagaaagaggctggatccagtatttttatgatcctgcatttcaaagaaaaagttttggcaagaaacttctgaaaaataatatatattaggctcaccttaataaaatagtctagactttgaatggaattattttgtattctttatttaagaaacataatggtgctatgaagtaggcaaagatcaaatatttatgaa

SEQ ID NO: 431059 - DNA, 538 bp, Homo sapiens
ctaggattaaaggtgtgagccaccatgcctgtcctaaaaattcttaatctctcagattctaactcttgccacacatcctccttaagatggttcccagtgggatataaggagtttctaggacctgacagcagtcagggagggaaacatctatccactggccttggattgcaacacctgcttccacatgctggccttattcttacaaagcctggtcctataaggaaccctacctggagaagtccacggcacccactgcagctgatgggtgatcttgctaccatttgttcttgtctcctgtgtgcctagtcacattatgagcttctcttagataactatacccaggaagaaagaggctggatccagtatttttatgaycctgcatttcaaagaaaaagttttggcaagaaacttctgaaaaataatatatattaggctcaccttaataaaatagtctagactttgaatggaattattttgtattctttatttaagaaacataatggtgctatgaagtaggcaaagatcaaatatttatgaa

SEQ ID NO: 431060 - DNA, 517 bp, Homo sapiens
tttggttcttggctgtctcttgcttctggcctaatttttgtttgtttatttgtccttacgctcttttcatgtgcmaagatctagcttataaattagaatttgcctagttattttgctaactggtgatgactcctgcctctgcctggattcttattaaaaacaaaacaaaaaaaatctgcgttgatgctctgctttgatgaatagcccctgggcctcaccagtatttacctcctctctcaagcagttggactgaacaatatctgccattttctccagttttagttcctgtaattatattctattatagaatgatttctaggataacttctgtgatttgtattccatgtctgcctaatccattcacattgtttaagtaattcagtgctttttaacacaaggcaggttggaaatgaaaagagacttgttcctcaggtacctgagaaaaataaaagatagaaagggcttcaattactcagccctggccattctttctcctttgacactaaggtcaagattc

SEQ ID NO: 431061 - DNA, 563 bp, Homo sapiens
agaaccacggcccaggcatatgtgcagtcccaggagccttggatccttgggcatcccgacattagcagctgcagctccggcaatggggaaggtcaggcttcctcatacacccccaggaagggggccaagtctacagggctgagcagtgacagactgcaggcctcacctctactgcacctcgcaggataaggcccrctggcctgggaccctagcatggccacaccaggcatgcctgtgctctggggcaagtagcagctctgcattttcctaggatggtgctcccagaggaagaggcagcccccatttctgctgcctcacagccctcactcctgttgccctcaggctctagatggtgtgccatgattagggactagcgcggatccccagcacagtgcagctgccccacaaagtgtccagattgttctaaccccgcttctcctcactgggttgggcctccagacctgggactccagcataactatcctgcctctgcctggacacttcagtgggaggtagctttgcacttctctgaggaggaaatcccagagacaacccatagcctc

SEQ ID NO: 431062 - DNA, 563 bp, Homo sapiens
agaaccacggcccaggcatatgtgcagtcccaggagccttggatccttgggcatcccgacattagcagctgcagctccggcaatggggaaggtcaggcttcctcatacacccccaggaagggggccaagtctacagggctgagcagtgacagactgcaggcctcacctctactgcacctcgcaggataaggcccgctggcctgggaccctagcatggccacaccaggcatgcctgtgctctggggcaagtagcagctctgcattttcctrggatggtgctcccagaggaagaggcagcccccatttctgctgcctcacagccctcactcctgttgccctcaggctctagatggtgtgccatgattagggactagcgcggatccccagcacagtgcagctgccccacaaagtgtccagattgttctaaccccgcttctcctcactgggttgggcctccagacctgggactccagcataactatcctgcctctgcctggacacttcagtgggaggtagctttgcacttctctgaggaggaaatcccagagacaacccatagcctc

SEQ ID NO: 431063 - DNA, 576 bp, Homo sapiens
cctggctaatttttttatttttaatagagacagggtttcccatgttggccagggtagtctcgaatgcccaacctcaagtgatccacccacctcggcctcccaaagtgctgggattacaggcatgaaccaccacgcccaggccttatataatactttaaataattttgtgcttgaaacaaagtttgtgtacactgaaccatcagaaagcaaaggtatcattttctcagccacccatgtgaatgatatgtggatgtttgacatcactgtcattcctaactctaaatttatatgctactgataagcaatcattttcttatacttattcagacataagtacttaacagttaaaaaagatatgtcattmatagagtaaaaaaataatgtgttgagagtaactaagcagcacagtagcatcaccagaatacctgtatcagctgttaaacaaccacaacaacaaacaacacaggctttcagtatctacctacagtgctgtgatttgattaaaaggctactgtacactgtgttttattttgttagatgagaagaaacatcagaagtagttgagggaccaggaaa

SEQ ID NO: 431064 - DNA, 640 bp, Homo sapiens
aagggaaaacatatccgcacagtccaatcctacccagggaaactccttaactatgttagaaaattgctactaggattaggttcatttactaatctaggcaatagattttgtactcaccaaggaatctacaagtaaaatctcacagcaggtgcagctgcaggtggcagtgaagctttccaaatagccactgaagctgccagtgtagaagatcttatgtcatctggcaaatatctctaatggacaagaatagctgtggggcaaaaaattctcttttatgtagagawggaaaaaaaatgctattaagctttgtattttcttctttttttcagttccaacaaatggcagatagacttttttcccttggaaaaagagtcttcagatgtttctttaaaataaatttaaaatatttttgatgatttatgctgaaatggatctgcattaaatttgtaattgctgaataatttaaatgttaaatgattaaaataattgccataaatttcatagcatgtgttttgaatatgtttcacctaaactgtgacattatgtaccttatagtttctcccaggatgtaaagcatcatcttctgattgagagctagaaaagtcaggcaaaaggcaaccaaatgaaagaaatctcttca

SEQ ID NO: 431065 - DNA, 640 bp, Homo sapiens
aagggaaaacatatccgcacagtccaatcctacccagggaaactccttaactatgttagaaaattgctactaggattaggttcatttactaatctaggcaatagattttgtactcaccaaggaatctacaagtaaaatctcacagcaggtgcagctgcaggtggcagtgaagctttccaaatagccactgaagctgccagtgtagaagatcttatgtcatctggcaaatatctctaatggacaagaatagctgtggggcaaaaaattctcttttatgtagagaasgaaaaaaaatgctattaagctttgtattttcttctttttttcagttccaacaaatggcagatagacttttttcccttggaaaaagagtcttcagatgtttctttaaaataaatttaaaatatttttgatgatttatgctgaaatggatctgcattaaatttgtaattgctgaataatttaaatgttaaatgattaaaataattgccataaatttcatagcatgtgttttgaatatgtttcacctaaactgtgacattatgtaccttatagtttctcccaggatgtaaagcatcatcttctgattgagagctagaaaagtcaggcaaaaggcaaccaaatgaaagaaatctcttca

SEQ ID NO: 431066 - DNA, 640 bp, Homo sapiens
aagggaaaacatatccgcacagtccaatcctacccagggaaactccttaactatgttagaaaattgctactaggattaggttcatttactaatctaggcaatagattttgtactcaccaaggaatctacaagtaaaatctcacagcaggtgcagctgcaggtggcagtgaagctttccaaatagccactgaagctgccagtgtagaagatcttatgtcatctggcaaatatctctaatggacaagaatagctgtggggcaaaaaattctcttttatgtagagaaggaaaaaaaatgctattaagctttgtattttcttctttttttcagttccaacaaatggcagatagacttttttcccttggaaaaagagtcttcagatgtttctttaaaataaatttaaaatatttttgatgatttatgctgaaatgsatctgcattaaatttgtaattgctgaataatttaaatgttaaatgattaaaataattgccataaatttcatagcatgtgttttgaatatgtttcacctaaactgtgacattatgtaccttatagtttctcccaggatgtaaagcatcatcttctgattgagagctagaaaagtcaggcaaaaggcaaccaaatgaaagaaatctcttca

SEQ ID NO: 431067 - DNA, 596 bp, Homo sapiens
gtttagaaacctaatgaagaaaatgtacaatagaagtgatcaatactgagaagcttaggaacagaaatatgtttatgttctttgaatcttagattaggtgttcacctgttctggcccaatttaggttatttttctgggaataaatcctggatttwaaaaaaaaactcattgtattaattatttgtttataaaatttataaagagaacccagagtattttagtctcctgaaagtattttaaaatttgaaaatttagtacattctgaattttctaatttatcattcagattatggaattttaaatggagttcaaagttggttcattaatttttatatctaacattgtagtatccttcaacatatcatataaaaagaatgttaagagagtccccacgtgtatagtatgaggcttagtaaataaattaaaatagaaaatagaaaaagtaggtcactgaagcttagtatagaacttagagtaagatcaattttagtgtgattaaagaggtttaagatggggatgaggaaggtaataaggaagataggacggtctggataaggaaaagcgactttaacttgtaagcctatattccccatgag

SEQ ID NO: 431068 - DNA, 564 bp, Homo sapiens
gtataaataaatgtatattcacttctcaaaactataaactactgttcattttgtataaaagtcttgattaaagcaaaagaaaattgaaattgatatgttgctgcttaaatgtgtaaggtactattatactctgtaggtgccaaaactgtctcatycccaaagcatctatgtgatagatgctggcaagtagaaaccatggtgatatgggcatgaatgaacgtatatggttgtggcttagtcagtccatgtagactacaaatggaggtaatgcagttatattttaaagtcatttctgcatgattgatttttgtctgataatttaattatgggcactatttattggaagagtttgcttcttattctagacatttgtccttacttggcattctattatgctgccatgacacattgcactacttaccagtaactgattatgacactttcaggctgattctcatcctggcaatgatgcagaaaggttttcagtactgtgtgctcagacagcactatacttggaaaggaagcttttgctgctgctgcgaaattggaccaagagtaccaagt

SEQ ID NO: 431069 - DNA, 616 bp, Homo sapiens
aatacttataattcaagcagagacaacccttagtctcaactatttaaatctttcaggcaaaagagtttcttaggcctgaattatgagtggttgcctcgtgctccacttcacctcacatgggtaaacacaggccaagtgtgcagcagtgattttaatgggctcagccaggctaaaagcctaatgaaatggttgcatgatgaaaaaccaatagaattttaactctgggccaatgcatygagggaactaaaaaaatcatctgggaaagatcgggagaacaattaaatggacagataaatgctactaattgctaatgatcagctaaaatataggcagatgcctgggatgttactgtacaggtgtgggatcccatttgacatttgtcttacgtttaatgtctgacatttgtgtaactttcaattaaaacagagtaatgataattagataagaaagaatctgttgagtaagctctcaaattttactacattccttacatgcgataaatttgactactttgacatttaaattttttcttctggctctataaaacatgtaccaatagaaactaacaaactttataatattcctgcaaatgttttggaatgatagcttaggcaaa

SEQ ID NO: 431070 - DNA, 649 bp, Homo sapiens
aaaggaaaaaaaagaaaaatttaattttttaacccaattaagaatttcttcacacattccatggtttggatggtgtttctattcaaacatttttctgtgcatctctgaaaattaaactacttaaaggatagagaaacagataaatttgagtaagccaatagagtataaccagtaagctaatatataaattttatgataaccaattggaatgactaaaatggcattctattatatacttcttatgcaaaaacatttatttctttgggatctaataagtgtaaaagactacataccaagtcacttccaaaagtattgacagaatgactaattayatgacaaaggttcaactttctatggagatatgagtattttccaaattatttgtggcttgaaaaatagatatgcttggaacaatggaacaatgtgacatggctaatgatattctctatacctaaatggctttaaattgttctcaattatcagtcccacttttgcttctaaagtgaattgcttcaaggtatagggcatcactggtattaaactgataaacccctcgcttctgcccttctgctttctgctatgttaaacatctttattaagactgtctcagtaggttcattctattctgatttcgttgggagcagcagtg

SEQ ID NO: 431071 - DNA, 538 bp, Homo sapiens
actctcggtgtttttaaacggattgcctctgtttattttaaattaatgtattttgcaggaaagaatccaaaacatcacatatttctataaaatcacaatgaaaaaagcacagcacagaatgtttgtgtgtttgtgggtgagtattggggtgaggtagaagggaagagagagaaacagggagacagaaacagagaaagaggggaacgttgtttayttcaccaccaggtaaaatgaaaagatgccacatggaagcaagtacctttctagttgtcattcaatgcttacattcagaatctatggtgatatggtttggctgtgtccccacccaaatctcatcttgaattgtaactcccacaattctcatatatcatgggaggaaccaggtaggaggtgattgaattatgggggtgggtctttcctgcactgttctcagtatagtgaatgagtctcatgagaactgatagggcttaaaaacgggaatttccctacacaagctctgtctttgcatgctgccatccatacaagatgtgacttgttc

SEQ ID NO: 431072 - DNA, 456 bp, Homo sapiens
atttattggcattgtaatctggaatagtttgatttaaaaaatacatctaactccagaaatataatattctcaattccatgaaagcaaaccatattaacagtaaaattatcttgcaatgagatattttcactgcttctatagttaatgctttctggatagagtccaaagtgccrtggaccaaggggtccatttttgtatacttacaaatacaattgcatatgcatatttttgatgtcctgcatattaccttttttctacataagaaatcattttgttagggttctgttcagaatttaagtgttattaattatccttattcttgaaattgtgatttgaaatagtaagcaggcctttgggtgttgtgaacagtatgaaccatgaaaatgactgtaagagatgaattgctaattttaaaattaaaagccttgcctgaagaaggtgatatgaagcaagaat

SEQ ID NO: 431073 - DNA, 456 bp, Homo sapiens
atttattggcattgtaatctggaatagtttgatttaaaaaatacatctaactccagaaatataatattctcaattccatgaaagcaaaccatattaacagtaaaattatcttgcaatgagatattttcactgcttctatagttaatgctttctggatagagtccaaagtgccgtggaccaaggggtccatttttgtrtacttacaaatacaattgcatatgcatatttttgatgtcctgcatattaccttttttctacataagaaatcattttgttagggttctgttcagaatttaagtgttattaattatccttattcttgaaattgtgatttgaaatagtaagcaggcctttgggtgttgtgaacagtatgaaccatgaaaatgactgtaagagatgaattgctaattttaaaattaaaagccttgcctgaagaaggtgatatgaagcaagaat

SEQ ID NO: 431074 - DNA, 569 bp, Homo sapiens
acttggtagaattctttagatcttggtggttcgtattttctctaaactttgttagtggcatgataagaaataaggtatttaacagattagatattttattgaaaatttttgttcaaaaaatgtataatatacaagaaatatacaagcctctctaaaaagagagtttcaggcacatgaactacagttgaagggatatttttactgtcatttggtcatgcaatcaaattacatcacaaaaactgctctttacttcagtcttttaaagactgaccttaattacagaaaatacaaaataaattactcatatatacaatataatggatgatatgaaaattaaaacattaaatcccctcttcgtctgcttctcccacttcctaagaatgcttacgtgttttagctttacgtggtcttgctatttttttattctttctatttagctaaakgagaaagagaaaagagcagaagtgagcctaagaccagtgtggtttggcgcggtggctcaagcccataatcccagccctttggggggccaaggcaggtggaatgtgtgagctcaggagttcaagaca

SEQ ID NO: 431075 - DNA, 355 bp, Homo sapiens
cttacagtgcacatctgctcacaataaatgtattctttcacaaaaagacaaatgctgtgtgttatcactcatatgtgaaagctaaaaatgaacttatatgtatatataagtttaacttatactgcacttacaccacaaatctataccacagctcataaacatgtgagtatacrtatgtgtgtgtatatatattcacgttttatgttcttttcttttcaaatgtctagtaaaccaactcattattttaaacctataaaattgagttaaggaatcaagcatttatctttgctttcgacataaactatcagtgtaattaaaaatttgatgaggcataattgctctattgaagaattcc

SEQ ID NO: 431076 - DNA, 625 bp, Homo sapiens
tcttaccccatttttcacctgtgctatgcctctaacaggttactgtcacttatttatgtgaaagatacatcttgttcttcctcctttcaaagtgttccaatgacaactggtttccccataatgacagccaaataaagcccttccaacagaacctattttatctggccttcctttacctctctggcatcatctttgactaatttttcctgctctaagcttcttggttctgttgctttttttcaattttcctaacatacccctcagttctttacccatgttcttttttcccctccatctgaagcactatatttcartcttcaccaaataggaccttctcagtgaaggctttctttttcttctctgtaacacccttgtcaatcttctttccttgcttaatttatttccatagcagttattgttttctaatatattccatctcaatctaaaattataatagtaggtattttggttttgctttggaattaaaagatttctaatttttagtagattaattattgataatcatgccttccagtgtttaattagacctgccatatattatgtttagtgtgcctactaaagcaaaagaacatgctttatggtggtacaattcttctcactttct

SEQ ID NO: 431077 - DNA, 638 bp, Homo sapiens
aggtatatacccagccccattatccatagttggctcttacttataagcacaatctactggcttgtargtcaaactacgcaacccagtaaaaaactggtgacagaagtgcatagggccatagaagcaaagccaaaagaccctactcagcattctctacagtcactccctgaaggaaggggaggaactgaaatgaaatacagtaatatcatagagaaaaaggcaaggacacaatttgctatccacatgaaaataattgcaaaaattggaagtgccagtgtcttcagatgaggagccaatgcaagacttctagcactgtgaaaaatatgaatgtagtgacatcaccaaaggatcacactaactctctccaccaacagttcctaccaaactggaaagtcagaagtgacagagaaagaattcaaagcagggatttcaaagaagctctacaagatccatgacaatgctgaaaaaccacacaaagaaaacttccaaatcacccaaggaaatgaaggaagagataaacatcttaaaaataaattaatcagagcttctgaaattgaaaacctcacttaaggaagttcaaaatacaattgaaatctatatcaatagaccagaccaagaaaaagaagtaatttcccaac

SEQ ID NO: 431078 - DNA, 557 bp, Homo sapiens
gaaaaaaaaatcttaaagactcagagaaaatgggcagattatgtacaaagggaacccaatcatactaacagcggacatttcagtagaaaccttactagcaaggagagattggaggcctatttttggcattcttaaagagaaaaaaaatcaattgtcccaccaaactaagtttatcccaggaaactaagttgcataagagaaggaaaaatcaaatattttctaggcaactaagagctagggaatttcttaccactagatcaaccttacaagaaaactttaagggagttctacatatggaaatgaaagaatgatccttgctaccacaaaaacacactttattacatagcccacagaccctgtaaagcaaccacataatagaaactgcaaagcaaccagccaacaacttcacaatagcatcaaaacctcacatatcaatattaactttcaatgtacatagtataaacgcccccacttaaaagacacagagtggcaagtggggttaaaaaaatacstcatcaacctgctttcttccagagacacatctcatggctacgcaa

SEQ ID NO: 431079 - DNA, 560 bp, Homo sapiens
cacactttacacctcattgtttctgtatcatgtactaacagcaaggggcctttatttttgcttctgtcttcatattactcttattattcttatttagtcttaattattgacaatttctatagaactatagaaatcctcacacaccacaaactctaattttcatgaatttatctccacccgtgatcttgttatctcctctgtctcaacgattcatctattctcagggttataccctctatatgtgtattataatatcctcattttttgcactcatttttctaattacttccaacttctttccaggtgacttcttttggcattacagaatccttcaaaactatcaggacccataatatgtgtattcatcaatgttttcactaacttctatgctttctctttcttgcttatgcattttcartttcacggtcattcattttaaccacactcatataccatcaaacattcttgcattttttcacgtagctctgctttcttgcccaaatcataacactgaccaaactaagcatttatttactcttttcttgcactaatgtaggtga

SEQ ID NO: 431080 - DNA, 626 bp, Homo sapiens
tctgttttctttctcttatacctttttatttatttattttttgagtaatcaaataactagtatttaaggaatatactagtttttattctctgttgtcctaatgttaaggaagaaaaattaccgtttattcatttcctgtgtattctcaagcaaaataaactcttaagataactagtagtggtaaataataagagcaaaggattgaataggaacccctttctaartattttattttttctcctggagaatgctcaccgattcttagagatacccctcctctaattatagaatcatttaaaaaatctcctgagaggagctttaaattgtgatcatgaaaagataatgaaacataccatttatttagtaatgggtgtgccagaaatgcttttcaatctactggaagagtaatagagtttgaatacttgtggttgaaggagataaattaaagagaagtaaatgtatctttgtgtgcaggacattagtatgtatttcctgttctgacagagaatattggtttaattgatataactttattttactgaagaaatagagcatactaaatgtcattacaaaaaaaatcaaatggaacattttaattattgtcacaaaaagatggaaagctcttt

SEQ ID NO: 431081 - DNA, 583 bp, Homo sapiens
cctggagtcgggcctcccagtggccagctctcccctgactgcccgcaacagaattccatgtcgtcccgccatctgatggcctgccagcgtctgctggtgtctatcagtgagctcttttgctcttctgctcctctcgacgtccagttgtttgtgtctgcccactagggtttcagagtttttatgggcacaggatggggggcgtggtgggccagagtgatctttgaaagtgcaacatttgggcatgaaaagaggagtgcttctcctcacttagtttcttgggcacaagcccgagggtggagcycccgccaggtaccccgctcttctctacccagcacttccctgccatgctcccgtatcaaatttcagttgttttaagctacactgcttgtggtacactgcttaaccaagttgctttgttaaagcaactttaggaaattaatacattctccaattttttcattccccactcttaactctagagtagatacaggaagaagagtgaaggaagaggaggagtgaaaataggcatggaagcctctaagcctccaggtactgggagcagagagagaggtaaggtttgatt

SEQ ID NO: 431082 - DNA, 627 bp, Homo sapiens
gaaacaaaaaataatttcaagcttaattaataattcataagatttacattatacatcttggagctttatgtcctataacattcaggaaaataaaataaaattatttcatcactggcttatagtcatgtcacctctcttttccccttcccttttaagacaaatttcttcacctttctgtattgtcctaagcaaatataccatgcatattctattcagcaaaactgaaattctgttagttgaacttaaaatcctttaaaagcagctcagcaaccatgcttactgataagtaacaatgcttctcaagtgagttatcaaatttttcaaccaaatacataggtctcttggaagattttagtctttgcataarcaaaacacaatgtggttttctgtccaattatgtaagctgtagttagaaaattctcatacatacctgctgaaagaatattctcatatatatgctaatatatgtatactcatatatataatgtattaaggacattctcatatgctgaaagaatatagaatataaatatgtaaatatgttttttatgtttaacatgaaacatataatacattattatatatgttacatatgtaatgtattataatattatatgttacatatat

SEQ ID NO: 431083 - DNA, 534 bp, Homo sapiens
agcatatgataaaatgataattaatgtaataagtcttcaaagctttccctaaaacttttgatagatcaaataatattttagctcttatccttgcttgatgagcacacatcctaattcatgataatcaacttatactgtgtaaaacatcttcagaatgttctacaacaattagtgattttatatttgaacagtaccatattccatctacttatctatctgcctaaaattaaataattagtcctcttttgcaagtatgcmaatgattctcagaaagtaaattgggaatatgtcttaagttacattttttttaacttggttttccaattagagttaaggaaaactcttcatcctcctactgtttatttttgttctttcgttatttctctctttctttccctctctgttactcttattatttttgtcaaaacattgactaacatcagagataggtttgtaattatccactatggaaatttggaatgatgttgtctgcatttaacaatattattgtttactctctggctctgattccaa

SEQ ID NO: 431084 - DNA, 607 bp, Homo sapiens
aaggcagcagaatccattcaaactagtttaaacagaaaaggaagttgctttatttttgcaaaaagaccgcctaatatgcayaaatggtagtagaaaaacagtaggaaaaaaagtaaaccataatttttttcctcttaacattcacaaaaaataactaaaaatggatcaaagatctaaataaaaaactaaaactctaaaacttcatgaagaaaatatgagaaaatatttgcaaatgcttcagatacgacacaaaagtagaaacaatgaaagagtaatattgatacttgacatctacaaatgctaaaatgaacaaatttcttttttaggtcaattatacaaacacggaaagaccagaaacagactggaagaaaatatttgcaaaacatgtgtcaggaaaaggttgtgtatcctatatatataactaatttttgaactcatttgtaagataatcaacctgattaaaaagaaatgtgcaaaaatgtgagcagcatttcaccaaatatggtgtgtgtgtgtgtgtgtgtgtgtgtgtgtatgtgtgtgtgatgcataagcatgtggaaatatacccaacattgttaatcatttgagaaatacaaactaaacc

SEQ ID NO: 431085 - DNA, 566 bp, Homo sapiens
ctgtgagaactcaactatcatgagaacagcatgagggaaactgcccccatgatccaaatatctccacttggtcccacctttgacacrtggagattattaacccatgagatgtgggtggggacacaaagccaaatcatattagttacttaatatccataagctatagttttctcacttataaaatatgaacaataatagtacctatatgagagaacatatagtaaccactgagaaaaatgttcaataattcaagtaatgtttaaataactatcactggtattgatatcatctcacctccaatatcaatatcattattaacaatatgtgcacaaatggtactattataatagtaatgctgtgttgcagttgtatttaactcttaaaaataattgttttgttttatatgacaatatcaacaaacttcaatgttaacaagggccataaaaataatatttttataagactttaacttaaataacatcagtgtaaaacaatttggcctatgtaatcaaaagctactgatcaataaaccattcatcaattaggatgcagataaataaaacatg

SEQ ID NO: 431086 - DNA, 566 bp, Homo sapiens
ctgtgagaactcaactatcatgagaacagcatgagggaaactgcccccatgatccaaatatctccacttggtcccacctttgacacatggagattattaacccatgagatgtgggtggggacacaaagccaaatcatattagttacttaatatccataagctatagttttctcacttataaaatatgaacaataatagtacctatatgagagaacatatagtaaccactgagaaaaatgttcaataattcaagtaatgtttaaataactatcactggtattgatatcatctcacctccaatatcaatatcattattaacaatatgtgcacaaatggtactattataatagtaatgctgtgttgcagttgtatttaactcttaaaaataattgttttgttttatatgasaatatcaacaaacttcaatgttaacaagggccataaaaataatatttttataagactttaacttaaataacatcagtgtaaaacaatttggcctatgtaatcaaaagctactgatcaataaaccattcatcaattaggatgcagataaataaaacatg

SEQ ID NO: 431087 - DNA, 593 bp, Homo sapiens
gcgaaaaactttttacctttaggattctagtttaatcatatatatgtatatatataatcatctatgtctttattcaaaatatgttaatactattgtcctctctgtctcaaataacacattttaggaagctgtattgctattgtttctaaagcttaagataaataagtaaaaattgagttatctgaaacatttcactctcaatcatataaactgaagaaaatgtgataaaaagtgcttgtrcttatgctgatgaattatacaatttttcataagttccagaaaacctcatatttgattatatatgttttttaaatatgaaatttggatatatatttgcaagaactcacattcaaaagatagcattttataaaaaatctaaacattataaaattcaatattaactattgaagcttaaattaaattatgaatatgctttagtttttattttatagtttcaatatttaaaactatgtcttttaaaataaatttatataaatgaataattattttttcaaaatactatttatatttataagtttatttttccctgtgtcttaagacagagattttattttggtaaagagacaaagcaa

SEQ ID NO: 431088 - DNA, 641 bp, Homo sapiens
aagtgattaatgaagaacttctaaagtaaaatttttgtcacatttaaaaaaaataactggtagattttgaggggaagtttcagggttatagaaaaagtgagcaaaaagtacagagttcccttatactaccctccagtttctcctttattaatattttgcatttgtatggtacatttcttataattaatgatccaatattgctacattattattaactaaagtccaaagttgacattagtatttatttttgtgttgtacactctatggggtttgacaaatgtataatgacacctagcagccatgacagtgtcattgtgcgaaawtgtcctaaacctacacattctgagccaaatttaaaaatttggagccaaggggaaaaaaaaataaagctacattgtctcagcatgaaagttccaatcaggtatcttctatttgcaaacattttgattccataacagcaaagaagttagcaatgtatttaattcttttttttaattatactttaagttctgggatccatgtgcagaatgtgcaggtttgttacataggtatacacatgccatgctggtatgctgcacccatcaacccgttatctacattaggtatttctcctaatgctatccctcccctagcctcccatc

SEQ ID NO: 431089 - DNA, 613 bp, Homo sapiens
caaataaaatcaagctaagtaaaagaacaagccaggctttatccataacaactacaaaaaaagttatgaagacctccactcccaggtaaattcttcacaaagtaagaaaatgtctactttagacagtgtcaggtcttcaaggcaactttgtgggtgttctttgcattggggtacatcatgcttcttttttcttgacaattagccagactcatcttatgagtaatgttaaaaactgtgaaagatagagcaagggagacataaagctctagtcctcagacaaaacaacaaaaaaattacttaaatgacaaccactcaagtaatccatgtatggtggttactttgaagactatttattgctggcacgagtattataaactagtgaaaatatgtgtttaaagaacaaaagtttgccaaaacagagaaaactgctaaatttgaatgcattagctatgataaatgctctgtcttttatctgacatttattatcaacacagagaccttagtataaatacgttaataattgaaacatagttaaataaaggygacttcaagtgaaaaactactttagttatgctaaatatggaatacataaatctttttctatgtaagtgct

SEQ ID NO: 431090 - DNA, 586 bp, Homo sapiens
gaactcattatcattagaacagcatggaagaaactgccaccttaaaccaattgcctcccaccaggcctctccctccacatgtggggattacaattagagatgagatttgggtggagacacagagccaaaccatatcaatttccaagaccttatcttctctgtattttgtgtaacatataaggtgccccaatgttacttttagttaatgtttacatcacataaaaagttactagtcttctctgaacatgaactttataagcataacatttttatcaactttgaatgcacattttaattttactaagagttccatataccttcagtgtttcttctagaaataagcctaaacatttccacatgctcacatttktattaaggaatgaggctaaattaattgtgtttatatactcaaaactctgtaaaaataagcatcttattagaaattagggtaaaagaaaacaagatacaaacaaaaagcacctttgtcatgtctaagaaaaccaaattttctatgctgagagcccagtgattttgctgagcaaatttaggtttttgttgtaattagtttctatttttatttattttg

SEQ ID NO: 431091 - DNA, 551 bp, Homo sapiens
gctccttactttattagcttgatagacaccttaaaaaccagcacattgatttttagaatgctgttaaatgagaccaatcatcatcacactscttctgattgataggtggagtaatgtgctgctggagtgttgagaacagtcttgagtttctcctcagggtctaactccattcttaaacagtttgctttctgcgaccaatacaatgtcacccatcttccccaattctcttgacatttctacaaatttctgcctataaatggcttctactctccaagtccatctattacctttgaactttctgacctctgaatcaccctggccccaatagtgttataacaacatcatctaatgaacaataatttagtcctgcattcctctggttgagttttgaaaggaaactgggagataagatacttggatatgtcaatcacagatgagggagagcaggaaagacttcatgccattagggtatagagtgggaatcaccacaggagagataatcctggcaagggagtagaatttctacgttgcacatcttgtctttctaggaa

SEQ ID NO: 431092 - DNA, 505 bp, Homo sapiens
cctgaagcagctggatatattgaatggtggaatggccttttgaagtcacaattacaatgccagctaggtgacaatactttgcatgactagggcaaagttctccagaaggctgtgtatgcactgaatcagcatccaatatatggtacagtttctcccatagccaggattcacaggtccaggaatcaaggggtggaaatataaatggcaccatttaccatcaccagtaatgacccactagcaaaattgttgcttcctatcccacgacatcatgttctgctagcctagaggtcttagtcttagagggagaaacgctgcccccaggagacgcaacaacgattccttttaactggaagttaagattgccacctggacactttgggctcctcctacctttaggccaatgggctatgaagggaattacagtgttggctgaggtgactgacctggactatcaagatgaaatcaccctactactccacaacaraggtaaggaagattatgcatg

SEQ ID NO: 431093 - DNA, 544 bp, Homo sapiens
aatttccgaatacagtagtccactcttaagattgcaggtaatgttctagaagtgaagccaggttagttgttccattgagggaagctgccagctctttccagcaaccattagttaccaggagctctctcctccttcccagccctcagagaaatgtcttaaagcacatttattctcactatgaaaatactgaagttttttcttttgtgtgtttatttgtttttcttggtgtccttgaggtccagtattgcatcaggctctgctctgtctctctctagggctgtcattcaaatttcctgagaaatcttccagttttatttgcaaagcaaatatgaagagttagcctgtggattggaaatgggaggggattgggaagaggaatctgctgctaagtcttagtatgtgtgagatggcctaccaaaaggggttgcacttmcacagtattctttgtattagttgatgttacacatatatcatgtgagtttggaagcttctttggaaacacaatttcctcactgcatgtcaggaagataattttaatgaaggt

SEQ ID NO: 431094 - DNA, 543 bp, Homo sapiens
ggggctccttgaactcttatttaaacctgtcatttcagatttacaagaatatatttttgacaaattctctcaaaatcaamtttggatttagttgcaattgctttaaatctgcaaatcaatttgaacataattgacattcaaaattgtgcctattaattaacttattgcctcccagctccaagctgacctttccttctcctgcttgtgatactacagcgtttctcctttgtcaatcatcacaatgttaagctttgtcagtaaagactgatagaaggaccctggaaaagataagaagagaagttttctttcccttttgtgtatgctttgttggcttgttcctgtgttgtaaagcacccaccaattaacagagactccagcagtgctcagcttgtagcttgccacttaccctctgggttctctgcctcatcagcctttgccacccagcttcccagatggggtttcctggcttgcagatctccttttgcctgttttgatcaagtgacacccaacagacggttacctccttgccagtcctggtctaca

SEQ ID NO: 431095 - DNA, 543 bp, Homo sapiens
ggggctccttgaactcttatttaaacctgtcatttcagatttacaagaatatatttttgacaaattctctcaaaatcaaatttggatttagttgcaattgctttaaatctgcaaatcaatttgaacataattgacattcaaaattgtgcctattaattaacttattgcctcccagctccaagctgacctttccttctcctgcttgtgatactacagcgtttctcctttgtcaatcatcacaatgttaagctttgtcagtaaagactgatagaaggaccctggaaaagataagaagagaagttttctttcccttttgtgtatgctttgttggcttgttcctgtgttgtaaagcacccaccaattaacagagactccagcagtgctcagcttgtagcttgccacttaccctctgggttmtctgcctcatcagcctttgccacccagcttcccagatggggtttcctggcttgcagatctccttttgcctgttttgatcaagtgacacccaacagacggttacctccttgccagtcctggtctaca

SEQ ID NO: 431096 - DNA, 548 bp, Homo sapiens
cagttccccgttgaccaaactcaactatttacaatgagctgattgaggatttctgactgccagctttgacctgccagcatcctcataagggctttatgtttgctggccagtctccagctccttgtccattacctttagtcagatagcattccagtgggtgatgttttgattggcagacccaaccacagttacccatgctccagcctcagtcgggtgtcacactaatgaggagcttctarattcagtccctgtccacagctccctgctcacggggctcagtccaacactgtgtatacattcagaccaccaaggcaatcctgcaacttctctgccatttagtaggctgcagtaacacaccctccgatgatggctgaattacagttttgaggaagagagcttccttccaactgttttcctttcttaagccttggagaaatttttagaatccttttttttcttttattcagtcttaataaccaatctcaggaatatggttaatatttctttatataaaacttcctgttttcaaattactgtgtactttttgt

SEQ ID NO: 431097 - DNA, 548 bp, Homo sapiens
cagttccccgttgaccaaactcaactatttacaatgagctgattgaggatttctgactgccagctttgacctgccagcatcctcataagggctttatgtttgctggccagtctccagctccttgtccattacctttagtcagatagcattccagtgggtgatgttttgattggcagacccaaccacagttacccatgctccagcctcagtcgggtgtcacactaatgaggagcttctaarttcagtccctgtccacagctccctgctcacggggctcagtccaacactgtgtatacattcagaccaccaaggcaatcctgcaacttctctgccatttagtaggctgcagtaacacaccctccgatgatggctgaattacagttttgaggaagagagcttccttccaactgttttcctttcttaagccttggagaaatttttagaatccttttttttcttttattcagtcttaataaccaatctcaggaatatggttaatatttctttatataaaacttcctgttttcaaattactgtgtactttttgt

SEQ ID NO: 431098 - DNA, 594 bp, Homo sapiens
cacaccctccgatgatggctgaattacagttttgaggaagagagcttccttccaactgttttcctttcttaagccttggagaaatttttagaatccttttttttcttttattcagtcttaataaccaatctcaggaatatggttaatatttctttatataaaacttcctgttttcaaattactgtgtactttttgtctcctaactaaatactgatttatacaaaaagatattttctccttctcrccttcttcttctcttcctccacttcctccttttcctttccctccctctttttcctttcctagaggatacatctttccagttattcaaacccttattcaaagtattttttgctttgaaaaattttttgtttatttttctttagttaagtagcatccttttgttttagaaatacaatgctatattttagtcctatggtagatgaggtaatttccattatattattccttggaatttagtgatgcatatgaagctaatgctttgctttttaatatgtttaacttacatcttgacatataactaaactgttttataatcaaatggtttcatttttgaggtattctagtttaaca

SEQ ID NO: 431099 - DNA, 594 bp, Homo sapiens
cacaccctccgatgatggctgaattacagttttgaggaagagagcttccttccaactgttttcctttcttaagccttggagaaatttttagaatccttttttttcttttattcagtcttaataaccaatctcaggaatatggttaatatttctttatataaaacttcctgttttcaaattactgtgtactttttgtctcctaactaaatactgatttatacaaaaagatattttctccttctcgccttcttcttctcttcctccacttcctccttttcctttccctccctmtttttcctttcctagaggatacatctttccagttattcaaacccttattcaaagtattttttgctttgaaaaattttttgtttatttttctttagttaagtagcatccttttgttttagaaatacaatgctatattttagtcctatggtagatgaggtaatttccattatattattccttggaatttagtgatgcatatgaagctaatgctttgctttttaatatgtttaacttacatcttgacatataactaaactgttttataatcaaatggtttcatttttgaggtattctagtttaaca

SEQ ID NO: 431100 - DNA, 568 bp, Homo sapiens
gactaatttcttcagtagcaaagtacttacaaataagagtttctataaagctcaagggtgcaataatgcactacaatattaaaattaattatttcattcaagaaaytcaagcaaagctctattaaatttaattatgtaaagtattactctgtgttgtctccactttctcttcctaaatacaaatctctgcttttttttcctctactgcacatattcagttctctattcatcattcttacttaatgtgttgtaagtaaactcattattgagccttatgaagcacatctaggctcaatagaaagacattttaaaaactctgggatccaggatttggatctggacttaataggtggatgagatcttttgttgcatgttttggtgaaaaaggcaagtaagtttagacatgtatatggtaccattgaattataaaaatggacatattttcaacatgtttacataagaagaaaatatgtttgaacttggggatctactgccactcatctaaaaatagcagtccggggcaactcactttcttattcttattccagtggcctgtgcaaggaactac

SEQ ID NO: 431101 - DNA, 618 bp, Homo sapiens
actatgttgaatagaagtggtgaaagtgggcatccttgtcttattccagttctcagggggaatgctttcaactttttcccgttcagtataatgttggctgtgggtttgtcatatatggcatttattaatttgaattaagtccttattatgcctattttgttgagggcttttatcctaaaggaatgctggatttttttcaaatgcttttttggcatctattgggatgatcatatggtttttgttttaaattctgtttacgtgatgtatcatgtttattgacttgggtatggtaagccatccctgcatccctggtatgaaactaatttgatcatgatgcattatctttttgaaatgctgttggattcagttagctagtattttgctgaggagttttacatctatgttctccagggaaattggtctgtagtcttctttctttgttatggcctttcctggttttggtattagagtgatactagcttcataaaaygatttacagaggatttcctctttatcttttgggatagtttcagtaggattggtatcaattctttgaatgtctgatcgaattcagttgttaatccatctggtccggtacgttttttgttggcaattttt

SEQ ID NO: 431102 - DNA, 617 bp, Homo sapiens
acaagttctgaagctgtactaactcagttcaaatcctggttctgctactcattaactgtaacattgggcaggttttttacctcttttagcctatttctcaggattgatgtgaggattaaacaaagcaataccagtgcatagaacagtagctggtacatggtcctcaggaaatattagtcccatgattattttcattattaggtaatctctatggtggggctgggtggagggatctcatagcataatgaagaagaagagaagtagacttggcaaataagtagacaagtcacagagggacatgactgatgtgagaacagcataggaaacaggtgcccccatcaggcagtggagttctgggaagacctcttggaggaggcgaccacagggtgaggtggagaagattrtggaaggacattccgagttctatagaaagttacagaaatgagaaacatgactacaagtagtttggcatggccacaacatacaggtggagaaagggccctatttgggagtgagagaggagagatatttggtggaaaacctgatccctcttggaaagctttccttcttcccctctaccttccatgagcaaaatttggtgaaggacagatgaccgc

SEQ ID NO: 431103 - DNA, 617 bp, Homo sapiens
acaagttctgaagctgtactaactcagttcaaatcctggttctgctactcattaactgtaacattgggcaggttttttacctcttttagcctatttctcaggattgatgtgaggattaaacaaagcaataccagtgcatagaacagtagctggtacatggtcctcaggaaatattagtcccatgattattttcattattaggtaatctctatggtggggctgggtggagggatctcatagcataatgaagaagaagagaagtagacttggcaaataagtagacaagtcacagagggacatgactgatgtgagaacagcataggaaacaggtgcccccatcaggcagtggagttctgggaagacctcttggaggaggcgaccacagggtgaggtggagaagattgtggaaggacattccgagttctatagaaagttacagaaatgagaaacatgactacaagtagtttggcatggccacaacatacaggtggagaaagsgccctatttgggagtgagagaggagagatatttggtggaaaacctgatccctcttggaaagctttccttcttcccctctaccttccatgagcaaaatttggtgaaggacagatgaccgc

SEQ ID NO: 431104 - DNA, 617 bp, Homo sapiens
acaagttctgaagctgtactaactcagttcaaatcctggttctgctactcattaactgtaacattgggcaggttttttacctcttttagcctatttctcaggattgatgtgaggattaaacaaagcaataccagtgcatagaacagtagctggtacatggtcctcaggaaatattagtcccatgattattttcattattaggtaatctctatggtggggctgggtggagggatctcatagcataatgaagaagaagagaagtagacttggcaaataagtagacaagtcacagagggacatgactgatgtgagaacagcataggaaacaggtgcccccatcaggcagtggagttctgggaagacctcttggaggaggcgaccacagggtgaggtggagaagattgtggaaggacattccgagttctatagaaagttacagaaatgagaaacatgactacaagtagtttggcatggccacaacatacaggtggagaaagggccctatttgggagtgagrgaggagagatatttggtggaaaacctgatccctcttggaaagctttccttcttcccctctaccttccatgagcaaaatttggtgaaggacagatgaccgc

SEQ ID NO: 431105 - DNA, 524 bp, Homo sapiens
actgtagtacatttaataaatgttacttgccattaatatttctgtagatttttgatcaacttttgctctggaagatcagaggggactgacctaattaggtctgataaaaggcttaactttatcacttagcattgcttgagtattttactggcctggtgggtgtactgagaaaagcaggcttatgtttcaayagtggactctattgtgcgaaataaatatgagtctcctccctctttgctgttgccttatttgtactagcatgccagtttgaatacacagtgttcatgtcaatatttttgttgatcaatttatcagctcaatttatagaaactttcagagtcttccttattgatgtgtttcctggggcaaggcccattgttttgcttaacatttcctagaacctagatgggcctctgtactcagttgccccaagaattttgatcaaaacatggaccaggctttggtattaaatttccaaagcctggaggctgaaagcagtttggaaaagagttgattcactttaa

SEQ ID NO: 431106 - DNA, 575 bp, Homo sapiens
tttgccttaagaattctccaggtgtgcgggagacatcagactcatttatccccaaaattccaagggacacatcaaaacgtcccaagccctcccagtgaactgtccaacgtcatcatggggcaaaggtggggaggagacctagaggacagcccaggagggaaaaagccacattactctccccctacaataaagactacattttcctgtttaaagaacctccctttcacatttcagtcttttcttgtagtctataggtatgtgataatggartgatggtcacaagattggtttgtgtctagcaacgtgttgaggctcttttaaaaagtaaagatgtaaagatctcaaagtcttttgagaaaacaggaaaagtcccagtcaacatcctgttgtgatcatattcctgaaagactggaagataggaatatgaaaaggggatcaaccacgattccacttccctaaaaccaatggctttttcttttcagtgtattttcttccactgttttatcaagtactgcttttctccacttcatttcacatcacatgcattgctccaaattactccatgctgattacat

SEQ ID NO: 431107 - DNA, 604 bp, Homo sapiens
aggattttccatttttgtactaattcctaaggggtgatttctaaaactgatgttatagactatgtttggcaactgattttgctagccaacatccattctcactgcttctagtaacaggactctgaagctttcctctgctgaagcttaaaaaagcccagaaattccagcacactattttgtgtggttaaaataaaaggatgatcaaagtatgaagcacatagtttattgccatacaaaaatttcctttgttcacaacgcttaaagatggggagaataattagaacaaatttcactgggaatacacttgacaggtgaagtacattaaccacatagtgaatgagttcyaattttgttacagtcgaattattaaagtctagttggtcaattaggatgacaacaggcttctgtggaaagaaaagtctaattgaagtttagggagtgcctttatatggcttgagcaacacagtggaaatctgtgacaacatttatattccctagacatgagagggcagtgccagtgttgactggtgaggcttcagagattaactcaaaggctaacatggttcggccctgttgcagcctgagctgtaggtctttgcagaag

SEQ ID NO: 431108 - DNA, 598 bp, Homo sapiens
gctcttcttttcccaggaagatcgtgttctaacaggtcaacagtagtttattttctgctagtagaaatgggtttttattcttctacctgagctttgttgagaaatagctgaaatgattraccagagttaaaggtgaggtctgaccacagacttcctatataaactagctcctatagaaactagctggttggcaaaagagtaaaaccagcaaacctcgttagctcttgttttctaactggctgagctgtgtggtccagttgctatttttaatcatgcccattatctgttataatcccttgcctccagccctttgtgtctatataactgttccctaagttacatatcatagttcatatccattttcaaaatgagttcacagattatatctcattaaaatcatacttcctaataaatgccacccaaagccattccacacatagatagtcattttcctggacagcaaaaagagttttgtaaaatgccatattcccttttactgctgcctggtaattgctgtctgctccacatgtcagggactaggggaaaggaggaaacattggtaggagatgttcttctgcgaggagattattctcaaagg

SEQ ID NO: 431109 - DNA, 598 bp, Homo sapiens
gctcttcttttcccaggaagatcgtgttctaacaggtcaacagtagtttattttctgctagtagaaatgggtttttattcttctacctgagctttgttgagaaatagctgaaatgattaaccagagttaaaggtgaggtctgaccacagacttcctatataaactagctcctatagaaactagctggttggcaaaagagtaaaaccagcaaacctcgttagctcttgttttctaactggctgagctgtgtggtccagttgctatttttaatcatgcccattatctgttataatcccttgcctccagcccttygtgtctatataactgttccctaagttacatatcatagttcatatccattttcaaaatgagttcacagattatatctcattaaaatcatacttcctaataaatgccacccaaagccattccacacatagatagtcattttcctggacagcaaaaagagttttgtaaaatgccatattcccttttactgctgcctggtaattgctgtctgctccacatgtcagggactaggggaaaggaggaaacattggtaggagatgttcttctgcgaggagattattctcaaagg

SEQ ID NO: 431110 - DNA, 600 bp, Homo sapiens
aattgcaccaccaggtggggcacactctggccccaaacagatggggttgaaaactccyctcaaaatgcagtcttgttaaattaaaaacttgatccaggagtggaacaaatagggagccatgaatggaatggagtcaggtccactcaggcggattctttcttctcccactccttttcctttaaaaaagaaaaattccccatttcactttcatcagtgttagcatctatgcagaaacgcagccatccaccctttgcagttgaatgtgttactttaattagtctgaaaattaaagggcaactccgggccaatgtgaatgattatgaaaatacatgtgcatcccatgcaatcttctcatttaattaatagtcttgtaaactatatggctcactttaagtcagtcaagaggtataacaactccattttaaatatccacttaatacttaacaggatgtgaggaacacactatagcatacggtcccttctcaagtttcactgtctgaaatttttcaaagctgacccaagtcaacctgaaaaatgtttaacaccctgggcttgaacacaagaaactctgtgatgaacagacattcaattacatttttt

SEQ ID NO: 431111 - DNA, 616 bp, Homo sapiens
cctgatcgtagctgtttttattccctctcttgtattatgcattcgaaaaacgtgaaagccacatgaagcttcagagagtccaaccctcagactcataaggcacaataccccaggattcctctagatcactgttctatcttrtagactatcctaactgcttttgtgtgagaaaaagcagggttcataggtagcaaaagttagccctttagatgacaacggtgcattttatgtgctttttaaaaatcatattgctctcatttggaagtagcttgaacaattccattttgaatcaagctctataaatttgatcaatatcattattttcatgaggcaagtttaaaccaataaagttgtcttgctttgtccctcttccctcccacccaccctcttaaaaaaaaacaaaaaaaaaaaaactaaggagagtcacaactttgacgtgaaacttgagtgtgaagtgcgggtagggaaaagtttatgaaagatgacatttatagatgggtacatatatatttaatttcttgtatgtgagtgtgtatgtatatatatttctacttctgttcatggagaatacaacatcataattaaggacattttactttatccaatgaagagtttt

SEQ ID NO: 431112 - DNA, 600 bp, Homo sapiens
tctgtggcaggacatgcctctggccagggaaaggctctattctaaactctastcaggtgcaggtcggacaaggctgagcactgctggtaaggagaggcgtgagaagcagcgtgaagggcgagaacaatcctggctcccaacaggaacagagtgtgtgtgaccttcatgatgatagcaaacactcacatgcacagttgtaagcaccttatgcttgttaattcatttaatccacagataaacctcacgaggtcagtattcctattagtcctactttacagttgaggaaatggagacacacagaggctaagtaactcacccgaaattgcacggttagtgagtgatcaagctaagagtgagtccgaagtctgagcttacagttggtaagctagtctaccttgtgggcaacagaaacatatgggtacttaactgttggagtaaatgttggcagctcataaggctgtttgttgctgacacccttttcttgaggatgcctttagttgcttccaagccctgccttacccccatggtgccagctgacaactccgcccttcccccaggagcaggcaccaaaacaagactgtgccaacccggctggttttc

SEQ ID NO: 431113 - DNA, 571 bp, Homo sapiens
cagtgacagggaggagggctgggatgtgagaggagaggtttgggggaaagaatataccttcttgtagcccctcattagccttaggaagagatagcccagtttaagactcaagctaaggaaagcttatccttccttctacccagtaaccacatcaatttactatcagtcatctcaactgctcttgctctttccttagctttaaaccctccacaatctgtgcatttttgcaaagtgttgcagaaccggaaaggaagacaaacttcattttacaactagccctcaagtcttcagttgtgaagccragaattttttttttttttccagagtgaaacggaggaagaaatggaagaggcttggggttgaaaatgacccaccaagccacaactgatttgcttatttttttccccaggcagattttctctgatgtatggctgaggaggactttgggagagcatgcacagggacatatctacttggtaaccactgacttttttttttttttaattgttcagggatactgtttctgcttcggagaatatacataatattttttcaattcccacccccattt

SEQ ID NO: 431114 - DNA, 570 bp, Homo sapiens
tgtggggtccagtgcagagcagagctggtttggggaccagtgaggacagcagctaaaagctcagcagggttaagttggggaatagtagaaaataagcttggaatggtagctggtggagggcttgggcatcaagagactgtggactttatgctgaaggcaatcaaaactagcttttgaagatcaggcaggatgaggtattcagtgggtcagggtagggatgacatgacagcagcatgcagagtgacctgggccaactgtagtcaggaggccagtggcaacttgcttatggcctgtgccagggcagtagcagggacagtaagaaaggatggaagggagacccttatgaagacaaaagaagggatggacttgagttctgggatgtggaaaagaaaggagaaggatgagcagggctgcgcacctgtcagacagcatagcctcttgctatcccatggagatgggctctgccacaatgatccctgcaygccacgcggggtgctccaccacactcagtctctggggaaatatgcagctgctcccacagtggcggcagcagccttgccgaaggacagg

SEQ ID NO: 431115 - DNA, 543 bp, Homo sapiens
aaggattctctgcagggctagagttctgagtccacaggtcctctttgcaaaggtgggacggaatcagggctttgattgtcttattytaatttgtttagtaatgttgccagtctcgagtgtacttgtgggggaaaaaaacctatgtccagaaacttcaggaaaggcagaaaaaggatccttagccttgagagaaatcctgggcatagagaaacagaatagacatggcattgggagtctgattatctcttgtcccaaaggttgaatattgaccacatcccaggccctgggctgaaccttcacatccatcatctcatataatttcatcctcaccatatctcaatgaggtggtatcatttgtcccattttacagatgaagaaacaaaatcagattttctaactcatccagacttaagcgaccagcaaatggatttagatccagaaggctaagttcataaattttaaaacctgacctcgctttaaccatgccacattgccatagggcccagttgtatcaagtgcaatctaggaatctaagtgtttctc

SEQ ID NO: 431116 - DNA, 543 bp, Homo sapiens
aaggattctctgcagggctagagttctgagtccacaggtcctctttgcaaaggtgggacggaatcagggctttgattgtcttattttaatttgtttagtaatgttgccagtctcragtgtacttgtgggggaaaaaaacctatgtccagaaacttcaggaaaggcagaaaaaggatccttagccttgagagaaatcctgggcatagagaaacagaatagacatggcattgggagtctgattatctcttgtcccaaaggttgaatattgaccacatcccaggccctgggctgaaccttcacatccatcatctcatataatttcatcctcaccatatctcaatgaggtggtatcatttgtcccattttacagatgaagaaacaaaatcagattttctaactcatccagacttaagcgaccagcaaatggatttagatccagaaggctaagttcataaattttaaaacctgacctcgctttaaccatgccacattgccatagggcccagttgtatcaagtgcaatctaggaatctaagtgtttctc

SEQ ID NO: 431117 - DNA, 518 bp, Homo sapiens
tatacatactatctcttattatagttatgatacctgccattgttgtgtttcaattccctttttcatttctaatatgtatcattttttaattggtattggcagtggtttaacatttgttagtctttccagaaaatgaatttttgttttcttactattccttttaatatatttatttgctaatttgtcagtttctgctctcatctttattactttcttccttctaatgcacttgagtttattctgttgttctttttctagcatcttaattttgatgctttgttcattatttttcaatctgatttaagcatcaaaggctacraatttccctctgaggactactttggctacattcctacagatttttacagttatttattttctgttatagtttagttctgaatattttttaatttacattattgtttcatcttttaagcatgagctatttagaagtattttttaattttcaaaggatttttgtaactctctctttcctactgtttctaaatcttgtggtc

SEQ ID NO: 431118 - DNA, 620 bp, Homo sapiens
gtggtagtgacaggtgagaaggagataggctcatttctaattcaccttcacactatgggtgcagatttaactaacccaactctttcagaagtatcgtattacagtcaccattgtgctgggccctgaattttgtctcctgttccctcttttctatgagttgctgaaaagtgaagctatattgaccgaatttttaaaaggtactcaagaccaaagccgtcttcatgttctgaatcacattttagattcctccattcactgtgttgagtattccttattacactaatgtagtctactcaggckactgtaacaaaatactgcccactagatagcttagacaacagacatttattttctcaccattctggaggctagaagtccatgatcaaagtgcaactaaattcggtttctgatgagggctctcatcctggctcgtaaatggccaccttctcactgtgtcctctcatggcttttcctctgtgcacacacgaagagagtgctctttgatgcctcctccccttcccataaggacaccactaccatcggattacagccccatccctatgaccttatttaaccttaattacttccctaaaagccccatcttcaaatatattcacatt

SEQ ID NO: 431119 - DNA, 337 bp, Homo sapiens
accttgggcatttgggttatctcagtccttataatattaatctgacattaacrtctgcctacaataatttttcccaaatttcatcagaaatgccttggagacactttaaaaccacagattcccaagctcttttccccaaagatctgattcagtgggtctagggtaggtaccagaacttatttttaaagacgaccctggtggttctgaccagctaaacttctgtcaacaatgcaattccttcttccagcaaagcacacagtggtctctctgccccatctctccctttgggcagccccagcttcagccacactgaactcaggttcacagacacacctgg

SEQ ID NO: 431120 - DNA, 479 bp, Homo sapiens
actattgacaaatcccatctcctctttaataactcgctccaaacactgattgctacaggctcacaccccgcctcamctagacgttgctgcaggcccacatcctacttcacctagaccttgctacaggtccacatcccacctcacctagaccttgctacaggcttacatcccgcctcaccttgaccttgctacaggtccacatcccgcctcacctagaccttgctataggtccataccctgcctcacctagacattgctacaggcccacatcccacttcatctagaccttgctacaggtccacatcccgcctcacctagaccttgctacaggctcacatcctacctcacctagaccttgctacaggcccacatcccacctcacctagaccttgctacaggcccacatcctacctcacctagatcttgctacgggcccacaacccacttcacctagaccttgctacaggtccacaccctgc

SEQ ID NO: 431121 - DNA, 479 bp, Homo sapiens
actattgacaaatcccatctcctctttaataactcgctccaaacactgattgctacaggctcacaccccgcctcacctagacgttgctgcaggcccacatcctacttcacctagaccttgctacaggtccacatcccacctcacctagaccttgctacaggcttacatcccgcctcaccttgaccttgctacaggtccacatcccgcctcacctaraccttgctataggtccataccctgcctcacctagacattgctacaggcccacatcccacttcatctagaccttgctacaggtccacatcccgcctcacctagaccttgctacaggctcacatcctacctcacctagaccttgctacaggcccacatcccacctcacctagaccttgctacaggcccacatcctacctcacctagatcttgctacgggcccacaacccacttcacctagaccttgctacaggtccacaccctgc

SEQ ID NO: 431122 - DNA, 582 bp, Homo sapiens
tgtctaaaaaaagaaaaaaaaagtcaggaaatgcttctgctcaggacatgtggcttagcttcagagacaaacaccctgaccacatccatctcccttccaggaaggaggtggagtgtcaccaacattaaacacctaccatgctcccaggcactgggatggaaacttttgcatcaattatctcgcttaagccctggtgttattattctcttttaacagatggggagactgaggcccaaaggtttcagagaaggttgatagcagaaccagcactcaagttcatgtcttttgatttcagccaaggacaatgtcccatgccacactccttcccaacaaggctagctccaggatatctccttctggttctaatgctgaatgaraaatggccatttagtaacagctggcttgtcctgaggctgttcttttctgggtgtttttcacaacttccctacacctacctggagatgatgctatacaggcagttacatgactcatcttatccaatggtacccactgaatcaggtgacatggctgggacttgggatttctccagacaaaggaatggaatgtgagcccacagggcat

SEQ ID NO: 431123 - DNA, 630 bp, Homo sapiens
gagctataaggggattggggatattatttcaatggctcaaatttatttgagaagttgtctgaagaggtgcaaagtattgtattgttcttctcttgaaacattttcttcaaaacaactctttactagggaattaccctgccaagaatacacaaatacactcttccttcatgttccaaaacattttctgtagcaagcagagacttcagaatcattttgttggcttttgagctgccctcacagtagtrgatgctcaatagatagtctttttttaatttaggtttttaagaagatgatttatctcacagtgaaaaacgttttgaaagaaaaggtggagctagcttctttgctcttactctctggtcctcagttaattcacatctcccgggacccctgctcaaaatcaatgggaagtaataccactttccatccattcaagctattgactgcctgtcttccctgtgctgagcaccatgcattggattcagagttgttcagtctctgcctaggaaattgctcatcctggctgtcatggtgggaaagctttggccaggctgcatatattctttaccttccagaagctttgccattttacttccttccttacaaaagaatagagagcatttcccatac

SEQ ID NO: 431124 - DNA, 593 bp, Homo sapiens
ctttctttgccacatccattcctgctgtctcatgtctagcctcactccaggctcttgttgtcctcagcctgaataatcacaaaatttcctaactcatctctaggtaactggcccacctttgagccagcgggtctcaccacgccttctccccaccagaactctccagcggctccccatcattttcaggatcagactcaaaccccgtaaaagtctgatctctgaaacctcaccatccactcttccttgtcactcttcaccttccctcctactctggtcacactgcataacacgcattctctttccaggtttccacctcactcctcrtgcctgtctatctttgtcatctctgttgccgtgtgtctaaatcctattagctcagaaggtccatgttcgatgccacctcttccaggcagcctcacatgcgggtgcatccttcatccctccccactgtggtcccacagtccgcttccgtggtttatgtcctcactcaactggaaactccttgaggacagtggtcttatctgactacctttcgcatttccatggtatccaaataaagccttgtacacagtaggtgctcaatgaatgcttgt

SEQ ID NO: 431125 - DNA, 612 bp, Homo sapiens
ccgtctcaaaaaaaaaaaaaaaaaaaaaaaaagaagtctgtattgatagctttgttttcctcattgagctcaggaacttatttggaaagagttttatgaatttttaagtgattatggatttttctttgttcttttcttattgatgcctagtttatttgtactgtgaacagaaaatgtggcccaacagtttttgcattgtgatagaatttatggggattttcttatagcctamtgtaaggtcaattttgtaatagtccatgggcacctgtaaagaagtttgcattccttgtttgaagactacagagtttcatataatatacacactcataatattttcagatcctttttatcttgatcttgatttcagggtagtatattttattttgtctctttcatgcttttggacataaagtattataactgtcatatctttattttgtaatgggctcattatccatgttttaaatatgatatttggattttgtattaggtctctataaaggactactgaaaactctctttgtttggtgacaacaccaaaagaaaaacataataaaagaggggtcttcaacaagccccttttattttctactcaagctcatgttaaataat

SEQ ID NO: 431126 - DNA, 421 bp, Homo sapiens
acagctataataatgaaggcagagactgacttccaacatgacaatgtgagaagctccactgatatgctcccttgtcaaactggtgaaaattatttttggaactacagacatttaatagcttctagaaatggtactaaggacaaaaarcaaatgaagagacatctattcaagaaaatctacaaaaatttggtaagaaggaaaactttgtgatatttgaaccaagattactccctcctttctgtcttcccaggtcagtgatgtggagactccactccacaatgctgtagccaagaacacagagctccctctcctcccagctgctagtcagagggctttcttcctgggagaagcaggacaaacattttctgccttgcctccagctaccttttgctaaggctgtcctgggcaaatatggtcccaa

SEQ ID NO: 431127 - DNA, 501 bp, Homo sapiens
atgtccttttatatggaatgcctcaattacacagaaaattattagattctctgagtagttcttaaagcctccacatggtcttcacgaatgatttatacccaagtgctttcctgaaggagcacgtgaaactcacatggggctgtgcttggaggagcagaggcgaggccagagtccggacataagcatgctgaacaggtcaaacaaaacaagggcgatgtaatgttgtacttaaatacttaaagaaacccacatctgttttctcgatttcaaatggcatgaataggtttgcctttcagatactaaaagaaaatgtggccttttacagaacgtatgttcagttggaggtatcatcttgacttctcttctggtcatggcttgttacagatttggcacttttcacttgacytgaaaggaaacagattttaaaattacatttaattagtttgcaatatgaaacaaaatgaagccagtttttaagacaataagaatggaataaattag

SEQ ID NO: 431128 - DNA, 578 bp, Homo sapiens
ttattttgttccctaaaaagtaaaatctagaaaatagcaacccactgcaagaagagttctatactaaaacattttcaatcattctctcttctcttcacatggtgtactctttcatgtacacatcatcggaaaacagactgataaatgcaaaccctgtgtgaaaggcacatggcactaatattgctcacacctgctacacctccttgggagccaagggaagccttttctgcaatctccccattttgatagaaacttatcacaaatttttttatagcaaaatatttaaaggtctctttccctgctcttcacttatctactaggaaggtayagaattaaaaagctttttttcccccagctgtgatcaagatgtattaaaagaatatgaaagagcatctgggttattctagaagttctgtgatcaaaacatattaaaaaaaattaaagcgcatctgggttattctagaagttcctgggctttatacttggatatttacagaggaagttgaacttcaagttctgccactcttcaaaatgggtgacaggagaggacgtgataggacagttaaaaaaaaattgat

SEQ ID NO: 431129 - DNA, 579 bp, Homo sapiens
gaatagctttcctaagagtaccttctactctggcattcttcctgtgtttatgacccctttccttttcagtctcctctatgaactctttttaaccctttaatgttggtgcacctcaggacaattaactctgtccactgttcttattttatagtctctccttctttagtcccagctacrctcatgattttaacactatgcatagatgctctacaaatctgtaatcttccttccatacctttcaacaccagctctttagactcatgaatccagtggtggctagacagcttctcctttcactctacctcaaatccatattgaactcatcccaagcctactgttatattccaagtgttagtgaattagaccattggttgctggagtcagtcctcttcctctatccttctccaagctctatcaatcttaccttctaaatgtttgtcaaatacacccctttccattcttgtgaatcttaatttaggccgtcataatctcttgtccagacgataactttcaattggtccccttgtctccaatatttccattctcaaattatagtgacttactaaaagacatgtgact

SEQ ID NO: 431130 - DNA, 550 bp, Homo sapiens
ccctctgaaaaaaggtattccctcccccttcctctcttcctcctctgagaggaaacagctcagtgtagagggtaatggtagactttggaaccagcctgatctgggtgtgaaaccaggtgccatcatgtcttattctgtgtgaccttgagtcacatgaactctctgagccttagtttcttcaaatgagaaaggagtgaggccaataatatttagcggttgagggagttaccaatataaatgctgcatgcctggcacaacgcccagaacatagtaggtgctcacaaaatggcaaatgttctcattccattgggccacagggccatgagggcgtgggcctagtctggttcataggtatatcctgggagactagcacagtgcctggcacttgtagggacatatgtgcatgttcattaattagttatttggagagttactcattcatgtattaattccttcatgcaacaaaaattcattgtgggcttacygtgcttggcacagtggggccagccctcagaggcttatatttttgtgagagtgaatcttaaagact

SEQ ID NO: 431131 - DNA, 588 bp, Homo sapiens
cgggtacagtggctggggagggcagatggccccaggagccagaacatgggatgcaccctggctctgccaggcaggcggcatcccttagacctacactgctcttgttgakccagggagcggtctgttgctttgaattctaaagacctcccgtacagcctaataagaatcattcgtgaatagtcctacccagctgcaaactgaaatgcaagaggagaccctgtgtatcaatggactcagaccttgtcccctctctgatcctcgcctcagctgccctgtgctgccctggctcaccagccagtggctcacaacttcagggatgaggggaaggaataatttggagaagtttcctggaagaggcatttggtatggtcttgacagagaaggaaggatgttccagagacaagaagtggcacatggccaagagtacagaagcccccactgcttgctttccaggctcttgttcccagggttagtgactcctaacttcctgtgtgcaaaatcccagcccagaccttcctcctgactccagaccccaagtcttgctactttcgggcttctctaagtgaaaatctcagaagtgcctccaac

SEQ ID NO: 431132 - DNA, 588 bp, Homo sapiens
cgggtacagtggctggggagggcagatggccccaggagccagaacatgggatgcaccctggctctgccaggcaggcggcatcccttagacctacactgctcttgttgagmcagggagcggtctgttgctttgaattctaaagacctcccgtacagcctaataagaatcattcgtgaatagtcctacccagctgcaaactgaaatgcaagaggagaccctgtgtatcaatggactcagaccttgtcccctctctgatcctcgcctcagctgccctgtgctgccctggctcaccagccagtggctcacaacttcagggatgaggggaaggaataatttggagaagtttcctggaagaggcatttggtatggtcttgacagagaaggaaggatgttccagagacaagaagtggcacatggccaagagtacagaagcccccactgcttgctttccaggctcttgttcccagggttagtgactcctaacttcctgtgtgcaaaatcccagcccagaccttcctcctgactccagaccccaagtcttgctactttcgggcttctctaagtgaaaatctcagaagtgcctccaac

SEQ ID NO: 431133 - DNA, 537 bp, Homo sapiens
cagaaaacatcacagcttagagttgctctgaagatggaatctctatctaccctcttgctcagaccaaaatcttaggaatattccagaatcctctctatgttccacccccacacccacaccatcagtcagccctgctgagcataccttaayccaagcactcctctttggctcctgtgctacctccgtggcccaagccccagtctccttcacccggtgtctccaaaggtctaactgagctccctgattccactcttgcccccacagccactcttcacacagcagctagagggatctgttaaaatacaaattagagcatgtctctcccctgcttaacacccccctaaatcttctcatctccctttaaataagaatcaccctcctgtcctggacctgcagagtctccgtggccagtctctgctggtgcccttgattccttcctcaccatgctccagccactgtggcccaactttctggtcctcaggcttaccaagttcctacctcagggctcttgcattcacctatcacctcccccgagag

SEQ ID NO: 431134 - DNA, 537 bp, Homo sapiens
cagaaaacatcacagcttagagttgctctgaagatggaatctctatctaccctcttgctcagaccaaaatcttaggaatattccagaatcctctctatgttccacccccacacccacaccatcagtcagccctgctgagcataccttaacccaagcactcctctttggctcctgtgctacctccrtggcccaagccccagtctccttcacccggtgtctccaaaggtctaactgagctccctgattccactcttgcccccacagccactcttcacacagcagctagagggatctgttaaaatacaaattagagcatgtctctcccctgcttaacacccccctaaatcttctcatctccctttaaataagaatcaccctcctgtcctggacctgcagagtctccgtggccagtctctgctggtgcccttgattccttcctcaccatgctccagccactgtggcccaactttctggtcctcaggcttaccaagttcctacctcagggctcttgcattcacctatcacctcccccgagag

SEQ ID NO: 431135 - DNA, 601 bp, Homo sapiens
acttttctgctgaccttgaagaaggaagccatcctgattttacagctgtaaggaaaccattctgccaccaatcatgtgaacttgagagaggccctcaggtctctgataaaacctcagccttagctgcccctggatgacagctttgtgagacccttagtagagaacttagytcagccatgcctggacttctgacccatggaaactgtgcggtagtaaatgtggtttaagctgctatgtgcgtggtgattttttttatgcagcagaaagaaagctgaaacagttagtgtttaagagatgttcatgcttgtggatatgatacccctctgcccacacaaggccctcgccatgctgtgttgtagctgcctatttatctcgactccctgctgacctgtgaccttcccacacaggtgcccagtaaaggtgagcccctgctcaattttccagatcagataacatgtgcttccctcgtggtcacagtgagatgatgtctggaaatagcaacctgctgatctaggtggagaggaaaggcgcctgctctgaagactatggatgcttctctttgtttattctgagcctagataaaaatgccacagagaaggcg

SEQ ID NO: 431136 - DNA, 601 bp, Homo sapiens
acttttctgctgaccttgaagaaggaagccatcctgattttacagctgtaaggaaaccattctgccaccaatcatgtgaacttgagagaggccctcaggtctctgataaaacctcagccttagctgcccctggatgacagctttgtgagacccttagtagagaacttagttcagccatgcctggacttctgacccatggaaactgtgcggtagtaaatgtggtttaagctgctatgtgygtggtgattttttttatgcagcagaaagaaagctgaaacagttagtgtttaagagatgttcatgcttgtggatatgatacccctctgcccacacaaggccctcgccatgctgtgttgtagctgcctatttatctcgactccctgctgacctgtgaccttcccacacaggtgcccagtaaaggtgagcccctgctcaattttccagatcagataacatgtgcttccctcgtggtcacagtgagatgatgtctggaaatagcaacctgctgatctaggtggagaggaaaggcgcctgctctgaagactatggatgcttctctttgtttattctgagcctagataaaaatgccacagagaaggcg

SEQ ID NO: 431137 - DNA, 601 bp, Homo sapiens
acttttctgctgaccttgaagaaggaagccatcctgattttacagctgtaaggaaaccattctgccaccaatcatgtgaacttgagagaggccctcaggtctctgataaaacctcagccttagctgcccctggatgacagctttgtgagacccttagtagagaacttagttcagccatgcctggacttctgacccatggaaactgtgcggtagtaaatgtggtttaagctgctatgtgcgtggtgattttttttatgcagcagaaagmaagctgaaacagttagtgtttaagagatgttcatgcttgtggatatgatacccctctgcccacacaaggccctcgccatgctgtgttgtagctgcctatttatctcgactccctgctgacctgtgaccttcccacacaggtgcccagtaaaggtgagcccctgctcaattttccagatcagataacatgtgcttccctcgtggtcacagtgagatgatgtctggaaatagcaacctgctgatctaggtggagaggaaaggcgcctgctctgaagactatggatgcttctctttgtttattctgagcctagataaaaatgccacagagaaggcg

SEQ ID NO: 431138 - DNA, 520 bp, Homo sapiens
tgccctgtcccatgtaatgcagctcaccactctctttccctgaccctgyttttgttctgcatgccatttatcccaatctgaaattattttttgattggcttgccccctggctgtctccacaccagaagtcaacctctacaagggcagcggctttgttgcattcctgctggatcctagcagcgtgggcataggtcaaatgaatgaatgaataaagctttgtctggcaacttgactttcggcccctttccaaatcctgatccccacgtgacagaagccctctgggtctcaggaggtcacaatggtccacagtgaggaccctaccctgctcctgcccccagcccactcttaccatccctggtgcctccagggctgtgctgactgtcgtcttccaactcaagctggcctcttgccccaccctatattcttcctcaggtggacctcctgggaatccccagaggcccacccccatgggatgggtctcggcctcagaccacctcctctgtgctggaaactgtctttc

SEQ ID NO: 431139 - DNA, 604 bp, Homo sapiens
ggatgcagagacgggagaaaccagcagtaagcacagcacagggaataagtccagtggccaaggaacgaggtggaatggcatgagcttagtggaagtagctcacctgctctggggagacaagggagaggtcagagatcacttcccgtaagaaatgatgcaagacccaaatcttacaggacaggaaacctacatggctccctgaacttccagggagtttcctaatccaargagtccagccttgagcctctggtcttgactccagattctgccagcccaccagcagtgaagccttcttgactgcaattctaggccaaccttgatctcacctgcccatccctagaagcaaccatgaaaattttctgccctgatggttgcaaatccttgaaggcctggtctacataaagtagatctttgatccaggacgtaattcccaattatgctgaggcttaaatgggaatcacatgtgccaggaggctggcatgtgagggagacactcagctagtgaagaaaccttgttgaccttctcaggatcttgggttctagggggtttgttgttggggcttatgtggcaactcctgtaaagtgataagaatcttcattttat

SEQ ID NO: 431140 - DNA, 578 bp, Homo sapiens
ggcagtgggatgaacagggcttgagagaacagagaaaagaaaaaggggaatgtggcccagcccttgctgtcctcgaggctaagccaggtccctgtgatactttgacagcacagtgctgctttgtggctggtgccattagagttcatagtaattcatttatttgatgattaattgattcatagttttagattcaaccacactgtggcaggcttaataatactcctcacccccacccaaagatgtccatgccctgatttccagaacatggaaatatgctgctttacatggcaaaagagactacagatgtcattaagttaaggatgagrtggggaggtcatcctggattatcctgatgtgtccaatgtaatcacaagtgtccttataagaggggggcaggaggattggagtcagtaataggagctgtgaccgtggaagtaggagatcagagtgacgggaggacggggccataatccaaggaggtggcttctccgaagctgggaaaaggaaggaaacatattctcccctagagcctccagaaggaatcggccctgccaacaccttgactgtagctcagtgag

SEQ ID NO: 431141 - DNA, 590 bp, Homo sapiens
ctttgtgtgtgttttcatcaagaagtaatccttacagccacgaaaaatgtccaataacatttctctcccttggcaaacatccccggtatatcaaaggctcaaatacacaatgcagcggctcacagggacaggtgttggmgactgctttatagcagcctgaagaactgtctgttggtcacatgggctcgcacaaatctcacatggttccagaaactgataacccagcagcatacagaggagattcctcccactgcgtgctcattctgcctttcttctggaaatgctcctctgagccaggcatagggccaagcactagggacacagacatgagccagtcaggctgtctgtccccaaggagcaagttttactgaatgctgtgttaagtgctttatatattgcaaaagtcccagaaggcactccaacgatccccattttacagatgaggaaacaaacagagacctagagaaatttaagtaacctgcttgatgtcccagggctagtcagtggcagaggtgctttgcttgcatggaactgtgagtgtcccaaagtcagaggctgagagttactcatctcagcacagggctcgacac

SEQ ID NO: 431142 - DNA, 590 bp, Homo sapiens
ctttgtgtgtgttttcatcaagaagtaatccttacagccacgaaaaatgtccaataacatttctctcccttggcaaacatccccggtatatcaaaggctcaaatacacaatgcagcggctcacagggacaggtgttggagactgctttatagcagcctgaagaactgtctgttggtcacatgggctcgcacaaatctcacatggttccagaaactgataacccagcagcatacagaggagattcctcccactgcgtgctcattctgcctttcttctggaaatgctcctctgagccaggcatrgggccaagcactagggacacagacatgagccagtcaggctgtctgtccccaaggagcaagttttactgaatgctgtgttaagtgctttatatattgcaaaagtcccagaaggcactccaacgatccccattttacagatgaggaaacaaacagagacctagagaaatttaagtaacctgcttgatgtcccagggctagtcagtggcagaggtgctttgcttgcatggaactgtgagtgtcccaaagtcagaggctgagagttactcatctcagcacagggctcgacac

SEQ ID NO: 431143 - DNA, 590 bp, Homo sapiens
ctttgtgtgtgttttcatcaagaagtaatccttacagccacgaaaaatgtccaataacatttctctcccttggcaaacatccccggtatatcaaaggctcaaatacacaatgcagcggctcacagggacaggtgttggagactgctttatagcagcctgaagaactgtctgttggtcacatgggctcgcacaaatctcacatggttccagaaactgataacccagcagcatacagaggagattcctcccactgcgtgctcattctgcctttcttctggaaatgctcctctgagccaggcatagggccaagcactagggacwcagacatgagccagtcaggctgtctgtccccaaggagcaagttttactgaatgctgtgttaagtgctttatatattgcaaaagtcccagaaggcactccaacgatccccattttacagatgaggaaacaaacagagacctagagaaatttaagtaacctgcttgatgtcccagggctagtcagtggcagaggtgctttgcttgcatggaactgtgagtgtcccaaagtcagaggctgagagttactcatctcagcacagggctcgacac

SEQ ID NO: 431144 - DNA, 581 bp, Homo sapiens
agggctagtcagtggcagaggtgctttgcttgcatggaactgtgagtgtcccaaagtcagaggctgagagttactcatctcagcacagggctcgacacaaagcacactgcaggagaatacyggcaagtgtttgagcatgagcttgaaagtcagataaggcccatctcaggatccaattcctacattgcacattaaagcctccaagtcccacagaacggaaggagtatctccaaggaatgaccttcttaggactggagcttcctggccccttctacaagagcaaactcagatgactgcacacttttcatctttgagtgtccctaataaggcaaatgaagagggtactctatggacggaacagccaccctgagtcagccatgatgccagatgcttaatgcctccacccagttcacctcacaacactctgaagccaggcactttccactgcacaaagctctgctcagactgcccctggctgggcaagctcccaccctttccttcaggaggctggccccaggctaggtgtaggaaggaaggctgggaagaatcagtgtgtcactctccagggtacatgcccagca

SEQ ID NO: 431145 - DNA, 581 bp, Homo sapiens
agggctagtcagtggcagaggtgctttgcttgcatggaactgtgagtgtcccaaagtcagaggctgagagttactcatctcagcacagggctcgacacaaagcacactgcaggagaatactggcaagtgtttgagcatgagcttgaaagtcagataaggcccatctcaggatccaattcctacattgcacattaaagcctccaagtcccacagaacggaaggagtatctccaaggaatgaccttcttaggactggagcttcctggccccttctacaagagcaaactcagatgactgcacacttttcatctttgagtgtccctaataaggcaaatgaagagggtactctatggayggaacagccaccctgagtcagccatgatgccagatgcttaatgcctccacccagttcacctcacaacactctgaagccaggcactttccactgcacaaagctctgctcagactgcccctggctgggcaagctcccaccctttccttcaggaggctggccccaggctaggtgtaggaaggaaggctgggaagaatcagtgtgtcactctccagggtacatgcccagca

SEQ ID NO: 431146 - DNA, 539 bp, Homo sapiens
catgcacaggatcaggggcagcagatgattgaggacttggtaaaatgggtttaaacaaaggctgatggatccaaaagggggtggttggggataaggaaacaaaatctcagaacccacctggggattcccagcctagggtgtaactttagccccggggatctggcctctggcttcatttctccgctggctccaacccaccattgcagcactatctcagcaggatgtgggatgccctctctgccttcctggagcaccatctgacccagggaggttcacrgaatctactccagctcagagcagggctgtggatcaggaatccctgacccaaggcagaagcaatggaggcaacaccaccagggcatgatgcgagtggtccaggagtctccttattccaaatctttcccgctgccccctcaaaatgcctgagattccaccatcagagaaccattcttttgatgaggcctctggctctgccacaatgtgacactgggcaactctgaactgctctgaccctcatttataaggtaggacactaatac

SEQ ID NO: 431147 - DNA, 545 bp, Homo sapiens
gccagctcctgctcctgctgctgcctctgcctgagatgcccttccctgacccaacccttccacatgctgaccctgtggaataagagcccaagaaacagaatctacagtggtgggactggaagcctcaactcagatgtcccctctccccagccttcctcttgggtcatttgttttttggtcaggacataaaaggatataaacattaaattagaaaaaaatcgcaacagcttctataaactactgaaagagtcaacagaagcgggcaggggtcccggtcggggctgacacgattcacaatgtgggaagggcaggtgtgaggtggagcacacctctaaggaggactaaggcttgctgagagctcwtctgggccagccctgtctaaaatctttaagtgtgttgtttatccttgcagcaactcagcaaggtggagactttattattcccattatatggatgaggaacttgaggaagaaaaaggttaagcaattttcccaaggtcatgcaggtactggggaaggagatgagattacaacacaggaagtctg

SEQ ID NO: 431148 - DNA, 545 bp, Homo sapiens
gccagctcctgctcctgctgctgcctctgcctgagatgcccttccctgacccaacccttccacatgctgaccctgtggaataagagcccaagaaacagaatctacagtggtgggactggaagcctcaactcagatgtcccctctccccagccttcctcttgggtcatttgttttttggtcaggacataaaaggatataaacattaaattagaaaaaaatcgcaacagcttctataaactactgaaagagtcaacagaagcgggcaggggtcccggtcggggctgacacgattcacaatgtgggaagggcaggtgtgaggtggagcacacctctaaggaggactaaggcttgctgagagctcatctgggccagccctgtctaaaatctttaagtgtgttgtttatccttgcagcaactcagcaaggtggagrctttattattcccattatatggatgaggaacttgaggaagaaaaaggttaagcaattttcccaaggtcatgcaggtactggggaaggagatgagattacaacacaggaagtctg

SEQ ID NO: 431149 - DNA, 512 bp, Homo sapiens
cctggagctttcagtctcatgaaggagacaggtgctcatacagcaatgacactgccaagtatgtaatcatagagccagactggcccatgagggaagcaaaggcatttgggctggacaggccatcagaggagaacccctgggacaatgagtctggagctgagagctgaggaatgggcacagtgaggttctgctgggatggggctgcaggataagaagcacccccaggtggaaggggtcccctgtgcagatgcttcagagggagggctgagaaagggcagagagggcagtatgggaggcctgtggaagtcacactgggtgccctgatcagagtggctgtaagtctgctgatttgtgccgagggcatgggtgaaggcagagaaggcaatttagagctaccatagctgtccaggtgagacaagatggaacctcaggctagtgggtgacaggayggtgaagaaaagtggaaagtggacagatgtcagaaacattcagaaggcaaacagaagtgggtg

SEQ ID NO: 431150 - DNA, 589 bp, Homo sapiens
tctcattggcatctagccagcttgctagagcatttggagccacagctttacctagtaatcaaggtttttttttgtttgtttgtttttgttttttgccagcgccattctttgtacatatactatattttcttgattcaagcacgccatcaataataacatgtgtcgtcaatttaattagggctttttgggaaaaagagagaaagaaaaacacagcataaactgcatttgttgatagtaagatttgttttgatttccaaaaggttaaactattggttagggtgtaggaggggagggagtacatcttgcaattgagratatatgaaatctccctagggggctttttagaacgagatggcctgaggtagggtccaagtattcctatggcctggtcaaatagcatcttaattccacctaatctattatttccaactctctcctacatgtaggagcttgatgttgttctgagagtgttccccatctggctctggacttgccaatcctcactcgctctccttcttcctcagcaattacctcttctcaatcctttctgggctgggctgagccctgacctgggggtcattcgacaatt

SEQ ID NO: 431151 - DNA, 589 bp, Homo sapiens
tctcattggcatctagccagcttgctagagcatttggagccacagctttacctagtaatcaaggtttttttttgtttgtttgtttttgttttttgccagcgccattctttgtacatatactatattttcttgattcaagcacgccatcaataataacatgtgtcgtcaatttaattagggctttttgggaaaaagagagaaagaaaaacacagcataaactgcatttgttgatagtaagatttgttttgatttccaaaaggttaaactattggttagggtgtaggaggggagggagtacatcttgcaattgagaayatatgaaatctccctagggggctttttagaacgagatggcctgaggtagggtccaagtattcctatggcctggtcaaatagcatcttaattccacctaatctattatttccaactctctcctacatgtaggagcttgatgttgttctgagagtgttccccatctggctctggacttgccaatcctcactcgctctccttcttcctcagcaattacctcttctcaatcctttctgggctgggctgagccctgacctgggggtcattcgacaatt

SEQ ID NO: 431152 - DNA, 402 bp, Homo sapiens
ctgagtactaataaaaagatgtaggttaagtcagtagacttgcgcccatctgaaggtggtctctagttttctgcctcagggctctatcatgatgctgttctgttcaacagaactaaggagaacaataggttcacgttcaaaaactctttctcacctaaacacacagatgggcagcttctaataaagttggagctttgtaggaatataagtgaagtcttacgatattmatttattcattaatagctttgtatttatctgtgtggttgcttgtttaacatctcttcccctactaggctgtaagttccatgaggacagggtgtgtgttgttcatgactatattcccagtgcctctcaagtgctttgcatacagtgggtgcaccataactatttgctgaatgaatg

SEQ ID NO: 431153 - DNA, 469 bp, Homo sapiens
tataagtgtattcttttttttaatttttaatttttgttgagtacataggtgtatatattcatggggtacatgagatgttttgatacaggcatgcaatgggtgataatcacatcatgaagaatggggtatccatcccctcaggcatgtatcctttgtgttacaaacaatccaattatactgtttcagttattttaaagcataaattaaatgattattgactatagttaccctgttggggtatcaaatagtaggtcttattcatgataatgattttttcwacccattaatcatcctcccctcctccctccccactcacaacccttcccagcctctggtaacccataagcacgttctgagtgacgagatgagttaaatgaaaaggagtaatttggacatcaaggcacctgagtgatagaaccaggtctgctactgacagtgagactataaacatcgctttgagtggctagaa

SEQ ID NO: 431154 - DNA, 469 bp, Homo sapiens
tataagtgtattcttttttttaatttttaatttttgttgagtacataggtgtatatattcatggggtacatgagatgttttgatacaggcatgcaatgggtgataatcacatcatgaagaatggggtatccatcccctcaggcatgtatcctttgtgttacaaacaatccaattatactgtttcagttattttaaagcataaattaaatgattattgactatagttaccctgttggggtatcaaatagtaggtcttattcatgataatgattttttcaacccattaatcatcctcccctcctccctccccactcacaacccttcccagcctctggtaacccataagcacgttctgagtgacgagatgagttaaatgaaaaggagtaatttggacatcaaggcacctgagtgatagaaccrggtctgctactgacagtgagactataaacatcgctttgagtggctagaa

SEQ ID NO: 431155 - DNA, 574 bp, Homo sapiens
cttccttccttcctgcctgcctgcctgcctgcctgccttccttccttccttccttccttsctccttccctccttccctccctcccttctccctttccctttcctttcctttttcttttgacagggtctcactctgtcacccaagcttgaatgcagtggaaaaatctcagctcactgcagccttcaacttctggacccaagggatcctctcacctcaacctcccgagtagttgggactaaagatgcatgccaccgtatctgggtaatgtttttactttttgtaaagacagagtctcgctatgttgcccaggctggtctggaactcctgcaatccttcttcctccacctcccaaagcgcaggcgtgagccactgcacccagaccaagatttcttttgggagggatttgttttcttaaaaagcaagtttggaaaccagagcttcacacttgagtgtcttgctgctttgagtgtgatctgagaagcagctgcatgggcaccccctgagagcttgttagaaatgcagaactcagcccccaccccacaccgagtgaaatagaacctgttgcactttcaag

SEQ ID NO: 431156 - DNA, 541 bp, Homo sapiens
cccacggtggcctcccaaagtgctgggattacaggtgtgagccactgcacccggcccagagacacagtttttagaaatgttatcatacataacacataaagtatgtcagtacaactaagtattcgttaataataatgagcaggacccttgactttggtcaaagatgtttgtgactataaacatgttttttaaaagccaggtgattattcagtcataaagacaataaaatattgatatattttataacatggatgaacttttaaaacactgtgccagacacaaaaggctacatgtataattctatttatatgaaatatccagaatacagaaatccagagacaaaaagaaaaaggtttccaggggcttgggggaatagggagtgactgcctaatgrgtatggggcttccttttggaagtgttgaaaatgtttggaactagacaatggtgatggttgcacatgatggcgttcaagacacactaccccaaaatatggcatctcggaatattgaatattttaagctgaagcaatctgaggaatggc

SEQ ID NO: 431157 - DNA, 647 bp, Homo sapiens
tatgatttgtttagttccattaaataatttcaaaatattgaatttcaatgataccaagaacaacatcaaaatacaccaaccagtgaattatataaagagaatctcataatgattctactaggaaaaatattgaaaactgaagcccaattaaaaatatgaatattttcaccaagtgtggtggctcacacctgtagtcccagcactttgggaggctgaggcaggaggatcccttgagcccaggagttcgakaccagcctgggcaataacgtgagaccctgtctctacaaataatgtaaaaattagccaggcatggtggtatgtgactatagtcccagctacttgggagctgaagcagggggaacacttgagcccaggaggtcgaggttgcagtgagtcatgtttgcaccactgctctccagcctgggcaacagagtgagaccctgtttcaaacaacaacagcagcaacagcaacaacaaaacaacaaaatgtttcaattagtacagtatgttataaatgatgcccaaataacttacttttttactaaatattaaaatgattgaaaaagatttaagcaggacagttcagtacataattccattaattacaaaagattatatttaagtgatcttttaaaagggatttaaat

SEQ ID NO: 431158 - DNA, 553 bp, Homo sapiens
tatatttcctccttttatattaaayaactaaaatgataagatacaaattttctccaactaaatctataaattcaagacaaatctaataacaattcaacctttgttttatttttagagaaactcaacaaactgaatctcaaattatgtggaggaataaaagtctgtaactagctaatcaaccttaagaaaagaatttaaataagggagacttgcccactacatataagaacatactacagagccatagtaataagaataatgtgatgatacaaatagaccagaggtcagccaatgttttctgtaaaagggccagacagtaactctgttagactttgcaggccatatggtctctgtgtgaattattcagttctgctgttgtagtgcaaaagcagccatatgtaaataaattactgtggctgtgttccaataaattaatttatgaataccaaaattcaaatttcatatgtttttcacaaaacattcttcttatttctactttctaccactaaaaaaatgtaaaaaccatttttagctcatgggccatacaaaaaca

SEQ ID NO: 431159 - DNA, 563 bp, Homo sapiens
gtggtttaagtttcatgcctgtcccgtgtctactggataaaactactattgttatgctagtcttttaatatatttattacattttaggtggcattctttgatcctggcatacctaaatctgggaaaaacaaccactactatactccttttgccaagttttttccatttgctttaagatttttacattatttccatatatttccctctcttagtggtttagagagactagaatattatttaataaagaaacttacatattcctttagatacctatatatctattgcctctatatgagatggcttgatttaatcagaaaaattagaatctttcttgtctatttctaaaacaaagtataactttcaaccatctccaaagagccaggtcaaaatatcaggagtgactacatattctgatccttgtgccttaagattgttttactctatataatactatgtgagaaatggaaaatatagccaattatataatatttatttctatgractaaaaattttcatttaatccatttaatttacatatggtctttagacattgttttagtcaa

SEQ ID NO: 431160 - DNA, 604 bp, Homo sapiens
cttccccttctttgttcatactcatttattttcatgtttgtcttttctattatattgtgaaccctctgaagacagagactactttttaaattctccttccatttaagctcttaataaatgttgagtgcatgcttgcatgaatacaaaaaaggcaacatctcaggaaattttagtgggaatcttctaaactagatttcacttggagagaaacaatgtctataaaaaawtagactcatagaactagaggtcctctcagtaattattaagcagttatttcagactttgagttgggattcattggtcagcggatcataagaccaatttagtgagtctcattcaggattatttttagagcaaatgaaatagaatagaaaaaaaattggggagggactgcttaatagatatggagtttctttttgggtgattaaaatgctctgaaattctatcatggtagtggttgaacaacgttgtgaatctactaaagacaactgaattgtatatttttaaatgactaaaatagtgaattttatgttatatagattttacctcaatttaaaaaaatcagtacatcatcatcagtaagaataaatatggttttacagaa

SEQ ID NO: 431161 - DNA, 593 bp, Homo sapiens
aaattctccttccatttaagctcttaataaatgttgagtgcatgcttgcatgaatacaaaaaaggcaacatctcaggaaattttagtgggaatcttctaaactagatttcacttggagagaaacaatgtctataaaaaaatagactcatagaactagaggtcctctcagtaattattaagcagttatttcagactttgagttgggattcattggtcagcggatcataagaccaatttagtgagtctcattcaggattatttttagagcaaatgaaatagaatagaaaaaaaattggggagggactgcttaatagatatggagtttctttttgggtgattaaaatgctctgaaattctatcatggtagtggttgaacaacgttgtgaatctactaaagacaactgaattgtatatttttaaatgactaaaatagtgaattttatgttatatarattttacctcaatttaaaaaaatcagtacatcatcatcagtaagaataaatatggttttacagaactttttaaggttgaatatatgtatgtttgtgtgaattttgtcatgatgtaaaaatgtatttcttactgtgggtcaa

SEQ ID NO: 431162 - DNA, 558 bp, Homo sapiens
tctttagagaaatgtctattcaagttatttgcccattttttgaattgggttgccttttttttttttttttggttgttagtaagttgtagaagctctttaaatattctagatattaatcctttaccagaaagacaatttgcagttatttttttccatccgttgggttgccttttcactctctttatagtgtcccttgatgcacagwtgtttttttttttctgatatagtctaatttatctactttgttctcttgttgactgtgctcttggtatcattccaagaaatcattgcaaaatcaaatgttatcaagcttttcctatttgcttctaataattttatagttttacctcttatgttcaagtctttgattcattttgagttcatggtataactcatgatgtaagtttttttgtacttgatgtaagttaagggtctaacttcattctatcccatgtggatattccatttttccagcactgtttgttgaaaagaccatcctttcttcattgaatggtcttagcactcttgttgaaaataatttgatcataaatgagaagg

SEQ ID NO: 431163 - DNA, 558 bp, Homo sapiens
tctttagagaaatgtctattcaagttatttgcccattttttgaattgggttgccttttttttttttttttggttgttagtaagttgtagaagctctttaaatattctagatattaatcctttaccagaaagacaatttgcagttatttttttccatccgttgggttgccttttcactctctttatagtgtcccttgatgcacagtwgtttttttttttctgatatagtctaatttatctactttgttctcttgttgactgtgctcttggtatcattccaagaaatcattgcaaaatcaaatgttatcaagcttttcctatttgcttctaataattttatagttttacctcttatgttcaagtctttgattcattttgagttcatggtataactcatgatgtaagtttttttgtacttgatgtaagttaagggtctaacttcattctatcccatgtggatattccatttttccagcactgtttgttgaaaagaccatcctttcttcattgaatggtcttagcactcttgttgaaaataatttgatcataaatgagaagg

SEQ ID NO: 431164 - DNA, 602 bp, Homo sapiens
actactgttggtaacaaccaaaatgattgctaagagaaactaaccacagtaaataatatttaaggtratttttaatcatatactcccctgctactttaagatgtcttcttgaaaagggaagcatgaaatgtattagttttcttttccttctataatggaaggtgcagattttaaagttacatattggcctgtgagttctagtaatggtggtattttaaaagcacactctttcacttttcagtggcatctttcaaattatttttcacttactgaataatattttttactgaaaatctccttaaatgtctaaaaccagtttacagccatgtctgtgcagtttattttattcacttctctgagtttgttctctgtgtaataaactggccctttggaagctacctggggtaagtaaaagaaggcaagttcagaggattaagtgaacacatttatgtgaaagcaaatgtaccggcacagtcccagaaacatagtggatgtttgccggaatgtagctgaatccaggaaggaagagattccctcttttgaatggaatatgtatgcctaagttttctggtagctattcctccaaccagatacattgctaa

SEQ ID NO: 431165 - DNA, 597 bp, Homo sapiens
tatgtgaaagcaaatgtaccggcacagtcccagaaacatagtggatgtttgccggaatgtagctgaatccaggaaggaagagattccctcttttgaatggaatatgtatgcctaagttttctggtagctattcctscaaccagatacattgctaaggatgcagcaaaatgtggtggtttactctaagctcttctcaacatctatttttaaggaaatatattgacatgatgtggttaagattctgatgaaaaaatgttaagggaagcagagtgaaaactagatggagacacccagagagagtgacctcggagttactctgtttctgcaaaccaacaacgccacagaccaagggaccctcagctcccattcctgcacccacacctccagtttgttccctgtaatgtgagaacctggatctcctatttttgtgattcctaaatatttataatttttcatagttggtgtggaagagtgagctgttactactttaggaaaaggtgagcaggtttctggatgtacatgagtttaaagagaggttgtaactgaaaacatattcttggctttagaatctttgccctctccttgataacccgtgtg

SEQ ID NO: 431166 - DNA, 559 bp, Homo sapiens
tttcatatttctcataatttcatcttgggccacttttagtcctctaattgctatattttaaaagtgaattgtttgtcatgaaattcccatacttctttctacacmaaagaactttttaatctggtcactaaagaataataaagtctaaattttcatataaaaaagtatttgaattttcctcaaagcacagtatggattagtcaataagataatttaagcacagaaataggtatttatgtggccttttttttctaatttcatttaaggtgcatccaggcaggtttataagaaaggtggattcaataggtagcagtatctggaaaataaggcaaataataaagtctataatattacaagtaaattgactagaataatatgtctagtgtcctagctacttataaactggtctgaaaaataaccactcctggacgttaatcacaatgactctctgcttttggagtcattcaacaatgccaagcttggcatcatagaagcaatgagaaaatgagaaatcagggatctgaattctgtgtctggttctacctgcctactagctgta

SEQ ID NO: 431167 - DNA, 527 bp, Homo sapiens
ttctaaattgatactagctttgttcttcctaatttctaaacaacagagttttcttgaatatttctgccatgttttggttgcacttaacttgagattgttcattcatgaagactatttaataaaaatgttacaggggcttcttctttagtgcctttcaactgtgaatatccattgaatgaattgacacacctgggaattgatgactacaaaaggagctctgtagctttcttggtttcatggatattaacatttgaaggagtaggacagagggacaaaaaggtcttcaatacaacctctgggacctcctggcttttaggcctcacagtactaggtgggctgtgttccctcaatgccatttattaatcttgtgattgactgcttggaactaaagcccctctatctcttccttcagatcttattaatgaaattctatctgagggttcataacccagaaaaacatctgttakctaattatttctgttatctaatcatttctgtctacagagccttcttttccaaaagcgaac

SEQ ID NO: 431168 - DNA, 607 bp, Homo sapiens
aagaggatagtcacattgcttcattactaaggagcatactgatttaatctgtttgattttgttatgtttatttggtgtccatcttcctgctgaattcctcaccctcctgcctcgtcttttcacctgctgtgggtcagctgacagccacttttctccgaagtaaatatattgtcaagactgactgtccccagacttcctgtgcactgctcttcctctccagagaggatgggctgttcaacaccaaagggcctaatcataactgacttggaatgtcaacttaatgtagtcaaatggtgtgagggaggtagagaatttcagcagcaaattctctgaggttggtagctcaayatttccctcccactgcaatacttctttttgacatttcctatggtacttgaaccaaaattggggcaaatctaaagtaattcaagaactaaagttttaagagcaagtctaaaccttctacacagcaattcatataagaagatgcccctaaatgactttggatatgaaatctctcatgacagctgtgattacacaatagcaaatctgatgccacaggtgaaaacaggactttttgtgtattgtcacactcgaatgaagaaga

SEQ ID NO: 431169 - DNA, 556 bp, Homo sapiens
gatgcaccctgtatatttactgttcatcatggaactcgtgccactgaaaatttttaagtgactatattcaaaaacagcaggttgcatgacagtttctcagtgaagaggttcaaaaaaggtgagatgctattgctttgtgaatttacaaaggaaagaataatttaactgctcagaattacatgtccggtcactgctttttaatttaaaaaataatagagcatcattagtaatcttgttttctctttgatacataggtaaagggtgttttgtgtctggatgcctaaggtgattccargggaggggatggaagatatgtgacatcttccctgaaatttatattgatatgcaatgctttgtcatttaaaacctaagctaatgttttctacaatccataactctgagtttatctttttggaaacatagaaggggatgacattgaagatgaaatggatacagcaattgctgaatgacagtttgcccaaattagtgcagttaaaatatgctgacgcccctgcatggccaggaagacttctgctccatgcacacaagcaccaag

SEQ ID NO: 431170 - DNA, 556 bp, Homo sapiens
gatgcaccctgtatatttactgttcatcatggaactcgtgccactgaaaatttttaagtgactatattcaaaaacagcaggttgcatgacagtttctcagtgaagaggttcaaaaaaggtgagatgctattgctttgtgaatttacaaaggaaagaataatttaactgctcagaattacatgtccggtcactgctttttaatttaaaaaataatagagcatcattagtaatcttgttttctctttgatacataggtaaagggtgttttgtgtctggatgcctaaggtgattccaagggaggggatggaagatatgtgacatcttccctgaaatttatattgatatgcaatgctttgtcatttaaaacctaagctaatgttttctacaatccataactctgagtttatctttttggaaacatagaaggggatgacattgaagatgaaatggatacagcaattgctgaatgacagtttgcccaaattagtgcagttaaaatatgctgaygcccctgcatggccaggaagacttctgctccatgcacacaagcaccaag

SEQ ID NO: 431171 - DNA, 593 bp, Homo sapiens
atttatattgatatgcaatgctttgtcatttaaaacctaagctaatgttttctacaatccataactctgagtttatctttttggaaacatagaaggggatgacattgaagatgaaatggatacagcaattgctgaatgacagtttgcccaaattagtgcagttaaaatatgctgacgcccctgcatggccaggaagacttctgctccatgcacacaagcaccaagtatcaagcgaccaccaacacrttcccattcctttaggcctccatagctttgcttttgctttctgtttcctgaactaaaaaaaaaaaaaaaagtgtagattgccagccttccctttttcctgcacgctaatggcatgtagtgcctccacccttccctatagtgagattaatgacctgctctgtaactcacattgtgtccttctctctccctttccttaacccttcccatcccgcttcaactcctggccatacagagaatgaacagccttccctcgtttggtttgacagaggaaagttttatttgacttttgaaggtaagtagtgcatagcataccagattctaatttatactcctcctcatccttattt

SEQ ID NO: 431172 - DNA, 593 bp, Homo sapiens
atttatattgatatgcaatgctttgtcatttaaaacctaagctaatgttttctacaatccataactctgagtttatctttttggaaacatagaaggggatgacattgaagatgaaatggatacagcaattgctgaatgacagtttgcccaaattagtgcagttaaaatatgctgacgcccctgcatggccaggaagacttctgctccatgcacacaagcaccaagtatcaagcgaccaccaacacattcccattcctttaggcctccatagctttgcttttgctttctgtttcctgaactaaaaaaaaaaaaaaaagtgtagattgccagccttccctttttyctgcacgctaatggcatgtagtgcctccacccttccctatagtgagattaatgacctgctctgtaactcacattgtgtccttctctctccctttccttaacccttcccatcccgcttcaactcctggccatacagagaatgaacagccttccctcgtttggtttgacagaggaaagttttatttgacttttgaaggtaagtagtgcatagcataccagattctaatttatactcctcctcatccttattt

SEQ ID NO: 431173 - DNA, 527 bp, Homo sapiens
cccagagagcctctgttagaccttgtttttccctaattgctccccaagtcgaattctaatatcatagaggtactgtacatctggtcatgtgctatatgtatatttgtgtgctttatatatttaacaagtaagatttctttcaccttccccaaagaaccaatttttatcccctttggggtgatacttctgctttgagaatgcatgccatgcctgcagctagatctcggatcacaacttcctaggatgtaggggcaaacrtctttaacacagggtagggtttaagaatacaatggaagttagacctggttttcagtcccagctcccctacttactatagagcaaattaccttgagcaagttatttaatttcactaaggtttaatttaaaagagtgtacctcagagagatgttttgagattagaagacatgaggcatgtaatgtgtttagcacagcggccatcgtatacaagtgctttacataaattagcttttgatatatttattcatattcttcatagtgccatgcta

SEQ ID NO: 431174 - DNA, 527 bp, Homo sapiens
cccagagagcctctgttagaccttgtttttccctaattgctccccaagtcgaattctaatatcatagaggtactgtacatctggtcatgtgctatatgtatatttgtgtgctttatatatttaacaagtaagatttctttcaccttccccaaagaaccaatttttatcccctttggggtgatacttctgctttgagaatgcatgccatgcctgcagctagatctcggatcacaacttcctaggatgtaggggcaaacatctttaacacagggtagggtttaagaatacaatggaagttagacctggttttcagtcccagctcccctacttactatagagcaaattaccttgagcaagttatttaatttcactaaggtttaatttaaaagagtgtacctcaragagatgttttgagattagaagacatgaggcatgtaatgtgtttagcacagcggccatcgtatacaagtgctttacataaattagcttttgatatatttattcatattcttcatagtgccatgcta

SEQ ID NO: 431175 - DNA, 611 bp, Homo sapiens
tgctttacataaattagcttttgatatatttattcatattcttcatagtgccatgctatagctgcctgtttccaatgcttgatcaaactctcaccactgtctatgtgaaagtgtttaaaatttggctgtatgagtcttcatactaagacaaagaaaatcctaagtttttagactgaggaaatcaatttgagcaagtgtacattcacttttctttcatttgtattatgactttgtcttctgtcttatgttcatatttaacaatagtatttttgttgaatacatgtgttctgacttggataataaaaagcaagtataatattctcatcttctgagtcaaacattttaggaagttaattcaattgggcattaattttggatgacagtttaggtgctctaggcaaagacccaggttgaagaaaaattctctacaaaacatgaagaaaaatgtcarttgattgtatgttcctggactgagcagaatttgaaaagcaaaaaaatatatatgcacatgacatacatatataaccagggcaagtgagcagagacttatgaagaggaagactggaaataactctaatcctatttacatactcagaaatccagtactctca

SEQ ID NO: 431176 - DNA, 611 bp, Homo sapiens
tgctttacataaattagcttttgatatatttattcatattcttcatagtgccatgctatagctgcctgtttccaatgcttgatcaaactctcaccactgtctatgtgaaagtgtttaaaatttggctgtatgagtcttcatactaagacaaagaaaatcctaagtttttagactgaggaaatcaatttgagcaagtgtacattcacttttctttcatttgtattatgactttgtcttctgtcttatgttcatatttaacaatagtatttttgttgaatacatgtgttctgacttggataataaaaagcaagtataatattctcatcttctgagtcaaacattttaggaagttaattcaattgggcattaattttggatgacagtttaggtgctctaggcaaagacccaggttgaagaaaaattctctacaaaacatgaagaaaaatgtcaattgattgtatgttcctgractgagcagaatttgaaaagcaaaaaaatatatatgcacatgacatacatatataaccagggcaagtgagcagagacttatgaagaggaagactggaaataactctaatcctatttacatactcagaaatccagtactctca

SEQ ID NO: 431177 - DNA, 586 bp, Homo sapiens
aggacctcatcttttaaagatgtcagatgtcatactkctgttaagaatttaaattatttttagtctcaggctgtctacatgtgtacatctgtgtgaccttgcttggtaatgagagtcacagaaaaccgcctttcagaaaacacacagtcacacactggtgactctctgtgccctcttccattcctcagaaccccctcaaagtgtgcatgtcaattgcttcccagtactctggagatgcttttttgtcggaggtccacagactaatggcagcaactcatccttctagggggtatcacaaacacgttatcaggttcctaagataactctctcctgacttctatgctccttgagcaaggtagggaggagggtggcatccagagtcagtcagtgcttggtttgcatcacagttctgttttgattgtttacttgccaggtgacaatggcaaggctattgaatttcttgaaacctccattttctcatctgtaaaacaagggcaagaatgctacttaccttatagcactcataaacttaccttattaccaggattaataattaatataagtaaagtcctttgaatagtggttg

SEQ ID NO: 431178 - DNA, 592 bp, Homo sapiens
cagattacatagcagaaaaaggaagactacattgatattgaaagaattagctgacccaaatagtatattgtttacctcctcaagaagaaagtaggagaataggtaaacatgtcacagtgatctgcagtgtgtttaaatatcagtgaatgtagattcatgagcccaaagccattgtgcaatattattgaaagctcaagtttttttcaaactgcaagtacataagactccacagttccctgggcaggactttaattatacatactttaggtaattagcttataggataaaaataacccacagagtattaaacctgaaatcggatacacaaatttacatgtagatgtttgctgtagtataactytgacatcttttcagaaagaaacatgtccttcctttccccaatactacattcacagaggcaagtaatcccaacaacttccttcacacaatgggttacatacctctagcctcatgaatggtgacctcacactggggctaccttgtgcaggctttagtacctctcagggtccccagtccccttaaatgaatgattactgacgttcacatggggctcctaggtgaaaatacccac

SEQ ID NO: 431179 - DNA, 635 bp, Homo sapiens
attctggaaaaaaaaatgccacaaggtacattaattagtaaggaaaaaaaagtgagcaccaagatttaagataggaagggataggctaactctactgtttgtgcaaatgaagtagggtttatgatcaggactgcccttatctataaaagtgctaaacccctagacttgaagggaaaagataaacaccagctgccagtcttttggttgtacaacaagarggcctggacagtgagaactgttattctaattggtttcatctgtgctttttcgctgaagtcaggaagtaaagtaccttgccagtaggggattgcttttaaaattcttctgatagacaatgcccctagccacccagaaccccacgagttcaacatagaaagtctcttagttgtcttgctgccctcaaacacaatatgtctaattcagcatctggatcagggggtcataaaggcttttaagattcactacacatggtactctatggaaatgaatgtcaatgctttggaagggaaacccaatagagtcaacatcatgaaagtctggaaggattacagcattgaagatgccatcgttgttatagaaaaagccgtgaaacccctcaagcccaaaacaataaatccctgctggagaaagctgtg

SEQ ID NO: 431180 - DNA, 397 bp, Homo sapiens
atagttttttagaagatatatcttttcttattcttgtcttattatggtaagaacacttaacatgatatctatcctcttaaatttttaagtgttaactataggcacattttgcacagcaaatctctagaatgtatccatcttgtatatctgaaactttatactctttgattatcaacttcccaattcccattcccccaggccatcaaccaacattctactctcagcttcaatgagttagactattttagatacctcacataactgaatcacgcagtgtttatcctttygtgactggcttatttcacttagcaaaatgtcctctaggttcattcattttgctgcaaatgacaggatttccttatctttaaggctgagtaatatcccattgtatatgttt

SEQ ID NO: 431181 - DNA, 586 bp, Homo sapiens
ttcattcattttgctgcaaatgacaggatttccttatctttaaggctgagtaatatcccattgtatatgtttatcacattttctttttccatttatccatccatgggcatttaagktttttctacttcttggctattatgaatagtgctgcagtgaactcaggagtgctaatatatatatatatttgagatcctgatttcaaattttgaataaataccccagaagtgagattgctggatctgatggtagtctatctataatcttttgaggaactccatacttttttccataatagctttatcaatttatattctcaacaatagtgtacatgggttccaatttctctaaatccttgccaacacttgttgtcttaaaaaaatactagccatactagtaggtgtaaaacagtatctcattgtggttttgattatcgtttctctgacaattagtgacattaagcaatattgacaattactgatacctgttggccatctgtttgtgtactttgtagaaatgtgtatttgtgttcttagcctattttaaatttagattattcatttctttgaataattttcttatatatttt

SEQ ID NO: 431182 - DNA, 621 bp, Homo sapiens
tctactctctgcttctgttagttcaactttcttagtgtccatctgtaagtgagatcatgcagcatttgtctgtctgtgcctggcctatttcacttagaacaatgtcctcyaggttcattcatgtttttaaaaatgacagggtttctttcttaaaggctgagtagtatttcattatatatatttttatatattatattagttataatttatatatgtttatatcacatttccttcagagattcattaatcaatagacacttaggtttgttccacagctttgactattctgaataatgctacagtaaacatggaagtacagctatttctttgacatattactttcattactatggatatatacccagaagtgagattgatggattatatagtagttctatttttagtatttggaggagtctctatatgtttttaataattgttgtactaatttacactcccaccaacaatatacaaaggttcttctttcctccttattctcaccaacacttgttacgttttttctttttgatcatactcttttttacaggtgtcaggtgacagctcattgaggttttaacttgcatttacttgatgattagtgacgttgagcatttttcatat

SEQ ID NO: 431183 - DNA, 595 bp, Homo sapiens
atagccaactacatcaattcagctccctctgcgagggaarcacgaatgtggaattataaaagtggcccccctctctctactccctctagtttacattcctctttgggtgtttaaaatattgcacttggtattacctatactcagggctgacagacagctggtattcaccatggcaggggctactgtgactgggtctgctcggattggttggtgctgtgctgtacagttattaaagtttcgttaccttgtcttccacttatttgtgcacttgtttgtctcctctactgggacagagaatcactcactgggtgctggaatctatattaagatattagtttaagaataaggttaagatcttccttgggcattcagtgccttggacattaaatatacatacctggcacacagtaagtgttcaaggtctgtttattgaataaatgaataaatgaggacatttatacaaaggaaaaaaataactctaaatggatcaaagatctaaatataaaagctaatactataaaaccattagaagaaaacatagagaaaagcttcatgacactgaatttgtcaatgatttcttggctctgatgccaaa

SEQ ID NO: 431184 - DNA, 529 bp, Homo sapiens
ctctaatgtgatgcctttaaatttgttctttttgcttagtgttgttatggctatacaagctctcttttggttccatatgaattttaggaatttttttctagttctgtgaagaatgatgatggtatttttatgggcattgcaatgaatttataaattgcttttggcagtatggtcattttcacaatattgattctacccatccctgagcatagaatgtgtttctatttgtttgtgtcatctatgatttctttcagcagtgttttgttgtttttcttgtagagatcattcaccmccttggttacatatattcctaagtacatgatttgttttgttttgttttgttatgtttttgcagctgttgtagaagggattgggttcttgatttgagtctcagcttggtcactgttggtgtatagcagtgctactagtttgtgtacacagattttgtgtcctgaaactttattgaattcatttatcagatctaggagctttttggatgaatctttagggtttacaatcatatcatcag

SEQ ID NO: 431185 - DNA, 539 bp, Homo sapiens
taattcccatgtatttgtatagttttgagggttactttgggaattagtttctaattttattccactgtggtctgagacagtacttgatataattttcattttctttgggacttgttttgcrgcctgttatatggtctatcttgaagaatgttcgatgtgtcaatgaaaagaatgtatattcttcagttgttgggtagaatgttctgtaaatacttgttaagtccatttgttctagggtatagtataagttcattgtttttctttgttgacattctgttttggtgacgtgtctagtgctatcagtagagtattgaagtcccccacgattattgtgttactgtctataacatttcttaggtccggtagtaattgatttataaatttgggaactccagtgtttcatatatataacacagcacatcatatcagtgcatatgctctcaggttgagttatcactgatgacattaaatttttttaatcacataaatttttattataatttgactgaaatatttttgcaaaaggtggcatttaaata

SEQ ID NO: 431186 - DNA, 521 bp, Homo sapiens
gtaagcagatgtatctgaaactactggcaggattcagaattgtgtattttatcaagtggtaatttatcttgaaacaaatgtcaatcaataaattatgccattccaagaccaacaactatttccattatttgccaaaatatcatagaacagttattattgagacaacaactccctcaaataaacaaaatattcaagatatgagtcattctgtttaaaaaatcctaactggtaaactaaaaattattcagaaaactcctgttattctcatctatatttttgttttcttttgttttgcatcgtgttgagactgagactcgctctgttacccagggtggagtgcagtagcataatcactgctyactgcagccttggcctcctgggctcaagcaatcctcccacctcagcctcctgagtatctggaaccaaagctgcacaccaccatgcccagttaagtttttattttttgtagagacagagtctccctatgttgccccagctggtctctatatttttggaaataa

SEQ ID NO: 431187 - DNA, 468 bp, Homo sapiens
ggttgttacattgtatttctaaaataataattggttgcagccagtggcagggaaaggcagtcttccaatagatagaataaacctgaaactggtgatcagcagcttttcaataggatcccaggagttggggagtgggctcaagcatgcaaaatgacagagtttaactggcatatgaccttctaggaacattcagctggtaaaggaagaatgccttaagtgagcatgcatacaaatacagtaaacgcattgcrcatgttcccctccgaagcactggcaggacactgtgcatgtggatagctcaccccaaggcaagaataggagagaaggtacacaagacgctggaagcatggcaaggtataaaaccccaagtcaaaggtcaaaccgtgccctgatctctcaaattgcctgcttggccctcttccaagtatactttacgtcctctcattactgctctaaagctttttaata

SEQ ID NO: 431188 - DNA, 370 bp, Homo sapiens
gcgtgagccacagggtttggccatttttaatctttcaagaggaatttgtcgggcgtgctggctcatgcctgtaatcccagcactttgggaggctggggtcggggggggggrgtggatcacctgaggtcaagagttcaagaccaccctggtcaaaatggtgaaatcccatctctactaaaaatacaaaaattagctgggcatggtggcgggcgcctgtaatcccagctactctgtaatcccagctactctggcgattgaggcaggagaatgtcttgagcctgggaggcagaggttgcagtgagccgagatcacaccactgcacgctagtctgggctacagcatgagacactgtctcaaaaaaaaacaaaaa

SEQ ID NO: 431189 - DNA, 555 bp, Homo sapiens
gtgttcagtgctttgctttatatactaattcatttaatattcaatatcctggaaggtaagtttaggctgagtatgccctatccagaatgatttgggaccaaaagtatttcagatttcttttgattttggaatacttgcattatacttacaggttgagcatccgaaatccaaaaattcagaatccaaaatgctccaataagcatttcctttgagctttggtcatgtcagtgctcaaatgtttcaaattttagagcattttgatttcagatttttccgatttgggatgttcaacctatactattactctcattttacatagaaagatactgagacagacaggttaagtaacttgtacaagatcayaggcacagtaaacagaactgggaccgaaacccaggcaatctggctccagagctaagctcctaaccactgagtcatgctacctcttctaagaggcatataataaacatttgctgaattaaacaaaaatacaaggctttgggatattctttacaggatctaatgctcgaggcggttttcttcctattatcatgc

SEQ ID NO: 431190 - DNA, 602 bp, Homo sapiens
ctctcataggcatcctcttgagtatatacactgcagctgtagtcatcttcatctgtaccagaatatcctttcaaaaacaagtgcttaaaagcaacagtgttatcttctttgaaagcaaccaccagctggttacttaaaccaaaacgaacaagctaaaaaataaaataaaatagaaacacatgaattacaccatttatcaggggaggcaaatgtcttctcactatcatcaaccattacctataaacrtcagaaaataatatcaattttttttggtttatactaatagcatcaatgtcaaaatacaagtcccacagaagaataacctcatcaagctacatcagcaattcaaagtagcataaaattagaagagattactgctcccaatgactactgactctactggcctttaagaaagaaagaaagaatccaaatcagctaagtctcaatccatttttcttatatttggatttcaagttaattgttttcaaaatcaattacttagtaaagcagtaactcattgtattgatttaagatttagaaattgtagtattttttaaaatcacaactatgttttacatatggcttttaaaagtgttttttga

SEQ ID NO: 431191 - DNA, 602 bp, Homo sapiens
ctctcataggcatcctcttgagtatatacactgcagctgtagtcatcttcatctgtaccagaatatcctttcaaaaacaagtgcttaaaagcaacagtgttatcttctttgaaagcaaccaccagctggttacttaaaccaaaacgaacaagctaaaaaataaaataaaatagaaacacatgaattacaccatttatcaggggaggcaaatgtcttctcactatcatcaaccattacctataaacatcagaaaataatatcaattttttttggtttatactaatagcatcaatgtcaaaatacaagtcccacagaagaataacctcatcaagctacatcagcaattcaaagtagcataaaattwgaagagattactgctcccaatgactactgactctactggcctttaagaaagaaagaaagaatccaaatcagctaagtctcaatccatttttcttatatttggatttcaagttaattgttttcaaaatcaattacttagtaaagcagtaactcattgtattgatttaagatttagaaattgtagtattttttaaaatcacaactatgttttacatatggcttttaaaagtgttttttga

SEQ ID NO: 431192 - DNA, 571 bp, Homo sapiens
tcaagaccagcctggacaatatagtgagactctgtctccacaaaaactttttaaaatcagcccagtgtggtggtggatgcctatagtcccagctactcgggagrcagaggtagtagattcgcttaagcataggagttcaaggctgcagtgagctatgattttgccactgcactccagcctggacaacagaaggagatcctgtctcaagtaaataaaacaaaacaaaacatcaggtgcctgtgtttcacttaggtatgtgagacatcctggggaaattgtcaagtttcccaaattagggggttcatggtggtacccccattgattttcagcatattcccaccagttatgttttatgtgggcccacttaagcatttttagaatgtatcatctagtttccgtggaaataacccttgcgaaataggcaaaggacataaagattcttgcaaaagcccagaaggtggagcaagatggcagaagagaagcctccactgatcatcctctcacaagaggacatcaatttaacaactatctatgtaagcaaagcactttcataagaaccaaaaatcaggtg

SEQ ID NO: 431193 - DNA, 571 bp, Homo sapiens
tcaagaccagcctggacaatatagtgagactctgtctccacaaaaactttttaaaatcagcccagtgtggtggtggatgcctatagtcccagctactcgggaggcagaggtagtagattcgcttaagcataggagttcaaggctgcagtgagctatgattttgccactgcactccagcctggacaacagaargagatcctgtctcaagtaaataaaacaaaacaaaacatcaggtgcctgtgtttcacttaggtatgtgagacatcctggggaaattgtcaagtttcccaaattagggggttcatggtggtacccccattgattttcagcatattcccaccagttatgttttatgtgggcccacttaagcatttttagaatgtatcatctagtttccgtggaaataacccttgcgaaataggcaaaggacataaagattcttgcaaaagcccagaaggtggagcaagatggcagaagagaagcctccactgatcatcctctcacaagaggacatcaatttaacaactatctatgtaagcaaagcactttcataagaaccaaaaatcaggtg

SEQ ID NO: 431194 - DNA, 571 bp, Homo sapiens
tcaagaccagcctggacaatatagtgagactctgtctccacaaaaactttttaaaatcagcccagtgtggtggtggatgcctatagtcccagctactcgggaggcagaggtagtagattcgcttaagcataggagttcaaggctgcagtgagctatgattttgccactgcactccagcctggacaacagaaggagatcctgtctcaagtaaataaaacaaaacaaaacatcaggtgcctgtgtttcacttaggtatgtgagacatcctggggaaattgtcaagtttcccaaattagggggttcatggtggtacccccattgattttcagcatattcccaccagttatgktttatgtgggcccacttaagcatttttagaatgtatcatctagtttccgtggaaataacccttgcgaaataggcaaaggacataaagattcttgcaaaagcccagaaggtggagcaagatggcagaagagaagcctccactgatcatcctctcacaagaggacatcaatttaacaactatctatgtaagcaaagcactttcataagaaccaaaaatcaggtg

SEQ ID NO: 431195 - DNA, 571 bp, Homo sapiens
tcaagaccagcctggacaatatagtgagactctgtctccacaaaaactttttaaaatcagcccagtgtggtggtggatgcctatagtcccagctactcgggaggcagaggtagtagattcgcttaagcataggagttcaaggctgcagtgagctatgattttgccactgcactccagcctggacaacagaaggagatcctgtctcaagtaaataaaacaaaacaaaacatcaggtgcctgtgtttcacttaggtatgtgagacatcctggggaaattgtcaagtttcccaaattagggggttcatggtggtacccccattgattttcagcatattcccaccagttatgttttatgtgggcccacttaagcatttttagaatgtatcatctagtttccgtggaaataacccttgcgaaataggcaaaggacataaagattcttgcaaaagcccagaaggtggagcaagatggcagaagagaagcctccactgatcatccyctcacaagaggacatcaatttaacaactatctatgtaagcaaagcactttcataagaaccaaaaatcaggtg

SEQ ID NO: 431196 - DNA, 573 bp, Homo sapiens
ttaacaactatctatgtaagcaaagcactttcataagaaccaaaaatcaggtgagcacttgcactacctgcttttaactttgtattgctaaaagaggcactgaagaggtagaaaaaacagtcctgaagcactgataccacccttcccccagccccagcagtggccacctggtgcgcagagtgcctctgcatgctgwgggagggagagcacagcaattgtgaggcagtaaacggttctgcccggttagagcagaaaggaaaactggaccaaattcagctgatgcccacccacggagggaacatttaaaccagccctagccagaggggaatcacaggtccttgtggttggaacttgagttcccacaaacttcaccactgcaggctaaagtgctctgggtgtctaagtgaatttgaaaggcaatttaggccacaaggactgcaactctaggcgagtcctagtgctgaactgggcccagaaacagtggactagaggggcatgcaatctaccaaactaccagggtggctaaaggagtggtgacatcacctctcccctaaccccaggctgcacaactag

SEQ ID NO: 431197 - DNA, 576 bp, Homo sapiens
aaagtgctgaaggagaaaaacttttattctagaatagtatgtctggtgaaaacattcttcaaacatgaaaaagaaataaagattttcccagacaaggtcgggtgcagtggctcacacctgtaatcccagcattttgggaggccgargtgggtggatcacgatgtcaggagttcgagaccagtctgaccaacatgatgaaaccccgtctctactaaaaatataaaaattagccaggcatggtggcgcaggcctgtaatcccagctactggggaggctgaggcaggagaattgcttgaactcaggaggtggaggttgcagtgagcagagatcatgccactgcactccagcctgggtgacagaccaagactccatctcaaaaaaaagattttcccagacaaacaaaagctgagggatttcatcaacaccagacctgtcctacaaaaaatgctgaagagagtacttcaatcagaaagaaaaggacattaatgagcaataagtaatcacctgaaggtacaaaactcactggtatcagaaagtacacagaaaaacaaaaaatattataaccctgtaacttcc

SEQ ID NO: 431198 - DNA, 576 bp, Homo sapiens
aaagtgctgaaggagaaaaacttttattctagaatagtatgtctggtgaaaacattcttcaaacatgaaaaagaaataaagattttcccagacaaggtcgggtgcagtggctcacacctgtaatcccagcattttgggaggccgaggtgggtggatcacgatgtcaggagttcgagaccagtctgaccaacatgatgaaaccccgtctctactaaaaatataaaaattagccaggcatggtggcgcaggcctgtaatcccagctactggggaggctgaggcaggagaattgcttgaactcaggaggyggaggttgcagtgagcagagatcatgccactgcactccagcctgggtgacagaccaagactccatctcaaaaaaaagattttcccagacaaacaaaagctgagggatttcatcaacaccagacctgtcctacaaaaaatgctgaagagagtacttcaatcagaaagaaaaggacattaatgagcaataagtaatcacctgaaggtacaaaactcactggtatcagaaagtacacagaaaaacaaaaaatattataaccctgtaacttcc

SEQ ID NO: 431199 - DNA, 461 bp, Homo sapiens
aataaagtggcaagagtaggtccttaattatcaataataacattgatgtaaatggactaaactctccaatcaaaagacatagactggctaaatggatgaaaaaaaacccactgatctgttgcctacaaaaaatacacttcacctataaagacacacatagactgaaaataaagggatggagaaagaaattccatgccaatggaaaccaaaaaagagcaggagtagctatgcttttgtcagacaaaacagattttaagacaacaactataagaagagacaaaaaagttcactatataatgataaaggggtcaattcagcaagaggatataagaattttaaatatatatgtacccaacattggagcacccagatatakaaagcaaatattattagagctaataagagagataggccccaataaaataacagctggagacttaaacaccccactttcagcatta

SEQ ID NO: 431200 - DNA, 574 bp, Homo sapiens
gaaactagtaaaccttgtcatcaggctaattttacaagtcccttctcccctctcatttatagctacttatatttctctgcttttctttatgactttccacatgaagcattctctaaaatatttttgggcaaaacttcattccatgcttcctcaagagtgcagtaatattggaagcacagtttgcaggtcactgtaagaggtcagtgagaagtctcctggtgttaatagcttgagtaatattgttttctcctttagaycacaccattaaattgctttcattacccacaaaggggttatttgtgtcagagcaaataagatctcattcaaattcaaactggataatttcaacctaataaaatagtttatttctaataactagaagaacaagacaatgacaaaaaattgtaaagtctttttaagacatacaagcagaagagaagaaatgtattttttaaataggtcctacaagagttttaatgtgctatctggaaattttggagggggctaccctgtagtttattctcctagaaatgggagggtatgaggtatttcccaaaggttttacaagaaatta

SEQ ID NO: 431201 - DNA, 540 bp, Homo sapiens
ttgttcaccattacaaccctaggattcagttgctctgtctgcctcatggygggtaattattggtaggttggctggctggctgaatgaatgaatgaattctcatggaggcatcaacagggcaaatgtgctgagccctgcaatatccactctgcactggtaacacaatgacaacacattatgttaatgcctcctcctggctcccagttcattagttatttatggatatgttcattaatcaacggcaggttggtaatttcaggtacattcttcccaagataataggagttgaattaccattcacataaccaaacagataccccaagagaccagttttctatgacttctgattccactcctgatcctccttttgccatcttttggtttcaacaaacaactctgatattcacatattaggtatatgatgcagggatggagactttggtcccaatatctcccttccttaccttttgttcacttcttccttatagtctcctaacccaaactgtaccaatgtgaacctgctcactggattttccagca

SEQ ID NO: 431202 - DNA, 540 bp, Homo sapiens
ttgttcaccattacaaccctaggattcagttgctctgtctgcctcatggtgggtaattattggtaggttggctggctggctgaatgaatgaatgaattctcatggaggcatcaacagggcaaatgtgctgagccctgcaatatccactctgcactggtaacacaatgacaacacattatgttaatgcctcctcctggctcccagttcattagttatttatggatatgttcattaatcaacggcaggttggtaatttcaggtacattcttcccaagataataggagttgaattaccattcacataaccaaacagataccccaagagaccagttttctatgacttctgattccactcctgatcctccttttgccatcttttggtttcaacaaacaactctgatattcacatattaggtatatgatgcagggatggagactttggtcccaatatctcccttcyttaccttttgttcacttcttccttatagtctcctaacccaaactgtaccaatgtgaacctgctcactggattttccagca

SEQ ID NO: 431203 - DNA, 582 bp, Homo sapiens
tgagcaataaatttctgttatttattaattacctaaagtatttttattattgcaacaggaatagactaagacaccacatgggaaaatttaataatacaattattatgtgtcttttctaattaaaaataatgtatatattttactttgtttcatgctctatacatctaagagaaacatttctaatttaaaagttatattatctttgactaatttattagaaatataaagatgaatatgtcacaaagacattggaattaagacactacaaaaatactrctcaaattttcctaattttattttgaaggatcttaacattttagttttatttcttacatgtggtcgaatttttaattatatcaagcactaacacctcaatgatttttacttcaaaaatcttcaaattcaactgtcccttgtcaaaaccaaaacagtttaagacatgtttttagcaaaaattgccctgagactgcaaagcaattttgtctgacaaagttgagacatcacagaaaaactatgattagccagaactcccactaagcagcactgtaccctggttccagatcctacttttgagagaaacag

SEQ ID NO: 431204 - DNA, 582 bp, Homo sapiens
tgagcaataaatttctgttatttattaattacctaaagtatttttattattgcaacaggaatagactaagacaccacatgggaaaatttaataatacaattattatgtgtcttttctaattaaaaataatgtatatattttactttgtttcatgctctatacatctaagagaaacatttctaatttaaaagttatattatctttgactaatttattagaaatataaagatgaatatgtcacaaagacattggaattaagacactacaaaaatactactcaaattttcctaattttattttgaaggatcttaacattttagttttatttcttacatgtggtcgaatttttaattatatcaagcactaacacctcaatgatttttacttcaaaaatcttcaaattcaactgtcccttgtcaaaaccaaaacagtttaagacatgtttttagcaaaaattgccctgagactgcaaagcaattttgtctkacaaagttgagacatcacagaaaaactatgattagccagaactcccactaagcagcactgtaccctggttccagatcctacttttgagagaaacag

SEQ ID NO: 431205 - DNA, 606 bp, Homo sapiens
tattaaatgggtatttccataaagagtccccataggttctctgggcccacgatgagaactcaaccattcatttcacaaatgataagtttgcagttgggccaaaaacctttaatttcaatgaaaccataamctgcaatggcttatgtcagagaacaacataaatatttgctttaagagctggtgccaagaatctcatgcaaactttaggcaaaatgttttagctgaggggtacttggctaaaaccagagggcttggaaggaggaaaatgtaatgcagagtctgctgaactttgacccatggcatcagtgaagtccaacaacttttcaagtcttggtcttctcatttgtaaaatggggacaatgcaaggctatgatttattcctcacaggaaaaaaagtcctctggaaatgtaaaagccgcattagagtaatgtttaataattcaagatgaggtctggaagaacatcaacagtctctcaccctctgtgcccaggcattttgaaagggcactgtgccaaagtccattagtgctgggaatacacatcagcaggaagccttttgcatcttgactccctttccattgagcccctgaaatcagatgcctaaca

SEQ ID NO: 431206 - DNA, 606 bp, Homo sapiens
tattaaatgggtatttccataaagagtccccataggttctctgggcccacgatgagaactcaaccattcatttcacaaatgataagtttgcagttgggccaaaaacctttaatttcaatgaaaccataacctgcaatggcttatgtcagagaacaacataaatatttgctttaagagctggtgccaagaatctcatgyaaactttaggcaaaatgttttagctgaggggtacttggctaaaaccagagggcttggaaggaggaaaatgtaatgcagagtctgctgaactttgacccatggcatcagtgaagtccaacaacttttcaagtcttggtcttctcatttgtaaaatggggacaatgcaaggctatgatttattcctcacaggaaaaaaagtcctctggaaatgtaaaagccgcattagagtaatgtttaataattcaagatgaggtctggaagaacatcaacagtctctcaccctctgtgcccaggcattttgaaagggcactgtgccaaagtccattagtgctgggaatacacatcagcaggaagccttttgcatcttgactccctttccattgagcccctgaaatcagatgcctaaca

SEQ ID NO: 431207 - DNA, 535 bp, Homo sapiens
tcacatccccgaaatccagtctccttccatcacaactgccttccccatgctggagctaattaagccagaatgatggcagttaattattttcctctgtggctggggaaggctggyttccccggccaggcagtgggcatgagggggtttgtaaaagggtaaatcagattaaaagaaggaacaggggcttgtggatcccctaggggctcacagatctcccttacggcggagggaggtggcacttagataacatgctcattagctaaagtttcaccaatcaatcctggtctctggagtccagtactcctggaagatgcatatgggtgtatgtgaaagtgggttcatcattaagcccaacactaggcagtcttgccaggctgggtccagaacacagaatggtgttcacagggacggcatcactatgacctaggcaggcatccatgtgtgcaaaaaggcttttcatccatgcacacaggggtgttgctcatcagagagaaaaaagagtagcttcatggtgcatactggggtcctcattgct

SEQ ID NO: 431208 - DNA, 544 bp, Homo sapiens
gggccaagcctcagtgggctgggctttcatttcctttttcatggagtccaaaatgagaatagctggtgtcggggcctgggactggactcagatagggactgggattttttcttaactgagggaaaaagtagagtcacagtcaaagatgaagggggtttggagctggaaaggcatcagctctagagtagatgctggctgtgagcaggagtttcagggagtaggtaagactgaggacagcaggtgattcccagcaaaaagctcaggactgtgaaaggggaggatgggacgtggctccaggtttgtgaggagcctagcaacttaaaagaacaggagcctggatggcagtaccccsaccccaaccccagctcaccgtgggtttctgggaccccttgggagcccaggaagtcccagatggaagaaatgtaataaaactccactactccagtttggagaatcatagagtattggagatgagaaaagtcttagaaatgacccaacccataaccatacacaggaaattccaaaggctagagatgggcagtga

SEQ ID NO: 431209 - DNA, 547 bp, Homo sapiens
ggggactttagacagtgacgtctggacccacagaaggggttgttattcccacagctcatttgctgtggctgccccttccaggattcaccggtccacagctattcttctccagcccccaaacacctctctctccctccccatccagctttgacagggcaggtctggctctatgtgaaaatggatttttctgttcacatgaaaatctcatggaagacaatatcttcttcttctcctttttttttttttgagacagagtctcactctgtcacaatatcttctttataaacaaacactctgtccccatgtatggggggattattaacaacaactacctgagaaaacgtggctcctcctttcaagccacattatgttcaaagcagtgtccactccaccatcygttacctgtttcctttctcttcttctgaatgagagcagcctgtgttcattgctatggactcaattgtgtgcccccaaaaattcctacgttgcagccataaccctcaatgcgatggtatttggagatgaggctttggaaggtaattagatt

SEQ ID NO: 431210 - DNA, 584 bp, Homo sapiens
tgcatgtttaacttgcaaactgttttgcaaagggctcttgccattttccacttccacctgcaatgcagaggggttgccgttgctccttatcctcccatcatttgataatgtcagtttttttttaaattttaaccattctaataggcatgtggtagtatctcactgyggttttcattcatgtttttctaataactaaagatgtcgagtgccttttcatgtacttatttgtcacccacatgtatttaagtctcttgctcattaaaaaaattggattattttctttttattgagcttaagagttctgtatagattctcgaaataagtcctttgtcagatataagatttgcagatattttcttctagtctgcggcttgtctttttcaatcttttaccagtgctttttgaagcttaaaagttttcagatttaatgaggctacacttccgaccttgctgcccattatgataattatgctgctcatttctgatggttaagtgccgtctgctgttgggatcttatctttccccacagctgccagggaacactgttctagaacagtctcctaacaccagctctcgctcacaga

SEQ ID NO: 431211 - DNA, 571 bp, Homo sapiens
tttaaattggggtacatgttttcttattattgaattgtaagagttctttgtatagtctggtacaagtcccttatgagatatatgatttacaaacattgtctctcagtctgtgggtcatcttttgagtttcttaatggtatcttttggagcccaaaagttttaaattttgatgaaattgaagtttttttaaataaatcatgcttttggtgtcatatttgtaaaatatttaccaaacccaaggtcacataaaagctttatagttttagctcttctatttaggcctatgatccattttgagttaattgttgtgcayggtgtgagataggggtctcctgaacccaccagatcaaactttctcctctgcctttccattaaaactgttcttccttggtgtattagtttttcattgctgaaaaaaaaaataacacaaatgaagtgtcttactacaacacacatttatcatctccccagtttccatgggtcagaattctggcaataagggtgcttggggtcctttggaagtttccaagaaaggcctcaatttcaaccggagcttgaatgaggaagttct

SEQ ID NO: 431212 - DNA, 412 bp, Homo sapiens
aaaaacatgttggcttttctcttgacgtgggaggtgagtacstttctatgaaggtgataaggatccactgagtcttccatataaagatcatattcctgctccaagtggccattactgagctgagagatgtcattgccgcagtgaggacctataggcacatgtaggttgaatgaaactctagttctacctggaagcccagacatgggatgggtcagtgagcatggctctcttcctagtctcaggccatgcctgtggcactctgattctactctcatgacattggacctgggcagatgtgacaaattcagagaactatgattttgactcaagggtttgtagatttcctttttcactctaatttcagtgtctggagtcctcacaaccatgaacaatctgagtatttgatgagaca

SEQ ID NO: 431213 - DNA, 412 bp, Homo sapiens
aaaaacatgttggcttttctcttgacgtgggaggtgagtacgtttctatgaaggtgataaggatccactgagtcttccatataaagatcatattcctgctccaagtggccattactgagctgagagatgtcattgcygcagtgaggacctataggcacatgtaggttgaatgaaactctagttctacctggaagcccagacatgggatgggtcagtgagcatggctctcttcctagtctcaggccatgcctgtggcactctgattctactctcatgacattggacctgggcagatgtgacaaattcagagaactatgattttgactcaagggtttgtagatttcctttttcactctaatttcagtgtctggagtcctcacaaccatgaacaatctgagtatttgatgagaca

SEQ ID NO: 431214 - DNA, 619 bp, Homo sapiens
tttttcactctaatttcagtgtctggagtcctcacaaccatgaacaatctgagtatttgatgagacagggctaaatattgcagtttttctcctagaaatcatttgagggtatttgctttaarttgattggaaaaataaggcataactgtttgcacaaacttgggacaaatgatattgggataacgatctactagaatagggacattttacccagagtttctgggagaaaaaccgaggaatttctatcacgaccagccttcaggcctcctgaaatatatctctcacagtgtcctattcttatgctgaggagcctgaggtccctgtgtgaggattagacagtggattgttatgtgtgtaggggaatcagcttaatgtgtctgtccatgtctgaatttattgcagaaattgaaaagaaggggaaggggaagaaaagaaggggaagaagatcaaagaagaaaagaagaaggggaagaaaagaaggggaagaagatcaaaacccaccatgccccaggtaactttcagcaattgtggatgcttaattctgtgttaacacctggaggcaacagattcagggaaaccagagtgtgtttgatgtcatgttttcaacgaaggctgaatt

SEQ ID NO: 431215 - DNA, 619 bp, Homo sapiens
tttttcactctaatttcagtgtctggagtcctcacaaccatgaacaatctgagtatttgatgagacagggctaaatattgcagtttttctcctagaaatcatttgagggtatttgctttaaattgattggaaaaatawggcataactgtttgcacaaacttgggacaaatgatattgggataacgatctactagaatagggacattttacccagagtttctgggagaaaaaccgaggaatttctatcacgaccagccttcaggcctcctgaaatatatctctcacagtgtcctattcttatgctgaggagcctgaggtccctgtgtgaggattagacagtggattgttatgtgtgtaggggaatcagcttaatgtgtctgtccatgtctgaatttattgcagaaattgaaaagaaggggaaggggaagaaaagaaggggaagaagatcaaagaagaaaagaagaaggggaagaaaagaaggggaagaagatcaaaacccaccatgccccaggtaactttcagcaattgtggatgcttaattctgtgttaacacctggaggcaacagattcagggaaaccagagtgtgtttgatgtcatgttttcaacgaaggctgaatt

SEQ ID NO: 431216 - DNA, 519 bp, Homo sapiens
ggtatttgctttaaattgattggaaaaataaggcataactgtttgcacaaactygggacaaatgatattgggataacgatctactagaatagggacattttacccagagtttctgggagaaaaaccgaggaatttctatcacgaccagccttcaggcctcctgaaatatatctctcacagtgtcctattcttatgctgaggagcctgaggtccctgtgtgaggattagacagtggattgttatgtgtgtaggggaatcagcttaatgtgtctgtccatgtctgaatttattgcagaaattgaaaagaaggggaaggggaagaaaagaaggggaagaagatcaaagaagaaaagaagaaggggaagaaaagaaggggaagaagatcaaaacccaccatgccccaggtaactttcagcaattgtggatgcttaattctgtgttaacacctggaggcaacagattcagggaaaccagagtgtgtttgatgtcatgttttcaacgaaggctgaattactccta

SEQ ID NO: 431217 - DNA, 519 bp, Homo sapiens
ggtatttgctttaaattgattggaaaaataaggcataactgtttgcacaaacttgggacaaatgatattgggataacgatctactagaatagggacattttacccasagtttctgggagaaaaaccgaggaatttctatcacgaccagccttcaggcctcctgaaatatatctctcacagtgtcctattcttatgctgaggagcctgaggtccctgtgtgaggattagacagtggattgttatgtgtgtaggggaatcagcttaatgtgtctgtccatgtctgaatttattgcagaaattgaaaagaaggggaaggggaagaaaagaaggggaagaagatcaaagaagaaaagaagaaggggaagaaaagaaggggaagaagatcaaaacccaccatgccccaggtaactttcagcaattgtggatgcttaattctgtgttaacacctggaggcaacagattcagggaaaccagagtgtgtttgatgtcatgttttcaacgaaggctgaattactccta

SEQ ID NO: 431218 - DNA, 519 bp, Homo sapiens
ggtatttgctttaaattgattggaaaaataaggcataactgtttgcacaaacttgggacaaatgatattgggataacgatctactagaatagggacattttacccagagtttctgggagaaaaaccgaggaatttctatcaygaccagccttcaggcctcctgaaatatatctctcacagtgtcctattcttatgctgaggagcctgaggtccctgtgtgaggattagacagtggattgttatgtgtgtaggggaatcagcttaatgtgtctgtccatgtctgaatttattgcagaaattgaaaagaaggggaaggggaagaaaagaaggggaagaagatcaaagaagaaaagaagaaggggaagaaaagaaggggaagaagatcaaaacccaccatgccccaggtaactttcagcaattgtggatgcttaattctgtgttaacacctggaggcaacagattcagggaaaccagagtgtgtttgatgtcatgttttcaacgaaggctgaattactccta

SEQ ID NO: 431219 - DNA, 519 bp, Homo sapiens
ggtatttgctttaaattgattggaaaaataaggcataactgtttgcacaaacttgggacaaatgatattgggataacgatctactagaatagggacattttacccagagtttctgggagaaaaaccgaggaatttctatcacgaccagccttcaggcctcctgaaatatatctctcacagtstcctattcttatgctgaggagcctgaggtccctgtgtgaggattagacagtggattgttatgtgtgtaggggaatcagcttaatgtgtctgtccatgtctgaatttattgcagaaattgaaaagaaggggaaggggaagaaaagaaggggaagaagatcaaagaagaaaagaagaaggggaagaaaagaaggggaagaagatcaaaacccaccatgccccaggtaactttcagcaattgtggatgcttaattctgtgttaacacctggaggcaacagattcagggaaaccagagtgtgtttgatgtcatgttttcaacgaaggctgaattactccta

SEQ ID NO: 431220 - DNA, 565 bp, Homo sapiens
tgtgacaaattcagagaactatgattttgactcaagggtttgtagatttcctttttcactctaatttcagtgtctggagtcctcacaaccatgaacaatctgagtatttgatgagacagggctaaatattgcagtttttctcctagaaatcatttgagggtatttgctttaaattgattggaaaaataaggcataactgtttgcacaaacttgggacaaatgatattgggataacgatctactagaatagggacattttacccagagtttctgggagaaaaaccgaggaatttctatcacgaccagccttcaggcctcctgaaatatatctctcacagtgtcctattcttatgctgaggagcctgaggtccctgtgtgaggattagacagtggattgttatgtgtgtaggggaatcagcttaatgtgtctgtccatgtctgaatttattgcagaaattgaaaagaaggggaaggggaagaaaagaaggggaagaagatcaaagaagraaagaagaaggggaagaaaagaaggggaagaagatcaaaacccaccatgccccaggta

SEQ ID NO: 431221 - DNA, 572 bp, Homo sapiens
gtcatgttttcaacgaaggctgaattactcctactgtcattgctgttggttttcattgcagtagatgtttaggtttccatttcttcctccccttatcatttastaacgtaccataggttgaccatacttcaaaagctgtactctcatggccactgcatcgaattttgagcatattttatggaaaactattgagctcactcttttcatgatcacagtttgctgtgtgtcatgagggcactaactcagagtgtcctttgactcccttaccagtatgtcacctggccaattcactagctcactttctctctgtctctgtctctgtctctgtctctgtctctgtctctctctctctgtctttctctttcattgttttctacctggccctgttctatcccaacataaaggcaataatttgttacctcattaatggatctgtcctttttcttttgtaaccacttccttatgttacttctgaaatctagtgaggctctgtggtgtctgactttccctggctgcttctttagttttgtctccttttccaggctcaacagcgtgctgatggaagtggaaga

SEQ ID NO: 431222 - DNA, 572 bp, Homo sapiens
gtcatgttttcaacgaaggctgaattactcctactgtcattgctgttggttttcattgcagtagatgtttaggtttccatttcttcctccccttatcatttagtaacgtaccataggwtgaccatacttcaaaagctgtactctcatggccactgcatcgaattttgagcatattttatggaaaactattgagctcactcttttcatgatcacagtttgctgtgtgtcatgagggcactaactcagagtgtcctttgactcccttaccagtatgtcacctggccaattcactagctcactttctctctgtctctgtctctgtctctgtctctgtctctgtctctctctctctgtctttctctttcattgttttctacctggccctgttctatcccaacataaaggcaataatttgttacctcattaatggatctgtcctttttcttttgtaaccacttccttatgttacttctgaaatctagtgaggctctgtggtgtctgactttccctggctgcttctttagttttgtctccttttccaggctcaacagcgtgctgatggaagtggaaga

SEQ ID NO: 431223 - DNA, 572 bp, Homo sapiens
gtcatgttttcaacgaaggctgaattactcctactgtcattgctgttggttttcattgcagtagatgtttaggtttccatttcttcctccccttatcatttagtaacgtaccataggttgaccatacttcaaaagctgtactctcatggccactgcatcgaattttgagcatattttatggaaaactattgagctcactcttttcatgatcrcagtttgctgtgtgtcatgagggcactaactcagagtgtcctttgactcccttaccagtatgtcacctggccaattcactagctcactttctctctgtctctgtctctgtctctgtctctgtctctgtctctctctctctgtctttctctttcattgttttctacctggccctgttctatcccaacataaaggcaataatttgttacctcattaatggatctgtcctttttcttttgtaaccacttccttatgttacttctgaaatctagtgaggctctgtggtgtctgactttccctggctgcttctttagttttgtctccttttccaggctcaacagcgtgctgatggaagtggaaga

SEQ ID NO: 431224 - DNA, 572 bp, Homo sapiens
gtcatgttttcaacgaaggctgaattactcctactgtcattgctgttggttttcattgcagtagatgtttaggtttccatttcttcctccccttatcatttagtaacgtaccataggttgaccatacttcaaaagctgtactctcatggccactgcatcgaattttgagcatattttatggaaaactattgagctcactcttttcatgatcacagtttgctgtgtgtcatgagggcactaactcagagtgtcctttkactcccttaccagtatgtcacctggccaattcactagctcactttctctctgtctctgtctctgtctctgtctctgtctctgtctctctctctctgtctttctctttcattgttttctacctggccctgttctatcccaacataaaggcaataatttgttacctcattaatggatctgtcctttttcttttgtaaccacttccttatgttacttctgaaatctagtgaggctctgtggtgtctgactttccctggctgcttctttagttttgtctccttttccaggctcaacagcgtgctgatggaagtggaaga

SEQ ID NO: 431225 - DNA, 534 bp, Homo sapiens
cgcatgttctcactcttaagtgggagttgaccaatgagaacacatggacacagggaggggaacatcacacactggggcctgttgtggggtaggaggctgggggarggatagcgttaggagaaatacctaatgtaaatgatgagttgatgggtgcagcaaacaaacatggcacacgtacacctatataacaaatctgcacgttgtgcacatataccctagaacttaaagtatttttttaaaaaaaagattatttctttgaataagcgttctactctttgctccttctcaactccctctttaaggccaatgaatctttgattttctcttttcaggccctcttctagatctcttaagcattctgtgttcctgctcattcttcttttcttttttctcctctgactgtattttcaaatagcttgtttgcatgctcactaattctttcttctgcttgatcaattctactgagacccactaatgcattttccagctccagcatttgatttttttctcttacttcagtaatcttgttaaatt

SEQ ID NO: 431226 - DNA, 534 bp, Homo sapiens
cgcatgttctcactcttaagtgggagttgaccaatgagaacacatggacacagggaggggaacatcacacactggggcctgttgtggggtaggaggctgggggagggatagcgttaggagamatacctaatgtaaatgatgagttgatgggtgcagcaaacaaacatggcacacgtacacctatataacaaatctgcacgttgtgcacatataccctagaacttaaagtatttttttaaaaaaaagattatttctttgaataagcgttctactctttgctccttctcaactccctctttaaggccaatgaatctttgattttctcttttcaggccctcttctagatctcttaagcattctgtgttcctgctcattcttcttttcttttttctcctctgactgtattttcaaatagcttgtttgcatgctcactaattctttcttctgcttgatcaattctactgagacccactaatgcattttccagctccagcatttgatttttttctcttacttcagtaatcttgttaaatt

SEQ ID NO: 431227 - DNA, 534 bp, Homo sapiens
cgcatgttctcactcttaagtgggagttgaccaatgagaacacatggacacagggaggggaacatcacacactggggcctgttgtggggtaggaggctgggggagggatagcgttaggagaaatacctaatgtaaatgatgagttgatgggtgcagcaaacmaacatggcacacgtacacctatataacaaatctgcacgttgtgcacatataccctagaacttaaagtatttttttaaaaaaaagattatttctttgaataagcgttctactctttgctccttctcaactccctctttaaggccaatgaatctttgattttctcttttcaggccctcttctagatctcttaagcattctgtgttcctgctcattcttcttttcttttttctcctctgactgtattttcaaatagcttgtttgcatgctcactaattctttcttctgcttgatcaattctactgagacccactaatgcattttccagctccagcatttgatttttttctcttacttcagtaatcttgttaaatt

SEQ ID NO: 431228 - DNA, 534 bp, Homo sapiens
cgcatgttctcactcttaagtgggagttgaccaatgagaacacatggacacagggaggggaacatcacacactggggcctgttgtggggtaggaggctgggggagggatagcgttaggagaaatacctaatgtaaatgatgagttgatgggtgcagcaaacaaacatggcacacgtacacctatataacaaayctgcacgttgtgcacatataccctagaacttaaagtatttttttaaaaaaaagattatttctttgaataagcgttctactctttgctccttctcaactccctctttaaggccaatgaatctttgattttctcttttcaggccctcttctagatctcttaagcattctgtgttcctgctcattcttcttttcttttttctcctctgactgtattttcaaatagcttgtttgcatgctcactaattctttcttctgcttgatcaattctactgagacccactaatgcattttccagctccagcatttgatttttttctcttacttcagtaatcttgttaaatt

SEQ ID NO: 431229 - DNA, 272 bp, Homo sapiens
tgagtgccttacttggtccatttgttgaggtcatattggcttcaatgttattgatactgttgatgtttgtcaatatctgggcattgaaggataaggtatttattccagcctttgcagtcaggtcttgtttstacctgtccttcagaggaccttccaggaattcaaagtgggctgacgagttccttaagccagtgatcactgcagccatttttgtactacagggcaccctagcccaggtacactgcaattcttacagattgttaggtctccag

SEQ ID NO: 431230 - DNA, 272 bp, Homo sapiens
tgagtgccttacttggtccatttgttgaggtcatattggcttcaatgttattgatactgttgatgtttgtcaatatctgggcattgaaggataaggtatttattccagcctttgcagtcaggtcttgtttgtacctgtccttcagaggaccttccaggaattcaaagtgggctgacgagttccytaagccagtgatcactgcagccatttttgtactacagggcaccctagcccaggtacactgcaattcttacagattgttaggtctccag

SEQ ID NO: 431231 - DNA, 570 bp, Homo sapiens
taggcaatgcaagactgtccttcctcccttcttcaatgcatcttttcttgttatcatgttaaaaccaggtgctatgatctctcacctggttagccctcgtgagagtgttttcttgcatagatagttgttcaatttgatgttccttcagggagaccattgctggagaattctattctaccatcttactccaccttttacctgtttattttttaaatgtttctagtaaataattgtgaagtgatacgtttattttaatcttggggatcaaaagcatgtagctaagaacttttcccaaggaatattttaaaatttttatatcaatgtttatggaatgacatactttttgattcaaggttcttaaatgtagttttagttttgattcaatgttatagaacactgtttttttaaactgtkatctgcagcccacatgtaatggaatcacctggggtgcttatattaaaaaaatgcagattctagggctcacaccaactaaatctcctgggattggagaccaggaggtagttcctataatctccacagctgcttctaaggtacaccaagtttaagaac

SEQ ID NO: 431232 - DNA, 392 bp, Homo sapiens
ttacctaggacactcatatcatgttatgcttactttggaaaatttttccctgtamaacagtagggatcacaatcttttacgttttttccagcaaaggaaatgaattgtctcactcagtgacagaaaacagactgttcacattgtttctcatttgaacatggggctagagaaggatcctgtaattgaagaaagttcagctctatgaggtcaggatcctcatcccctaccattgttgctgggttgtggagtcaggctgggcccacatcccaggaccattcctgccaggttccagaagcgagaattggaaagggtgactgtcactggtcttgaaggtttttatctgacacttcctgccctccacttatctttggcagcctttctggtgccacgtc

SEQ ID NO: 431233 - DNA, 392 bp, Homo sapiens
ttacctaggacactcatatcatgttatgcttactttggaaaatttttccctgtaaaacagtagsgatcacaatcttttacgttttttccagcaaaggaaatgaattgtctcactcagtgacagaaaacagactgttcacattgtttctcatttgaacatggggctagagaaggatcctgtaattgaagaaagttcagctctatgaggtcaggatcctcatcccctaccattgttgctgggttgtggagtcaggctgggcccacatcccaggaccattcctgccaggttccagaagcgagaattggaaagggtgactgtcactggtcttgaaggtttttatctgacacttcctgccctccacttatctttggcagcctttctggtgccacgtc

SEQ ID NO: 431234 - DNA, 392 bp, Homo sapiens
ttacctaggacactcatatcatgttatgcttactttggaaaatttttccctgtaaaacagtagggatcacaatcttttacgttttttccagcaaaggaaatgaattgtctcactcagtgacagaaaacagactgttcacattgtttctcatttgaacatggggctagagaaggatcctgtarttgaagaaagttcagctctatgaggtcaggatcctcatcccctaccattgttgctgggttgtggagtcaggctgggcccacatcccaggaccattcctgccaggttccagaagcgagaattggaaagggtgactgtcactggtcttgaaggtttttatctgacacttcctgccctccacttatctttggcagcctttctggtgccacgtc

SEQ ID NO: 431235 - DNA, 392 bp, Homo sapiens
ttacctaggacactcatatcatgttatgcttactttggaaaatttttccctgtaaaacagtagggatcacaatcttttacgttttttccagcaaaggaaatgaattgtctcactcagtgacagaaaacagactgttcacattgtttctcatttgaacatggggctagagaaggatcctgtaattgaagaaagttcagctctatgaggtcaggatcctcatcccctaccattgttgctgggttgtggagtcaggctgggcccacatcccaggaccattcctgccaggttccagaagcgagaattggaaagggtgactrtcactggtcttgaaggtttttatctgacacttcctgccctccacttatctttggcagcctttctggtgccacgtc

SEQ ID NO: 431236 - DNA, 556 bp, Homo sapiens
ttctaatgatcatcctctaaacattttatcatttattaatcctccctgcctgtgtctattattatatwcatatctctacgctgcaaattttgggtctcaatttttactgtgcctttgtttttactagtgtctgctgttgcaaaaagaagaaaacattctctgcctgagttttaatttttgtccaaagttaattttaatctatacaattaaaaccttttgcctatcactctggacttttggattgttttttacattcagtgttataatatttgattatgctgattggttttggtgggtactgatgtgaattaataaaaacatttcatttccatgtttattttctaatctcttccacattgtaggctatgtttaccatacgtagcagaatgtatttacatttcttggttctagtcatttgtattcttcgtgagtgtgtgtgtgtgtgtgtctgtgtgtgtgtctgtgtgtgcctttggcatttaggaagggttgtatagctcatgttaaatattgcactaaaaatgtttttgatggttttcctccctttgaactagac

SEQ ID NO: 431237 - DNA, 556 bp, Homo sapiens
ttctaatgatcatcctctaaacattttatcatttattaatcctccctgcctgtgtctattattatatacatatctctacgctgcaaattttgggtctcaatttttactgtgcctttgtttttactagtgtctgctgttgcaaaaagaagaaaacattctytgcctgagttttaatttttgtccaaagttaattttaatctatacaattaaaaccttttgcctatcactctggacttttggattgttttttacattcagtgttataatatttgattatgctgattggttttggtgggtactgatgtgaattaataaaaacatttcatttccatgtttattttctaatctcttccacattgtaggctatgtttaccatacgtagcagaatgtatttacatttcttggttctagtcatttgtattcttcgtgagtgtgtgtgtgtgtgtgtctgtgtgtgtgtctgtgtgtgcctttggcatttaggaagggttgtatagctcatgttaaatattgcactaaaaatgtttttgatggttttcctccctttgaactagac

SEQ ID NO: 431238 - DNA, 556 bp, Homo sapiens
ttctaatgatcatcctctaaacattttatcatttattaatcctccctgcctgtgtctattattatatacatatctctacgctgcaaattttgggtctcaatttttactgtgcctttgtttttactagtgtctgctgttgcaaaaagaagaaaacattctctgcctgagttttaatttttgtccaaagttaattttaatctatacaattaaaaccttttgcctatcactctggacttttggattgttttttacattcagtgttataatatttgattatgstgattggttttggtgggtactgatgtgaattaataaaaacatttcatttccatgtttattttctaatctcttccacattgtaggctatgtttaccatacgtagcagaatgtatttacatttcttggttctagtcatttgtattcttcgtgagtgtgtgtgtgtgtgtgtctgtgtgtgtgtctgtgtgtgcctttggcatttaggaagggttgtatagctcatgttaaatattgcactaaaaatgtttttgatggttttcctccctttgaactagac

SEQ ID NO: 431239 - DNA, 556 bp, Homo sapiens
ttctaatgatcatcctctaaacattttatcatttattaatcctccctgcctgtgtctattattatatacatatctctacgctgcaaattttgggtctcaatttttactgtgcctttgtttttactagtgtctgctgttgcaaaaagaagaaaacattctctgcctgagttttaatttttgtccaaagttaattttaatctatacaattaaaaccttttgcctatcactctggacttttggattgttttttacattcagtgttataatatttgattatgctgattggttttggtgggtactgatgygaattaataaaaacatttcatttccatgtttattttctaatctcttccacattgtaggctatgtttaccatacgtagcagaatgtatttacatttcttggttctagtcatttgtattcttcgtgagtgtgtgtgtgtgtgtgtctgtgtgtgtgtctgtgtgtgcctttggcatttaggaagggttgtatagctcatgttaaatattgcactaaaaatgtttttgatggttttcctccctttgaactagac

SEQ ID NO: 431240 - DNA, 619 bp, Homo sapiens
aacctgcaaggaagccaatttggtttatgtacttaaaacccctattctccatattattttaaatacaacattttctgatgttgctgaactttctattttacccttccagtttaagtaagagcaaaacaatatgataaagatttttacttctggaatttgattttaaacaacaaaaagggagagtaacacaaaaataatcagtatgtcactttataagtttcattattcttatttgaaaccyggtagaattagtattgtcaggaccacagttttgtgtttatttccgtttcccattctttgttggaggcaaattacgatgctattttttatttagaaaattcatcttggcccaggtgagaacatggagaagttgaagacttaccttctgttaacacttagactacttaaaagcaacaggcttgttattcgatcataataaaatgttttaacaaagctactggtgcaaagggtgagaaggtggcttaaatccacactctaaaacacattataactgaaataactgaaatatacactatataaaaaacattataactgaaatatacagaaatcactcgaatatattatcctactgactcattccttctgtttattactgtat

SEQ ID NO: 431241 - DNA, 619 bp, Homo sapiens
aacctgcaaggaagccaatttggtttatgtacttaaaacccctattctccatattattttaaatacaacattttctgatgttgctgaactttctattttacccttccagtttaagtaagagcaaaacaatatgataaagatttttacttctggaatttgattttaaacaacaaaaagggagagtaacacaaaaataatcagtatgtcactttataagtttcattattcttatttgaaacccggtagaattagtattgtcaggaccacagttttgtgtttatttccgtttcccattctttgttggaggcaaattacgatgctattttttatttagaaaattcatcttggcccaggtgagaacatggagaagttgaagacttaccttctgttaacacttagactacttaaaagcaacaggcttgttattcgatcataataaaatgttttaacaaagctactggtgcaaagggtgagaaggtggcttaaatccacaytctaaaacacattataactgaaataactgaaatatacactatataaaaaacattataactgaaatatacagaaatcactcgaatatattatcctactgactcattccttctgtttattactgtat

SEQ ID NO: 431242 - DNA, 540 bp, Homo sapiens
tcatgtttggccaaatgtcctggcaccctggtgctcggtcacagtgacaactacaagtaactatcacacatgccctttgtcatattggtgatttccactgtttttctcccaaactgcagcttatatttgttctcttaatactgttgagcaaaaacttttaatttttataaagtcgaatttatcaatgttttcttyaatggtttgtgtttattgataataaagaacactttgcctaactctgtgtcatgaagattttgtcttatattttctgctatactttttctagttttatagtttatatttagttgcataatccattttgagttagtttttgagttagtattgaggttcaggtgaatttttttcctttgggtataaaaaaaacaaattgtgtaaaaaaagttgtttctacacaatttgttgacaagagaatgccttctccactgaatcatatttgcacctttgtcaatccattgggtggttgagactggtgagaggactgtcctggtgtttggacagagagacagggcatgaagtagg

SEQ ID NO: 431243 - DNA, 540 bp, Homo sapiens
tcatgtttggccaaatgtcctggcaccctggtgctcggtcacagtgacaactacaagtaactatcacacatgccctttgtcatattggtgatttccactgtttttctcccaaactgcagcttatatttgttctcttaatactgttgagcaaaaacttttaatttttataaagtcgaatttatcaatgttttctttaatggtttgtgtttattgataataaagaacactttgcctaactctgtgtcatgaagattttgtcttatattttctgctatactttttctagttttatagtttatatttagttgcataatccattttgagttartttttgagttagtattgaggttcaggtgaatttttttcctttgggtataaaaaaaacaaattgtgtaaaaaaagttgtttctacacaatttgttgacaagagaatgccttctccactgaatcatatttgcacctttgtcaatccattgggtggttgagactggtgagaggactgtcctggtgtttggacagagagacagggcatgaagtagg

SEQ ID NO: 431244 - DNA, 540 bp, Homo sapiens
tcatgtttggccaaatgtcctggcaccctggtgctcggtcacagtgacaactacaagtaactatcacacatgccctttgtcatattggtgatttccactgtttttctcccaaactgcagcttatatttgttctcttaatactgttgagcaaaaacttttaatttttataaagtcgaatttatcaatgttttctttaatggtttgtgtttattgataataaagaacactttgcctaactctgtgtcatgaagattttgtcttatattttctgctatactttttctagttttatagtttatatttagttgcataatccattttgagttagtttttgagttagtattgaggttcaggtgaatttttttcctwtgggtataaaaaaaacaaattgtgtaaaaaaagttgtttctacacaatttgttgacaagagaatgccttctccactgaatcatatttgcacctttgtcaatccattgggtggttgagactggtgagaggactgtcctggtgtttggacagagagacagggcatgaagtagg

SEQ ID NO: 431245 - DNA, 398 bp, Homo sapiens
tccatgtctgaacttattgcagaaattgaaaagtaccaagaagtggaagaagaccaagacccatcatgccccaggtaactttgagcaattatggatgcttaattctgtgttgacacctggagatgccaggtccagggaaaacaagagtgtgttcaatttcatgttttcmacgaaggttgaattactcccactgacattgctgttggttttcattgcagtagatgtttaggtttccatttcttcctccccttatcatttactaacttactataggttgaccatacctcaaaggccgtatggcaactgcatggaatcttgagcaagtttatggaaaattattgagcccactcttttcatgatcactgttcgctgtgtgtcccgagggcactaactcagag

SEQ ID NO: 431246 - DNA, 398 bp, Homo sapiens
tccatgtctgaacttattgcagaaattgaaaagtaccaagaagtggaagaagaccaagacccatcatgccccaggtaactttgagcaattatggatgcttaattctgtgttgacacctggagatgccaggtccagggaaaacaagagtgtgttcaatttcatgttttccacgaaggttgaattactccyactgacattgctgttggttttcattgcagtagatgtttaggtttccatttcttcctccccttatcatttactaacttactataggttgaccatacctcaaaggccgtatggcaactgcatggaatcttgagcaagtttatggaaaattattgagcccactcttttcatgatcactgttcgctgtgtgtcccgagggcactaactcagag

SEQ ID NO: 431247 - DNA, 398 bp, Homo sapiens
tccatgtctgaacttattgcagaaattgaaaagtaccaagaagtggaagaagaccaagacccatcatgccccaggtaactttgagcaattatggatgcttaattctgtgttgacacctggagatgccaggtccagggaaaacaagagtgtgttcaatttcatgttttccacgaaggttgaattactcccactgacattgctgttggttttcattgcagtagatgtttaggtttccatttcttcctccccttatcatttactaacttactataggttgaccatacctcaaaggcygtatggcaactgcatggaatcttgagcaagtttatggaaaattattgagcccactcttttcatgatcactgttcgctgtgtgtcccgagggcactaactcagag

SEQ ID NO: 431248 - DNA, 466 bp, Homo sapiens
tcctgttactccctcatcagtgtgtcacctggacaattcactgagctcgttttctctctctctctctctctttctctctcagtgtgtgygtgtgtctttgtgtgtgtgtttgtgtgtgtgtgtgtgtgtgtgtgtgtctgtctttctctttcattcttttccatttggccctgttctgtcccaacatgaaggcaataatttgttacctcattaatggatctatccttttacttttttaaccacttccttatgctacccatgaaacctagttggggctctgttgtgtctgatttcccctggcttattctttactttttcctccttttccaggctcagcagggagctgctggaggtagtagagcctgaagtcttgcaggactcactggatagatgttattcaactccttccagttgtcttgaacagcctgactcctgccagccctacagaagttccttttatgcattg

SEQ ID NO: 431249 - DNA, 361 bp, Homo sapiens
ttagcaatgaacaatctgagaagaaaattgacacaatgatttcatttataatagcactkgtaagaataatatgcctgggaataaatttgttcaagaaggtgcagtacttgtacacagacaactacagaacattgctcgaggagattcaggaagacctaaatcaatggacagacatcttgtgtccatgggttggaagttgtaacatggttaagataaaaatacaactcaaagcaacccacagattcaatacaatcctatcaaaaagtggccttttttacaggaatgcctaacaagaacttcatattcctaaaaaatagtgtgtccccccaaaacaaaagcaatcttgaaatgcaagaagaaa

SEQ ID NO: 431250 - DNA, 361 bp, Homo sapiens
ttagcaatgaacaatctgagaagaaaattgacacaatgatttcatttataatagcactggtaagaataatatgcctgggaataaatttgttcaagaaggtgcmgtacttgtacacagacaactacagaacattgctcgaggagattcaggaagacctaaatcaatggacagacatcttgtgtccatgggttggaagttgtaacatggttaagataaaaatacaactcaaagcaacccacagattcaatacaatcctatcaaaaagtggccttttttacaggaatgcctaacaagaacttcatattcctaaaaaatagtgtgtccccccaaaacaaaagcaatcttgaaatgcaagaagaaa

SEQ ID NO: 431251 - DNA, 537 bp, Homo sapiens
ataaaattaaaaaaaataggcttcccaagaggctaagatttgctgcaactccagtttgtggtcaaatgcagaccagcagagtacagacggcattgttggcccaggagaaggcaacaatacagggagatgccacattttttatcaacctcctaacaattatctcaatgaatattcaaattggtgattgaagtacttgtttctccaagcaggtgataggcaaaattggaaaagttgccttgcttgtataaataattgtgtgctcagattgaatttgagggtatacagrtgcagcctccagtggaaaatattctaagaacaggatgtgggtagaggatgcaattatggaacttcatatcttcaccacctttctcttctttcttcctattttgactagtcttgtaatcctagcctcatgcatcaatatacatacaactaagagaggcaatatcaatgcaaaagacacaatatctatacaacgaaattagatggtgcctattgctaaaggtactttaacttcacatcatatagcccaattag

SEQ ID NO: 431252 - DNA, 626 bp, Homo sapiens
ctaaatcaatggacagacatcttgtgtccatgggttggaagttgtaacatggttaagataaaaatacaactcaaagcaacccacagattcaatacaatcctatcaaaaagtggccttttttacaggaatgcctaacaagaacttcatattcctaaaaaatagtgtgtccccccaaaacaaaagcaatcttgaaatgcaagaagaaacattttctattccaaaggtctttaactgctctaagcagtacttggtagtcttcaatatataggctttcacatctytttttttcttcttttgtttctgcacaggatctcactctttcacccaggctggagtacagtggcacaatcacagctcactgcagcatggaattctcaggcctatgacatcctagggcctcatccactgattcctgggactacaggctcacaccaccaaacccggataatttttctgattttcagtagagatgagggctcactatgttgcctaggctagtttcaagcttatgagatcaagcaaccctcctgccacagccttccaaagtgctgggatttgaggccaagcctggctggctttcatgtcttttctatgtagtttatatttctggatgccattgagagtct

SEQ ID NO: 431253 - DNA, 626 bp, Homo sapiens
ctaaatcaatggacagacatcttgtgtccatgggttggaagttgtaacatggttaagataaaaatacaactcaaagcaacccacagattcaatacaatcctatcaaaaagtggccttttttacaggaatgcctaacaagaacttcatattcctaaaaaatagtgtgtccccccaaaacaaaagcaatcttgaaatgcaagaagaaacattttctattccaaaggtctttaactgctctaagcagtacttggtagtcttcaatatataggctttcacatctctttttttcttcttttgtttctgcacaggatctcactctttcacccaggctggagtacagtggcacaatcacagctcactgcagcatggaattctcaggcctatgacatcctagggcctcatccactgattcctgggactacaggctcacaccaccaaacccggataatttttctgattttcagtagagatgagggctcactatgttgcctaggctagtttcaagcttmtgagatcaagcaaccctcctgccacagccttccaaagtgctgggatttgaggccaagcctggctggctttcatgtcttttctatgtagtttatatttctggatgccattgagagtct

SEQ ID NO: 431254 - DNA, 626 bp, Homo sapiens
ctaaatcaatggacagacatcttgtgtccatgggttggaagttgtaacatggttaagataaaaatacaactcaaagcaacccacagattcaatacaatcctatcaaaaagtggccttttttacaggaatgcctaacaagaacttcatattcctaaaaaatagtgtgtccccccaaaacaaaagcaatcttgaaatgcaagaagaaacattttctattccaaaggtctttaactgctctaagcagtacttggtagtcttcaatatataggctttcacatctctttttttcttcttttgtttctgcacaggatctcactctttcacccaggctggagtacagtggcacaatcacagctcactgcagcatggaattctcaggcctatgacatcctagggcctcatccactgattcctgggactacaggctcacaccaccaaacccggataatttttctgattttcagtagagatgagggctcactatgttgcctaggctagtttcaagcttatgagatcaagcaaccctcytgccacagccttccaaagtgctgggatttgaggccaagcctggctggctttcatgtcttttctatgtagtttatatttctggatgccattgagagtct

SEQ ID NO: 431255 - DNA, 626 bp, Homo sapiens
ctaaatcaatggacagacatcttgtgtccatgggttggaagttgtaacatggttaagataaaaatacaactcaaagcaacccacagattcaatacaatcctatcaaaaagtggccttttttacaggaatgcctaacaagaacttcatattcctaaaaaatagtgtgtccccccaaaacaaaagcaatcttgaaatgcaagaagaaacattttctattccaaaggtctttaactgctctaagcagtacttggtagtcttcaatatataggctttcacatctctttttttcttcttttgtttctgcacaggatctcactctttcacccaggctggagtacagtggcacaatcacagctcactgcagcatggaattctcaggcctatgacatcctagggcctcatccactgattcctgggactacaggctcacaccaccaaacccggataatttttctgattttcagtagagatgagggctcactatgttgcctaggctagtttcaagcttatgagatcaagcaaccctcctgccacagccttccaaagtgctgggatttgargccaagcctggctggctttcatgtcttttctatgtagtttatatttctggatgccattgagagtct

SEQ ID NO: 431256 - DNA, 466 bp, Homo sapiens
tcctgttactccctcatcagtgtgtcacctggacaattcactgagctcgttttctctctctctctctctctttctctctcagtgtgtgcgtgtgtctttgtgtgtgtgtttgtgtgtgtgtgtgtgtgtgtgtgtgtctgtctttctctttcattcttttccatttggccctgttctgtcccaacatgaaggcaataatttgttacctcattaatggatctatccttttasttttttaaccacttccttatgctacccatgaaacctagttggggctctgttgtgtctgatttcccctggcttattctttactttttcctccttttccaggctcagcagggagctgctggaggtagtagagcctgaagtcttgcaggactcactggatagatgttattcaactccttccagttgtcttgaacagcctgactcctgccagccctacagaagttccttttatgcattg

SEQ ID NO: 431257 - DNA, 466 bp, Homo sapiens
tcctgttactccctcatcagtgtgtcacctggacaattcactgagctcgttttctctctctctctctctctttctctctcagtgtgtgcgtgtgtctttgtgtgtgtgtttgtgtgtgtgtgtgtgtgtgtgtgtgtctgtctttctctttcattcttttccatttggccctgttctgtcccaacatgaaggcaataatttgttacctcattaatggatctatccttttacttttttaaccacttccytatgctacccatgaaacctagttggggctctgttgtgtctgatttcccctggcttattctttactttttcctccttttccaggctcagcagggagctgctggaggtagtagagcctgaagtcttgcaggactcactggatagatgttattcaactccttccagttgtcttgaacagcctgactcctgccagccctacagaagttccttttatgcattg

SEQ ID NO: 431258 - DNA, 553 bp, Homo sapiens
aagaaatggaaagatatttcatgttcctggatttggaagaatcatgtggtacaaaatgtccatactaccccaagcaatttatagattaaatgcaatccctatcaaaataccaaagacatattcacagaaatagaaaaaaaatgctaaaatttatgtgtaagcacgaaagactgagaatagccaaagctatcctgagcaaaaataacaaaactggaggaatcacattatctgatttcaaattatactacagagctatagtaaccaaaacagcatgatactggcatgctgacacatagaccaatggaatacaatatckaacccagaaacatatccgtacatctacagtgagttcctttttgacaaagacaccaagaacatacattggggaaagaacagtcacttcaataaattgtgctgggaaaactggatatctatatgcagaagaatgaaactagacccctatcagtcaccatatacaaaaatcaaataaaatggattaaagacttaaatctaagaactcaaactatgaaactactaaaataaaacatttaga

SEQ ID NO: 431259 - DNA, 553 bp, Homo sapiens
aagaaatggaaagatatttcatgttcctggatttggaagaatcatgtggtacaaaatgtccatactaccccaagcaatttatagattaaatgcaatccctatcaaaataccaaagacatattcacagaaatagaaaaaaaatgctaaaatttatgtgtaagcacgaaagactgagaatagccaaagctatcctgagcaaaaataacaaaactggaggaatcacattatctgatttcaaattatactacagagctatagtaaccaaaacagcatgatactggcatgctgacacatagaccaatggaatacaatatcgaacccagaaacatatccgtacatctacagtgagttcctttttgacaaagacaccaagaacatacattggggaaagaacagtcacttcaataaattgtgctgggaaaactggrtatctatatgcagaagaatgaaactagacccctatcagtcaccatatacaaaaatcaaataaaatggattaaagacttaaatctaagaactcaaactatgaaactactaaaataaaacatttaga

SEQ ID NO: 431260 - DNA, 564 bp, Homo sapiens
ctaaaagacaggcaagaacaaatgctggcacatatttggataaaagaggatgctcatacactgtttgtgggaatgtaaattagtacaaccaatatggataacaatttggagtttcctcaaaaagctaaaaataaagccgccatatgatctagcaaactcactgctagtatatacscaaaagaaaggaaatccatatatcaaagaaatatcttcacccctatgtttattgcaccactattcacaatagcccagatttggaatcaacctaagggtctttcaacagatgcatggataaagaaaatgtggtgcatatacacaacagagcactattcagccataaaaaataattagatcctgtcatttgcgacaatgtggatggaactgaaggtcattatgttgcgtgaaataagccagacacagaaagacaaactttacatgttctcacttattttgggagctaaaaattaagacaattgaactcatggagatagagagtagaatgatggttaccagaccctggaaaggatagtgggtgggtgagggagaagtggggatagttaatgg

SEQ ID NO: 431261 - DNA, 564 bp, Homo sapiens
ctaaaagacaggcaagaacaaatgctggcacatatttggataaaagaggatgctcatacactgtttgtgggaatgtaaattagtacaaccaatatggataacaatttggagtttcctcaaaaagctaaaaataaagccgccatatgatctagcaaactcactgctagtatatacgcaaaagaaaggaaatccatatatcaaagaaatatcttcacccctatgtttattgcaccactattcacaatagcccaratttggaatcaacctaagggtctttcaacagatgcatggataaagaaaatgtggtgcatatacacaacagagcactattcagccataaaaaataattagatcctgtcatttgcgacaatgtggatggaactgaaggtcattatgttgcgtgaaataagccagacacagaaagacaaactttacatgttctcacttattttgggagctaaaaattaagacaattgaactcatggagatagagagtagaatgatggttaccagaccctggaaaggatagtgggtgggtgagggagaagtggggatagttaatgg

SEQ ID NO: 431262 - DNA, 624 bp, Homo sapiens
agggtgattagacatcacttgagggatggtagaggtgatatatttatggtgatcagatactgagaatggatgattacggctaaactgaacaagattcttgctaaaattggacaatgcagagatgaacatggcaacccagaagtcaggacctagttgacaagaaagttcagaggaacctgagctgggtttggtgaaggacagaatttttgtcacctgacagtaactcatgtaattccactgacattcatgtttgctagatatgggggtgcagcgggtgtgcacaggtcagaaaaaatggaccctggagaaaatttagttttgctggacattagttcccagcagccactttrtactatgaaaggataacaacaatttgggtggacaactagctagctgtctgtgccacaaatagagttctgccttccctaatcagtttctgtagctcattattaaaaaatgttttggagaatttcagtgtgaggatggtgattgtctgtctcttggtcaatttaacaatgtttctcatcacttttatggtaaacatgaatctccagtatttgtttacacagcccagcaaattccaatagcagttcttgatagcacccacacaagccgcctttccac

SEQ ID NO: 431263 - DNA, 620 bp, Homo sapiens
ctataaacttagttttatattaaagatggttattttgattgatcttgatatgtttttcatttcatcagtaacaatgaaagtcttctggtagaataatcagttctgtattaaaattattttcttgatatggtagggtttatgtagaaccttccatattctcctgtcacctgtgatctgtagatattgtcaaaatatgaagagcattgcgatggcagaagagttttctgagaaattgactcccctaaatrtgggtatagtatataatatagccaaccgagatcatttatgttttgaatacttgttttctgaattgaaaagacatcttctcccactttttgttatctggaaattgattatggactctgcatttaggattcaatatagtggatatctgaatgtagatataacatctgggactctgagaatagaggaagaggaacatatactaaagaataaaatgagttcatctgttttcacaaaccacttggtggtgttttatataagaattagccccaaattgggcatgtttgtgaaaatgaatgaatgaaataatttactagattttcccaattgtaacccatatattatttaatatcgtaaacacagcacttactaagttt

SEQ ID NO: 431264 - DNA, 615 bp, Homo sapiens
catcactgttgcaaaacctaagatcagtgcttgagatattttgcagatcttgcattctgatgcaccagctgacactacccagacccaggaatctggctcaaccagttctgtgatcccaaacaagagcaaaagacagcgagaaaaacccactttgaacccttatgatttcatcttcaacctgaccaatcagcactcgccactttctgtcccccatccacaaaattatccttaaaaaccctgatccctgaatttccagggaaactgatttgagtaataataaaattccagtctcccatacagctgattctgcatgactttaactctttctctattgcaattctcctatcttgataaatcaatgggcaaggagaacccattgggtggataagttatgttccagaacaacatcaacaacattattttttttttttacttttcatttcccatcaccaggaagttcacaacacacgaccttgaagagtcaatggaatctgccaagcttctgtttcatcatctgtgaagtgggagtaacatttcctacccagctgacctcatggggttkttttaaagatagaattaaatagggaatatagatggacacaggaaggtccaagt

SEQ ID NO: 431265 - DNA, 317 bp, Homo sapiens
gctcctcaagggcttcatctgaactagaaytctgaagccatgaagttgattctcagatgcccacaccaagggcaccaatagcattttaaacccaaagctgtagatgagatactggtattttcctgaggacataacctttaagttgtatcacttttcacctcttacaatacctcccacacccaggctttcttagagccttgaattaattttgttttactcaatattaaattgagattttgattcctgcatgtatctcatctttgaagttgaagagatagcaagaaactggcctgatatcagaaaactacggtggaaat

SEQ ID NO: 431266 - DNA, 580 bp, Homo sapiens
  misc_feature (1)...(580): n = A,T,C or G
tgaataaatgaggccatacttactggagcaaaatgaattttttttattgtacttcagggcaacaagtcawcagctgcaggaaaacaaaaccaggtccaatctatgatctaagaggaagtcaggaaaggcttggaagagagatccaaaggccggcctggcaaggggaatcccacatgagaattcctgggagagagcaggccccaggcagcaaggtcatcttgcctgcttctctgtaagttaatcctggaaacaaaaggaaaaatatttcaaagcccaactcagtaaactgaggcctaagtcaagttactaaacaatggatgctcagagttggaaggctgctacccaattatctaatcaggagtttcaaatggttctaggccctttgccaggatagcagagccagtcttttagttgtctgtctgcagtgagccccagcgccctgcttctccaccctctgccctagaaccaatgtatcacagcataactgtttggtcagcaacagccttcatctgcacaggaggatatacaacacacctannnnnnnnnnnnnnnnnnnnnnnnnnnnnnnnnnnnnnnnnnn

SEQ ID NO: 431267 - DNA, 594 bp, Homo sapiens
tgtttttgcctttgaaacctgaaagcattgctgagtaattgccaaacmaacaaaattagaatttcaatgattcataattcaaaaagcctttcaaaataattgagagtatgcaggaataaatttcacagggcagtaagaatgtttataaaaatgttcttgcaggccgggggcggtggctctcgcctgtaatcccagcactttgggaggcccaggcgggcggatcacgaggtcaggagattgagactatcctggccaacatggtgacaccctgtctctactaaaaatacaaaaattagctgggcgtggtggcgggcgcctgtaatcccagctactcaggagactgaggcaggagaatcacttgaacgcgggaggcggaggttgcagagagccaaggtcgtgccactgcactccagcctggcaacagagcgatactccattaaaaaaaaagaaaagaaaaagtcttgcatctctaacctaacctatcttctctgctctctttgaagttctatgaatcaaaactgtgattacaattttttaacaaatatttaaatacccgtggtaataaaatgaattcctcatgctgtcttcgccaag

SEQ ID NO: 431268 - DNA, 564 bp, Homo sapiens
aactcatctcgtttagagtgaaaagatgacaagcagaggttcgcagaagccacatacaaccaatgaagcctataaggtagctgagaattaaacaaaagcacctgttccgattaccttcattgttcctggttagttagcacctccctttcctcaacagaatgcccggcgcacaggggtgggatctgagtgagggcaacaggtggattggagaacatttcttcccataagtagtaggatttgatggaaaaacaagtaacttcagggtaataaaatgatggaaagtcctgatgggtcaggtccatatctaatcttaagaagggcagccttaggcagcatagtgggtgctagaatcattggtaccatcaagaaaagagtagtaatgtgaatttcaaagaagatcactttgggataatgaacagcatgacagaatccgggagcctaatgaagaagatgtgatatagtaaaagaaatataytgagtgtaggctttgaatagggcagaaggagtggaactagagaggcaagaggagatgtgattatggaaggtcttgtatatcataccaag

SEQ ID NO: 431269 - DNA, 640 bp, Homo sapiens
agcatctaaagtagtcaatttcataaaaacagaaaggagaatggtagttaccaagagagaaatgaggggacaggggaatggggagttgtttaatgtgtatggagttttagttctgcaagatgaaaaaacttctgaagatctattttataacaatgcaaatatgcttcatactactgaactgtacacttaagaatggttaagatgctaaattttacattaattttttataacaattwaaaaaaaaagcaaaacctaaggtatgtttctgacttatttacatttaattcatcactcatttggagagaaatcagaggtccatgaaaccctggccttcactcctttaattagcctctagctctttcttcttagacacaaaatcttctattttgacaggattaagtgaacaggaatacatgaaaggaaaggtttaaattttccttgaaattgagactctgactcccagaaggccaacgaggttctaaacttgaaatgtgcacttgacaatcactattaataactaagatatacctccagacaaattcccaaacctacttattatgtatgaacatgagcaattatgcctttgcacaacacatacacaatatactgcagagcatgcaatcaaattaatgcataatat

SEQ ID NO: 431270 - DNA, 648 bp, Homo sapiens
actattagttaccaatttctttctttaaacattcatcaaagcgactgtggaaaaaccaagtgtagcttaactggcatttggatataagaatctggaagactgaagagaagtcttagctaaagatgtatgtttgggagtcatcactcaataaatgggatttaaaatcctccatcatttctcaagccattcttctctccactctgtaagtctaatcattcacctatcttcattgattctacttgcaaattagttctctaatcttttccacagctgctgtcatctcttatattagtagcctcaaattgtctcaccatattcagttttacccacttccaaaacattctctacactgcagccagaattatccttactatatcagttttctagggctgctgtaacaaagtattagaaactgagtggcttaaataactgcattctattgtctcccagttctggaatctatagtttgagatcaatgtgttggcagaactatgctacctctgaaggtactagggaagaatctattccaggcctctctgctaacttctggtagttccgtgatctgtggaaacataaccccagtcttcacatagcattcttcctgtgtgaatttmtatctttccgcatgatatttttaaaaataaggac

SEQ ID NO: 431271 - DNA, 555 bp, Homo sapiens
gacataattcaaccactatattttttaaatgttaataggatcctgtcatttcctcttaaaatggttccccactgtcttcaggataatatccaaaatgtcttaacatggtttactaagtgcttcatattctggtccctaggtcctctcttgtttcatgtcttgcagctctccttcttcctaccctactctcagaaatactcagcaataaatgtaaaattacaattgcaatatgtattttaataacctgatgccagtacagactctaatagtggatttgatctattcaggaagatcagaaggtgcttcttcaagggaatgatgattgatctaagaggtaaaagatctaaataggtggaaacagaagagaagagcatcccagacagaagacgcagtttgtcctctatgtttgaaggatgaaccaaaggaagataagagcaacrtggtatgagatgaggttggagtggcagggaggtccagatgaagcagagacctgtgggccatattcagaggagtttagagatggcacagaagaatcccggagactcttacccaggg

SEQ ID NO: 431272 - DNA, 579 bp, Homo sapiens
ttgatattgatatgagtctacctgtgcccctggaaatatcatctgcgtaccttgggttacatattgtggacatgcctctttgaaccaacttaagcactttctcctaagcacaattcttatgtttagaccgcaatacggttttgctgaaagtgctgacctgggaagggaatggctcaaagagagggagaacagcttggtggctattataatagttctcattgcgttatgctcaggcatcgaagatccctgtgcattatctatgtatcctaggtatcaggactgggggattcaggacactagctgacataattagaatgcttttkgatgtattctctttgtttatgatgcctgtttaagttttagttaactttcattatcatccctaccacctgatttaactctaacccttccctgtccaccctaggtctcactgcagcctttcatccctttacttttcctcataacaacattaacaaatccaacatcctataatttacttactagtgttatttttgtccctttctcccctgttcctgcactggcatgtaaattctattaggctttttttttttttttttt

SEQ ID NO: 431273 - DNA, 485 bp, Homo sapiens
acaagtcagaggctcatggtacgagtcagggctggaggtataaagttatacagaaggagttaaagcaatgtaattagattaggtcattcaggaataaaatgcagatagagaagaaaaagagctcaagctytttagcactccagcaattagagattggccggaggtaaaaaaaaaaaaaaaaaaaaaggaaaccaaaaagtttgaaaataaccagtgagacagagggaaagcaggagggacaggcacagttctgaatgccttactatcttatttcatttaatcctatgagcccaataatattctcaataaaaaaaaaaaggaggaaatagtcaagttggacagacggtattgaaaagcagagtcagccaaaaacacagaacaatgtgttgacaatgttgaccactgatgatgtcaacaagggtatttcagtgttgaaacaataacttattgtttaaacagaaactatatttacttacaaattagaa

SEQ ID NO: 431274 - DNA, 597 bp, Homo sapiens
tccttgttaaagaaagccacaaatgtcaaacacttccttttatttarggtctaaaatattgattttcttttatggtaacagcactgtatttgttttggctatttttttcctctgcaaaagtatactaactctataccagcacatctggtttcaaaacaatcagcttgggaggagttaagaatttggtgacatctattgaataaccacataatttttatttagtacctattctgtgcaaggcactgtgaagagtaaaataattttaaaattctaatcagtgtgaacttaatctcagcacacagcgctaagctgtgtgggagagtttcatgatcaactagagtcaattcgtatgctgttttagaagcctaaggaatggctttgtaaaacaagtcatttctctgctaaaatgaatctcgacattttgccaccttacaggaaaaaatgacttgattattggctggggcacaggtagaaggtgagagagagaggaagggaagaaacagcaccagagagacctataagtatagtgtagtagaatttttgatatacacatgattgaatgcctattacaggtcagtcatatttctcagtacttta

SEQ ID NO: 431275 - DNA, 543 bp, Homo sapiens
taggggaaaaccagaaatattctgtgccctgcaaatctatacaatactaagacacatgttttgggccaaagttaaattattccaacaaataattgaaataatgccaaaaaattcaagatcactgaactctaacttgctttcctcatgtaaatgcaatctcccctgtgttctccttggtacactaatggcactctgaggaaatccacagtgagaaatcatagcttcttcccagccctctcagcctgctgtscattttaatcttggctcccatcagaaaggctttgagagtatgaccctgccctccagactcacttattatccttctcagcaataggagtccttattaaaatccatgcacttttttcagctgtggcactgctagctgagcccaaattggaaaaattgaaaatagcaagcaagaagaggaaaacaattttacatggctccttttggatcaataaaattaataatttttgtcagaaataagtcattccagcatggttagaaatatctggtcagtcaacccacctggtgcaatatttt

SEQ ID NO: 431276 - DNA, 483 bp, Homo sapiens
atagatagggaggctgctcttggataagtaataaatgygttgcagaagttaagaaacagattccagaagtagagaaatctatgcagaagcatatagctagaaagtagcagagtggtaattgaacacaaatctgatgacagagccaatgcttccttttattctagcatgctgctagaaactggttcttttataatagtcttaaaataccttaagtctttgagatgagatgaaagtgaaatatgatgaaatgttgaagattgtaattgaaattatacaattacatatctctttcatattaaactttcaaagtcctggtactaatagcttgtattttaaattatgtcttcattgtttaatccatattgaaaatttggcttatgcaaaattatatgcctttgacaccaaaaagatatagaaaagatatggccactatatgataaatttcttatcctctctaataagaaataaatatttagtcccagg

SEQ ID NO: 431277 - DNA, 483 bp, Homo sapiens
atagatagggaggctgctcttggataagtaataaatgcgttgcagaagttaagaaacagattccagaagtagagaaatctatgcagaagcatatagcyagaaagtagcagagtggtaattgaacacaaatctgatgacagagccaatgcttccttttattctagcatgctgctagaaactggttcttttataatagtcttaaaataccttaagtctttgagatgagatgaaagtgaaatatgatgaaatgttgaagattgtaattgaaattatacaattacatatctctttcatattaaactttcaaagtcctggtactaatagcttgtattttaaattatgtcttcattgtttaatccatattgaaaatttggcttatgcaaaattatatgcctttgacaccaaaaagatatagaaaagatatggccactatatgataaatttcttatcctctctaataagaaataaatatttagtcccagg

SEQ ID NO: 431278 - DNA, 535 bp, Homo sapiens
ttccttgtttcttctttctacagccctttttttcccctataaaagcctacctctgtctgcttagctcattggagcacctttctatttagtagatgggatgttgctcagtttatgaatygctaataaaagccaattaggtctttgaaactaaatttgttgaaatttgcttttttgatgccactattgctctttatcaaaatgatcccatagatagtctatagtcttttcttagtgttttctcccaaatctgttgggaagatactaagaaagttccgtaagtctgaaatctggtcctaaaactgtgtccagtaggtaccattgtattcaatatagcattttggtttaatcttgatcttctaaagtctgaatatgttctttagtttgtctagtttctgcagtcttgtgtactaaaagggtagtaattttcagttagctaattactatgctttacacagttataaggacgaagcattttagaatggcacttcattaaagcagtaaaaatactgtgggctcagtaatctcatttactggg

SEQ ID NO: 431279 - DNA, 535 bp, Homo sapiens
ttccttgtttcttctttctacagccctttttttcccctataaaagcctacctctgtctgcttagctcattggagcacctttctatttagtagatgggatgttgctcagtttatgaatcgctaataaaagccaattaggtctttgaaactaaatttgttgaaatttgctttkttgatgccactattgctctttatcaaaatgatcccatagatagtctatagtcttttcttagtgttttctcccaaatctgttgggaagatactaagaaagttccgtaagtctgaaatctggtcctaaaactgtgtccagtaggtaccattgtattcaatatagcattttggtttaatcttgatcttctaaagtctgaatatgttctttagtttgtctagtttctgcagtcttgtgtactaaaagggtagtaattttcagttagctaattactatgctttacacagttataaggacgaagcattttagaatggcacttcattaaagcagtaaaaatactgtgggctcagtaatctcatttactggg

SEQ ID NO: 431280 - DNA, 602 bp, Homo sapiens
  misc_feature (1)...(602): n = A,T,C or G
taatgctgtgacccagtaattccattcctagatacctcacattcatgggtacatttggcatgaaaggaagtatacaatcatgttcatgcaaatcaaaaataaccctgtgctcattaacagtggaatgaaaaaaktatatgtcaaaatgatacatcatatattcatataatgaaatagtgaatgagctagtggtatgcacagcatgcatgaatcttgcagatacaatggtaagcaaacaaagccagatgcagagaatgcataccataatatttcatttatataagccaaaacaggtaaaattaagcgatagtgatacaagttggaatagtgttctgttttccttgtgtacttgttatacttcattaacacatgtttaaaaaaaacccaaaaatatcgcaagataaaaaatgcagaagcattttctgggtaaagaaagatgggcaaacattacaaaaaaaaggaaatttgggaggttcaaattctgtatcagtcatgagacttctttcctccaaaagaacttacttttgaacttttaaactctattaacattcttatctattatttattatggaactagatagggccacttatagtaattgnct

SEQ ID NO: 431281 - DNA, 602 bp, Homo sapiens
  misc_feature (1)...(602): n = A,T,C or G
taatgctgtgacccagtaattccattcctagatacctcacattcatgggtacatttggcatgaaaggaagtatacaatcatgttcatgcaaatcaaaaataaccctgtgctcattaacagtggaatgaaaaaattatatgtcaaaatgatacatcatatattcatataatgaaatagtgaatgagctagtggtatgcacagcatgcatgaatcttgcagatacaatggtaagcaaacaaagccagatgcagagaatgcataccataatatttcatttatataagccaaaacaggtaaaattaagcgatagtgatacaagttggaatagtgttctgttttccttgtgtacttgttatacttcattaacacatgtttaaaaaaaamccaaaaatatcgcaagataaaaaatgcagaagcattttctgggtaaagaaagatgggcaaacattacaaaaaaaaggaaatttgggaggttcaaattctgtatcagtcatgagacttctttcctccaaaagaacttacttttgaacttttaaactctattaacattcttatctattatttattatggaactagatagggccacttatagtaattgnct

SEQ ID NO: 431282 - DNA, 535 bp, Homo sapiens
agaggttttatcaattctctggctagaattttctttggaggtaaggaaaatcatactacctaataaattttcttaattttcatgtgggattcctgccagcatataaagctagtggtaaatggaacagtcattgccattcactcaatacagattttttttttcattttkttttgctttctgggctgaaggatactttaagggcttatagtttgagaggaggaggttggtaaagatggaatgattgacgatacaagagaaggaccactgatggagtgagaatacatggaagataagactcaataatttaagagtatagttagattggtaccctttggaaaggcagaaatacatctttcttggaaacaggaacaatgaatcaagaatgagagaagaaacaggttactttataagaaaggacttcaactagattcactctaggttctcttatatttctaaaaggaagcaagtgttaattgatgagagatagggtacttcgagttacagttaacagactttaaaataggatgaacttttg

SEQ ID NO: 431283 - DNA, 594 bp, Homo sapiens
gagatcaggccactgcactccagtctgggcraaagagtgagacactgtcttaaaaaaacaaaacaaaacaaaaaaacactatacctacggaggagtaaagaaaagaattacaactaatttatcctaagaaacctaaacaaggagaaagaggagtgaagaaaccatataagcaagaagaaagagaaaaaaaagaccaacctaaaaatctgtacccctataaaattgtccttcaaaagtgaaggagattatattaataatcactttgggctgtgcgcggtggctcacgcctgtaatcccagcactttgggaggccaagatggggggatcacctaaggtcaggagttcgagaccaacctggcccatgtggcgaaaccctgtctctactaaaaatacaaaaattagccaggcatggtggtgcatgcctgtaattccagctactcaggaggctgaggcatgagaattgcttgaacctgggaggcggaggttgcagtgagccaagatcgtgccactgcactccagcctgggtgacagagtaagacttcatctcaaaaaaataaataaatgaatacataaaataattttttttaaaaaaat

SEQ ID NO: 431284 - DNA, 594 bp, Homo sapiens
gagatcaggccactgcactccagtctgggcaaaagagtgagacactgtcttaaaaaaacaaaacaaaacaaaaaaacactatacctacggaggagtaaagaaaagaattacaactaatttatcctaagaaacctaaacaaggagaaagaggagtgaagaaaccatataagcaagaagaaagagaaaaaaaagaccaacctaaaaatctgtacccctataaaattgtccttcaaaagtgaaggagattatattamtaatcactttgggctgtgcgcggtggctcacgcctgtaatcccagcactttgggaggccaagatggggggatcacctaaggtcaggagttcgagaccaacctggcccatgtggcgaaaccctgtctctactaaaaatacaaaaattagccaggcatggtggtgcatgcctgtaattccagctactcaggaggctgaggcatgagaattgcttgaacctgggaggcggaggttgcagtgagccaagatcgtgccactgcactccagcctgggtgacagagtaagacttcatctcaaaaaaataaataaatgaatacataaaataattttttttaaaaaaat

SEQ ID NO: 431285 - DNA, 566 bp, Homo sapiens
ccatagccaatatgaaagctcagaatatttctgtcaactaacttaattacatatgtatgtaggagaaaaaatcaatcttactgtaagatctgaaattaaaaaatagtacaaatattaacaccaataatgattatagaatgtcaataattatatcaagtattctgttatgactatagtagctttataagctactaccaattattttattttcttctacaagcaccactttttctatcaaacttttatacttaaagcatattaatgtaccaatatcatttatagwgtatggagtacatttgtggaatgtgttaccctggattatggctacttttatagtgaataaatcttgtaaattccaaaaatgtgcatagtggaataaccattgtcccgtctgccgatcattaacactctactattacaatgggaagacaatttcagcaaaacaaaaacaatctaacaagactgaatctttaaaaataatagcttattctttatctaattttgttcaaaagccatacgagaaatatgcatgcaattggattttgttatgtgggtatatgttacat

SEQ ID NO: 431286 - DNA, 590 bp, Homo sapiens
ctgaaatctagtgtctttctttaagttcaagtaagagaacagggccattttgaacactaatggttatttaaatttcaaaactttgtttttgaatcatttcatatttgagagacatggtgaactgtcagagycaattttattttgttagatccactaagctcttattctgcgtttttatataatcttaaaaaaataatgttttattctttaaatacaaaaaaaaacctcaatgtctttattgggttaatatttaattgatatcccttcctacttttttagttaaagattaatgtaagagatatgcactttaatggtatttttttcatcttgcaaagctatgagcaaagatagatattactcatcatggtatctaaaatctccaaattcaggaagcaaataatatactcattcttttaaaaaatgaccaagaaaaacaaatcttttgcaagatgaattttatcctttcatgtatcagaccataattactatatagatcaacatattgctattttttaccttatttaccaggaaattaaaaatagaagtcaggctcaactgtagcactcagtttatgctagtacagtaacact

SEQ ID NO: 431287 - DNA, 550 bp, Homo sapiens
actatgaggttcctaacctatacaattgacaatgtgacagtactcattattaaaaatagaagattgtagaagaaggagttttaaacttgaaatttaggttcctattatatatttaattggaattatcaagaaagcaattaaatatgaatctaaagtttaaggggcatatagaagttagcaacataaatttagatttcatcaacagtagataacatttaaggccaaaagataatatgagaccacaaaattgaatgtgtgcccccagagaagagaacgcatataaagacaagtcctatggagmccaattttaaaagatgagagagatgaggaagaaccagcaaagaaaaaaaaagtaaacatttaaaaaaaagggtggccacagaagtaaatgaaactgaaacatttttactgtccataagtcaagagaatgagtgtttcaaagaagaaagggtacacactaaaatttctccatcaggattaacaattacctctgtgtagctaattccaacggtcaattattggtcctcatgatatttgacctatcactggt

SEQ ID NO: 431288 - DNA, 550 bp, Homo sapiens
actatgaggttcctaacctatacaattgacaatgtgacagtactcattattaaaaatagaagattgtagaagaaggagttttaaacttgaaatttaggttcctattatatatttaattggaattatcaagaaagcaattaaatatgaatctaaagtttaaggggcatatagaagttagcaacataaatttagatttcatcaacagtagataacatttaaggccaaaagataatatgagaccacaaaattgaatgtgtgcccccagagaagagaacgcatataaagacaagtcctatggagcccaattttaaaagatgagagagatgaggaagaaccagcaaagaaaaaaraagtaaacatttaaaaaaaagggtggccacagaagtaaatgaaactgaaacatttttactgtccataagtcaagagaatgagtgtttcaaagaagaaagggtacacactaaaatttctccatcaggattaacaattacctctgtgtagctaattccaacggtcaattattggtcctcatgatatttgacctatcactggt

SEQ ID NO: 431289 - DNA, 550 bp, Homo sapiens
actatgaggttcctaacctatacaattgacaatgtgacagtactcattattaaaaatagaagattgtagaagaaggagttttaaacttgaaatttaggttcctattatatatttaattggaattatcaagaaagcaattaaatatgaatctaaagtttaaggggcatatagaagttagcaacataaatttagatttcatcaacagtagataacatttaaggccaaaagataatatgagaccacaaaattgaatgtgtgcccccagagaagagaacgcatataaagacaagtcctatggagcccaattttaaaagatgagagagatgaggaagaaccagcaaagaaaaaaaaagtaaacatttaaaaaaaagggtggccmcagaagtaaatgaaactgaaacatttttactgtccataagtcaagagaatgagtgtttcaaagaagaaagggtacacactaaaatttctccatcaggattaacaattacctctgtgtagctaattccaacggtcaattattggtcctcatgatatttgacctatcactggt

SEQ ID NO: 431290 - DNA, 608 bp, Homo sapiens
caaacttacaggcttaaaaccaaacatatgtattatcatgcagagtttctgagggtcagaaatctagaagcaatttatctgagtctctcatgagcgtatagtcctcatgagattagctgaggttgcaattatctgaaggtttgactggggttggaagatctgcttctaaggtcacttaggtggctstcaccagaaggcctcagttcttcagcacatggtcctctcacaacatggcatctgacttcccccagagcaagtgattcaacagagagagacagagagagagagagagagagagacagagagagagaggccaagacagaagttatatgcctttaatgtcttagttgtaaagtcacatagcattacttctgcatttttctatttgatagaaatgagtcatcaattccagcccacatgcaaggagaaggtaattaagcttcatctcttgaagggaggagttaaaaaaaactttggacacgtataaagtcaaaagaatagtttcctattcattattgcattcccatagagaaactaatactcttcctatggtcaattaattttttttatcttaatgcactttcattacattcatccaactaattccc

SEQ ID NO: 431291 - DNA, 608 bp, Homo sapiens
caaacttacaggcttaaaaccaaacatatgtattatcatgcagagtttctgagggtcagaaatctagaagcaatttatctgagtctctcatgagcgtatagtcctcatgagattagctgaggttgcaattatctgaaggtttgactggggttggaagatctgcttctaaggtcacttaggtggctctcaccagaaggcctcagttcttcagcacatggtcctctcacaacatggcatctgayttcccccagagcaagtgattcaacagagagagacagagagagagagagagagagagacagagagagagaggccaagacagaagttatatgcctttaatgtcttagttgtaaagtcacatagcattacttctgcatttttctatttgatagaaatgagtcatcaattccagcccacatgcaaggagaaggtaattaagcttcatctcttgaagggaggagttaaaaaaaactttggacacgtataaagtcaaaagaatagtttcctattcattattgcattcccatagagaaactaatactcttcctatggtcaattaattttttttatcttaatgcactttcattacattcatccaactaattccc

SEQ ID NO: 431292 - DNA, 608 bp, Homo sapiens
caaacttacaggcttaaaaccaaacatatgtattatcatgcagagtttctgagggtcagaaatctagaagcaatttatctgagtctctcatgagcgtatagtcctcatgagattagctgaggttgcaattatctgaaggtttgactggggttggaagatctgcttctaaggtcacttaggtggctctcaccagaaggcctcagttcttcagcacatggtcctctcacaacatggcatctgacttcccccagagcaagtgattcaacagagagagacagagagagagagagagagagagacagagagagagaggccaagacagaagttatatgcctttaatgtcttagttgtaaagtcacatagcattacttctgcatttttctatttgatagaaatgagtcatcaattccagcccacatgcaaggagaaggtaattaagcttcatctcttgaagggaggagttaaaaaaaactttggacaygtataaagtcaaaagaatagtttcctattcattattgcattcccatagagaaactaatactcttcctatggtcaattaattttttttatcttaatgcactttcattacattcatccaactaattccc

SEQ ID NO: 431293 - DNA, 521 bp, Homo sapiens
gaaacatggacaaaatctgtacacaaaggaacactgagaagatcagcatacttgagactyctggagatgacgaggaacctcctaatggctagtttttcaacccacaaccagtgtccctcacatgggaagcttgtttatactagaagactcccttgtatctgatttctgaccaattacaactgtgtgaccattgctgtatgccgcagctgggagcttgaacaacaacaacaacaaaaatggcatggatatcagtaccagccacatggtgagtgccaacatggttcccagtggccttctctgcagagcaccttggcagactttgccactgagggttacaacagcccatatggcatctgccgattcaccatagccttcacagcaaaggtgccattagtgtttattggcatggaccccagcagccggctctgcagaggatactggcagtttttgccactgagctaaccaacagccatcatagaaacaaacctccttggagagggagatgctgctggtatccctac

SEQ ID NO: 431294 - DNA, 521 bp, Homo sapiens
gaaacatggacaaaatctgtacacaaaggaacactgagaagatcagcatacttgagactcctggagatgacgaggaacctcctaatggctagtttttcaacccacaaccagtgtccctcacatgggaagcttgtttatactagaagactcccttgtatctgatttctgaccaattacaactgtstgaccattgctgtatgccgcagctgggagcttgaacaacaacaacaacaaaaatggcatggatatcagtaccagccacatggtgagtgccaacatggttcccagtggccttctctgcagagcaccttggcagactttgccactgagggttacaacagcccatatggcatctgccgattcaccatagccttcacagcaaaggtgccattagtgtttattggcatggaccccagcagccggctctgcagaggatactggcagtttttgccactgagctaaccaacagccatcatagaaacaaacctccttggagagggagatgctgctggtatccctac

SEQ ID NO: 431295 - DNA, 654 bp, Homo sapiens
ccccggggacctggggacatggggtgagggccaaggagtgcctgtggcacctgtcaatgcacggactccttgtctgcaggcattgatttctctccttcctgacctttcaggagaggcgccctgaattccatgccgggtcattacagagccagtggcggagactctatgagacccagccccactggctgcagccccttcggatgcatctgcgagagcagcctggccgtcacccgccggcctggcccgtgctgtcagccggccagagcgtgtctgaatcgaggaaagctgactggggctcgattcacactgactcgagccgcaaggcgagtttatggttcttgattacacccagcagggaggccttcttagtgatgagagagaaaatattcaacaacctgtctttgcaatgtgctgatctcttggagagagagagagagagagagagagcagagaaagtggaggaggggtttcaaaggagggtgatttatgagtggaaagaaggcttttttaaaaaaaaatccagggctcccccaaactgcctcaacatttcctctttctcatcgttgggttttgccttgrtataactttgaggcacagtgattgcatccctgtgggtttctgcaagctgatgcaaagcttaaaaggatgcaggcc

SEQ ID NO: 431296 - DNA, 605 bp, Homo sapiens
tcctcactgtaccctgcaggggctcagggaaggagcagcgtgggcgagcgtccatgagcctgtccagcagcctggcatcagagtcacagtccagactgaccctcagcgccctcwtccccttaaccctgtaagtcccttgcctcactcgagggctctccttaaccctggctccaggcccttcgagacgatcatcttgctcaccatctttgccaattgtgtggccctggccgtgtacctgcccatgccggaagatgacaacaactctctgaacctcggcctggtaagattggcccttccatctcccttcctgcgagcctgcagccccaggcttggggaggcccccttggtggactctgttctgggggatggtgccggtggttcaactccctgacgatgcaggccctgcatccccagccacctgcagggctggctgagtggctcaatgggtttccagggtcaacctgcttattccagattctgatactgtcagccagcactaagcacgcactcattggtcccaggcactgtgctaatacctgatgagagtaaattcatttaatcctcacaaccaactcataaagtggttccatttgacagatgtggaa

SEQ ID NO: 431297 - DNA, 605 bp, Homo sapiens
tcctcactgtaccctgcaggggctcagggaaggagcagcgtgggcgagcgtccatgagcctgtccagcagcctggcatcagagtcacagtccagactgaccctcagcgccctcatccccttaaccctgtaagtcccttgcctcactcgagggctctccttaaccctggctccaggcccttcgagacgatcatcttgctcaccatctttgccaattgtgtggccctggccgtgtacctgcccatgccggaagatgacaacaactctctgaacctcggcctggtaagattggcccttccatctcccttcctgcgagcctgcagccccaggcttggggargcccccttggtggactctgttctgggggatggtgccggtggttcaactccctgacgatgcaggccctgcatccccagccacctgcagggctggctgagtggctcaatgggtttccagggtcaacctgcttattccagattctgatactgtcagccagcactaagcacgcactcattggtcccaggcactgtgctaatacctgatgagagtaaattcatttaatcctcacaaccaactcataaagtggttccatttgacagatgtggaa

SEQ ID NO: 431298 - DNA, 605 bp, Homo sapiens
tcctcactgtaccctgcaggggctcagggaaggagcagcgtgggcgagcgtccatgagcctgtccagcagcctggcatcagagtcacagtccagactgaccctcagcgccctcatccccttaaccctgtaagtcccttgcctcactcgagggctctccttaaccctggctccaggcccttcgagacgatcatcttgctcaccatctttgccaattgtgtggccctggccgtgtacctgcccatgccggaagatgacaacaactctctgaacctcggcctggtaagattggcccttccatctcccttcctgcgagcctgcagccccaggcttggggaggcccccttggtggactctgttctgggggatggtgccggtggttcaactccctgacgatgcaggccctgcatccccagccacctgcagggctggctgagtggctcaatgggtttccagggtcaacctgcttattccagattctgataytgtcagccagcactaagcacgcactcattggtcccaggcactgtgctaatacctgatgagagtaaattcatttaatcctcacaaccaactcataaagtggttccatttgacagatgtggaa

SEQ ID NO: 431299 - DNA, 605 bp, Homo sapiens
tcctcactgtaccctgcaggggctcagggaaggagcagcgtgggcgagcgtccatgagcctgtccagcagcctggcatcagagtcacagtccagactgaccctcagcgccctcatccccttaaccctgtaagtcccttgcctcactcgagggctctccttaaccctggctccaggcccttcgagacgatcatcttgctcaccatctttgccaattgtgtggccctggccgtgtacctgcccatgccggaagatgacaacaactctctgaacctcggcctggtaagattggcccttccatctcccttcctgcgagcctgcagccccaggcttggggaggcccccttggtggactctgttctgggggatggtgccggtggttcaactccctgacgatgcaggccctgcatccccagccacctgcagggctggctgagtggctcaatgggtttccagggtcaacctgcttattccagattctgatactgtcagccagcactaagcacgcactcattggtcccaggcactgtgctaatacctgatgagagtaaaytcatttaatcctcacaaccaactcataaagtggttccatttgacagatgtggaa

SEQ ID NO: 431300 - DNA, 606 bp, Homo sapiens
  misc_feature (1)...(606): n = A,T,C or G
ggacaatggcacatgcacctcaagcttggaaccttggctcacaaaaggtcctgacttctgccatctccctgcctctaaggaggggctctcagcttratgttttgcctctggggtcctgggccacttggcagaggcntgagtgggagaatgggaaggnccgtgtctcagggaagnacatggctctggttgtctctaccctgggctgacattgctgcagtccattcagtaaatgacctatgaggttgagcctccaaggccctccccgattctgggtacttactgtttcccaggaagcagagattgcaacacccttgggtgccggatgtccactatgggttgaggtggtgggtctgagtgaaggggagatgcctggctccacacctccacctctggccagggcacaggatgtcgggctgtgggatggtgagggtggagggggaagattaggaggaggcgcttgtggcaatctgcacttgccctgcacaacactgaacagcaatcaaaagacaccacagtaggctgagaaaggggctgaaagaaagggaaaagctttatatttagtaccttcatcagcactcatttcctactgtttgaacgtgggggccc

SEQ ID NO: 431301 - DNA, 606 bp, Homo sapiens
  misc_feature (1)...(606): n = A,T,C or G
ggacaatggcacatgcacctcaagcttggaaccttggctcacaaaaggtcctgacttctgccatctccctgcctctaaggaggggctctcagcttgatgttttgcctctggggtcctgggccacttggcagaggcntgagtgggagaatgggaaggnccgtgtctcagggaagnacatggctctggttgtctctaccctgggctgacattgctgcagtccattcagtaaatgacctatgaggttgagcctccaaggccctccccgattctgggtacttactgtttcccaggaagcagagattgcaacacccttgggtgccggatgtccactatgggttgaggtggtgggtctgagtgaaggggagatgcctggctccacacctccacctctggccagggcacaggatgtcgggctgtgggatggtgagggtggagggggaagattaggaggaggcgcttgtggcartctgcacttgccctgcacaacactgaacagcaatcaaaagacaccacagtaggctgagaaaggggctgaaagaaagggaaaagctttatatttagtaccttcatcagcactcatttcctactgtttgaacgtgggggccc

SEQ ID NO: 431302 - DNA, 566 bp, Homo sapiens
ccatatcttaattcttggagcctatggatttgttacctcaaatggcaaaagggactttgcagatgtgattacattacgggtcttgagatagatagaagattatcctgcattgattgagaaggctcagtgtaatcacaaggkttcctataagagggatgcaggagggttcgagtgagagtaggagctgaggcagtggaaacagatgtcagagagatgcccctgctggaagaaactttgagccaaggaacccaggctttctctagaagctgaaaagaataggaacagattctctgtaccccctctctaccagcactgattttagccctggaagacccacttcatacttctccacaaactgtaggatataaatttgtgttgttttaagccactaagcttgtggtaatttgttacaagagaaaaagaaaattaatacagtgagattaccatgtttctttgaattttcagtttccagaagagttgccttttgctacacctggtttctttttcagtctggtcctctgatattttaaaaactggtttcatcaatccagtttgtaaaaatatgg

SEQ ID NO: 431303 - DNA, 566 bp, Homo sapiens
ccatatcttaattcttggagcctatggatttgttacctcaaatggcaaaagggactttgcagatgtgattacattacgggtcttgagatagatagaagattatcctgcattgattgagaaggctcagtgtaatcacaaggtttcctataagagggatgcaggagggttcgagtgagagtaggagctgaggcagtggaaacagakgtcagagagatgcccctgctggaagaaactttgagccaaggaacccaggctttctctagaagctgaaaagaataggaacagattctctgtaccccctctctaccagcactgattttagccctggaagacccacttcatacttctccacaaactgtaggatataaatttgtgttgttttaagccactaagcttgtggtaatttgttacaagagaaaaagaaaattaatacagtgagattaccatgtttctttgaattttcagtttccagaagagttgccttttgctacacctggtttctttttcagtctggtcctctgatattttaaaaactggtttcatcaatccagtttgtaaaaatatgg

SEQ ID NO: 431304 - DNA, 566 bp, Homo sapiens
ccatatcttaattcttggagcctatggatttgttacctcaaatggcaaaagggactttgcagatgtgattacattacgggtcttgagatagatagaagattatcctgcattgattgagaaggctcagtgtaatcacaaggtttcctataagagggatgcaggagggttcgagtgagagtaggagctgaggcagtggaaacagatgtcagagagatgcccctgctggaagaaactttgagccaaggaacccaggctttctctagaagctgaaaagaataggaacagattctctgtaccccctctctaccagcactgattttagccctggaagacccacttcatacttctccacaaactgtaggatataaatttgtgttgttttaagccactaagcttgtggtaatttgttacaagagraaaagaaaattaatacagtgagattaccatgtttctttgaattttcagtttccagaagagttgccttttgctacacctggtttctttttcagtctggtcctctgatattttaaaaactggtttcatcaatccagtttgtaaaaatatgg

SEQ ID NO: 431305 - DNA, 628 bp, Homo sapiens
aataatgcgactcatctgtaagcttaagttaagtttggtttagaaaagcaatgagaaatgtgacagtcccactctttaaacagacaaaatgaaaaatcataagcaaaacaatctatgtgattgtatgttctcactcacatgtgggagttaagctatgaaaatgcaaaggtataagaatgatacattagtgtttgaggacccgygggggaaagggcagggggtggtgatggataaaagactacacattgggtacagtgtacactgctcaggtgatgagtgcaccaaaatctcataaatcaccactaaagaactcagtaaccaaatgccacctgtttcccaaaaacctattgaaataaaaaaatcaaaattaaaaaaaaaacctatgtggatttaatgtatcattcaaagatgcttcagattttgatgacagagggatgtggcagctctttaccattctggtacctgtaagtacctacaggttttaggttttttatcctaggatgcttccttcattcccatgagatgtttcagtagagaggagccagcgcagcttccagtcagagctggagaagcgcagagactgtacagacagcaggataccctggatcaggctggattaagttgcctg

SEQ ID NO: 431306 - DNA, 628 bp, Homo sapiens
aataatgcgactcatctgtaagcttaagttaagtttggtttagaaaagcaatgagaaatgtgacagtcccactctttaaacagacaaaatgaaaaatcataagcaaaacaatctatgtgattgtatgttctcactcacatgtgggagttaagctatgaaaatgcaaaggtataagaatgatacattagtgtttgaggacccgcgggggaaagggcagggggtggtgayggataaaagactacacattgggtacagtgtacactgctcaggtgatgagtgcaccaaaatctcataaatcaccactaaagaactcagtaaccaaatgccacctgtttcccaaaaacctattgaaataaaaaaatcaaaattaaaaaaaaaacctatgtggatttaatgtatcattcaaagatgcttcagattttgatgacagagggatgtggcagctctttaccattctggtacctgtaagtacctacaggttttaggttttttatcctaggatgcttccttcattcccatgagatgtttcagtagagaggagccagcgcagcttccagtcagagctggagaagcgcagagactgtacagacagcaggataccctggatcaggctggattaagttgcctg

SEQ ID NO: 431307 - DNA, 628 bp, Homo sapiens
aataatgcgactcatctgtaagcttaagttaagtttggtttagaaaagcaatgagaaatgtgacagtcccactctttaaacagacaaaatgaaaaatcataagcaaaacaatctatgtgattgtatgttctcactcacatgtgggagttaagctatgaaaatgcaaaggtataagaatgatacattagtgtttgaggacccgcgggggaaagggcagggggtggtgatggataaaagactacacattgggtacagtgtacactgctcaggtgatgagtgcaccaaaatctcataaatcaccactaaagaactcagtaaccaaatgccacctgtttcccaaaaacctattgaaataaaaaaatcaaaattaaaaaaaaaayctatgtggatttaatgtatcattcaaagatgcttcagattttgatgacagagggatgtggcagctctttaccattctggtacctgtaagtacctacaggttttaggttttttatcctaggatgcttccttcattcccatgagatgtttcagtagagaggagccagcgcagcttccagtcagagctggagaagcgcagagactgtacagacagcaggataccctggatcaggctggattaagttgcctg

SEQ ID NO: 431308 - DNA, 628 bp, Homo sapiens
aataatgcgactcatctgtaagcttaagttaagtttggtttagaaaagcaatgagaaatgtgacagtcccactctttaaacagacaaaatgaaaaatcataagcaaaacaatctatgtgattgtatgttctcactcacatgtgggagttaagctatgaaaatgcaaaggtataagaatgatacattagtgtttgaggacccgcgggggaaagggcagggggtggtgatggataaaagactacacattgggtacagtgtacactgctcaggtgatgagtgcaccaaaatctcataaatcaccactaaagaactcagtaaccaaatgccacctgtttcccaaaaacctattgaaataaaaaaatcaaaattaaaaaaaaaacctatgtggatttaatgtatcattcaaagatgcttcagattttgatgacagagggatgtggcagctmtttaccattctggtacctgtaagtacctacaggttttaggttttttatcctaggatgcttccttcattcccatgagatgtttcagtagagaggagccagcgcagcttccagtcagagctggagaagcgcagagactgtacagacagcaggataccctggatcaggctggattaagttgcctg

SEQ ID NO: 431309 - DNA, 604 bp, Homo sapiens
gcaattggcccctggttcttcagagacattcagtcagttcttatkgagtgaatagatactgaatgagtaaagaggaacattttcttaggaatttagttttaagtacaacatggatgccatgtcagatgaaagcactcacaacttcgtcatagataaatgtttatggaaggccccagtgatgggattgaagggtctcatcctggaactgactggagatcggtcaggaagaatcaggaagaatctgattctatttggattccaaatcttgtttgccaggtcatgtatgatgtgaattcagaagtcaattaatttactaattcagtcaaagccaatgattctggaagaggtgaaatagcattattggagttgaggataagaagatattttgaattctcagtagctcaaacttgccaggggcttcctattctggcccaggtaccatcaccttgggaagacttccttgtcagctgccaaaatctcacttcttccttggcccctgagaatccatcccttgctccaatagccagagctactaatatccccttacctcagtgcagtcaatggaagtgattggaaactctttcctctacttacataaacacct

SEQ ID NO: 431310 - DNA, 497 bp, Homo sapiens
tgacaaccaaacatgtctccagacattgccagatgtcacctgagggcagggaggaattccctggttgagaaccactgctttatagaaatggtagccagaaaagctagaaaaacatgtttctagaggaatagatttaaaatcacattttaaaagaaagtaacaacaatacaagtgattacaaatacactgaaaagcgtatcagtttttcagtaattgatatttttaagaagatgagcaatgggttaacactaggtggaaaggtgggctaagatgtcacaggtggcaagcatcatggcagagtggctggagcctgttggtgtcagataggcctcggctcttacctggactctgctccttayttgctgtgtgattctgggcaagtcacttaaccactcagagcctcaggatcctcattaatggaaaaagaatgaagactgactgaaacagattgcaaacataataaacaagtcttataagtatttattgaagaggaaaga

SEQ ID NO: 431311 - DNA, 512 bp, Homo sapiens
cctaagtagatctagaaagatctgaggagaagagggtataacgacacagtgagtcacacctgcagtagggaaagaaaatcccaaagcacatgataataatgtttgcaagtttttccttaatctttcatgtatgtaaagtgtgtcgcagatatggactcacttgcccttcacataagtcccatggggaaggcatttttattcctgttttgcagatgccaaactgagtcttacgtagaggggctaactgaattgcccagtgtctcacaagtcaagtgtggtgtgggagccagaattcaaagttcactccatcccacttcaacacatgagttyttagtcactatagaaatgtgccctctcgcactgggagatgttgacctgttggcctatatatgatgagctctgaggttgggcttgcaatgacttgaggaattatgtcgaagcgactgcagcagaggctacaaagtgtctgcctctgatagggtttgcagacttgcttctctgggttgtcaacc

SEQ ID NO: 431312 - DNA, 600 bp, Homo sapiens
ctcccttcgctaccatgccatcttaggcccctcttctccagaatcagtatctccagtccctggctcaytcattgcttaccattgtcccagtcacacctctccatcctgagcaccctcctgtgaaggctctttagctgggagagtggtatctttgccaacttggaagttgggggctacagaaaagcaaaggctatgtagtctggatctttacccttcagtaacacttagtcacagaggtcagaagggtgactgacctctgtgctccagctgattattattattattattagtagtagtagtagtagtagtagtagggtctacttcatttccaccacctttttttctggggcatggtaagagttaacttctaaacaaactcacactactttgcaagcaacagcaaacacccagtgtaatactgtccttataaaatatgtctttccataatgtgacccaaagcatagagaatatttttactccagcatttcctgccattaatgttttccttttgcaatcttcacatagtgttatgagtgagttgtgtgttacaaaaagctacataaacactctcaccttgtaatctactgtaatggcattagt

SEQ ID NO: 431313 - DNA, 600 bp, Homo sapiens
ctcccttcgctaccatgccatcttaggcccctcttctccagaatcagtatctccagtccctggctcactcattgcttaccattgtcccagtcacacctctccatcctgagcaccctcctgtgaaggctctttagctgggagagtggtatctttgccaacttggaagtygggggctacagaaaagcaaaggctatgtagtctggatctttacccttcagtaacacttagtcacagaggtcagaagggtgactgacctctgtgctccagctgattattattattattattagtagtagtagtagtagtagtagtagggtctacttcatttccaccacctttttttctggggcatggtaagagttaacttctaaacaaactcacactactttgcaagcaacagcaaacacccagtgtaatactgtccttataaaatatgtctttccataatgtgacccaaagcatagagaatatttttactccagcatttcctgccattaatgttttccttttgcaatcttcacatagtgttatgagtgagttgtgtgttacaaaaagctacataaacactctcaccttgtaatctactgtaatggcattagt

SEQ ID NO: 431314 - DNA, 604 bp, Homo sapiens
ctataaggagaataaaaataacacccagctattagggaaatactatcaatatttaacatattattgttaggaagattaaattataccatgcatgtaatatgttcagaacagaggtaggcacatagtttgccctcacgaaatcaaacctcattatcattattattattacattgttttcattgttcaaatatagaatgaaatttcagaggggacatcactggttaaataaagatccttgtttcaagtcctgtactaatggtttccatccttggctatttccgctgtgttgtgccatctctcacatgagatattgtaagcttctcttagccccatcacagtcctatgattgccctactaaaatgtctgcccctgaaacttgtggatccttttcaaacactatactgggatatcccacctcattgctcagtggcagcctgttytgatgtccagtgtccaaaaaaacagaaggtcaagccctacggttatgaaacagagacactgggagaaatctagattccatgcaagggtgacactgaccaaatgtagtcttttctctatggcgtaaatgctaagaatgagagagtgagttacttaggtgttggga

SEQ ID NO: 431315 - DNA, 621 bp, Homo sapiens
gtatgtccctgttatgggactagaaaaaatttgcaaggtttaaaaagttcctgccaaagattaggatatcatttttgatggcagccattgttaagcctccagaacctatacctttaaaatggttagcagataagctaatttggatagagcaatggccgctaagtaaagagaaactggaggctttaggtattagttactgaacaatcagaaaatgggcacatagctccaacattttccccttggaattctccagtttttgtaattaagaaaaaaatcaggtaaatggagaatgttaactgacctaagagccatcagttcagttatacaacctatgggagtattacagccaggattgccttctcctgctataattccaaaaaattggcctttaatagtcayagatttaaaagactgtttctttactacccctttagctgagcaaaattgtaaatggtttgcatttacaattcctgcagtaaacaacctgcagcctgctaagcgttttcattgttttacagatgggtctagtaatggtaaagcttcttattttggctcaaaaagtaaagttttccagacatcctatacttcagctcaaaaagcagagcttgtagcggtaattga

SEQ ID NO: 431316 - DNA, 588 bp, Homo sapiens
ccatacaattctcaaggaccagccatagtagaaagaatgaatctctccctaaaacagcagttgcaacagcagaaaaggggagacagagagtatgggaccccacrgatacaactgaacctagcattattaactttaaattttttgagcctgcccaaaggatagatgttatcagcagctgaacagcatctacagaaaccagctgcaaagacagaagcagaacaactgatttggtggagagatctgattacaaaaacttaggaaataggtaaaataataacttggggtagaggttatgcttgtatttctccaggcaaaaatcaacagctgatttggataccaccaagacacctgaaaccttattatgagccagatgccaaggaagagattccgggaggatcccgagtactccccggttgcagccatgtcaagactgatgctgaggaggaccccaactgtcacaaacaacacatgtcaaacacagccactcatctggggacagatcaagaagctgccacagatggcggaagaaaacctgaggaaagtgggacaaccagtcacaacaagtaatttaatggtagctatgatagc

SEQ ID NO: 431317 - DNA, 632 bp, Homo sapiens
gtggacaataaaattttggagatggtgttcagttcatttcttcatcatccctcattttgacatatgctgtcctaggctggttctacagcagctacctctcaagtgttcatatccacactggtcttgtttgtgctttgtgtttctgggactagagctctaaaaccatatttctactctactacctggctccacctaggttctgctagttgaggaagactagaagaaggctttctgcttcctgtttctttctgcctcttgttcttttaacgatgtcctaagcaacrgctaacagtactcaccctaacagtagtagttctttcctgtctcagcagctgaatccagctgggttttttaaaatgacacttacagaactagtgccataacccccgtcccccaatcagcatgggccagtttagacccctcctcagttgtttgagcctcagctccaaggtgtcccttctgtaagggtctaagtattcataattaaaatctctttcgtttgttcacacagctgtggggtggtagctatttactacaggtgctacttttggataccacagggtgttatctttgtcatttcagttcctcaacacagctctttatattaaattttctgttaaaagaatacatgc

SEQ ID NO: 431318 - DNA, 597 bp, Homo sapiens
gggagtagaatgttctctggccttgctgggactgtccactccagtagaaacgaaagggagtcctacaggagatgatgcagctcaggtgccttctaaggtacattcctgccacccaccttgcaaggcagaggcttaaactctcgtctttttgctccattcatatccacaatgcctcttaagatcctctggagcctttcttacagacaatattttgtcctttccagaccttgcttggtgaaaatcacgttagaagtggtaagtagaaagatgaagacttccagctccttctgttactcttcccaccacttctgttctgaaaagctagacttgctcaggttttagctgtcatcactgctcatctcatttcaaattttaatggtagtgacaartactttcttttcttccccctctacttgtgctttcctgtttctcagtatccattcaaatccctgccaagactagaaagattcacagcctttatctcactgtctagcagagtttgaacatatctcactgcagatatggggtgaaaggtatgttattattgagactgtgatgcaatgcatcccccaaaattgtttgtcattcatttaacaa

SEQ ID NO: 431319 - DNA, 593 bp, Homo sapiens
aatatttacaaaagaaaaagagagaagacaaaatattgacatcacatatgaagcatatatcacaacagaccccgtagatatcaaaagacatataagaaatgctatgtataatacattacacataaatttcacaacgtagatgaaatggaccaatttctcaaaaagcaccaactaccacaattgatccaatatgaaataaatatttgaatagccctgaaattattaaggagattgaatttgtaatttaaaaacttccccyaaagaaatctccaggcccagatggtttctctgtagaattctatcaaaagtttgaagaagaattaaaacgaatactatatgatctattccagaaagtagaggcagaaggaacattttctgattcatttcattacaccagtataaataaaagaaaactatagagcaaatattcttcgtgaaatgaacacaaatatttttaacaagatattagcaaatataaaaaatatataatacataataatattatataatatgtaataaaaataatacattgtgactaagtggaatttattttagaaacacaaggctgtttaaatattcaaaaatcagtcatt

SEQ ID NO: 431320 - DNA, 590 bp, Homo sapiens
ctgtacttgctcacattacccatctgttcttacatgttgtctactttttcccttaaagcatttaacatattaattatttaaaattatctgcctgataattacaaaatctatgttatatttgattctgattctgatgcttgtctcttcaattwtttttttgccttttagcatgccatgtatacttttgttgaaaattaaacatgacttattgagtaataggaactaaggtaaaagggcttttgtgtacattgctatggaaactgagctaggcattggctctgtttaatgttttctttatctatgcgtattaaagatttcaatttcctctggtgtccttgatttttttttccttttttgtgtttgagttttcctaaaaactcctttttaatagtctgtgccttgcagttcttttaactgtaattcactgttattatatgaaagctttgatgacagggtggtaaggtatacactttctataatgctatgattaagcctcagtcttttagtgggcttctgtctctgatctgtgaccatcctaagtgtatctcagtgttttttcccatattaggtaagacatgaagggtagaggg

SEQ ID NO: 431321 - DNA, 570 bp, Homo sapiens
acagggtggtaaggtatacactttctataatgctatgattaagcctcagtcttttagtgggcttctgtctctgatctgtgaccatcctaagtgtatctcagtgttttttcccatattaggtaagacatgaagggtagagggtggagaatggagacatttcccttactgcacagtggatatggctttagtaaagtcttttctcttgccaagtagacttgtcttatggagaatgctctgggcatatttcaaagtggttactttatccttccttctgccataaatgtaaggcttttctcttgcctctttactgygagaaatgggtaggttttctgttgttttcaggaggtaaaaacccaaggaacagtagaggcttccctaagagtgtggtttctaggaattcttcactctccagctacttcacactaagactccagcaatttattaaaattatgatttaagcattactgtcagctaatggctccagctacttctgctccaagtaagctagtcatggctgcagaaccatgcagtttcttatctttctagatttcttggtggtactttgccctg

SEQ ID NO: 431322 - DNA, 570 bp, Homo sapiens
acagggtggtaaggtatacactttctataatgctatgattaagcctcagtcttttagtgggcttctgtctctgatctgtgaccatcctaagtgtatctcagtgttttttcccatattaggtaagacatgaagggtagagggtggagaatggagacatttcccttactgcacagtggatatggctttagtaaagtcttttctcttgccaagtagacttgtcttatggagaatgctctgggcatatttcaaagtggttactttatccttccttctgccataaatgtaaggcttttctcttgcctctttactgcgagaaatgggtaggttttctgttgttttcaggaggtaaaaacccaaggaacagtagaggcttccctaagagtgtggtttctaggaattcttcactctccagctacttcacactaagactccagcaatttattaaaattatgatttaagcattactrtcagctaatggctccagctacttctgctccaagtaagctagtcatggctgcagaaccatgcagtttcttatctttctagatttcttggtggtactttgccctg

SEQ ID NO: 431323 - DNA, 591 bp, Homo sapiens
  misc_feature (1)...(591): n = A,T,C or G
gtgaaggaaagtgacaggataaaacttgtatagccaacttgggaagaaaacagtccaagctgaagcaggaggacagaggaccccagagaaaayacaaaaagtaattgatacagttgagtatctggaaaatattactgatgagtgtaagacaatgataaaagaacactaggaaaaattagccactggtgcataaagtatcacagatgaaaacaagaaaatgcttattcttagtaaaatggaggattatatgataaagagacctggtcatagttcacaagtcacagaagggggatgatatttgacttcaccaaaagctgtgtcatacctataccaaggtaatgttaggaggggaattgggagtaagaaatggaataggtgagattttttttctaccatgacagaaagtcaataaatnctactaaaatagatagacagacccatttatagtttaagcatatcagttgaaaatatgnaggtaaatgccagtagaaagagctagaaatgtgagagtggttactgctgnaacaggactggggagacagggcacatggctatgaatttcactataagccttgggttttttgttttggt

SEQ ID NO: 431324 - DNA, 621 bp, Homo sapiens
gcattgaaattgctctatgtgcaacgcaccatgttaggtgctgtggaagggtgcaattcctgtactccagaagctgacatttcagttagatgtatatagcatcccgctctgttcatatatgctggcccctctgttcgaaatggccttcatcacttttctccctcctttatctggccagcttctatatatttctcaaggcccagctatacatcattttcgtttttaactgacaaataaaagaatatatatttatggtatacagtgtgatgttttaatgtatgtatacattgcggaataattaaactaagctaattaacttacctatcccctcatatacttttttttttcccgtgagaatatttaaaatctccyttagcaattttcaaggatatagtacattaactatagttacccttttgtacaataggtctataggagttattcctcctgtctaactgaaattttgtactctatgaccaacatcttcccatttttcttaccctccccccattgctcaactactccctgcttctataagtcaactttttaagatttcacataaaagtgagattaggcagtatttgtctttctgtgccaggcttattttacttagcataatgt

SEQ ID NO: 431325 - DNA, 621 bp, Homo sapiens
gcattgaaattgctctatgtgcaacgcaccatgttaggtgctgtggaagggtgcaattcctgtactccagaagctgacatttcagttagatgtatatagcatcccgctctgttcatatatgctggcccctctgttcgaaatggccttcatcacttttctccctcctttatctggccagcttctatatatttctcaaggcccagctatacatcattttcgtttttaactgacaaataaaagaatatatatttatggtatacagtgtgatgttttaatgtatgtatacattgcggaataattaaactaagctaattaacttacctatcccctcatatacttttttttttcccgtgagaatatttaaaatctcctttagcaattttcaaggatatagtacattaactatagttacccttttgtacaataggtctataggagttattcctcctgtctaactgaaattttgtactctatgaccaacatcttcccrtttttcttaccctccccccattgctcaactactccctgcttctataagtcaactttttaagatttcacataaaagtgagattaggcagtatttgtctttctgtgccaggcttattttacttagcataatgt

SEQ ID NO: 431326 - DNA, 591 bp, Homo sapiens
gttttggacagctaaaatctggaactgtcagagacctctaaaacatcctgacatccaataagctgttacaagtagcaataacaacaaaagatgaccttaatatagctataacaatcaacatttaatttttgttttttaccataataagtctaataattttctgctaaaaaatacttgtgcgtatgtctaaaaatatattcaagtatacttaccaccaggatatttacaatagtgaaaaactggaaacattcaaagagttcatcaatatgtatgtaaatccatacaaggcactatcattcagtcatttaaaaattagataactgtttccttaaatggaaagatatctaccaactagtttttgaaaaatatttactaggtaacatagtcacataactcaaaaggtacaaaaaagtgtataggataaaaattctttctttaaccctgatgcctggcatccttttccyttctcagagacaaccaatgatatcaatcattttgtattccaggatagcttatgcatatgtatgctaacatatacatatatttcttccttatctgtataatattagcataatatatactcctttctgc

SEQ ID NO: 431327 - DNA, 574 bp, Homo sapiens
agcctttcttcagtcctcaaattacatattgatctaaactttacttattttatatttttatctttgattcccctcagaattcatctttgattcacctcagaattacctcagtatggtaagtgatgtgtggttccacaattcaagtctttatagaattctgggaagttgtgccctcagccattatctgctcaatctttaccccaccaatctgaaatgctacttacgatacactaaattcttacatggttaggccatttttttcctccactttctgtgtcattaacttgtttatgtaatgccaataccacactgttttaattattttaaccaaaaccaagcctcaatatatctgatttatcaagttccaactaattgctatccttatgtaaaacttcttagctattctcgtacctttgtttttctatgataattattataatccttaaaattattttgttttatatccctttcccacaccacrtaaactgttttggattttggttaggattactttagtttgaagagaactgagagccacaccggttagagtctcccatctggtaatgtgcgttta

SEQ ID NO: 431328 - DNA, 646 bp, Homo sapiens
tggttcttctcctttcgtgcactgatggtttaggccaggtaacaagaatcccactttgctttttgctccatgtcagtcctcatgacgtcactgttgtggcattaatgcatttcaccatgacttcttcataccgtttttgtgtcagtaacccttctgttatgtttttactttcttcaaatttgggtaactcaactgcaatgtagccttcagtgatggcttttcttgaagaatagatggcttatggagaatgtttttcattcacttccatcgaacatcctctaacacaactagatacagtatattcttcgccatctgagcagtaaatcttacagagaggtgcaagttctgttagaaactgtgccccccacttaaatttcccagagaccttgttctgaagtctgctacagttgggactgatctgacagggaatgcttttaattgtttttccactctgaagaactggatgagattctgccaatgtgatgacacatattcggttagagtgctgtggtatacagtggtccttacaagatcttcctttgacatctgcttygtaccagcgagtgaagtattgatccacgaacaaaggcaccaccggctctgcggtttggcgctcggtagccatggtgacctcaggcgccaccac

SEQ ID NO: 431329 - DNA, 533 bp, Homo sapiens
gagaatctgttttcttactcatgcaggctgttggcagaattcagttctttccggctgtagaactgaggcccttgttttcttgttggctgtatgctgaaggccattcccaggttttcaagctgcctcattccttgactcatggctcccttcctccaacttcaaaaccaacaaaagcaagtcaagtcctcaggtggtatctctctgacaaatgcttctgcatcccccttccatttttaagagctcatgtgatttgattgggaccactcaactaatccagaataatctccctactttaagatcagctgattagaacccttaatttcatctccaaacttaatttccctttgccatgtaakataacatattcacatgttctggtagaatatgaacatctttggggaccattattcgccctatcacagttcatccctaaagattcacatctatcccacatgcaaaatacattcacttatctcaatttcccgaaaggttaacctttacagcatcaactcaaagttcaacatctcatctaa

SEQ ID NO: 431330 - DNA, 580 bp, Homo sapiens
ttagaaacacgttatctgagtacgggttaaattaacaggaattatctaaagcagttcaggtgagagccttgcacctatctcttgacagcctttttggatatggaaagagcactgaatttgggatgaggaaatctagtcctttgactttaaarttgatgataattatatatttgatctggagaaagtaatttaaccattcttggcctcaatttcctaatctgtaaactaaggagattggcttatatgatatctaagaccctttcaactccataagaatgctgatatttggacataaaagagatgggtttcttcccacgtatggactagtaattatttaactcctaatgaaaattttaaaccaaaaccttaaccacatgtcaaaacaagatacttattccaatcagagtttaacaaattgaatctctcagtacaaagagaaagggactcataaatagttgaataatactttgcaaaataagagtcttatctatagtaattaaggaagtgcatccaaattcatttataaagatgttcattcagtattgtttgtcattaatgatgtaaaaaattgcacattcat

SEQ ID NO: 431331 - DNA, 572 bp, Homo sapiens
tgatttaagtaatcataaaccttacttctatgttttctactcccccatatttgtggagttaataatttatatttattcagcaaagcttttataaataatttargtaggtatatgtatgaaaataagtaattacagtgaacatatcaattaactttcaccattctacccttattttcattctttctagccaaaataattatttcctatcattttgtaaatggcaagagcaaatttcagttacattgcttagaatgatttaatttctatacttctcataggcctttttaaatctatggcattgtttcccagcttgctatttcatcctaagtctaaataatgtcagatggagaagaaagcaatgaaatatgcatattaaactacaaattcttgaaacacttgcaaaataaacttagtacatatacatatattttgatattacaagaaaaaaatgtacaaactgtgaagataaatatagacctacaagtaggctattacaactcagataaggaacattctcttcattccataggtataaccggtaataaaaacatttccacttaacatataaatca

SEQ ID NO: 431332 - DNA, 487 bp, Homo sapiens
  misc_feature (1)...(487): n = A,T,C or G
caatacataaaatgaggagtttctttaatgttcatttaatcaaacttataaacgtttttagtgtatagcctaattttttattttaatttttttaaactgacagaaggtaagatacggtattaaataacacaattatttataaactaatagattaataatgaattgatcattaaaaaaaacacaagccagcgtacagttgtattagtcatttgctttggaaattcaacatatctaattttggtatggatttcartgttagcattttattctaaagaaataaataaattaggtcatttgtttgtaaattataacccaagggagagccctgctggcagactttcatagatgcagcaagtacacccacaatagaagtaacctgtcttaggaanggaggtgataaagtgtaatacatctgaatgttttttggctctgtatagtctatattctagaattgagtctcattaacttttaactcaatgtgcnctgg

SEQ ID NO: 431333 - DNA, 570 bp, Homo sapiens
atgagcctgaagtggaggctaatcaggtgagcttgcctcaggcctcctggagcacttccctgtgtccttgctggcaccagcagcttctctttagcaaacacatttcttagtgccctggttatgtgcagggttagactgaatgcacaacacaggcccatccgcatcgccaggtctctgtgacccacttgcggttggatattctctcaatgcttcaaactcagccgaagtctgtgatcttgtccacctcaaaaatcgtatgattctattttaaaaactgagttaygtatgttcgctaaaatggaatctcccctcttaattcattccctgtcattcttctgatatctaaaccgtaaggtcaagttaaaagggtagaagatgatcatagatatatagctgtgattctgagtcaaattcccaaaccctgtcatcacctccctgcaaggttcttgagagagaaaaatgcaaaaaaggtaaggctcagtaggtgggcttgtggccaggtgggggcactgggctcaaatttccaaggggagccctggcaagctgggcagacactcccatttccttgtt

SEQ ID NO: 431334 - DNA, 456 bp, Homo sapiens
ctcccctactaattacaacagtttcatagattgtctagttgtcaacagcactgttcccacatttaatcccttctgaagttgctgccagattcacctttctaaaaatgcaaatctaatcatataagtttcctactcaaaatctttccttgttccctgatagctttcaggataatatgaagctccttatcctagcacaaaaggccattcctattctagccccttcctatccctctgggctcacttcctgtcactcctccccttcctccactatacagagggtgtagtcttcctacttccaagatctatgctcagcctgggcaacatgataaaaccaaaaaaaaaamcaaaaaaaaaaatgtctccacaaaaatgtctctacaaaaaaatacaaaattagctgggcaaggtggcatgcacctgtggtctcagctactctggaggctgaggtgggaagat

SEQ ID NO: 431335 - DNA, 488 bp, Homo sapiens
tgttgcaaaaggcttcattctggctcctcaacctttgggctcaaagacattttgccacaaaacttgtggccacacagggagtgggaggagagagcactgaaaagagtgtctctttggcctcccatatgtccctggcatgtgtatgacttgtacttttcttcttcctcaccatccttaacagaacagccagtcctggggaaagtttgggtgtggcccttccagaaatggagaggcctccagcacattcatacagggagagacctggaccatccaaaacacaaggctgggagaatgggaggattcaggccctgccaaggacatctcagagaatcacttcttcacatctgttctgaaaaggctgtcctgaaaaaggacctgtctgtgacatgatctcactcccctcccscaacccgcagcaggcagaggccctggagaatacagggggaaagtgccgcctgttaactgacagacgaaaggaatgtccctgc

SEQ ID NO: 431336 - DNA, 645 bp, Homo sapiens
ctcaatccctaggaaactgctggagaccaggagagttctaaaagatgcttgttagcaaatgtcccaatttacccaagagggaaagatacaggtcctgctgcatgggctggtaagccaggcaaaagtttaggccatataatagttttttaarccctccaaaaaggaagagatgggttttgagagttggcatgggtttgagaaaaataagccacgccaaatgactctactggctttttcccttataggctgcctaagggggcagactggagaaggccacagttactgtgtatcttgaagcctatatatatctttatctacttagacccttgacaatacaggtggcatggtcacggggctcagggatgcctgagagtaggctttggccattctgagcaccttatattcttgagcccagcacattctttgaagccaccatgccaccgccacatagtgttcccatgcagaatcaccttcctcacaccctttgtctggctgtttgttcttcaagactccgctcaaacagcacctccccttggaaactttctcttctgctgagtatgatttagaagttccttatccatgccagccaagcaccctgtaaactctgctgtcactatcgcagtgcgcttttccttgggctgcaat

SEQ ID NO: 431337 - DNA, 632 bp, Homo sapiens
gagcctggccaaaatggcaaaatcccatctctactaaaaatacaaaaggttagcggggtgtggaggcgagcacctgtaatctcagctactcgggaggctgaggcaggagaatggcttgaatttgggagacggagactgcagtgagtgagagtgagtgacatcaggccattgtactccagtccgggtaacaagagtgaaactctgtctcaaaaaaaaaaaaaaaaaaaaaaaaaagtaatggcaaaaaccgtgattacgttggcaccaacctaatacttttgaagacttgggtttcttaaactcatagcaattggctggaagcctcaaggcacttctgttagactgctgagtgaccattctgggaactgagtttttccctaagtaatccaggaaacagccatgattcacctgaattactcatactatggctcctagcaaacagtttgactttttttcatgttatgcacaaagccatcatttcttccttcccttcttyatgggaattttctaaaagtttactaaaaatttgtctgtcataaaaaggtgtcttgttatggcccttaggagatgattttagtaactggtttagaaacaaattctcttcattccactctttaaaagaaattgtgtga

SEQ ID NO: 431338 - DNA, 642 bp, Homo sapiens
cccacgggagtaatgtcagcaaagacagcagagtaccaatggcccttccctccagaaaaacacacaaacaaaaaaatgagaagaaactatcagaattaacttcatctgaacgctggaaaatagtcaaaggtttacagcaactaagtaaatagtggctcaagamagaggaaacatgaaattttggtggcatttttacttgcccttgccccaatgccctccctgatttagtgacaatcttgacaatggcagcccacatttccagcgtgggactccagttctacagaaggcagagcagatcttattttcaaagaactgtgtttgtctgttttgacttatctggggacaaccttcaggcctgacaaaagacacttgccttactttcacctaactcaagactttctcaaggcagaaaagtggctatacagagggcattctttgaaaacattgaaaggcaaatgaacaaaccaccgtcacctgaagcaaaagattactgttaaggcacacaaaagatatgctgcagcctgggaagaaagattctttggagatttagtgcattgaaaagctgccatgtgttactggggaatttagaaagccatatgcatgcccgtggtaggatgcatattcagaaaagacctgagaaga

SEQ ID NO: 431339 - DNA, 564 bp, Homo sapiens
tatggtaaaagtccattttatcaattttttttcttccatggattgtgcttttggtgtcttacctaagaaatctttactggttcaaggttcaaaagatttatgttttcttatagaagttttataggttgggattttacatttagtcctatgatccattttaagttaatatttcatatggcgtaaagaatggatcagttgtattttttttttttgcagttgttccagtaccatttgctgaagactcttttctgaattgctttacatatttgtggaaaatcgatttgctctgtgtgtgtgtgtgtgtgtgtgtgtgtgtgtgtgtgtatctttgacctctctgttttgttccattactctatgtctgtcattttactagtaccacactgtggtaatgcaagtagytattagtctgtagtttttcttttttataatgtctttatctggctttagtgtttagggaatgctggcctcatagaatgagttgtaaagtagttttttaaaattttctgtctctctggaagagtttgtatagaattgatattatttctttctttaaatatttag

SEQ ID NO: 431340 - DNA, 557 bp, Homo sapiens
gcaaacgtaattcaaaatcctttacagttcatgaattaatatttcaacaaatatgggcttgttttgttgtttaagaaacaacaaaaagtcaactcacccttgttttcattgagataaatttattacttatatgttgctttcttcccaaaagatttaggtgatgttaaaattatatgcaaacaagacaactgctaatttataatgcttataaataatgccatgaaaataatkgggaaccatgcagaccaccatatatgcctatacagtttctgtaattgaatgttcaattgagctctcagcttaggtagagacaaactataacagtggtttcatatacttttcattgtcgaataaaataaaaaaatcaattcctcaggatcattagcattatttcttagaagtgaattttaaaatgaatttgtcatttggaaccctattcaatgtatgctgaatgtaacagataatgcaattaaaactacttttgcagtagaataaataattcttttcaaattcaaataaaattttcaaataaaatggtgaatgttgaatttaacctg

SEQ ID NO: 431341 - DNA, 498 bp, Homo sapiens
atgcttgtagcctggaagcaatagctatatcatatagcctagatgtgtaataggctgtatcatctaatttgtataagtacactctataatgctactatgataataaaattgcataaagatgcatttcacaaaatgtttccctatcattgtgacacctgactgtacttaggtataaatctaataaaatatacacaaaatctatatgaagaaaacaaaactctggggaaaaatatcaaagaactaagtaaatggaaaaatattccacctttgtgcatagaaacactcaatattttctaatttgatttataatttcaatgcaattttactcaaaatctcaatgttatttcatgaatacmaatcaactgattctaaaatttatgtggagagaaaaaagaccctgaatagccaaattaatactgaagtagaagaacaaagagtgaggtttgcatctacctaacttcaagacttactataaagctacagtaatacagtgcggta

SEQ ID NO: 431342 - DNA, 600 bp, Homo sapiens
cttctggctgaaactctacctattattgctttaagtcagcagtccccagcctttttgacactggggatcagtttcatggaagacaatttttccatagactgagattgcgggagagatggtttcaggatgattcaagcacattacatttattatgtacttcattattattattattattattaccattgacatatatagtgaaataattatacaactcatcataatgtagaatcagtggragtcctgagcttgttttcctgcaactagaaggtcccatctgggggtgatggaagacgtgacagatcatcaggcattagattctcataaggagcaggctgactagatccctggcatgcacaggtcacaataggtttgtgatcctctgagaatctaatgctgtcactgatctgaaaggaggtagagcgtaccagtaatgccagccatagggaccagctgtgaatacagaggaagcttcactcactcacctgctgcttaccttctgctgtgtgtcctggttcctaacaggccacagacccgtacaggtctatggcccaggggttggagatccctgttttaagtggctgtgataaagtattaaaa

SEQ ID NO: 431343 - DNA, 390 bp, Homo sapiens
tgcataagtaatgaggagccaaatgttaatcgccaaggcaatagaataactgtctcctgggcgtgtcagagactttgtggcagcccctcccatcacatgcctggaggcctaagaggaaaaagccatttcctgggctgggtaccctgctgtaggcagcctagggatttagtaccctgtttcccagtcacttcagctatggctaaaaggaccaaggcacagtttgggctatggcttcagatggtgcaarccccaagctctagcagcttccacatggtgttgagcctgcaggtgcacagaagtaaaaaattgaggtttgggaacctcaacttagattacagaggatgtatgcaaatgcctggatgtccaggcagaatttgctacaggggcagg

SEQ ID NO: 431344 - DNA, 505 bp, Homo sapiens
aaatattttggtgtggtgacttacaaattactaaaatagtttataatcaatgtttggccccatattcctgggaaaacaattaatgcttcaggtacatttggtcatctagtgggtcatttaaatattttataaagggatttcattcaattgttattttcaatgcatgttttctgtttgtataaaagctttcccatgcaagaggcctgatgttataacagtagattattatgctacagtgtattttcaccaggtaaagaaagcttgttatggtttggatcttytgggaatgttggagaaagactgtccttaccatccacactacaagaaaacctcgggaccttgaactttgggttcatagtctcatatctgagaagggtccttccacactcttggaactgtacacccacacccattgcaacccttagaataaaactaaccagggaggtttctccccagaggaggatggcatccttgatgttaacagcttttcccaagttcacagatt

SEQ ID NO: 431345 - DNA, 569 bp, Homo sapiens
ataaggccctaagttttggtcacactctcacctaagtgagaacctgagcaaaaaggtagagttttttaaacaaaattctgggaggccactgcattgaactaagctcataaactaggcccaaacagaccaaaccaaactaaaaccaaaatgtgctaagactttaaggaaacacaggctcttgaacaggttttggttttgtctcctgcaaatctctataacaaacattcctgacagcattggtatttaccccctaaagtgctcattaaatctttcaaccaaattcatttcctctcacctagagaccatcaagcttcagataatcatgcaaaaaaggttccagccaattccaggtgaagacactgcctctggccatcaagaagctaccctgcctccactagacagagcagggtaagagttccatggtccccagttggtaaaactatgccccaaaccagcatgaagcatttacagagaaaagtmcattggtccctctgcctcccataaagatttacagggatcacatctctcagtggggaaatgaggcaggaaagtagggtccggaggcaggg

SEQ ID NO: 431346 - DNA, 631 bp, Homo sapiens
ataaatttctattataaatatagaatatctatgctcctgctgaaaatttgcatgactggagtcgaaactgactgcaatagtaaagatagtagcgaaaaagacacaaagaatgagatgtgacaaactgctttgtacaggtcagtggttggaactatggggaaagagaacttgttggaaaactcttactttttttaaaataaaatacaaatatactctgccattctgccttagacagtgtgtcataytctgcaaaatatgattatgctgtacaatatttccacagtcttcctctaagagaagaggtttaggaggagctgaagtcatatgctagcccttacagctcagactccatcagcgatgtctcatggaccatcatcaatgcctccatgctgtgctattacactgcaatttgacactgcattgttggaaaagaaaaacaaattatatgactgctttttagaaagctgtatttctagataaaatctcctttcatgtcttttattctatagtgactgaaacatttacaatatcaattttaagcaaaaagctgttggtcatggtttagcaccaattacaatcatgaatgccctatatgtgtttctttcatcattatggtttttgagatagaaaa

SEQ ID NO: 431347 - DNA, 531 bp, Homo sapiens
tcctccaaaatttttccagacagttaatatttctaatattgtgcatcaaaggtacaaaatcaaagatgaaataaatgagaatataagtcattgcactgaaaatcatgatgtgtgaatgttagacctaactcttctacacaaaaactcacaaggccttcagcatatcacttaagctttttacccctcttctaatttttgaggagagagtgagtatgcaacaatgtaagaagtgagaaactattttcttcagggacatttttattccagagcctttattctataaatttgtctttttawatcatattaaattatgtagaaaaacattaagtagaaaagaccgattattataaaattgtggaaagaaattggtagttgcctatataacattaaatgactcaaaagtacttaataatgcttaatttgttcttcatgtagaaatatccattgcatattaagaatttctttttctaaggccaggcgcagcagctcacgcctgtaatcccagcactttgggaggcaaaggcaggtagg

SEQ ID NO: 431348 - DNA, 553 bp, Homo sapiens
acactcagtctcaaaaaaaaaaaaaatctctttttctgagtcagaaaatcatttatcttcaagcacttttacaaaatttcacccagtttatatagtctgtttgtaggtgttaatttactactacagtcttcccttgatgttttgttcactactaatgggaaatgtttttcaattttttttctagtaacaggacagatgtcaattccattacmacatagtatagactgctcctctctcagactttagaaatcaatgactcatctttattagtcctgctcatcagaatagagagaaattagataatccagtttacaatggctactgaatattagtgctgtgaatggagattgcttttaaacaaaattccttattctgttcgttagcaaagccacatcctgaggctaactacagcattctgtagctgaacccagtcatgatcttgccaaaactctgaaggagcataagaatggccaattctaattattggtttccctattaatctattacatgcattataacgaccatccattggcacttaggtttcaacgcataa

SEQ ID NO: 431349 - DNA, 553 bp, Homo sapiens
acactcagtctcaaaaaaaaaaaaaatctctttttctgagtcagaaaatcatttatcttcaagcacttttacaaaatttcacccagtttatatagtctgtttgtaggtgttaatttactactacagtcttcccttgatgttttgttcactactaatgggaaatgtttttcaattttttttctagtaacaggacagatgtcaattccattaccacatagtatagactgctcctctctcagactttagaaatcaatgactcatctttattagtcctgctcatcagaatagagagaaattagataatccagtttacaatggctactgaatattagtgctgtgaatggagattgcttttaaacaaaattccttattctgttcgttagcaaagccacatcctgaggctaactacagcattctgtagctgaacccagtcatgatcttgccaaaactctgaaggagcataagaatggccaattctaattattggtttccctattaatctattacatgcattataacgaccatcyattggcacttaggtttcaacgcataa

SEQ ID NO: 431350 - DNA, 625 bp, Homo sapiens
ctctgttgtaatttgcttaccaaacataacttacctttgccacctgaaatctaaatagtttcactagaatttttcctgttctttttggcaggttatcccaatacatgttaggacactgttaacyacctatcccttatatagattaactgccatatataactgatacataatgagttgtggctacacttcattaaatgtgctagtcagtctgtaagtcacaataataaaatttaataccctttacagtactcaataaagtctatgactatattatattataataagtttttaggaacttcgttactttgatttcattttctgcagtgccgatcagtttgaaatctcaattctcctagaaataactgaaaattcaattaaaggcattggatttaactacatcaaaaccaacagaagttctaatacttatactgaaacacaggaaaaaatgaatcagaaaagatataattcttatataaagagatatgaatctctgaagcatcaaagaaaagttagatgatgaattagtgtggctaaggtaagaggagaaagtttgaataggaagataccaataaaaagagataagctgctatccttcctcactggcaaacatgtttcagcaaggttg

SEQ ID NO: 431351 - DNA, 625 bp, Homo sapiens
ctctgttgtaatttgcttaccaaacataacttacctttgccacctgaaatctaaatagtttcactagaatttttcctgttctttttggcaggttatcccaatacatgttaggacactgttaaccacctatcccttatatagattaactgccatatataactgatacataatgagttgtggctacacttcattaaatgtgctagtcagtctgtaagtcacaataataaaatttaataccctttacagtactcaataaagtctatgactatattatattataataagtttttaggaacttcgttactttgatttcattttctgcagtgccgatcagtttgaaatctcaattctcctagaaataactgaaaattcaattaaaggcattggatttaactacatcaaaaccaacagaagttctaatacttatactgaaacacaggaaaaaatgaatcagaaaagatataattcttatataaagasatatgaatctctgaagcatcaaagaaaagttagatgatgaattagtgtggctaaggtaagaggagaaagtttgaataggaagataccaataaaaagagataagctgctatccttcctcactggcaaacatgtttcagcaaggttg

SEQ ID NO: 431352 - DNA, 591 bp, Homo sapiens
gtgtacatatttgttagtatacttagctctctctatatatctatgctaactttttgaactttgcattcaaaataatgaatggttatacccccgcacccagatcttgggttctaatagcattttccaataaaaggaatctagagtcaacrggaaaaaaaatgagtgattttagagctaagacagagaagcatgcaagatgatcctgcagcatcctggagtgccagaaaggaagaaaatgttcaaaaaacaaactctagaggcatgtaaaagtgacaaaggtgtcagtctgaagcaactcccaatgaccaaaacctggaacaatttgagaaacaaaataatatggcattcaattatgatccaatgaataaaataaacatttatgagtctatgcttatacaaataaattataaaataaatggggcaggatagaaaaatttccaatgcagaaagtttccactccattgaagaaaagcatttttcttgcatcctcaagcatgactgtacatagtgacttcctattaaggagtatgctatgtaaaaggggatgagagagaaagtaacctcatagtggagaaacctgacaaacattcc

SEQ ID NO: 431353 - DNA, 584 bp, Homo sapiens
agcaggtggtatcacatctgtcaaattaactttgtccaaataaatattttctctacaatccccagctgtgtggaaaagtagaaacctacgagagtctccccatgatgacatttaaaagaaagatgttattggtggtgccttgagataaagcaataagtttatggttgagtgttagggaattttcctttgttttttttctccttcatttctgctacagcatatgttttgatctttttttactctttattattaaaattcaatgatggtagttacagtataatcaggatcaatgatggataattacctccyttctctgccttccttgttgttatttcttagaagagaacaggggcagagatgtctttagaaaatcaagtgataagataaattgctaaactaggaggaacattaaagcttatatacacaagcaccctgtgtaatatcctcagaagaactttgtagattgtccacagtgacagccagggctaaattaatatctacatatttcttggttagtgggcttcagtcctctaccaaatacaggtgtcttgacattttctgttaattttttttatttccttatt

SEQ ID NO: 431354 - DNA, 615 bp, Homo sapiens
cttatttagttgctagttttgtttgaagcattttaacatatattaactcactgattccttatgactgctttattaagtaagtattatatgtttatattcattttgcagattataaaactgaggcatggagccatgaagtaataaattcaggtttatatcattggtcacgtatcaaagtcacttttgaaattcaggcagttgggttccaaagtctgtgctgttgaacagtttgctacactgcctctcatttttgcttataagatattacaggtgttgttatagattatttccaagatctctttctgatcacaaatgctcaaaccccatgataattacttaaaatataaaagctaagagatcagactgtgtttcagcctgtttggttggaatagtttatgtgtttaatatcttatcaaagctcttccctgatttttttttttgagatggtatcttgctgtattgcccaggctaaactcaaattcctggtctcaagtgatcctctcacctcagcctccyaagtagctaagactacaggtgcacattactgcacctggctttctaatcttaatgtgagactctgcattcctccatttatattcctttttacagaagatt

SEQ ID NO: 431355 - DNA, 567 bp, Homo sapiens
gagagaaagagacagagaactcgaaagagagatcgagagagagcgcgctccgtggctttccttcctaatctctccagttcagcttccattgagtctcgggcaatcggtcacctccccctaccgaagaaaacctgctggttgccctcgcatctgccccggggccaccgtacccctttatttcctttgcacacgcactcgctcacacgcggacacacgcacacatgcgcgaacacacagacccctcccctcggctggcttcccctccgggcttcggagctcaagtccccggagcycatcccccgggatggacccggtctctcagcttcgcgggtcatttccctcccgacctcaaagtgccctcctcgggtgctggtccgctccctcgcctttcccagcggggccctcacccggagcgcgtctccccgctccccgagccctgcggagcaggtcacgacctccccccgcccccgggacaccgctcggcgccacagatcagccctgtcggtgccgggaggctggccgtggaacccaggtcctggggagcgcacgaacgcggacagcagcgct

SEQ ID NO: 431356 - DNA, 457 bp, Homo sapiens
ggttttcttacccaaaactctataattaattcacctgtcttacacagtaaccaactatcctcatgtcctttaagacccaaagccaattgctaawgtgttttttggacaacacaatagttttttttttttttttttcatgtttgaaaagtgctgctgtagttttggaaagtccttttcaatttgtcagtaaatatatgttttgtaaataatgggaagaacaaaaacaaagctcactagttgacttgtaaagacttgggtagctgtgcttaaaacaacatgaggctgagtttagactgactctattcctcctttccttcctctttccttttcttttcttttctaacttgttgcactgaagtatttattcaaggatttttgactaacatatcatttgaatatgggtcaaatctatttgctgctcatgtctccaagtatcttcaattagttagcctttgaa

SEQ ID NO: 431357 - DNA, 457 bp, Homo sapiens
ggttttcttacccaaaactctataattaattcacctgtcttacacagtaaccaactatcctcatgtcctttaagacccaaagccaattgctaatgtgttttttggacaacacaatagttttttttttttttttttcatgtttgaaaagtgctgctgtagttttggaaagtccttttcaatttgtcagtaaatatatgttttgtaaataatgggaagaacaaaaacaaagctcactagttgacttgtaaagacttgggtagctgtgcttaaaacaacatgaggctgagtttaractgactctattcctcctttccttcctctttccttttcttttcttttctaacttgttgcactgaagtatttattcaaggatttttgactaacatatcatttgaatatgggtcaaatctatttgctgctcatgtctccaagtatcttcaattagttagcctttgaa

SEQ ID NO: 431358 - DNA, 597 bp, Homo sapiens
aacttgttgcactgaagtatttattcaaggatttttgactaacatatcatttgaatatgggtcaaatctatttgctgctcatgtctccaagtatcttcaattagttagcctttgaaccggtccacacatgttcagtaagttcataagatatgaagcaatgctttagcatttgacagatttttaaaataaactrttagtagcaggttcacagggttgggaaattttataataaaatttttgccattctggtgttgaaatgatcacatttctctatatcattttaagcctttgaactctgtgaatcgcagtgtcaaatagtgcaggaactgtctaccgaaaaatagaaatatgacactatggactaattagtgtatgattatactaaaatttttgggacatagcagttaaatcaggaggctttcctgggagataagaattcagaaaatcgattgttgcagaaaagtccatgaacttctgcaaggacaactaaagtttaaacagttgtttggcctggttaaccaatgtattgtaatacattcagaaataatttttatttatgtttcagtcttcaaatttgttatgggtaaaagtaggaat

SEQ ID NO: 431359 - DNA, 615 bp, Homo sapiens
gtgaatcgcagtgtcaaatagtgcaggaactgtctaccgaaaaatagaaatatgacactatggactaattagtgtatgattatactaaaatttttgggacatagcagttaaatcaggaggctttcctgggagataagaattcagaaaatcgattgttgcagaaaagtccatgaacttctgcaaggacaactaaagtttaaacagttgtttggcctggttaaccaatgtattgtaatacattcagaaataatttttattwatgtttcagtcttcaaatttgttatgggtaaaagtaggaattcaatatatatcacatacatcaaaacacttccttaagtatttttgcatgttttagaaaatattacttttttaagacataccaaactactattataatgaggggaggggaggaagaaagtattaagccctgaaaagctaattttattttcgaattctatgcctaactttaataaattttgatatggttttaaaagactaaactatagtctcattattttaagttctagacccacaaatggaagaatgggaattaaatgccgagcatctgccattaccattctcattttttacatttccttaaactatcactcaccc

SEQ ID NO: 431360 - DNA, 561 bp, Homo sapiens
gatcacatttctctatatcattttaagcctttgaactctgtgaatcgcagtgtcaaatagtgcaggaactgtctaccgaaaaatagaaatatgacactatggactaattagtgtatgattatactaaaatttttgggacatagcagttaaatcaggaggctttcctgggagataagaattcagaaaatcgattgttgcagaaaagtccatgaacttctgcaaggacaactaaagtttaaacagttgtttggcctggttaaccaatgtattgtaatacattcagaaataatttttatttatgtttcagtcttcaaatttgttatgggtaaaagtaggaattcaatatatatcacatacatcaaaacacttccttaagtatttttgcatgttttagaaaatattacttttttaagacataccaaactacyattataatgaggggaggggaggaagaaagtattaagccctgaaaagctaattttattttcgaattctatgcctaactttaataaattttgatatggttttaaaagactaaactatagtctcattattttaagt

SEQ ID NO: 431361 - DNA, 558 bp, Homo sapiens
tcttgggctcaagcaatccacctgccttgtcctcccaaagtgctggcgttttcaggcctgaaccaccacatccggccttacctttattttaaatccctttgcataatctttgtggtttaaatgggtcacatagtccattttcatgtattgaaatcactaatatttttgtattgatatctatcatcttattttgtggtcttactggtaccaccccctatattttgtagtttcttcccttggcttttaatatccattcatgactcacctgaatcaaccaccactgtgatggttgccagattgtgttcatctatttctgtttttctttctacatttacaagttgtcatcytattgcaagaaaaatctttgtcttctattgaaatcatgactttgttaatttaaattattgtattccccttattattctttattttcatgttgacattggcccagatttgttgttcagttggagtctattccatctggcttctgtcattttgacatgcccatgtcattctttgggagtttcttagtttctggcacagggtccaggttccttt

SEQ ID NO: 431362 - DNA, 585 bp, Homo sapiens
cattatgctttgggattctcatcagaaacctataaacaatgtataacttacaaatgtccttcagtgcattagaatacttttagtacagctttaaaattttaaatcaattctgccattcactccatattatttatcttcaatttctccatattttaaatgtcactgtgtcatattaagtaataaaaagtttaaaagattataacctgaacttggcagatatgcactttcattacaaggcctgaaatccttgccttcgtacgttttctctaccagagtcttacttcttatcttgttttcatttttgaatgcaatgaaatcttcacactcaccgaacagtctaaagtatcaacaatgttattttaaaccaattctaatagtaagttaacggtatttaaaatatttggctcttaatcagactattttgtcacctcttttaaaaattatcctattatacaatatcagctgaaattatccatcattctgctagtcttaaatcatcctttawttctatcagttatattattcacatgccccgtaatccagtaacatttcattttcttcaatctgaagctcaagaaggaaaga

SEQ ID NO: 431363 - DNA, 606 bp, Homo sapiens
tagaagtgatgaagtcctgccatcccactacagtagaaaacatgtggaggcagaaggaagaaacacctcctgagtgcatattatatggtagaaaccgtataatttagttatgataccaaccctttgaggaagtcattatttataatccatgctttacagatgtggaaacggattttaaaagyttagtaacttttgactcattcttgggttaatcagactccaaagtcagtgtgctcattgtattagatcagaatgctgtccattctagaacacactttctaggtacatgtcctcaaaaggcactataatctctaacaaatccaactcttcttcagaaaaccataaggcattatggtagacagggacaaaataggtcactgtcattttctatgaaactaaattgatgattcatcaacacaggccattgttagaaagatcattgttcctaggtctttacaaacatatcgctaggccaaaagtgatgtgaaatcggtgccatcttgcttaccaaaagatatcactgaaaggtgctacaagaatgctcccctagcagggcatagtggttcatgcctataatcccagcactttgagagatggaggaaggag

SEQ ID NO: 431364 - DNA, 591 bp, Homo sapiens
cacagaactctctttcaagtttaaattgtgacatcagtgggccmgacgaaactggtgttaattttattgctctgaccaaagctagttaaatctcttctttctgcagtcaatgtcccaaggtcccaagattattgttagagctaggaagtcttaagttaggtctaatttgtcttgttttgcaaatggcacccctgaaattcagacagttccagggctactaagtagcagaacctagtctgaaaggtatgtatcctaacttttaattcagtacattaagaggaaatgatgtagctatcaatttcttcacatagatctttaagaacatgggatactactttccccaaattactatctaagaatagagacagacttgtataatgtcttcaaactaaatcaagtctgtcccttgcctactctcttcctttcacatgaattctaaaagtatttcttttaatcacagcattagcaacaaatatatggaaaccattacttttaaacttatgatactataccaaaataatagagaatattcatcatagaccattaatttattggctgagacggtatggaaaaaatactaaaaaatgttaa

SEQ ID NO: 431365 - DNA, 526 bp, Homo sapiens
tactgaacatgcttcttttaagaaatctcttctagattttggattttataacactcaactttactaattctgcaagtgacttcacaatggcctcaattctttargtattattattttcttcatgaaaaagaagttagaataatagtgcttgttctttttgtaccagaatatcattaaaacttaaaggtttctttaaagaaaaattaagggttccttcagatttcttgcagttggataaaaatagttaatggaattattccttatagatcaaaactataagcagataaacctatagctattataaaaatcttacttttcttcttttcaataacacatagtatattatactatcacttctacaaatttggctggtgacaaagctttaaactattaaccaaattttcagtattagtaattcccattagaaatgccataatgttttggtttaatgaatgatttaaggttacacactgttcctccagaaagatttccaacatctcccaaggcatgtttatgataaaaagtg

SEQ ID NO: 431366 - DNA, 526 bp, Homo sapiens
tactgaacatgcttcttttaagaaatctcttctagattttggattttataacactcaactttactaattctgcaagtgacttcacaatggcctcaattctttaggtattattattttcttcatgaaaaagaagttagaataatagtgcttgttctttttgtaccagaatatcattaaaacttaaaggtttctttaaagaaaaattaarggttccttcagatttcttgcagttggataaaaatagttaatggaattattccttatagatcaaaactataagcagataaacctatagctattataaaaatcttacttttcttcttttcaataacacatagtatattatactatcacttctacaaatttggctggtgacaaagctttaaactattaaccaaattttcagtattagtaattcccattagaaatgccataatgttttggtttaatgaatgatttaaggttacacactgttcctccagaaagatttccaacatctcccaaggcatgtttatgataaaaagtg

SEQ ID NO: 431367 - DNA, 570 bp, Homo sapiens
tttaattctttctaagaacaacatctgagaaaggaactaaaataaggcacagaagcttccaatggttgcaaagaagcaaaggggaatagaaagctgagaaatctaatagccggagcactaaaaagaataaaataaacacaatttgacaaacacaagggaaaacacaagagtttgggaagcaagtatagtttttagatcagcactctctaccgctcagtgaagccctgtttataaaacatgaaaagccaaaaattttagatgaacttctttctagatttttaagtgtagtgataacatttgctcttttacaacagacactttctctcccgactgcctataaagaaagtaggtacagcatatgaagaattatcaggagagattttcytaaagttcataaaactaagatgttctctacaacacctacacttgattacttaaccagtatttcaaatcctcatttagctgagacctctgaaaaatattaagatgactcattatgataaaatgtaagcctgttttctaggatgaaattgctttatccaaacatctacatggtattttaataggatt

SEQ ID NO: 431368 - DNA, 526 bp, Homo sapiens
ggaaatgtcgttctagattattttaaatttcccaggtgtttagctatacaaatcaagagtgttttgctgagacttaagtagtttccatgagccattcgacaatcacagcacagaattatacagtttccttttgatatgtggcattaatgttataccctgggaaaatggaacttgtcacaaaattaacttagaatgtgagagaacataagctgacaatttcttttttttccattatttttaactagaaaaaattgtattctatttttaaatgtttttgccttataggcagtcagccactgataagtaccctaagcacaaagacttaagtacaaaaattcagacattaagtacctgttacatatcagtacttgttaatgtcattctaatcaaaatcaaattatttaaatctaagcagtgttacatattatgaagaatttcctgaacagatttctcaaagctcatcattatatcacaatactattastctacttttggcctacctatcgtgaaatatttttcactaact

SEQ ID NO: 431369 - DNA, 655 bp, Homo sapiens
gtcttttagtgggtggagggtgggaggaggtagaggatcaggaagaacaactaatgggtmctaggcttgatgactgggtgatgaaataacctgtacaacaaacccccatgacacaagtttacctgtgtaggaaacctacgcttgtacccctgaatttagaataaaagttttttaaaaagagaaatggaagcatacgtctacaaaaattatgaatgaataaagtaaaacaaaattattaaaaataagacatataaaggagaaaggaaatatataatgttagaactggaaatgacattgaagatcaaatagttcaaccttatcactccacagattggacaaaccatggcacagatcagtggaactgtccaagtcatagagttgtggatggcccatatgccagctcccaggactgtaagttgtgtagagtgctgttacaagtacaacactctggttctctttgccatcattacagctccacacaccaagatgtcaagatacaatgtgatcctgccagttgatgtattagttattgaatacttattgttctcttagaaaatggcaaacccttctctaggtgttggtagttctagggacacaccagggaactaggcctgcactcaacaatgtcgcaacagctagtcacatgtagctagtg

SEQ ID NO: 431370 - DNA, 655 bp, Homo sapiens
gtcttttagtgggtggagggtgggaggaggtagaggatcaggaagaacaactaatgggtactaggcttgatgactgggtgatgaaataacctgtacaacaaacccccatgacacaagtttacctgtgtaggaaacctacgcttgtacccctgaatttagaataaaagttttttaaaaagagaaatggaagcatacgtctacaaaaattatgaatgaataaagtaaaacaaaattattaaaaataagacatataaaggagaaaggaaatatataatgttagaactggaaatgacattgaagatcaaatagttcaaccttatcactccacagattggacaaaccatggcacagatcagtggaactgtccaagtcatagagttgtggatggcccatatgccagctcccaggactgtaagttgtgtagagtgctgttacaagtacaacactctggttctctttgccatcattacagctccacacaccaagatgtcaagatacaatgtgatcctgccagttgatgtattagttattgaatacttaytgttctcttagaaaatggcaaacccttctctaggtgttggtagttctagggacacaccagggaactaggcctgcactcaacaatgtcgcaacagctagtcacatgtagctagtg

SEQ ID NO: 431371 - DNA, 496 bp, Homo sapiens
tatataaatacatccacataaaccacacacacacatacaatttcaatgaaatcyagttctaaatgtgcttatgagtcttttagtgtcatgtattaaactatcccattttaaataagttaataatataattgaaaaggaaatgtgatttccactatatttgtagtgaacagagatactcacaaaagttcaaaataagatcttgcaaaatattacatggattaacacctgtgccacctttaatatagtaaaagtaaaatgaagtatgtctttattttcttagattccttcctaatacatttcttaaattaagcaaaagtgcaagatgagcattccttagatgcacttgctgctgggctctcatcattcttgtgtatctcgtgtatgttattatgttgaacacactgcatgtttcccaaaagttgcaatgaatgtggaaagggaattaactaaagcaaactttcctcgattagcgttaattttcctaatacaaaaattt

SEQ ID NO: 431372 - DNA, 631 bp, Homo sapiens
gagggactcagttatattcaacatcaaataagtactcagaaaatgaaaaaaataaaataaggcaacatatgtccttaaacaagttgacagactgaaattaaggaagagatggagaggaactttccctaatactctgaaaaaatgccccattaattgctgaatgtcacataaacatgataagtaagaaaaagaaacattcttgccagagtaatatgcatgagtaataatcacccagcacatggcagggactcartgagtatgttcagaatgaatgaaaaataaatgaatgaatgagtgagagagggaagggatgatatttaatttttcctaggtctgcaactagagtttttcttttggctaaagctacaattctccacatcatttcttctgctttggaaaataactctttctcgtccccagggtattatttcaattactacttcatcaaaagagttattctcactccttactactctcagggagtagtttacacaatggaggaatttgtcctaaaatatttctgttttttcctctcataaagtcaataaagtggaagctctgtccaaacacaatcattgacttgagcaatttaaagctgaggatattactatttatacatttcataaacatg

SEQ ID NO: 431373 - DNA, 535 bp, Homo sapiens
tttgaccaagtataatctccatctacaaatcacataagataaatatgtattgaagtcatcatcgggcttggttttgtgtgtgtgtttaaatgtaagacaaaacatatggtagtttctagatgcaaataaataaaatcctgatcttaggaaattatttttgaaaaatagaatagaatgactttggacttaattttcaaacacaattaatttgactttagaataagtttgtctaatttggataaatttcatctaaaacaagaaagtcactgcaactaagtacgtactgggaataaaaattcarctgtataaatttatacaaaattaaatttgctttatatacttatttcctcctcaaacctaggctttgacttctttaaattctaaacaagtaattttaggctgctcatccattatctccaagcattctcttcctgcaaaggatccaccatggtaatagttctttcatcaaagcctaatggtttgtttcaaataatcaaagtagtgtttatatcactgtcctcaggtgcaaccattt

SEQ ID NO: 431374 - DNA, 588 bp, Homo sapiens
aacttgttcaaatgatagaccttgatcaatttagcttctcaaaataagacatcttctactactggaaatgtaaaaatgtaagagaaggcatgatatccagccacctaggttcaattaaagcagtttgtttcattttgtttattctcatttcaattgtatttaagttaaatgaccaagccaacattaaattgctttgtttttatatatagataactcctactattctaaaaagaggagtaattaatttatctctatttttcctcttttttgagagaagacaattaagtaaaacaatctgaattccactccctacttttttatttttatttttatttttaatgaaatccatatagcttcagaaagacgctaacagggaagttgcgctcccttcagaatcttctgagatctatgtgaatagaacgttttgaaagctacaagaagaraaaacattttgtaagagagagccaacattgatgtaaaagaatcctagtgcatcagattcatctgtagcacctgggctaggagtattagggatgctcagtgagaaatacctgccccaggacccactgagggatgggttctatggtc

SEQ ID NO: 431375 - DNA, 588 bp, Homo sapiens
aacttgttcaaatgatagaccttgatcaatttagcttctcaaaataagacatcttctactactggaaatgtaaaaatgtaagagaaggcatgatatccagccacctaggttcaattaaagcagtttgtttcattttgtttattctcatttcaattgtatttaagttaaatgaccaagccaacattaaattgctttgtttttatatatagataactcctactattctaaaaagaggagtaattaatttatctctatttttcctcttttttgagagaagacaattaagtaaaacaatctgaattccactccctacttttttatttttatttttatttttaatgaaatccatatagcttcagaaagacgctaacagggaagttgcgctcccttcagaatcttctgagatctatgtgaatagaacgttttgaaagctacaagaagagaaaacattttgtragagagagccaacattgatgtaaaagaatcctagtgcatcagattcatctgtagcacctgggctaggagtattagggatgctcagtgagaaatacctgccccaggacccactgagggatgggttctatggtc

SEQ ID NO: 431376 - DNA, 504 bp, Homo sapiens
acattctcctacaaatcttctactatctcataaaatcgcagagatctggaaattttctattgtatttaagatatttatacctcttaatacaaaaccaagtgaatggtaatcactgcaggctatttaccaacttgaaaaaataaaatagttcactaatactccaattaaaagcagaacggttgaacacagtttatcataggtactcagattcaggaactggtaatagtcttaccttatcttgctcaataattgcctaataataaatctagccaaagaattctgaatcacacattttattcctttcaccatcttgagaaaaaaggtaccattayagagtattctagatatttctcattagagagaaagtcccatttggtaggctatgaagaattctacattttccaaaaaaaaagactaaaatattaaataaaaattaatagtcaatgtttattgagtggttattatgtctctcactgtgctaagtgcttaatatgcataatttca

SEQ ID NO: 431377 - DNA, 504 bp, Homo sapiens
acattctcctacaaatcttctactatctcataaaatcgcagagatctggaaattttctattgtatttaagatatttatacctcttaatacaaaaccaagtgaatggtaatcactgcaggctatttaccaacttgaaaaaataaaatagttcactaatactccaattaaaagcagaacggttgaacacagtttatcataggtactcagattcaggaactggtaatagtcttaccttatcttgctcaataattgcctaataataaatctagccaaagaattctgaatcacacattttattcctttcaccatcttgagaaaaaaggtaccattatagagtattctagatatttctcattagagagaaagtcccatttggtaggctatgaagaattctacattttccaaaaaaaaagactaaaatattaaataaaaattaatagtyaatgtttattgagtggttattatgtctctcactgtgctaagtgcttaatatgcataatttca

SEQ ID NO: 431378 - DNA, 624 bp, Homo sapiens
tagacgagtaagctaagactcacagactttaaaaaacgtgcctacaatccccaagccagcaagtggcagagaaaagatcttaaaacctagtttttatctgcagcatagtttgttcttgtcccttagaattgcaggaaaaaaaatgtaatattttcctacttgtagataatgcaaagctttatagcattaactctgatccatacttcctatttccctcctctactaagctagaaaccaaagcgagagaaaatgcaaagaaaaataagctctgttaaaatgcctttgagctcttcatatcgccttcaaatattgactcaaatgtcattttctcagtgaggtaggcctcattctgaccactttatttaaaatttcacctatcccactcttcataccccaagctctctcactctgtcctatttttaacgtaatttgctyattgattatgttaattctttattgcctccctctccacccctaaccatgagtgctagaattgaagccctatgagggtagggatttttatccaaaacacctagaagaaatgcctgtcatatattaggtgcataacaaatatgcattgagtagataaaatgtagttttcatcactttatacacacacacaca

SEQ ID NO: 431379 - DNA, 624 bp, Homo sapiens
tagacgagtaagctaagactcacagactttaaaaaacgtgcctacaatccccaagccagcaagtggcagagaaaagatcttaaaacctagtttttatctgcagcatagtttgttcttgtcccttagaattgcaggaaaaaaaatgtaatattttcctacttgtagataatgcaaagctttatagcattaactctgatccatacttcctatttccctcctctactaagctagaaaccaaagcgagagaaaatgcaaagaaaaataagctctgttaaaatgcctttgagctcttcatatcgccttcaaatattgactcaaatgtcattttctcagtgaggtaggcctcattctgaccactttatttaaaatttcacctatcccactcttcataccccaagctctctcactctgtcctatttttaacgtaatttgcttattgattatgttaattctttatygcctccctctccacccctaaccatgagtgctagaattgaagccctatgagggtagggatttttatccaaaacacctagaagaaatgcctgtcatatattaggtgcataacaaatatgcattgagtagataaaatgtagttttcatcactttatacacacacacaca

SEQ ID NO: 431380 - DNA, 536 bp, Homo sapiens
tattcctcttgttagcagcttctactcctactcccaaactctagcaaaccactgatttgttttttgtacctatagttttgctaaaatatcatacaaatgaaatcaaacagcatgtagcctttttagtatggcttctttcacttgttataaaataataaaaattcatttatgttgctatgtgwtttaatagttcattgctttctatttctgaatagtcttgcattgtatggatgtcctacggttgtttatccattagccagttgaagaacatttggttgttgccagtttgggtgattataaacccactctaaacattcatattcaagtttttgtatgagcatttaagttttcatttctttgatgtaaaatcctaggaatgggatcgtgggctctatatgataagtttattttaactttataattaaccaccaaatttttccaaagtgaaatattatcttgtactgccattgacaatgtatgagagtccttactgctccacatctttgttagtacttagtattgtcagtttttgtttt

SEQ ID NO: 431381 - DNA, 618 bp, Homo sapiens
tatgcttttaatgtcatatctaagaaatatttgcctaacatagggtcacaactatttaccctatgttttcttctggaagtttcataggtttgtgttttatatttagacctatgatccatttttagttcatttttatagaaagaacaaggtgtgagtcaagatttactttttgtatatcaatgtccaatcatttcagatcaatattgaaaagactatactgtctttactgaattacctttgaccatgtatgtataagtctatttctagactctctattctgcccccatttatctatgtgtctgttctttcatcaatgtgacactgtcttgattacttaggtaagtcctggaatgcaatattctgagttctttaactttgttcttctttgtctgctttggctattctagtgcctctgactttccatatacattttacaaacagtttattgatatttattttaaaaatcctaaaggrgttttgatttggatttgtggaatctctgtatcagtttgttcagaattgatatctcaacaatatttagtctttgtgttaataaacacagtatatgtctctatttaggtctcctttgattttttcaagagtgcttgtagttttaag

SEQ ID NO: 431382 - DNA, 545 bp, Homo sapiens
ttctgctgacgaccgccttacttccattagggtctgctgaccatgcaagggactttctaccaatttccaagtgctcaacagtggggatggcatcttagtcagtggtatatcgtgggtgcttggtgtcacatggccttgtactgagcaggacttccataaacatttgttaaattgaactggaacctggaagaaaacagcctgtcagttctcaaattacttgatggcatcttcatgttagagaagactatgtggtgataaattcttcactttctcctcaaaataacctaaatcaccctccttcttagctagacattttaaaagaatgtccrtgcctttcctaatactgccctcatgaactgctcaatccaaaaagtgtttttaggctttatcacttactctttcttaaagatttgatacagccacccaattactccctcctttttttaatgctcattctgttataggccacgggctcttcggctccccatgtaatacgggaattaacgcgggaccaggcacatttcccagactaggcttttatttca

SEQ ID NO: 431383 - DNA, 508 bp, Homo sapiens
cacctagctcttaactggtatcactgacacttggaaccaggtcttaaaactgaacacccaggtagagtaaaataaatttaattcaattcacaaaaaataagcaattattatgtccttggcattggacaggctatacatatgaataaatatgtttatatgaataatgaaacagagaaacacaggtcttgctcttttttatttttttgagatagtgtctcactttgttgctgcggctggggtgcagtggtgccatcacggctcactgtagcaggcccggctcttgatgacttcacctgtaacaactgagagtggaggctttcaagcagaaggcttytaagctgaaaaaaaaaaatcatatgattcgatttggactacactgtggaaagctatttagatggggaagatgctggagacagggtttctcccacatttttactgtaacagatccagagagaggtggcaaggcctacactaagagaatgagagtgaaattacgaatgagggaaca

SEQ ID NO: 431384 - DNA, 585 bp, Homo sapiens
tgctttttattgtaattcaacagctatagagagaaagataacttattgtgtgtttgatttcagggagagagattttctttggtcatccataatagagattgataagatttagcaactggtgttggagaaaaaaagaaaagcaaatgagtgttttcaggtttttttgcattatatgcatttatgtaatgtttctgttatcagcaatgtgcaattattttattgagaggaataaaaaagctttctatgagtttggtatggtgcgaggaaaatcttacagtttgaattatgacctagaaatttttcattcccatrtctacctaagaaggaagcagtaaatccataatttaccttttgggcaatgctttgtgagcaaaacaaagtcacttctgccataacatcttgaatttaaccatatatgccagattactttatatgcatcaacaagatcaccagtgaagtttaatctagctaaacactggtcctgctcctgagatgggatcctatgtgtttggaaaacgtgataggcacacgaggatgagtggctttgtatcgcccagagaggtgcttgtccagatttcacatgca

SEQ ID NO: 431385 - DNA, 585 bp, Homo sapiens
tgctttttattgtaattcaacagctatagagagaaagataacttattgtgtgtttgatttcagggagagagattttctttggtcatccataatagagattgataagatttagcaactggtgttggagaaaaaaagaaaagcaaatgagtgttttcaggtttttttgcattatatgcatttatgtaatgtttctgttatcagcaatgtgcaattattttattgagaggaataaaaaagctttctatgagtttggtatggtgcgaggaaaatcttacagtttgaattatgacctagaaatttttcattcccatatctacctaagaaggaagcagtaaatccataatttaccttttgggcaatgctttgtgagcaaaacaaagtcacttctkccataacatcttgaatttaaccatatatgccagattactttatatgcatcaacaagatcaccagtgaagtttaatctagctaaacactggtcctgctcctgagatgggatcctatgtgtttggaaaacgtgataggcacacgaggatgagtggctttgtatcgcccagagaggtgcttgtccagatttcacatgca

SEQ ID NO: 431386 - DNA, 554 bp, Homo sapiens
aatggtaatacctttttaaaagctcttgtgaggattaagtgagccattgcacataaagcatttagcatcacatctgacacctgatatcaacaataacaatgcagatacctttaagcagaatatttgaatggcatatgcatatgagaattagaaaaacaattgaatggctttcacrggtcctataaactttcctcgtacaacttatatcagggcaaatactcctgaatatgcattaagaaacctgcaacattctcacaaattccacaaattcaacatattccagtaacaactgtggatgattatgattaattaattaaggaataagagaaggaaagttgtcgatgtactgttttagcttctaagtagcatattccctgtttagtaagtactgcaattaaagccaatgtttatctccaaactacaaaatgcaagaagctctagaaatgttcttttgttttttcaatagtaactatttcatgaattgccaacaagttttaccatgccactgtgtgcctaacaccgggttaattgctgtgggaactgccaaaaaacag

SEQ ID NO: 431387 - DNA, 359 bp, Homo sapiens
ggataaaattttttagatccttgaaatgaatgaaaatagaaacacaacataccaaaacctatgggcacaacataaatggtattaacagacaaacgtatagtaataaacgcctacatcaaaaaactagaaagatttcaagtaaacaagctccaggagctagaaaagcaagaacaaacaaaaccaaaaattagtagacgaaaagaaataataaatatcagagaagaaataaagaaaattgagacaaaaaaattacaaaagataatgwaacaaaaagttgattttctgaaaaaataaaattgacaaaccattaactagactacacaggggaaacacttcaggactttggtctggaaaaagag

SEQ ID NO: 431388 - DNA, 603 bp, Homo sapiens
agtgagttgttctcaaaaggctgatattttgaatcagaaaagaaggcttgcaaaatgcatatttacaaatgtccttcttttagcatgaaaggttgctatggagacctgtgacggtgacacgaatttctggcttaagacggtgttgggctccttgtattaagccaggtaggttgctgggcttgtgctgctgcagctgcagaggctggrtggcacccacaagtgcctggggacacaggaagagaaatccctcaacgtggaaagtcttccagcactaaggatgctatgttctcttccaaaatggataattagtcaaggcaagcagcatctgtctcccaagaccaaatcctctttatttcaaagccttcacatatgtgaaccaccccaaccccaatctggctttggctggcaggacttggcctttagattacacaaactcagttcatcctccagattccagacaagcaggaggagctcccaaggcctttatccaatgcctgtgtctgctcataaaaacaatccaattatcaagaccgttggcactgctgctgctttacaggaggcatacaggatgctaataattgcaccatctaattgcatggagcc

SEQ ID NO: 431389 - DNA, 603 bp, Homo sapiens
agtgagttgttctcaaaaggctgatattttgaatcagaaaagaaggcttgcaaaatgcatatttacaaatgtccttcttttagcatgaaaggttgctatggagacctgtgacggtgacacgaatttctggcttaagacggtgttgggctccttgtattaagccaggtaggttgctgggcttgtgctgctgcagctgcagaggctggatggcacccacaagtgcctggggacacaggaagagaaatccctcaacgtggaaagtcttccagcactaaggatgctatgttctcttccaaaatggataattagtcaaggcaagcagcatctgtctcccaagaycaaatcctctttatttcaaagccttcacatatgtgaaccaccccaaccccaatctggctttggctggcaggacttggcctttagattacacaaactcagttcatcctccagattccagacaagcaggaggagctcccaaggcctttatccaatgcctgtgtctgctcataaaaacaatccaattatcaagaccgttggcactgctgctgctttacaggaggcatacaggatgctaataattgcaccatctaattgcatggagcc

SEQ ID NO: 431390 - DNA, 603 bp, Homo sapiens
agtgagttgttctcaaaaggctgatattttgaatcagaaaagaaggcttgcaaaatgcatatttacaaatgtccttcttttagcatgaaaggttgctatggagacctgtgacggtgacacgaatttctggcttaagacggtgttgggctccttgtattaagccaggtaggttgctgggcttgtgctgctgcagctgcagaggctggatggcacccacaagtgcctggggacacaggaagagaaatccctcaacgtggaaagtcttccagcactaaggatgctatgttctcttccaaaatggataattagtcaaggcaagcagcatctgtctcccaagaccaaatcctctttatttcaaagccttcacatatgtgaaccaccccaaccccaatctrgctttggctggcaggacttggcctttagattacacaaactcagttcatcctccagattccagacaagcaggaggagctcccaaggcctttatccaatgcctgtgtctgctcataaaaacaatccaattatcaagaccgttggcactgctgctgctttacaggaggcatacaggatgctaataattgcaccatctaattgcatggagcc

SEQ ID NO: 431391 - DNA, 592 bp, Homo sapiens
ggtggcgtttggattgggctgccaacccagaagaggtgagcaggcttttgactgtcgtaggggaaaagcttaggcttgataaaggagacctgggccaaattccctggacttgctgggagaacttgcacaagcatttaagagttcttctctttttgcctataaaatgactttcaatgatgatagagttggaacagatttggggcccttgctaccaaatcaccttcttcctactgttttccaggatccattcaaatgcaaacactcgggagtgggaggcaagtgggctgaggaggtggaggagctggcccaggtccttaaagcactgcaaagtcacactctaggcccagggatgaggtggattttagggggaagcttagaagcctggctcactggagagtgccccagatctggctcttatgggcaaggcagctgctgtgtcagcttggctctgggtggtctgaggatgaagagmatcttccctaaagcccaaggagcctggggttctcccaaagcaaatctttgaaggcctcactttgcccctcctttttctttgaccttgtctttgcattagaaatacattctaaagccttcc

SEQ ID NO: 431392 - DNA, 560 bp, Homo sapiens
tatgccattgcgcaatcaatttctggacctaaatgtgttggtacaataccagctatattgatgtaagrgtattcttcagagtcatcccaagctagtttctggcttgtcactggaacccaagctctacctctgtacccggtgcctgcccactggaatgtaaggtcctcagtttcagcagcccagcttgggttgagacaacatctctgctttttttttttttttttttttttgagacagagttctgctctttcgcccagcctggagtgaagtggtgcaatctcagctcactgcaacctctcccccaccaccccatcaagggttcaagtgattctcctgcctcagcctcctgagtagctgggattataggcacctgccaccatgcctggtcaatttttgtattttttttttagtggagatggagttttgcattgttggctaggctagtctcgaactcctaatctcaggtgatcccctggcctcagcttcccaaagtgctaggattacaggctctgcttcttttttaattttacctagtaccaagcacaaactgtggaagaagt

SEQ ID NO: 431393 - DNA, 536 bp, Homo sapiens
agtttcatttggactaaaaacaagtgagtatgtcttccttttccctcccccaaatctagatgtaggggtgtcaggtctcccccttcacgtctgtggcggtggaaggaggtgggaggaggtaggagaagctggccccacacaggagaatgtggcttgctgtcttctcccctcccggagctgcccacggctgtggattaagcaggagtggagaggcgctccagactcttcctttcacttcctgcactgacagatcaatttggagtaatttatttataagctggattagtaagtctccatagagtaaacacagtgctcctgaatatagaaatgtagaggaatcccttcccagctgttcccaggctggagctaaatgctttggggatgaggacgtgggagggatgaggaaggtgtgtcacccaggcacactcagggttcctgggccacagcaaacagaaagcaagagccgagccaccccgccaggaacagatgyccaaaaacagtcttcatgaaatccctcctccctccggaatcctgtc

SEQ ID NO: 431394 - DNA, 400 bp, Homo sapiens
ttggaaggcaggtgtttgtcctgtttctgtcgcaggcatgatatgtgatctgggtgacttacttaccctctctagctattagtttcctaacctgtaaaaattatgtccaagatcctgtccagctaaacttttaagcctgtctggattaggctcaaggcattttggggcttgtggaagcagctcaaagttggatctgtggtttgagtctccttggggtgtcctctacctaagccagaactcgggctctggagcaaatggagccagtcctcagaatcaccttgatattwcatgggcctttcatgtgggtttttaagtgacttaaaaacccgggctgttagaaaaacaacagcaaccaccagagaccatctggaactagaagagtctaagggaacaaagaaag

SEQ ID NO: 431395 - DNA, 534 bp, Homo sapiens
ctatttctttgcactgaatgattccactcttaggatgaaatgtgcagtcttcttgatccaatattgtattgatttgaagtgtccattccaagtggcttccagaaggaagtaaaacaactcaaattaaaaaatatctccattctttcttgcttatgttctttgatcaagttgtctttgtgctcttatgaaatggctacagcccagtcctcacagcccaacataagtttgccaaaagatactctgggaatcctaaatggttatcaatgatgtcacctgataggcagcattagatgtccacacgatgcacttagaacaaacacttcctacatacaatgacactcattttctttcgttttcctcttctcttcttttttcctccctacatcatctttagctgagaaggtagtaatgctgcagacgagctctccttatcaaatgtatcaggcctggacacagctgtgtgggaagcaaggctgcttgcgatgtcagcygcctccaggatctcctgggtcaaaaggacttattttgcagttg

SEQ ID NO: 431396 - DNA, 585 bp, Homo sapiens
ttgattagcttgtaattgttgcaattgggtaggtgattacattttgtccaataccctgtgactaggatggcagactcacaggaaaaaaagcataataatattttggaagaaggtttactcatgttctagggcatttgaaagggaagtgatgaaactttcagacactggtgttaagttactaacactgacacctacaaaatattagctgtcatcatagtcaccataatgatcaatgtgatgatgaggttgctatatacaggctttttcaatttaaatctctaagaactctaagacatgctaacatactaataattaaaacaccctttttgcaaacttttttcactgtttataaaatagattcacacttcaatttggagcttggtcctccaaatccatgcttaaatttggagcttggtttactcttttcattttttttccttagatatggatgtgctagcacaaaggatgcacccaggtaaaggaagttatcagctgttacasctgcttccattgttagggttggttcctctcatcttaaattacagatcacacatttcccccatattaagctagcatagtggtata

SEQ ID NO: 431397 - DNA, 607 bp, Homo sapiens
atcacacctgcttccattgttagagttggttcctctcatcttaaattgcagatcacacattttccccacagtaaacaagcacattattattgacagtaaaaagagcaaaaataaaagcatatgggaggtgaatttagcaaaggtaagagtacaacgacctgatttggaaaaggcagtgatagcttacttaagatcatttctgagataaactttaagaatgaatgaaatcattccacgaacaagagtattctagaggaagaaaacacgtgaaaaacatatggaggcctaaatattcctccaattggcttttggctcatcatgctctgcactgcccagggtttcagtgtgggttatagtcttatttccaggtttcacctttggaacatcaaaagagtttgtgtagcmacatgttgtttgaatgagtgttttctcaaatgaaagcttctgcaagaaataaaaagaattgtgaacatgagggcgtttggctggttggaagcagcgaaacagatcctcctttaagatcagcaaatgcatgaaatacctcccctgaactccctccctatatccctagatcccaccaatctcaacatgctccatctacgggaag

SEQ ID NO: 431398 - DNA, 567 bp, Homo sapiens
acaataattccaaagttacttgtattaaacaccattttttcattgatttaccattctgagctcagcattgctaagtagagaaataatctccccagttattaaaatattaaaaatcttaagagcacaggaagtaaaattttccaaaccaaatgtgtttcaatatatcagctttgtgttcattaatatgcagatttgggcttctgcagatytaataacactgatcatttgtggcataaaaagttctgattctatttattgagaaaaagacagcaattaatatcaaaattaattaatctaccatgcatatatcattttccttaataatttcactgagatatgtttttatatatcaaaacattttaagtatgtacaattaaatgaactttaataacttcaccaaatggtgaagttatcatcaaaagtcagttttaggatgtttacctaataacaccccccattcctatttataataattctccattcccaccttcagcccagaaaacctctcatctatttcctgtttctatagttatctattctggacatttcatgtaaatggaatcatat

SEQ ID NO: 431399 - DNA, 440 bp, Homo sapiens
aatacttatcattgtgttgcaattgcctacagtatttgatacagtagcatgctgcacaggtttgtgtcctacgagcagtatgctataccaggtgtgtagcctatgtgtgtagtaggcaataccatctaggcttgtgtaggtacattctgtgatactcgcacaatgacgatgtcacctaatgatgcatttctcagaatgtatccccatcaagaagcaatacatgactgtattttaacaggagcagaaatttcttttaaaccctgtatttctcttttgtacttttttgagcaacaaatattcactgtgggaaacacagttataatacaagagtcactggaagctaccayatcaggcagttgagtcatatctgcatccactgtagttctctggttccatctcgctacacatatgcaggtcagccaaggctgtgatgttcaaca

SEQ ID NO: 431400 - DNA, 456 bp, Homo sapiens
ctggaggctgggaagtccaagataaagacactggcagcatcagcacctgattagggcttggtttctgattcataggtggcattgtcttactgtgtttttacatagcaaaaaagacaayggcatgctcccttgggcctcttttataaggacactaattccatttatgaaggttatgccctcatgacctaatcaattcccaaagactcatctcccagtacatcacactgggggttaagatttcaacatatgcattttgggggtggaggacacaaacattcagataatagcaccctccaaagtggaagataaggtactgcatgttgtatctcctgttactaaaatatagcacagtataggtagattttttaaaaaattgtagacaacatataacatgttctgggagcccacccaatcaatttgccatttatctccttaggctgcaattttgagtgagac

SEQ ID NO: 431401 - DNA, 387 bp, Homo sapiens
gggactttcagtactatgtagactaacagtggtgactacaggcatcattgtcatgttttagatcctagaaaggctttcagattttaactattcagtrtgatactcactgtgggtctgtcatatacagcttttattatgttgaggtgtgtttcttctatatccagttgttttaggatattttatcatgaaggaatgttgaattttatcaaatgctttttcagcatcaattgaaatgatcattcagtttttgcccttcattctgttgatataatgtatcacatcgattgatttacaccatacttgcataagtgagataaatcctacttggtcatgatgaaggatctttctaatgtattgttgaattcagtttgctattattttgttgag

SEQ ID NO: 431402 - DNA, 387 bp, Homo sapiens
gggactttcagtactatgtagactaacagtggtgactacaggcatcattgtcatgttttagatcctagaaaggctttcagattttaactattcagtatgatactcactgtgggtctgtcatatacagcttttattatgttgaggtgtgtttcttctatatccagttgttttaggatattttatcatgaaggaatgttgaattttatcaaatgctttttcagcatcaattgaaatgatcattcagtttttgcccttcattctgttgatataatgtatcacatcgattgatttacaccatacttgcataagtgagataaatccyacttggtcatgatgaaggatctttctaatgtattgttgaattcagtttgctattattttgttgag

SEQ ID NO: 431403 - DNA, 394 bp, Homo sapiens
gttatttttaagtaaggacttacttctgtcattttgttatttgttttctggttgttttgtggtcttctcttacatttttcttccttcctgtcttccttcckgtaagcgaagctgctgttctctggtggtatgatttaatttctaactgtattttttgtgtgtaagtgtttctgggtttgaccttaccatgaaacttgcaaatactgtctcataacccattatcttaagctgataacaacactgtttgtataaagatacaaacaagcaaaaagaaaagaaataaaaaactatgcaccttgacttcttctccttgttgttaaccttttgttgtttctatttataccttactgtatatgtcttgaacagttgttgtagttgttatttttgattggat

SEQ ID NO: 431404 - DNA, 547 bp, Homo sapiens
ttcacttttggttcttacgaaggtgcttctttgtgtgtagatcgttgataaagctggtgttcttgcaggcgggacgatcagtggagccttctattcagccatcttgctccaccctctctgctaggaattcccaatccaggatttatcagcaaccatatgaccataggttattgactgtatactcaaattatctcatattgttgccactatatttttggtgctaagctaaatagttttttcctgctttcctagtgatatatattcaactaatttattgttagtcttagaggtttttttccccaattgttggctttcatacagcagagtcactgcaaaatagaattttatraataaaactgtgtctataatctaaagtgtgcttatatatcatggaagggtaggatcgttgctcactggtttctgcgcctcagcacacatacaaatacatgttactatatcatttgagtaaaaaggacaatattatagaagaacctgtaattttgaaggtaaataaggaggacacagcctattaagtgcactgaaattt

SEQ ID NO: 431405 - DNA, 515 bp, Homo sapiens
tttttctctatagaatccactatatgtatgtatgtggatagatagataaatatctagatagattagatatacatatctacataggtaaataaatacatatagatagatagatagatagatagatagatagatagatagatagatgtggagasagagagagaatgaatttctctgttgtccagactggagcatagctcattgcagccctgaacttctgggtttaagcaagcctcccacctcagtttccttagtagctgggactacaggcacgagccaccatacctggataatttctgtattttttgtagagacagtagtttcgctatgttgcctagggtagtctcaaacccctaggcataagcaattctgctgccttggcctcccaaagtgctaggattacaggcatgagccaccacagctggcctacatggtcattttcatagtcttttcctcgctgtctctttttttgaaatactactgacaattttattttttagctcttcaaacatactaag

SEQ ID NO: 431406 - DNA, 515 bp, Homo sapiens
tttttctctatagaatccactatatgtatgtatgtggatagatagataaatatctagatagattagatatacatatctacataggtaaataaatacatatagatagatagatagatagatagatagatagatagatagatagatgtggagacagagagagaatgaatttctctgttgtccagactggagcatagctcattgcagccctgaacttctgggtttaagcaagcctcccacctcagtttccttagtagctgggactacaggcacragccaccatacctggataatttctgtattttttgtagagacagtagtttcgctatgttgcctagggtagtctcaaacccctaggcataagcaattctgctgccttggcctcccaaagtgctaggattacaggcatgagccaccacagctggcctacatggtcattttcatagtcttttcctcgctgtctctttttttgaaatactactgacaattttattttttagctcttcaaacatactaag

SEQ ID NO: 431407 - DNA, 515 bp, Homo sapiens
gtaacttaggcattgttatgctctcagaccaaaaaatggaagcaagagctctaaaacttttgtaaaaacgtctgcccagcaactgtctatcaaaccttgaactgacatctcccttattattgatccttgtggccaaggataattgtttcacttgaaaaccttcctcttgctttacctccctgaatacattcrcatatttcattgtaacgttcaatactgaataaacattattttctttttaagagcctttatgttaattatttaggtttaacacatatatgcagtgtctcactgaacagaaaacaagatttaacagttctctattactctgtatttcacaaacaattctctttactacagcacctttttaaaatcagctgaacttttttcaattttctagtgctactctgtccaatacagtagcaattgaacactattatgtggccagtaaaactgagaagtgctgaagatgtgaaatatatactggtttttaaaggcttagtatcaaaaagtca

SEQ ID NO: 431408 - DNA, 515 bp, Homo sapiens
gtaacttaggcattgttatgctctcagaccaaaaaatggaagcaagagctctaaaacttttgtaaaaacgtctgcccagcaactgtctatcaaaccttgaactgacatctcccttattattgatccttgtggccaaggataattgtttcacttgaaaaccttcctcttgctttacctccctgaatacattcgcatatttcattgtaacgttcaatactgaataaacattattttctttttaagagcctttatgttaattatttaggtttaacacatatatgcagtgtctcactgaacagaaaacaagatttaacagttctctrttactctgtatttcacaaacaattctctttactacagcacctttttaaaatcagctgaacttttttcaattttctagtgctactctgtccaatacagtagcaattgaacactattatgtggccagtaaaactgagaagtgctgaagatgtgaaatatatactggtttttaaaggcttagtatcaaaaagtca

SEQ ID NO: 431409 - DNA, 611 bp, Homo sapiens
aaagtcagcaaagaaactctggacttaaactggactctagaccaaatggaccaaatagacatttacagaacattccacctgacaattgcagaatatacatttttctcacccacacctggaacattctccaaaactgaccatgtgcttggtcataaagcaagtcttaatgaatttaaaacgtaaactgaaatcacatcaagtatctttctggaccacagtgaaataaaactagaaatcaatactaagagaaactctcaaaactatgcaaggacatataaactaaacaastttctactgcatggcttttgggaaaacaacaacatgacagcaaaaattaaaaaagtgtttgaaataaatgaaaatagacacaaaacatattaaaacctgtgggatatagcaaaagcaatggtaagaggaaatttatagcattaaaggcccacatcaaaaagatgaaactttcaaattaaccaatcaatgttgcaacggaaagaactaggaagcaagaacaaaccaaattgaaagccaaaaaataaaagaaataacaacgatgtaaagacgattgagtaaattaagactgagactaaaaaatacaaatcaacaaaatgaaaaat

SEQ ID NO: 431410 - DNA, 654 bp, Homo sapiens
atgctgcaaacataaagatgtgcatttctaagagttactacagaatacataaactaggaattttctgcataaaggaaatcatgggataatgtacaagacaaatgcagtttttctatgcactttttctctaatttcctttttaaaaattcaaatcaggaagcgatggtgtccatacatttcttgaacattgtgcttatagaaatatgtttgttgcatgcctcaagtaataacagaacacaactctttgagttctagtctatattaaatgacttaaatgttactcacttcattttctcaaagaggaataagtatartaatactgttcccagaaacagtttttaaaaatgatataaatgagactgaaattttagaagaggagctatgtaacacttttaccatattactattaaaatcacttttagaaagcacctagcaacagagaacctacttaaaatgaaaacgaaaatagatgctattacctaatattgcatatgaattatttgaattataaattaatgcgtatatgcagtacttaatcttttatttcttaacttgaatttagaaataaaagatatcaagagaaaccactgtgcgtgtctcttccttctgaatttcttctatccttatgttgattggtagactgtgatatagcag

SEQ ID NO: 431411 - DNA, 654 bp, Homo sapiens
atgctgcaaacataaagatgtgcatttctaagagttactacagaatacataaactaggaattttctgcataaaggaaatcatgggataatgtacaagacaaatgcagtttttctatgcactttttctctaatttcctttttaaaaattcaaatcaggaagcgatggtgtccatacatttcttgaacattgtgcttatagaaatatgtttgttgcatgcctcaagtaataacagaacacaactctttgagttctagtctatattaaatgacttaaatgttactcacttcattttctcaaagaggaataagtatagyaatactgttcccagaaacagtttttaaaaatgatataaatgagactgaaattttagaagaggagctatgtaacacttttaccatattactattaaaatcacttttagaaagcacctagcaacagagaacctacttaaaatgaaaacgaaaatagatgctattacctaatattgcatatgaattatttgaattataaattaatgcgtatatgcagtacttaatcttttatttcttaacttgaatttagaaataaaagatatcaagagaaaccactgtgcgtgtctcttccttctgaatttcttctatccttatgttgattggtagactgtgatatagcag

SEQ ID NO: 431412 - DNA, 654 bp, Homo sapiens
atgctgcaaacataaagatgtgcatttctaagagttactacagaatacataaactaggaattttctgcataaaggaaatcatgggataatgtacaagacaaatgcagtttttctatgcactttttctctaatttcctttttaaaaattcaaatcaggaagcgatggtgtccatacatttcttgaacattgtgcttatagaaatatgtttgttgcatgcctcaagtaataacagaacacaactctttgagttctagtctatattaaatgacttaaatgttactcacttcattttctcaaagaggaataagtatagtaatactgttcccagaaacagtttttaaaaatgatataaatgagactgaaattttagaagaggagctatgtaacacttttaccatattactattaaaatcacttttagaaagcacctagcaacagagaacctacttaaaatgaaaacgaaaatagatgctattacctaatattgcataygaattatttgaattataaattaatgcgtatatgcagtacttaatcttttatttcttaacttgaatttagaaataaaagatatcaagagaaaccactgtgcgtgtctcttccttctgaatttcttctatccttatgttgattggtagactgtgatatagcag

SEQ ID NO: 431413 - DNA, 654 bp, Homo sapiens
atgctgcaaacataaagatgtgcatttctaagagttactacagaatacataaactaggaattttctgcataaaggaaatcatgggataatgtacaagacaaatgcagtttttctatgcactttttctctaatttcctttttaaaaattcaaatcaggaagcgatggtgtccatacatttcttgaacattgtgcttatagaaatatgtttgttgcatgcctcaagtaataacagaacacaactctttgagttctagtctatattaaatgacttaaatgttactcacttcattttctcaaagaggaataagtatagtaatactgttcccagaaacagtttttaaaaatgatataaatgagactgaaattttagaagaggagctatgtaacacttttaccatattactattaaaatcacttttagaaagcacctagcaacagagaacctacttaaaatgaaaacgaaaatagatgctattacctaatattgcatatgaattatttgaattataaattaatgcgtatatgcagtacttartcttttatttcttaacttgaatttagaaataaaagatatcaagagaaaccactgtgcgtgtctcttccttctgaatttcttctatccttatgttgattggtagactgtgatatagcag

SEQ ID NO: 431414 - DNA, 519 bp, Homo sapiens
taaataccatttatcaaaattttaaaagtgttccttgcactgtgccaagcaatttaaacacatttttcccttcacaagtaccatctaatgtaaatattaacattgttatctctatttaacatgtaagaaaattgagccttaagggtggtaggtaacttactcagactcatcatttacccactggtgggtggaaacaggcttgaacttagttctgtttgactccaaataccatgctctaaatgacttagctgtactgtcactcatatgttacaactggtttacatgacaacgtcaggtttattccaaccattcttacttcatcttgatggggagaaaracaaactaaaatgactgtttttctcttgtaaaaagactgaattacacttaatgatacacagaataaaagtattattaaaaaccacattttgttaacataagtgaaaccttggattttttttaaggctttagatttctaaatatagccccataaaaaagggctgctcctaataacagaatgag

SEQ ID NO: 431415 - DNA, 540 bp, Homo sapiens
gcataaatgtatataaaacagtagacaatagaaactaagaaagcaaaaaaaaaaaaaaactgttctccaatttttctctctaaatatccaagtctctatgaccagtgaaaactctggatcagaggatttcaaattcttcatgattaagggactaaaaacgtggtactatcataagggtaatagaataaggtcactctgcagagaagcttccagcaaggcatgacttttgtgcatttctgttacatccagacacatcctgacttttgtgcatttctgttacatccagaacattgccaccaagaaacgatttgtggatgaaaagcttggctgaaaggagagccaagactcgcagccaagtaacagagccagagcctaagagctggaagagttgcccattggtagaggtggctagattccacaaagtggagtcagggacatgttttacaaagactctcgaagggaaaccaagcttgsagcaaggttcggttaagaagtgaagagatggagcaggaagccactgggcttaagtcaacagtgaga

SEQ ID NO: 431416 - DNA, 483 bp, Homo sapiens
ctcttccttatgccaatggaaatcaaacctaaaatgagcagagctaggagaaaatgttctcctaagccttgtttagttcagtggtactgcggagatgggccgtactaamtcaccgaggtaaactatagtggctggaggcatctattttggcagagctatttcagcaccatgacacctgttctctcaccggatgctttttccccaataatctttaggagggcccaaggagaaagtggggctgaaatgtctgttaggaagttattactacttgaacaatgaatagtgactgtcatccacaaatcagatacctcactcaacttccttgacaagaggcctggaaggattaggggaaagatttttctcttgaaaaccaaaacagtgggaaattatcaacccctataataattatcattactctgattttactatactactttattgcttgaacaataaacagtgactgtcatccgcaaatcagatacc

SEQ ID NO: 431417 - DNA, 483 bp, Homo sapiens
ctcttccttatgccaatggaaatcaaacctaaaatgagcagagctaggagaaaatgttctcctaagccttgtttagttcagtggtactgcggagatgggccgtactaaatcaccgaggtaaactatagtggctggaggcatctattttggcagagctatttcagcaccatgacacctgttctctcaccggatgctttttccycaataatctttaggagggcccaaggagaaagtggggctgaaatgtctgttaggaagttattactacttgaacaatgaatagtgactgtcatccacaaatcagatacctcactcaacttccttgacaagaggcctggaaggattaggggaaagatttttctcttgaaaaccaaaacagtgggaaattatcaacccctataataattatcattactctgattttactatactactttattgcttgaacaataaacagtgactgtcatccgcaaatcagatacc

SEQ ID NO: 431418 - DNA, 553 bp, Homo sapiens
tcattatatttattacaatattaattgtaaaaatttatacaataatgttagtatctagacatcatttgctagtggaaacaaataattagttctaaaaacttgtcgttcagcaggccaccaggagaggcaaggtgagctacccaactctcaggcagcaggcattcatcattgacttgcacagcccttaagcatccttctaatgcctgtattgctcaaaatgttaaagtaggatmcagaatcttttatttctttttctattttctgaaacgactatatttgatatttttgaaagacatttcttagatctttatatgtaagtctctaatgacttcccaccatggtgaactgagatcattctcctccagaactttagcctctccattttcgtttttaagcaaagaccagagtctgaactgcagaataaatactatttcttattttatatcaggcaacttttcttccttatgtgaaccctcaggtaatgagctctctattctgctttacactctgaaatgtctgcgtagaagagatggtgactcttcatccccatgta

SEQ ID NO: 431419 - DNA, 524 bp, Homo sapiens
ccacagaaaacatatgttctgcatattataatgcttatttaacactaaccgctacaaacaattgcagaaagaccacaccggtgttcttatcctaactttgatatctgtggttgcagtatgtcattataagttctctcaatctctgtttctcataattaaaatataagagaagcctacatatccttttcagtgcttttctagtgatacattgtctgagttcctaaactgtgaatggcatgcagccgcctcactccttttatacaaggtgagaggagagactgcacttgagttgacacaatgctgttaccacaatggaaagaatgaactcaagcttaatttttccaccccctacacgttttctatggctctatagaagatctgccagtaaaaaatactgtgtaataattatgatgagctaagttgrtgggtcctgtgggagatccaaatttgaagaagtaaaacatacgcataagaagaaaatgaacctcattcaaccccaggcatagcttatggcaaataagagc

SEQ ID NO: 431420 - DNA, 518 bp, Homo sapiens
ctgtgaatcaagtagttaaagaagttttcagcctgtcaaggcatgagatggtttgccataccaagacccaatttataagcacccttggggatagtagtttagtaagaagagagcacataataggagtcaagagaaataagggtttcatataacttagtaartttaatgttctcacacaaacgaggagcataacaaaacaagcaaagcaagcagcagacacatatctgtaagaaattagatctgcagttctagatgttgttaccctgcattggctaaggaggagtggaatgtgtgggggtggaggaagaaacctgaatgtgagaactgggaagcatactcatctttgcagggggctgggggatggagggatggcatgggcatgataaactcagattgaagggaaaataattttagtatgcattaagaaaacaataaaaagatgctgaaatcaaaaggttggagagtcaccacttgtgagcaatgaaaatgattgaaatagggctacacaaatcctcatt

SEQ ID NO: 431421 - DNA, 518 bp, Homo sapiens
ctgtgaatcaagtagttaaagaagttttcagcctgtcaaggcatgagatggtttgccataccaagacccaatttataagcacccttggggatagtagtttagtaagaagagagcacataataggagtcaagagaaataagggtttcatataacttagtaaatttaatgttctcacacaaacgaggagcataacaaaacaagcaaagcaagcagcagacacatatctgtaagaaattagatctgcagtyctagatgttgttaccctgcattggctaaggaggagtggaatgtgtgggggtggaggaagaaacctgaatgtgagaactgggaagcatactcatctttgcagggggctgggggatggagggatggcatgggcatgataaactcagattgaagggaaaataattttagtatgcattaagaaaacaataaaaagatgctgaaatcaaaaggttggagagtcaccacttgtgagcaatgaaaatgattgaaatagggctacacaaatcctcatt

SEQ ID NO: 431422 - DNA, 594 bp, Homo sapiens
gtcatgaccattaggttccatgagtgaaagtttctcaggggacataactcagagaaaatgttcttatggtcaatagcaggcatttctaatttgctcagcagtatatgaatttccactgctccatatcctcagcattacttgatattgttggattttaatatttgactatctgttgaatgtgagataataattttgattttaattttcaaaccagtaaggtctcattttaatatatttaattgtcatttgtatttttttctttcatggaatgcctactcatttctctacttatcttcaattgggtggtccatcttttctttttaattagtcaaagttattaatatattttgcataataatmttttgttggttaagcatgtatcaaacatcttctcctagttcatggcttatttttgcaattctatagtaccttttaacaacaaaatatttttaaaataattagttaattttaattttttctaacttgtttgcatttttctttttttctgtgtcttctttaagaaaactttcattactttgtggttataaaaacacactgctaatactgttttgtcatatttagtaacataaccca

SEQ ID NO: 431423 - DNA, 540 bp, Homo sapiens
gcattaggtcctggtaaaatgttttaaaatgctggagtagtggaccttgactgtttatccagggaaatacccacatgtcctgacccagctttccaaaacagccaggagtaaagcttccactcaacctccacttcctatgcctcatgtaagtttatctaaccggaagaasttaattcactttcaggaccctatctgtgagagatgctgggaagtgcagctactaactttaaagtctttgcaaagactcactagagtgtacgctcttccgcatctatacttacccttccatttgcatttgcactttcaaaaagtgtggtccaaattacatttccccacaccctgaaaagggaactccatagaactatcaatcaccgtgcacatctgtggatgatgcttttctctcctccgggtcagtcccaatccacttttctgtcctaaaacctaaggatttagttaaaaagttagcctccatcaacagtccttttattgatcttacaaaaatgagagagaataaaagaaaattgtttaatttttaacaag

SEQ ID NO: 431424 - DNA, 590 bp, Homo sapiens
gtttagtaagaagagagcacataataggagtcaagagaaataagggtttcatataacttagtaaatttaatgttctcacacaaacgaggagcataacaaaacaagcaaagcaagcagcagacacatatctgtaagaaattagatctgcagttctagatgttgttaccctgcattggctaaggaggagtggaatgtgtgggggtggaggaagaaacctgaatgtgagaactgggaagcatactcatctttgcagggggctgggggatggagggatggcatgggcatgataaactcagattgaagggaaaataattttagtatgcattaagaaaacaataaaaagatgctgaaatcaaaaggttggagagtcaccacttgtgagcaatgaaaatgattgaaatagggctacacaaatcctcattgctaaatctgaaatcaatgctgaaggataaagagaaggtcagagaagaatcaacccaatgtcagcctattattataaagctcacaaaaaaagcaaaactaaaatatgtacataatatttagggatatckattactgtgataaatctacaaagaaacaggaaaaaaagt

SEQ ID NO: 431425 - DNA, 541 bp, Homo sapiens
atttacaagtgcagcggatgcagagtattttggggcttatttacgagtgcagtgggcacagaatattttgaggattattggatcaatggcataatgagccagaaatggcaagttgatagtctcagtggaaacgtttttatgcctctgatgaatcatctctcctttgtaccctgacttctgaccaagcagaggctaaatgtacggtgtcaggaagcaaacatttgcatatggctcgcaggtcttagagcggcaggtgcygctcctcctttcacccctgggttcgccaatccaaagttctagttatggaaaaaacagaattttttcttcactgatctttcagtatatacactacatcctataggacaaccccccaaactctcaaggtattttccctcagttgatgctgtaacagaactgtcagtgagtcagctgcatcttataattggtacatggtaagatgtgtgaatgtgttatggtgtcagtctattgcttaatttttttttttttgtcattagaaagagacagagaggaacttgatcag

SEQ ID NO: 431426 - DNA, 611 bp, Homo sapiens
aaagtcagcaaagaaactctggacttaaactggactctagaccaaatggaccaaatagacatttacagaacattccacctgacaattgcagaatatacatttttctcacccacacctggaacattctccaaaactgaccatgtgcttggtcataaagcaagtcttaatgaatttaaaacgtaaactgaaatcacatcaagtatctttctggaccacagtgaaataaaactagaaatcaatactaagagaaactctcaaaactatgcaaggacatataaactaaacaagtttctactgcatggcttttgggaaaacaacaacatgacagcaaaaattaaaaaagtgtttgaaataaatgaaaatagacacaaaacatattaaaacctgtgggatatagcaaaagcaatggtaagaggaaatttatagcattaaaggcccacatcaaaaagatgaaactttcaaattaaccaatcaatgttgcaacggaaagaactaggaagcaagaacaaaccaaattgaaagccaaaaaataaaagaaayaacaacgatgtaaagacgattgagtaaattaagactgagactaaaaaatacaaatcaacaaaatgaaaaat

SEQ ID NO: 431427 - DNA, 579 bp, Homo sapiens
gagtgctataagaagtagctcaaaaatagatagaaacacagaaacaagctcacctggcagaatattacatttttccccaaaaaactttatagaaataccacgtcttctttgccttgtgtttttctgttgaaaccaaagattgcaagatgtcatgtttgcacccaattttagagcactgtaatgtcaagtagactccattttacatgagattccaaaaccgtgtgctgttttttatattcatctttcttctttgtaacacaattaaaagcatcctgctttcttcacagtaatcagaacatgaaatattaccttgtgctccaaatgcaacccctgggggtgtttaacatgtctctacaagactcttgggaattctgcacaaatgttggaaaaatgcatgctggcaatgtcattaaaaaggaagaaaacagatggttctttggcttgaatttatgccggcagttttatgtgttcaggacaagtttgattaaacaataatttcartaggattttagctaacaaataactgtccaaccattgtctgtttcagaaaaagtagttctggcttttttcccccttttc

SEQ ID NO: 431428 - DNA, 571 bp, Homo sapiens
tttttaataagttacatacatattaatagagcaccttttttttcttgaaacatttttgtttcaattttcaattactcatgtcaaagcctgaaaatattccctaatagaattaaaatatatctgtygaaatgttcatggattttaattaaagactgctgttgtacctttaggtaaagaaaatataatgatgacttagacaaaatgactaaacattcttaaattaatttaaaatatttacttttttgaattcatatttaaaacattttttatcagtcaaaataaaagtgttaccatttttaaattttaaaaaataaaactgaaagcatattaaatagaagtttgacaatagaaatgcagattacattcctaccaattcactaggaaacacttaaaaaatttacataccgagagtgcagtgattgtaggacttcacactggaactcagtgctgcctatcacaatggaagcaacacagggcagaattcagccgtcgcccacagagggagcatttagaccagcccccggcacatgaaaagcatttagacgaccagccctagccacagggaattcat

SEQ ID NO: 431429 - DNA, 585 bp, Homo sapiens
agattttcttgcaacttggataccagccttgcctctgaaaatggggtattttccctccaggccttagctcccagacaatacttctggacacaccctggacagaaggaaacctattaccttgaatggaagggcccagctgtggmaggatttatcacctgctgactagagagtgcttggaccttgaataaacatcaatagcagccagacagtacacaccatcgaccttgggtgagagctggtgctgtgctggcttcaggtgtatccagcaccttcccagctatggtggctagaagagactccttctctcggggaagggtagaaagagtaaagggactttgtttgcagcttaggtccatgctcgggcacagtagtggagagcagcaccaggctctcgggtctttaattccaggctttggctccttgaatgcattttggacccaccctgggccagagggagtccctgcctgaaagaagagattcaggcctggtagcatttacctcaagctgattgaacagcccttgggccttgagtgaacattggtcgtagaaaggcagcattcactatgtgcctggggtggcagtggc

SEQ ID NO: 431430 - DNA, 617 bp, Homo sapiens
agtaatggatgcacagcatgcttaggaagaaaccaatgcagatattgttggatgcataccctgatgcttgaccctgttacatgtatttcattttattctcacaccartccttcgatatagataatattacatgcattttacagatgatgcaattggtctctatagagttaattatttgtctgaggttataatgaaagaaaaacaactaagtcttcatatctcaagactagcaaattttttgctatattgagctacattggaagtttcattgttgagatagtatacaactttcaaaattcaaaattattatttattgttttactgaaaagataaatgtgaaagaatatgatatattgaaaataatgcatttcctttccacctaattagctcataaactcaatgaaagagtgggtagataaagatatctagaagagttattccttctttctcatgtgaatgaatgtgaaaataagagaatatcacaaatattgtctttggaaataattcttacatgtattctatggtggttgaaaataaggctcttcctagagagcagggtaatagtacatgtcatatgtaaaggaaagaaaaaaaatagatatataaattgtgtagga

SEQ ID NO: 431431 - DNA, 617 bp, Homo sapiens
agtaatggatgcacagcatgcttaggaagaaaccaatgcagatattgttggatgcataccctgatgcttgaccctgttacatgtatttcattttattctcacaccagtccttygatatagataatattacatgcattttacagatgatgcaattggtctctatagagttaattatttgtctgaggttataatgaaagaaaaacaactaagtcttcatatctcaagactagcaaattttttgctatattgagctacattggaagtttcattgttgagatagtatacaactttcaaaattcaaaattattatttattgttttactgaaaagataaatgtgaaagaatatgatatattgaaaataatgcatttcctttccacctaattagctcataaactcaatgaaagagtgggtagataaagatatctagaagagttattccttctttctcatgtgaatgaatgtgaaaataagagaatatcacaaatattgtctttggaaataattcttacatgtattctatggtggttgaaaataaggctcttcctagagagcagggtaatagtacatgtcatatgtaaaggaaagaaaaaaaatagatatataaattgtgtagga

SEQ ID NO: 431432 - DNA, 617 bp, Homo sapiens
agtaatggatgcacagcatgcttaggaagaaaccaatgcagatattgttggatgcataccctgatgcttgaccctgttacatgtatttcattttattctcacaccagtccttcgatatagataatattacatgcattttacagatgatgcaattggtctctatagagttaattatttgtctgaggttataatgaaagaaaaacaactaagtcttcatatctcaagactagcaaattttttgctatattgagctacattggaagtttcattgttgagatagtatacaactttcaaaattcaaaattattatttaytgttttactgaaaagataaatgtgaaagaatatgatatattgaaaataatgcatttcctttccacctaattagctcataaactcaatgaaagagtgggtagataaagatatctagaagagttattccttctttctcatgtgaatgaatgtgaaaataagagaatatcacaaatattgtctttggaaataattcttacatgtattctatggtggttgaaaataaggctcttcctagagagcagggtaatagtacatgtcatatgtaaaggaaagaaaaaaaatagatatataaattgtgtagga

SEQ ID NO: 431433 - DNA, 528 bp, Homo sapiens
tcaaagaaaaataatattttaaaggtataatattaacaatgtattgtgtgattgtagcataagtaaaagtgaaatataagacaaaattggcataggcaatgtggggaggaatgaggaatatgtggatgctgctggacttgcgatgggggcacttctatcaagatgtaatctcatcataagttatatctggacaaaagtaactccatcaacttaagtcaagaaacttactaaattcattttgcatttgcagcattgtaaagttgaaaaattatgagtcaaaccattgtaagttggagactgtctgtaccgatataggatscttacactacacttgatgaggtataatatttccgggtgaacttagattatttgaaagtgtattttgtaaactccaggcaatctcctcttcagatgaagcagtttagtcacatatttttctcctttctagctacaattgcattacttgcacactatctttctcataataaaaccattgtgatgaagagaaaagtcatgcctagttgacag

SEQ ID NO: 431434 - DNA, 488 bp, Homo sapiens
ggaattggatgctatgccctataagttacatttaaaggaactagacacattaagtcctgagacgagatgacttgatggttatgatctcataggccagtctctgggataattggcagaatttgcataaacataagttctattctttcaaactattgcagagatccattaagtttctattagttaaaaaaatactaataatgagattcgactttttttttttttttttttttttactgtcggagaaagaagctgtagtaaagcaaggaggagaaggctgtattaaacagtgtggcacaagatcagattcagagacatcaatatgaactcaggtttacttttatacrtatatatgataaatgcagaaataattatggatatgtgtgtatgcataggttagaaagcatgcatctatttcctagctctgtctgctgagagaccctagaggcagctatgcccagtatagtggatatactcagcaaccagttctt

SEQ ID NO: 431435 - DNA, 488 bp, Homo sapiens
ggaattggatgctatgccctataagttacatttaaaggaactagacacattaagtcctgagacgagatgacttgatggttatgatctcataggccagtctctgggataattggcagaatttgcataaacataagttctattctttcaaactattgcagagatccattaagtttctattagttaaaaaaatactaataatgagattcgactttttttttttttttttttttttactgtcggagaaagaagctgtagtaaagcaaggaggagaaggctgtattaaacagtgtggcacaagatcagattcagagacatcaatatgaactcaggtttacttttatacatatatatgataaatgcagaaataattatggatatgtgtgtatgcataggttagaaagcatgcatctatttcctagctctgtctgctgagagaccctagaggcagctatgcycagtatagtggatatactcagcaaccagttctt

SEQ ID NO: 431436 - DNA, 549 bp, Homo sapiens
ttcagtaccatccgaatttacttttctttttttcatcaaattttattttaagttccagggtctatgtgcaggatgtgcagatgtgttacataggtaaatgtgtgccatggtgatttgctgcacagatcaactcatcacctaggtgttaagcccagcctccattagctattattcctgaggctctgyctccccatgcacccccgacaggccccagtgtgttgttccccccactcccgatgtttctatgtgttcttatcattcagctcccacttataagtgagaacatgcagtgtttggttttctgttcctgcattagtttgctgaagataatggcttccagcatcatccatgtccctgcaaaagatatgaatctcattcctttttatggctgcatcgtattccatgttgtaaatgtaccacattttctttattctatctatcattgatggttatttgagtagattccatgtctttgctattatggatagagctgcaatgaacatgtgtgcatgtatctttataatagaatgatttatattttgggggata

SEQ ID NO: 431437 - DNA, 549 bp, Homo sapiens
ttcagtaccatccgaatttacttttctttttttcatcaaattttattttaagttccagggtctatgtgcaggatgtgcagatgtgttacataggtaaatgtgtgccatggtgatttgctgcacagatcaactcatcacctaggtgttaagcccagcctccattagctattattcctgaggctctgtctccccatgcacccccgacaggccccagtgtgttgttccccccactcccgatgtttcyatgtgttcttatcattcagctcccacttataagtgagaacatgcagtgtttggttttctgttcctgcattagtttgctgaagataatggcttccagcatcatccatgtccctgcaaaagatatgaatctcattcctttttatggctgcatcgtattccatgttgtaaatgtaccacattttctttattctatctatcattgatggttatttgagtagattccatgtctttgctattatggatagagctgcaatgaacatgtgtgcatgtatctttataatagaatgatttatattttgggggata

SEQ ID NO: 431438 - DNA, 560 bp, Homo sapiens
tgccactattgctttttttagttttaacacacatgagtttgttagttaatgttgcttaattttggagcatttatgatggagaaaatttcataaagtgagtttataaagaaagatgaattttgtttctagtatttaaatgattagaaaatgaggagtttaagatgtcttacctaacaatgcataatattttaaccaagtaatctccattctctgccaactgaaacaagttttataatgtttatagtaacagatcattggtcttcttgaamaccccaaaactgatttctatcacatcgttaggggcttggctttaaaaccatgactcatataacaatttataattacaaaaataattatgagaaatccacaagaattttacaagattgcaatacatccatcaccaacaacaagcgttaaggtgagactttctacattctctgagacttatgtagtcatacagggttgcagccagtgtaaaactaaaagcaacaacttaatgaatccattctcaacatttatatcacttcctgcttggattttgcagttgtctgaagcagcac

SEQ ID NO: 431439 - DNA, 560 bp, Homo sapiens
tgccactattgctttttttagttttaacacacatgagtttgttagttaatgttgcttaattttggagcatttatgatggagaaaatttcataaagtgagtttataaagaaagatgaattttgtttctagtatttaaatgattagaaaatgaggagtttaagatgtcttacctaacaatgcataatattttaaccaagtaatctccattctctgccaactgaaacaagttttataatgtttatagtaacagatcattggtcttcttgaacaccccaaaactgatttctatcacatcgttaggggcttggctttaaaaccatgactcatataacaatttataattacaaaaataattatgagaaatccacaagaattttacaagattgcaatacatccatcaccaacaacaagcgttaaggtgagactttctacattctctgagacttatgtagtcatacagggttgcagccagtgtraaactaaaagcaacaacttaatgaatccattctcaacatttatatcacttcctgcttggattttgcagttgtctgaagcagcac

SEQ ID NO: 431440 - DNA, 623 bp, Homo sapiens
atacatttacaagatttgaaactgttctcacatttccagaccatttaatttattttacttcttccaggacaaattttttcagcatttccctcttaccataacaatataagttcgtctcgggtaaagctctgggtcatcctaagtgcgtttgctgctttagtaggcaactagggatggcccaggggcagcttrtttgtgttcacatcttccttgcatgctacctcgatcctggctgcgtggactgtgtggcccaacgtgtgtctcccgttgcacgcaggttgcccctggttgcccacctgtgagcagattgtgggcagctggatggcccccgatgtcctctctcttttattggacttgacactgtttaaagttttccttttattctcttaaacatttttcacccgctgtaagcaaatacctctctccattctacatcacccctgccagaacctgtcataaagatttagagaaaagatggaatttcaatgttgcgagaccacaagcaccctgctcctgcccagtgatttcacagagctgctttgacacagtgcaaacctaacaagcctaacaaggggaagctactgctttctgaaaagctggtgattttctcctagagagatctc

SEQ ID NO: 431441 - DNA, 595 bp, Homo sapiens
cttgaacccgggaggcagaggttgcagtgagccgagatcatgccactgcactccagcctggcaacaaagccagactccctcacaaaaaaaaaaaaaaaaaaaaaaactaatgacattaaataaataaataaataaagcttgtatttatttgtcatttaatattttccaaaccatttgctaaatacttgtaatgcttaccaaaacgaacaaaaaagggtggaaaagatgaraaggtgaggctggtcgttgtcttagtcccttcaggcgactggaacaaaaataccgtaagctgggtaacttagaaagaacagaaattcatttcccacggttttggagctgggaagtccaagatcaaagcactggcatagtcagtgcctggtgagggctgcttcctggtccacagacggtgtcttgtctctgcgtcctcacgaggtggaagggtacaacaagctcctccttggtgggcttcttgtctaagggcactcatccacactcaagaccacatcacctcccaaagcctccacctctcaatatttcacattgggggttactacttcaacatacgattttcggggggacacagctcagcagtagt

SEQ ID NO: 431442 - DNA, 595 bp, Homo sapiens
cttgaacccgggaggcagaggttgcagtgagccgagatcatgccactgcactccagcctggcaacaaagccagactccctcacaaaaaaaaaaaaaaaaaaaaaaactaatgacattaaataaataaataaataaagcttgtatttatttgtcatttaatattttccaaaccatttgctaaatacttgtaatgcttaccaaaacgaacaaaaaagggtggaaaagatgagaaggtgaggctggtcgttgtcttagtcccttcaggcgactggaacaaaaataccgtaagctgggtaacttagaaagaacagaaattcatttcccacggttttggagctgggaagtccaagatcaaagcactggcatagtcagtgcctggtgagggctgcttcctggtccacagacggtgtcttgtctctgygtcctcacgaggtggaagggtacaacaagctcctccttggtgggcttcttgtctaagggcactcatccacactcaagaccacatcacctcccaaagcctccacctctcaatatttcacattgggggttactacttcaacatacgattttcggggggacacagctcagcagtagt

SEQ ID NO: 431443 - DNA, 559 bp, Homo sapiens
ctgggcacttatgatggctgaaagcctgagaatggcaagattccccagcaaacaggcatcagcaggaaagacataagggtacgagtgacggtgccacagttgaatgggcagaggagagaggcccgaaaaggagactgaggaggaagtggcagcaccatgaagtcaaggaaaggggcctccaataggaaagagtatcccactgtgcctgaagctacagggaagtcaaacaagtagaatcgaagagtggttgttgaaattaagaaaagctcatccatggcaaatggtttggtgaaagcaaagccagattctctggctgaggtagtgactggaaagaaaggatgtggaaactggaagcataaattgctcttttgagacgtttggccatraagaggaagagatagggcaggtgttttgagggaatgtggtggccaagggaagtctgatgctacttgttataaagaaggagtccatagacagagggacatgggacaatcagagtgaggttctttgaaaagacacaaggagatgggatccagagagagtcaagcacacatttaat

SEQ ID NO: 431444 - DNA, 614 bp, Homo sapiens
cagatccaaaccatatcagtcccttatcccagaaccccatatttagaagggtagtagaccagcacataatttctgacattataagaaaaaagagatggaaaaacagggcagtgttggagtaaagagaaagaggccatttggattcagaaaaccaagaatggctttataatgaacagaaattttgaaatgccccttgtaacaagaataagattttaatatgttgggaggaaaataggaattctgggttgagggaattgtatggacacagccaaggcactgggaatagggctcagcctgtccacatgcatttarggcggggtccacaaaactttcctgtaaagggccttgtagtagtgttacagcctctgcaggccacgaggtctctattgcagccactctacagccatagtagaaaaaacagcctagactctagagaacacggacatggtgagcatagctggggtccagtcaaactttatttacaaaacaggtggcatgcagccatagtttgctacctacaaacaacatgaggaaagagatttttctctatgttgttcacaagtttatctcaaatacatagctcagagcttgacccatagtgcatgcccagtgaa

SEQ ID NO: 431445 - DNA, 614 bp, Homo sapiens
cagatccaaaccatatcagtcccttatcccagaaccccatatttagaagggtagtagaccagcacataatttctgacattataagaaaaaagagatggaaaaacagggcagtgttggagtaaagagaaagaggccatttggattcagaaaaccaagaatggctttataatgaacagaaattttgaaatgccccttgtaacaagaataagattttaatatgttgggaggaaaataggaattctgggttgagggaattgtatggacacagccaaggcactgggaatagggctcagcctgtccacatgcatttaaggcggggtccacaaaactttcctgtaaagggccttgtagtagtgttacagcctctgcaggccacgaggtmtctattgcagccactctacagccatagtagaaaaaacagcctagactctagagaacacggacatggtgagcatagctggggtccagtcaaactttatttacaaaacaggtggcatgcagccatagtttgctacctacaaacaacatgaggaaagagatttttctctatgttgttcacaagtttatctcaaatacatagctcagagcttgacccatagtgcatgcccagtgaa

SEQ ID NO: 431446 - DNA, 562 bp, Homo sapiens
ggtgctggatttgcttttcttcttagacgtatctgaactctactgttgacattacagcagtaacacctgtatcaagaagactgaaatcctgggtttgctgccatgatctctaaagcattgtttggttrtaaaaatattttattgttaccaaatgaagaggctgaaaataagagtttctgttttaatgagagtagcaaaactttcccatgtacgtggaagaaatggagtagtttgttcacttctccttcctccattttagggtgtactcctttgcttaattaattgggaaacataaacttaacatgaatttttacaataacatgcttcagtttttccaatgccttcagtttatcatgaagactgtggattgacacatgtcagggtcttaaattgtttgagttcctttgggtagcaagaaacagaggccctccggggtgaccataagattaggagttcattgtagagatacacaaaggacagcaacagcagcgactccatctgcacagcagaacccagaatattattgcaggaactggaatgttggtttaagacacaccacagc

SEQ ID NO: 431447 - DNA, 562 bp, Homo sapiens
ggtgctggatttgcttttcttcttagacgtatctgaactctactgttgacattacagcagtaacacctgtatcaagaagactgaaatcctgggtttgctgccatgatctctaaagcattgtttggttgtaaaaatattttattgttaccaaatgaagaggctgaaaataagagtttctgttttaatgagagtagcaaaactttcccatgtacrtggaagaaatggagtagtttgttcacttctccttcctccattttagggtgtactcctttgcttaattaattgggaaacataaacttaacatgaatttttacaataacatgcttcagtttttccaatgccttcagtttatcatgaagactgtggattgacacatgtcagggtcttaaattgtttgagttcctttgggtagcaagaaacagaggccctccggggtgaccataagattaggagttcattgtagagatacacaaaggacagcaacagcagcgactccatctgcacagcagaacccagaatattattgcaggaactggaatgttggtttaagacacaccacagc

SEQ ID NO: 431448 - DNA, 604 bp, Homo sapiens
tgcatgtctgggaccttggaggaggagctgcaagacctctctctgtttcccacttggccaaacttgggttcttgacatgtggctggattccatgagagctttcccaagaggagcacaggtggaagctgcagatagattcctagccacagaggtgctatcagcatccttgctgccttctcctggtcaaatccaggcaaagggccaggccagatgcaagggggacgaaaataaaccctgcctctcaataggagaagaagcaagaatttgtagtcatctataatctactagaatctatcctttggccataaaatatttatattctttgacatgcaaaatacacttactttctcccaagagtccataactctcatctcgttatggtgtcagggtctaatgcaaagactaggatctcatgatctaagtcggacacaggtaaatccatgaattaaaaagacaagccaactgccttccacacacasagtatctgcagcagacactccacaggaggaaaggggaagcatgtaacgattggaacgcagccatgtctgccctgcaattcctcctgctcactgaagaaaccctagatctccccgctgggagcagc

SEQ ID NO: 431449 - DNA, 601 bp, Homo sapiens
ccttctggttcatgatgtgatttttcctcctcttacacacaagaatgcatcagctactcatgtgaatatgggccctgctacacctcaggaagtagaattcaatgactgaacatgacattttcagagagtacaggaggtgaggtaagttaaataagggagctggaaggagagtggacatgagccagccagcatgacccaatcaattgtarcaactattaggtgacgtatatctctggaagatcagacatcctgccttagaattagcttcaccattgaatcaaacaatgatcatagaccaccatgtggcacctcataggttttattgaaaatttctatttagatccagtgatcttacttagttttagcctgtttgtattttgtctccccagttagatcataactctcaaaaggtttaatgaaagttttccaatacccctgagagggtatagatctactggggcagtaaagtaataaagattcacccagaagatattccatttcagcagtggctacttctattgatttcatcaaccaccagacctagtaattgaggtgcaatcgtaactggaatgaaaatattccattaaaccaagtgagtaat

SEQ ID NO: 431450 - DNA, 543 bp, Homo sapiens
ctggactgaggccatgctgcaccctggaatgatcccttatgatttcagaggcttgccgaatatcaggtgccggtgagcaggtaaatctcacagacatatggcccatttgtcacctgaggcagagggactagatctcctttttagctctcataaagcatgttttgggacctagacatttttgatgcataaatcttgggcactgaaagttcagttttgttctcctgactctgcagttatttcaggccacatgccactgctgctatttccaggatgacaaatgaaggcagtgaggatgatggggaggagagggtagccmgtgagttcgcacataggaaacaatggtatttttacattaaatgtttgtcaggctttcatttcacggataaatcactctaaaaccaaggaagagaaaccactgcccaaagacagaacccacaagatcagtgagttatgaagtcatcgctagaaaccatcaaagcgaaattcttttcacagcactcagtgtcttctgcagttgttattgttgttcaacccgtgctggaa

SEQ ID NO: 431451 - DNA, 543 bp, Homo sapiens
ctggactgaggccatgctgcaccctggaatgatcccttatgatttcagaggcttgccgaatatcaggtgccggtgagcaggtaaatctcacagacatatggcccatttgtcacctgaggcagagggactagatctcctttttagctctcataaagcatgttttgggacctagacatttttgatgcataaatcttgggcactgaaagttcagttttgttctcctgactctgcagttatttcaggccacatgccactgctgctatttccaggatgacaaatgaaggcagtgaggatgatggggaggagagggtagcccgtgagttcgcacataggaaacaatggtatttttacattaaatgtttgtcaggctttcatttcacggataaatcactcyaaaaccaaggaagagaaaccactgcccaaagacagaacccacaagatcagtgagttatgaagtcatcgctagaaaccatcaaagcgaaattcttttcacagcactcagtgtcttctgcagttgttattgttgttcaacccgtgctggaa

SEQ ID NO: 431452 - DNA, 543 bp, Homo sapiens
ctggactgaggccatgctgcaccctggaatgatcccttatgatttcagaggcttgccgaatatcaggtgccggtgagcaggtaaatctcacagacatatggcccatttgtcacctgaggcagagggactagatctcctttttagctctcataaagcatgttttgggacctagacatttttgatgcataaatcttgggcactgaaagttcagttttgttctcctgactctgcagttatttcaggccacatgccactgctgctatttccaggatgacaaatgaaggcagtgaggatgatggggaggagagggtagcccgtgagttcgcacataggaaacaatggtatttttacattaaatgtttgtcaggctttcatttcacggataaatcactctaaaaccaaggaaragaaaccactgcccaaagacagaacccacaagatcagtgagttatgaagtcatcgctagaaaccatcaaagcgaaattcttttcacagcactcagtgtcttctgcagttgttattgttgttcaacccgtgctggaa

SEQ ID NO: 431453 - DNA, 543 bp, Homo sapiens
ctggactgaggccatgctgcaccctggaatgatcccttatgatttcagaggcttgccgaatatcaggtgccggtgagcaggtaaatctcacagacatatggcccatttgtcacctgaggcagagggactagatctcctttttagctctcataaagcatgttttgggacctagacatttttgatgcataaatcttgggcactgaaagttcagttttgttctcctgactctgcagttatttcaggccacatgccactgctgctatttccaggatgacaaatgaaggcagtgaggatgatggggaggagagggtagcccgtgagttcgcacataggaaacaatggtatttttacattaaatgtttgtcaggctttcatttcacggataaatcactctaaaaccaaggaagaraaaccactgcccaaagacagaacccacaagatcagtgagttatgaagtcatcgctagaaaccatcaaagcgaaattcttttcacagcactcagtgtcttctgcagttgttattgttgttcaacccgtgctggaa

SEQ ID NO: 431454 - DNA, 526 bp, Homo sapiens
aagaaagaagcagtctacaaacataaaagagtacaaggaaggtaaaattcacttgagtttccataattcagagraaagcattatttcttgtcattcatatcttccagagagagagctagtgtattaatcctttttcatactgctgataaagacatacccgagactgggtaatttacaaaataaagaggtttattggacttacagttccacatggctggggaggcctcacattcacggtggaggggaaaaggcacatctcacatgacagcagacaagagagcttatgcagagaaacacacctttttaaaaccatcagatctcaagagacttattcactatcatgagaatttcacaggaaaaacccacccccataattcaatcacttcccactgggttccttccatgacatgtggaaattgtggaagttacaattcaagatgagatttgggtgcagacacagccaaaccatatcattccactcctggcccctcccaaatctcatgtcctcacatttcagaaccaatca

SEQ ID NO: 431455 - DNA, 570 bp, Homo sapiens
aggtgtaacatttggtaagtgggtacccaaggcatctcttcccactctgctgccacccttggactattaaatgttttaaataggtgctgaatacacagggacactgagtgtagccaattatatagtgacaatgacacagtaaaaagtacagacagtgttacggctatctttttgtttgttttttgktttttttttgcgtgtgtgttttgtttctgtttttgtttttgtttcttctcagtgtgtctccacttccagctacttgagctcccgatgagtaaagttccagaatatcctccacagttttgtagccatcacgcaagagcaggaatgtaacatcctgatttataaatcagaatcaccttttaaaattccactatctgtaggtctggtggtaattattcctgctacactggagatgaaagaaattatggtctatccatggtgatctgcctcaactaggaaactgaattactaatcaattacagagtagcgaagatgttattattctcactgctttgggagtgtaatattctgccatagataaggaggaaaataaaaaataaacagctg

SEQ ID NO: 431456 - DNA, 540 bp, Homo sapiens
tgtcttgggtcccacatcttatccatcaaaaaatcctcccaggtttactttcagaaatacatttggaatctagccgattctcaccccctctaagtcctcctctttagtccaagccctcagcattccttgctgcagactgcagggtccccaagggtcctgtgactatccaggctccctctaggtctgtttccagcagagttcttaggggcttatgatccactgtcatttggaggatgtcctctcatggcttctcacgtctctgagaccaaaaccaaatgacagtgacacatggggccccacgaggtctgctttcttcatgcacagtgctgcttccccagcstcgttttccttctccatcgtgtccttgtgccatgctgctcctggaacactgtaggcacatttctgtctcctggaaagtccttccctgacacctgatgtccacctgcctctcttcctcacctccttcaaatgtttgccaaatcccttcttctcactgaagcctgtctttgtcaccagatctaaaatgttaccattcaccac

SEQ ID NO: 431457 - DNA, 543 bp, Homo sapiens
aataactgttaagttcagcctctattcagcacattttctccctggtttctttgcctctcacttctaatggacttgcaggaattgtaaaacaaaaaactaacattcacccttgtgtgatctactccagaatatagtcctctgtgaaaatttgatatatgaaactaaaaactgcattttttaagatgccacgttgttataaataacttttggagtgagcagtttcaggtataaaattattggcatgtgccaaatgtggaatagaatagacctaactagttctaaattattttttacttttatagatttagagacacaagtgcagttgggttatttcgatgtatttcatagggkcgatgtctgggcttttagtgaacccatcacccatacagtgtacactgtacccaatagtcgtatttcatcctgcacccatcccttccagcttttggagtctctgatgtctatttttccactcatatgtctctgtgtacccaatgtttagctcccacctaaaagtaagaacacatggttttctacttcctttct

SEQ ID NO: 431458 - DNA, 576 bp, Homo sapiens
tatgatatttccgtgtatgatcacaacacgggctttctctcaacttgctgagctagtcctgatgtgctcttttgcatcagttgttaaaccattttaccaagtatccatgcttcaaagtcaacacttccatgtttaagagggatctagcttctcctggcacaaagtttggtattttaaaagaagsgactttattatccaaggcagagattcctgaagaacaggtctagtaccatcatttgaacagaaaaactcatcatccttctgtgggtggggtgagccacatgccttgtggtttcacttaattactgtgcaggaattgtgctctggggccaagctacgggtgcattttgcttttcgttgcaatcttaacaggaaataaagtctgtggacctaaaaaattgtgcccgccattaatgagctctatctatgtctcacagaggcaagccatgcaaacactgggtatcattgaggtacaggggatttttcactgtgagtacacggtcatgattaagtgggcaggctttggaatctttggatttgaatctcagggccaccacttactacatgcatgtggat

SEQ ID NO: 431459 - DNA, 576 bp, Homo sapiens
tatgatatttccgtgtatgatcacaacacgggctttctctcaacttgctgagctagtcctgatgtgctcttttgcatcagttgttaaaccattttaccaagtatccatgcttcaaagtcaacacttccatgtttaagagggatctagcttctcctggcacaaagtttggtattttaaaagaagggacwttattatccaaggcagagattcctgaagaacaggtctagtaccatcatttgaacagaaaaactcatcatccttctgtgggtggggtgagccacatgccttgtggtttcacttaattactgtgcaggaattgtgctctggggccaagctacgggtgcattttgcttttcgttgcaatcttaacaggaaataaagtctgtggacctaaaaaattgtgcccgccattaatgagctctatctatgtctcacagaggcaagccatgcaaacactgggtatcattgaggtacaggggatttttcactgtgagtacacggtcatgattaagtgggcaggctttggaatctttggatttgaatctcagggccaccacttactacatgcatgtggat

SEQ ID NO: 431460 - DNA, 569 bp, Homo sapiens
gtaggcatttccatttcacaaagcgtgttcaacaaatgcactcactgctgattagcactggaggcgcgcttttccgaagtcctttttgccaccagatcttctttatcctgggaagccggacactgctgattgtcaaacgctgctaagtacccagattaagacctctccccatttaccagttcctatgaagctgctgattgtggcaagccctcctctgccactgctgtcatcccgcagcaggactttcttaaggaaaacaagctctccattctgcactctgccgcattcaaaaataggatttcaagccttccccttccccagattcctgtaatcctcattcagctgcccttgcatctgtgtctgagtctgaaccaggaacactaagattctccttcattcaatcttcttccgtttttctaactctgttggaggaaaaaatgcaatacacccagctatgaagacagagaaagacagaaagagacatagagagactgagagacagacagaacccacagacatggcacacatttctattaaygtcatagtcatagtctaatagcttaaccttt

SEQ ID NO: 431461 - DNA, 526 bp, Homo sapiens
actcctaggtctctatgccccacagaaatgcatacattcatccaccaaaagtcatgaactagaatgttcatagcaacattgctcataacagccaaaaacttgcaattatccaaatagtcatcaagcatagaataggtaaataaattgtrgtttatgcacttttggaacattatgcgagattgataataagtattaagctatagcaactactgaacaaaacagaatgttagagaaagaagctaaacacaaagaatatatactatataaaataataaatcaagacaactaatctatgctgatagaagtaagtgcgtagagcctggtttggaggagagaaatctctcaaacgcagttaatggtccatttccttacctgggtgctagttacacagttatgtttaatttatggaaatctgctggtatgtgcactttttatatatgatgcttttttaaagtgatatatgcccattaggaaacgcagtaaagtagaaagagaaaaagtaactgaatcacaacattagtaatga

SEQ ID NO: 431462 - DNA, 559 bp, Homo sapiens
catgaactagaatgttcatagcaacattgctcataacagccaaaaacttgcaattatccaaatagtcatcaagcatagaataggtaaataaattgtggtttatgcacttttggaacattatgcgagattgataataagtattaagctatagcaactactgaacaaaacagaatgttagagaaagaagctaaacacaaagaatatatactatataaaataataaatcaagacaactaatctatgctgatagaagtaagtgcgtagagcctggtttggaggagagaaatctctcaaacgcagttaatggtccatttccttacctgggtgctagttacacagttatgtttaatttatggaaatctgctggtatgtgcactttttatatatgatgcttttttaaagtgatatatgcccattaggaaacgcagtaaagtagaaagaraaaaagtaactgaatcacaacattagtaatgaaccttacgtttttcagagtttttaccacagttacagttacaaccatatttaattgtattcatttgaactcaaattaatacaatgt

SEQ ID NO: 431463 - DNA, 592 bp, Homo sapiens
caaacacctttgttctgtggactctaccgtagtcatgtagggagcaagtgttgggggatgggatacttggttcccaatcctgtccatgtggacaaccttttgcctgggggacacttgtggtcactagtcaccctccaactctccactccagcctcagccagtagaggaggcgtgattcatccgactgctcagtttggaaagacaaatgaggtgaatcagccagccatgcccctctctcttccaagtgaagctgctggccccccatgcacaaggtcccttcttggtttctctaggccaagtgttttggaacccaagcaccaaycttgtgggtagatgcccacctgggtccagcacttttggtgagtaggtaatcaatccatctcaaccagtgattctgataccagaataccacttatccatgcatggaatccccgtctgtatcatcagattcattagtaataaaagtaatattctgttctcccaactgcctaatgtctgggttttatttctttgtcagttcagaatgcagatataaaagaggtatgttatgtatgttatttgtgggggatacctcttgaacttcaagaggaaa

SEQ ID NO: 431464 - DNA, 569 bp, Homo sapiens
tgtcatggggatttggagaatgagggctgctttcattttgggcagaggagggtacagtgatgaaggtagagaagaggcagcactggtattgggtctgatggttggatggggggtgagattttaggtgaagagtcagagggaacctctgggaaaatccagtgagttagagcggactgaattaatacaatcatggaagagatctttctcttaatttccaagtaaggcaaaataagctgtaacagaagctcacagtacatgccacacacatccaggagygtgtagaatgaggaaccaaaacaagaaacaagaaatggctccactcctgtgacacaaagagcccctaaagggaatgaaaataagatttaggcaaggagacaggcccaggtcattgagggttggcaatatgaaagtagacagtttggattattattaataattcttcttcttcttcttcttcttcttcttcttcttcttcttcttcttcttcttcttcttcttcttcttcttcttcttctttcttcttcttcctcttcttcttcttctcttcctcttattcttattcttactct

SEQ ID NO: 431465 - DNA, 569 bp, Homo sapiens
tgtcatggggatttggagaatgagggctgctttcattttgggcagaggagggtacagtgatgaaggtagagaagaggcagcactggtattgggtctgatggttggatggggggtgagattttaggtgaagagtcagagggaacctctgggaaaatccagtgagttagagcggactgaattaatacaatcatggaagagatctttctcttaatttccaagtaaggcaaaataagctgtaacagaagctcacagtacatgccacacacatccaggagcgtgtagaatgaggaaccaaaacaagaaacaagaaatggctccactcctgtgacacaaagagcccctaaagggaatgaaaataagatttaggcaaggagacaggcccaggtcattgagggttggcaatatgaaagtagacagtttggattattattaataattcttcttcttcttcttcttcttcttcttcttcttcttcttcttcttcttcttcttcttcttcttyttcttcttcttctttcttcttcttcctcttcttcttcttctcttcctcttattcttattcttactct

SEQ ID NO: 431466 - DNA, 571 bp, Homo sapiens
gatttgtcaactcaagtcacttgttatttgcctccacatttctaaagatccctcaccagagaaagaaaattgcattagctgcatttttaagaaagcataaggccgggcatggtggctcaagcctgtaatcccagcactttgggaggccgaggaaggcggatcacgaggtcaggagatcgagaccatcctggctaacacggtgaaacccygtctctactaaaaatacaaaaaattagccgggcgtggtggcgggtgcctgtagtcccagctactcgggaggctgaggcaggagaatggcgtgaacccgggaggtggagcttgcagtgagccgagatcacgccactgcactccagcctgggcaacagagcaagactccgtctcagaaaaaaaaaaaaaaaaaaaagcatagaggaagtgattctgaagtttcttccactagggtatgacattggagttgacatttcaaatcatagtgcaggtgtttataaaagatagaggaacctggaccaagactgtctagaaatggtctcatttttcataccggagaatggaagcatctattacttctact

SEQ ID NO: 431467 - DNA, 629 bp, Homo sapiens
tgaaaaagtagtcctggattttttgatgcccacagacaaatggcagaagtcaaygtaaattctctctgcaataattcaccgtcaactcaagcctctaaaaattcttccagataaagtttgcagaatcatgaaattgtcaacaataataaaatacaaaaaatgttggataatcatcagaaaaaagccaaatgaatggagatgtctaataaaatacagaatatccaattaaatttgaattttacgtaaacaatgaatgtaatctttagtataagtatataccaatattgcatggggaatttttatatttaaaaaaaggaaagaaaagggaaaataaaaacacattattaatgtgaatttcaaatttgtgaactttaactgggtgtgctatatttttatttgctaaatctaggagccctataaatcaatgacagaaaattatagaacgcaaaagaccaagagaaagcaccaaaagctagctgaagtgaaaacaaacaaaaatcattaaaaaatggttgaaacctcagtagaagctatacaatccagaaaacaatcagatcccatgcttaaaaatggaagaaaatattcacccttcaagaaagtatgtttcaaaatgaggagagggtaccgag

SEQ ID NO: 431468 - DNA, 629 bp, Homo sapiens
tgaaaaagtagtcctggattttttgatgcccacagacaaatggcagaagtcaacgtaaattctctctgcaataattcaccgtcaactcaagcctctaaaaattcttccagataaagtttgcagaatcatgaaattgtcaacaataataaaatacaaaaaatgttggataatcatcagaaaaaagccaaatgaatggagatgtctaataaaatacagaatatccaattaaatttgaattttacgtaaacaatgaatgtaatctttagtataagtatataccaatattgcatggggaatttttatatttaaaaaaaggaaagaaaagggaaaataaaaacacattattaatgtgaatttcaaatttgtgaactttaactgggtgtgctatatttttatttgctaaatctaggagccctataaatcaatgacagaaaattatagaacrcaaaagaccaagagaaagcaccaaaagctagctgaagtgaaaacaaacaaaaatcattaaaaaatggttgaaacctcagtagaagctatacaatccagaaaacaatcagatcccatgcttaaaaatggaagaaaatattcacccttcaagaaagtatgtttcaaaatgaggagagggtaccgag

SEQ ID NO: 431469 - DNA, 616 bp, Homo sapiens
aactttacccttgagaaatccgtcttcctcatccactttgagatggtaatgaaatcgctggaattttagaattaagacgtcctacaagagatatggcctttaacagccagaaaagatcaagtgtggaaatgtaagtctgaatgcatgccagwagtaatggaatagatcacccccaaaatcactgcaaatggagaggaaagatcctgcttcagcggaggccatgattagttcataaagatgtctcaattccaggggcaattattcaggcatgtggatggatggtaggaaatgggaattgaggggctgacagacagatagaaaaccaatccctggggtagcctcatgtcccacaatccacattcccaggaataacatgagtccacttatattaggaaagggattatttgcactgccaaagtagattttttaagaagccagatcccatcagaagcaactaagtgaaaatgacacattttcccaatgtggagtgggggaggggatataattttaaaaggccattgagaccaattgcttacaacagaacaaacttcatatttgctgtaatggtatccgatcaggcattgtgtgattcaaacactatgcaccaagcaagctg

SEQ ID NO: 431470 - DNA, 616 bp, Homo sapiens
aactttacccttgagaaatccgtcttcctcatccactttgagatggtaatgaaatcgctggaattttagaattaagacgtcctacaagagatatggcctttaacagccagaaaagatcaagtgtggaaatgtaagtctgaatgcatgccagtagtaatggaatagatcacccccaaaatcactgcaaatggagaggaaagatcctgcttcagcggaggccatgattagttcataaagatgtctcaattccaggggcaattattcaggcatgtggatggatggtaggaaatgggaattgaggggctgacagacagatagaaaaccaatccctggggtagcctcatgtcccacaatccacattcccaggaataacatgagtccacttatattaggaaagggattatttgcactgccaaagtagattttttaagaagccagatcccatcagaagcaactaagtgaaaatgacacattttcccaatgtggagtgggggaggggatataattttaaaaggccattgagaccaattgcttacaacagaacaaacttcatatttgctgtratggtatccgatcaggcattgtgtgattcaaacactatgcaccaagcaagctg

SEQ ID NO: 431471 - DNA, 588 bp, Homo sapiens
ttagatatagtcatacccaaagtcaaaaaattgaattaaataaccctttgtttttgtttttgttttttttttttttttgagacgaagtttcactcttgttgcccaagctggagtgcaatgacatgatctcactgcaacctctacctcccaggttcaagcgatcctcctgccgcagcctcccaagtagctgggattacaagcatgcaccaccactcccagccaattttttgtatttttagtagaaacggggtttcaccatgctagccaggctggtctcaaactcctgacctcaggtgatccacccacctcagcctcccgtagtgctaggattacaggcatgagccactgctttcagcctaaataatcctttctaagttgcttttttatcctagatcctgagacttagtcaagacatgaaaacatgctgttaccctcttcgcaaggctaaaataattctgtttactttgcaatttcttctctttttccatttctttggtctttatgtaaattttgctgaaagaaatctgatgcarttgctgtggctagtcaagggggagggaaaatgtaaatgttgcaggcaaaatggaa

SEQ ID NO: 431472 - DNA, 529 bp, Homo sapiens
aatccaatcaagttgacactcaatattaaccrtcacaaccaggcatatcattccctaacatttcttttaagaaaagaaaaacaacagcaacaacaaaaaacaacgtatatttgttgacgaaaataatcaaactgtaaaatattggaagaaatttattctgagccaaatatcagtgactaatggcctgtgacacagccctcaggagatccttagaacatgtgcccaaggttgttgggctacaacttgaacttggttttatacatcttagggagacataagtcatcagtcaatacatgtaagatgtattttggttccatctggaaaggtgggacaactggaagtgaagtcttccaggtcataggcagattcaaagattttttgattggcaattggttgaaagagttattgcctacactggaatcaatataaaggaatgtgtgggttcagacaaggggctgtgtagaccaagattttatcaagcagatgaagcctccaggtagcaggcttctgagataatagattgtaaatg

SEQ ID NO: 431473 - DNA, 629 bp, Homo sapiens
attgggcatgtactttatgccaggcactatttggaacacttagagcacaccactgaacaaaataatctgagatccctgccctcacagatgcatgcatcctactggagaaagatatgcaataagtaataagtgtaatagatacagaaattaaataayatggtacaggatgataattgctgtaagagaaatgaaaaagtaagtatgttaagggaaaacgaaagtgcttaagcttaaagaaaggaggatgttgcatttctgagtaggtatggtggataggcctttttgagaaaagaatgtttgagtaatgtcttgtaagaggtaatggagtgagccatgagatatatgaaacgaagaacattccagaaatgagaagcagtcagtgtaggacatagagaaagagggaggaaaggatggctccagcagtgttttgaagatgttgaatgagtgaataaggcacacttagttataatgaacaacaacctggtcatcagctaacttcagcaatttactgtggtctcagtatctctgctcatgatattggtcttagaatgaacttgtaactaacttcaaaaactactctaaataaatccattatagtgtgataatataatagttgttaactcacatta

SEQ ID NO: 431474 - DNA, 528 bp, Homo sapiens
tgcatcacccagaaatataacttctcattaaaaaatttattaatctcactacatggtaatatagccgaaacagaataaatatgaagtatgcataaaatgctggtgagctgtcgccaattaaacagcagaagcattaatattgttttccatgttttctatgtctgtaattaggtaggtttggggagtctgctcttaaagctttctgccttttcttcccttagtaatctgatgttctagattcacaagtacttagactttgataaagtaaatattcctacagatgaagagtcagtttacaggctgagggaggaggacacttaaagcggacatcaaaggaggtgatgcccttgttccctcgtcgagacctatataagtaactgccaaaaataaataaattgaaacaaagcaagtgctcagtggtaagtctacataaatatcatggagctrttaaaatgaatatattaattaaatctctacctgtgaactggaattttttttttttttttgacagagtctcactgctatcac

SEQ ID NO: 431475 - DNA, 548 bp, Homo sapiens
gtggtaagtctacataaatatcatggagctgttaaaatgaatatattaattaaatctctacctgtgaactggaattttttttttttttttgacagagtctcactgctatcactgaggctgaactgcagtggctcagtctcagctcactgcaacctcgacttcccaggctcaggtgactctcccacctcagcctcccaagtagctgtgactacaggtgcatgccaccacacctagctaatttttttgtattttttgtagagatgggggattcaccatgttgtccaggctgatcccaaaaatctgggctcaagcaatcctcccgcctcggcctcccaaagtgctgaggttacaggtctaagctactgcacccagcgaacttgaagaattttaaagaaatttttatttagcaagaaaagcgagatggatataatacactgcagtctagtaaaacrttggtcctcaccccgacctgccttcgtacgtttggatgtcagcatgggtgtgtgcagcagcagtcaaggacaaatgttccaggtttgggcactggg

SEQ ID NO: 431476 - DNA, 582 bp, Homo sapiens
ttccctttccctggatcaccctttctctagttcatgaatccagtgggaaaggtgattgtgaaagggacgagaaaaatgccacttcaaactacgccacttttgcatactattttgagatgaaaacaattgagaaacagcagctgcaagaaaggatctatgccctttccctttctgcttaaaagaagggcatatttcccatgagaaagtkgcccttctgataccaagaagaagagaacactcttatcagagacaggacttggggaggagatggtgcagagataagtctgcacaaacaaaccttactgaaataacccttatcttccattagtttctctcatatattttctagtcactttcccacaaattactgcccctaggacctttttggacacccttcctttgtcctatcatttctccacaaattttttgccctttgttaaaatggtatataacccctgagtctaactgcttgtttggggttttcgcttctttcctatgaagcccctcatgccacataaaaatatttacatcaaataaaatttgtatgcttttctcctgttaatatgtcttttgtctgcttga

SEQ ID NO: 431477 - DNA, 551 bp, Homo sapiens
tttccctttccttgtttcagtccctctggcaaagccctattaacctatgtgtttgattccaagttctttttactttttagactagatagtctgattcccatgaargtcttgagagactcacagttcctcccagcagtcaggaaaaatgatgtccaagcttctggccctcactttccagtggactaagactacaatacaagataccgaacacctagatatttccagattttggatattggtctgcctgatgccaaacatctggatagttgaaaaatcaggatgcttggcatcaagcagacaaaacatctggatgactgcttgagtttttcactttttaagtggatgtttggtgtcttgtagacacaagctgaggctctgacttcatcttgtaacagcccccaggctgccaggctggctccagattccctttattgcaactgacatttttacaagaaaactttgcattctgtgtgatgcctgttgttcttatgctgagaaacagattggttactcaggaaaaaaccagcccaaaccgagccccaaaggccaca

SEQ ID NO: 431478 - DNA, 576 bp, Homo sapiens
gtgaaagaacataagcttactatgcaatgatcttgcaaaacatgccttcatggaggcctgttcttcatatcaggaatgttcttaatttcttctccacatacctgaaacctacttaacactcagagtccagttcattctattttcttcccaagacctttttccttgtctctagaagcaggtctgcaggaattgactgtttayacaaagggacttcaaaaagttcatggaaacatgacattaaaagataaaaattaaaaatgtaaattttatttctcaacgtaagcaccatcaaggtcatgacacttttttaagtgatgatctgagccatttagtccatccctaaataactaagggtcctgggaatttaaccatgtcaatgcagtcttttatacattattaactgaataaaaatgggtgccctttaaagacttttttaagattaggaaacaaaaataagtcaaaaggagccaaatcaggactgcaaggtagatgccaatgatttctcatcaaaacgctcacaaaattgcccttgtttgatgagagaaatgagcaggaacattgccatggtagagaagg

SEQ ID NO: 431479 - DNA, 618 bp, Homo sapiens
cctcatttctacaactgtggaaaaaataaaatctgtaagctgacccaaaatttctgttggccacatcagaaacttccgaaaacaccatttacaagttatatcatttccctcaaatgagccaatttttttctccttttactctaggggttaaaaagaaagcccctctacctttgcyataaatatcaacaggtcaggggaaagctgtttatttttctcctgaagcacattaatgctaccaaccaacaacagcagcctttaaaactcagaatgcaagactagaaggagccagccacaactcccccggagtaatggcaaacactttttcacctcaggctattcgtgagaaaggattttctttttttcttttagggcctcttttcctattcactgatattcacccctaaccccacatcagggagaatgaaaaggttcagggatactttaaagttgggctattggaaagttaaaagccttaaattgtagaataaacattgactacttcgagctcatgtttttcaccacaaactaggtgaagatgtattttctcacagatcccttgattaggaaattttaaaaacaattcaaatatataaataaaatacataaattaaaaatttt

SEQ ID NO: 431480 - DNA, 574 bp, Homo sapiens
attggcactaaactatagaaagattatttmatcagatagcacgggattgttccataatctcctacaaaatttgattcctgcattatagcattatcacagtgtgtcttacatttcagtaattaaaatgtttttagtttctctattgatatgtggctcatagaaaacagcaagaaatatcttaattacagttgactgttgaacaacatgggtttgaattgtatgggtccacttatacatgaattttcttcacttctgccacccctgaggcaacaagaccaacccttcctcattctcctccttctcaacatgaagacaaggatgagcaccttgatgatgatccatctccacttaatgaagagtaaatatatttccccttccttatgattttcttaatgacattttcttttctgtagatcactttatcatatgaatacagtatatagtccatatagcatacaaaatacatgttaatattgttcgtgttatcagtaaggctgacatgaatcaatacggtttatgttatcagtattgtgttaatattgtttatcttatcagtaggataacataagtaagt

SEQ ID NO: 431481 - DNA, 574 bp, Homo sapiens
attggcactaaactatagaaagattatttaatcagatagcacgggattgttccataatctcctacaraatttgattcctgcattatagcattatcacagtgtgtcttacatttcagtaattaaaatgtttttagtttctctattgatatgtggctcatagaaaacagcaagaaatatcttaattacagttgactgttgaacaacatgggtttgaattgtatgggtccacttatacatgaattttcttcacttctgccacccctgaggcaacaagaccaacccttcctcattctcctccttctcaacatgaagacaaggatgagcaccttgatgatgatccatctccacttaatgaagagtaaatatatttccccttccttatgattttcttaatgacattttcttttctgtagatcactttatcatatgaatacagtatatagtccatatagcatacaaaatacatgttaatattgttcgtgttatcagtaaggctgacatgaatcaatacggtttatgttatcagtattgtgttaatattgtttatcttatcagtaggataacataagtaagt

SEQ ID NO: 431482 - DNA, 615 bp, Homo sapiens
gggcacatgtgcaggtttgttatataggtaaactcatgtcactgggggttcttgtacagattactttgtcacccagctactaaacctagtacccattagttaattttatttgctctttgycttcctcccaccctccaccctaaggtaggcccctgtgtctgttgttcttctctttgtgtccaggtgttctcatcatttatctcccacttataagtgaggggttttgttcttgcattagtttgctaaggataatagcctccagctccatccaaatgaactataagacctaaaaagtttcaagtaactctaaaatatccagaacttcctgattcaatagctgaaccatgacttctgagttgcaacagagacaattccataaactcaaggtaactacatggaaatacaatggagacattatgaaaaacagggccagaataactcagtcagtattatttctttagaataataatttcagaaaaaggaaaatgagtgtgatcaatcagctgaaaattgctcttttccatcaggaggtcactgtgtatgctaagtgtgaagaattcttaactgctgctattcaggtgattcattttcaacctcacatctgtttgttctgag

SEQ ID NO: 431483 - DNA, 570 bp, Homo sapiens
tatatattatggttattaatcttgtcagatggatagatttcaaatattttctccctttctgggaattgtctctttattttatcgrttgtttcctttgctgtacagaagcatttttagcttgatttagtcggatttgcctatttttgctttggttgcctgtgcttttgaggtcttactcaaaaagtctttgccaagaccagtgtcctggaatgtttcccaggtgttttttttttctctagcagtttcatagtttcaggtcttagatttaaatccttaatccatttttatttgattttcgtgtatggtgagagataaggatttagttttatttttcagtagacagttatccagttttcctgctaccatttattaagaagactatcctttctccatcgtgtgctcttggtatcttcgttgaaaatgagttacctgtagatgtgtgaatttatatctgggttttattttctgttccattggtctatatgtctctttttggttatgatggcttggtagtaaattttgattggggttgcatgaaatctgtaaattgcttttgttgatattgtcatt

SEQ ID NO: 431484 - DNA, 571 bp, Homo sapiens
ttcatcaatgttattggcctgtagttttcttttttgttgtattcttgtctggttttggtatcgtggtaatggcctcatagaatgagtttggaaatattctcttctctttaatttattgttgagttgagtaggattggtattagttctttaaatgatgggttaaattcagcagtgaagccatcaggtcctgagatttacttttatggraagcttttttttttttttttttttttttttactacagtttagatcttgttactcgttattaatttgttgaggttttcagtttcttcagggttcaatctatgtaggttgtatgtttccaggaacttatttcttctaggttatccaatttgttggtatatagttattcagaacagtctctgaaaactcttcatatttttgaggtctcaggtatgcatcctttttcatttctaattttatttatttggttcttttctctttgttcaaagttttgtcaattttgtttaccttttcaaaaaaccaactttttgtttcattaagcttctgtattgatttcagtcgcaatttcacttatttctgctcagat

SEQ ID NO: 431485 - DNA, 592 bp, Homo sapiens
agttttcttctttgagcttttgaacatgttccactccccgctggcctataagatttccattgtgaaatctgctgccagatggattggaattcctttatatgttatttgcttttcttctcttgctgcctttagtattctctctttgtccttgacctttgacagtctgattattcagtgtcttatggtattcttatttgagttgaatctgcttggtgctctcagatcttcctgtacctagatatgtatatctatctcaagagttggtaagttttctgttattctttccttgaaaaaactttctaccacttgctcttgtttgattcccttttgagcactgataactcagatttagtcttttgaggtaattttctgtatctcgtaggcagtcttaattcattttcattctttttttcgtttttttcctctgactttgtattttcaaatagstggcctgagaggtcactgactcctcagcaagacccattctcctgttgagagtctctaatgggttcttcaattcagcaaatgcatttctaatttctcagatttctgttaacagaggcaaaaaaggcagagtcacaggcgaaacaca

SEQ ID NO: 431486 - DNA, 656 bp, Homo sapiens
taacattatattctgatgaacacagttagtaaaattatactttcaaattatcttaatttttttttcccagatcagtgctaagtcttctagtattaaattggatttgattcagggttaggcgtgtgatataagaaagacttataaagtttctcctgatgtgaagaataaagataattttttaacccctggggttgttaaactaggaaggaatgtctaattgagagtggcagtgaaggaaagtggtccccatattctgttagaataccaatcactggctgggtgtggtggctcatgcttgtaatcccagcactttgggaggccgaggcgggcggatcacraggtcaggagatcgagaccaacctggctaacatggtgaaaccccgtctctactgaaaagttaaaaaaaattagccgggcatggtggcggaagcctgtattcccagctactcaggaggctgaggcaggagaatggcgtgaacccgggaggcgaagcttgcagtgagccaagattgcgccactgcactccagcctgggtgacagagtgagactctgtctctcacaaaaaaaaaaaaaagaatacccatcaccaccagaaaaccatgagcagcaccacccaccttgaggaatgttattcctcatattaccaaattataata

SEQ ID NO: 431487 - DNA, 588 bp, Homo sapiens
ggatggttgtagaatgggtacagcagggactattgactggagtgtatgtggcctcccagtatggcagtctcagggctctaacaggaagtattcccagagaaagtattccagcaaaactgtagaagctgaataatgaaactytgtcatatacactcttcagcatccacattatttgctggaataccccagtcaacaccgcctgtcctcagccatcccagtaggagccaaacatgtaagtaagtaaaacaagccacatggaatggaattgcccagctgcaagtattttaaccagcgattacagctgaggccccaaatattatgaaggtgacaagatctgtcttcactgtcccatttctgaatctgtaactcagagataccataagaataataaaatggtttagaccattcaattttagagtggcttgttacacagtgacaggtactgcaaacaccagaaaatagcaaattgagtgatagcaaccaaaatttgttggttatattatttcaaaataatatagcactatctatcatagaagaatatatatacaacttagaattgtatgcaatcaatacatttgcaaataaata

SEQ ID NO: 431488 - DNA, 572 bp, Homo sapiens
agaagctgaataatgaaactttgtcatatacactcttcagcatccacattatttgctggaataccccagtcaacaccgcctgtcctcagccatcccagtaggagccaaacatgtaagtaagtaaaacaagccacatggaatggaattgcccagctgcaagtattttaaccagcgattacagctgaggccccaaatattatgaaggtgacaagatctgtcttcactgtcccatttctgaatctgtaactcagagataccataagaataataaaatggtttagaccattcaattttagagtggcttgttacacagtgacaggtactgcaaacaccagaaaatagcaaattgagtgatagcaaccaaaatttgttggttatattatttcaaaataatatagcaytatctatcatagaagaatatatatacaacttagaattgtatgcaatcaatacatttgcaaataaatacttgtaaaaaattatgaaagagtattccaaaaacattatttgcccttttaaagtaaaataaaaacaccataagccttcccttaactctgtaatagtgttgattt

SEQ ID NO: 431489 - DNA, 673 bp, Homo sapiens
gaactgcctgcattctgtcattgctgacagtaaagaaccagagtaagacagggtagaccaacttctggatgaaagtagggttctaagtttaaacactaatgggagaaagatgaaataatcctagttggcatttccttctctcagtttgaagaatccttgcccagttgctaatatggtagcatcagtcaccgcaaggatatgttggtaagacatttttgagtctgatctcatatgtgtcaaaagtactgtgctttatctagttcctctgggcaactgctttttccttcaatgagcttcacatattagcttatcattatatcccacgactgttcctttcaatgaattataagtaayccaaactataaaatatataaaattaatagtttttggtgaccattggtcatagttaacttgttttttttctacttgacttggcacatctctactctgcattataacttggggaccacatagattattatccaaattgggatgacaaggctgaaaatgaacagaacactattcatgggaatgggtatataaagcagtactgtcccaggaaaactcatttgcagaattatccgaattataatactttaggaagtatttttaaaaagtaataaatattacatgaaaggatgagatattttatattgataacttgttcatatat

SEQ ID NO: 431490 - DNA, 577 bp, Homo sapiens
ccaaaatctaatgacagcagyggagactctgaccaataagcagacagagcaagaccagaaatgtatactatcctgaaaagagaggaattagaaccaataatttatttgaccacaacataggatctcttacctccagctagctccttggctctttcctcaggcactttgcttgtgtgaatctgcactttatcaatattcccttggattatgattacaaaaatggatcagactcttctttctgtaacaaacaatagcaaatatctgagaatacttgttaaatatcaaactggcacaaataaaaggctttttctcttatgtttttatttgtttagtttgtgccagtgagtcagcaaataggcatgttttaatcagtgagatcctgtactttctaatagccaatatctccagcacggacttgctataaactttgtcgtgtcttacatctccagcgttaagatattgtcactgaatatgtcctctgcatctaaaattgattctgtcatgtgtgttcagtgaattagtgttaatttaaactataaatgaattaactgaataatcaaaaatataccaagtactt

SEQ ID NO: 431491 - DNA, 577 bp, Homo sapiens
ccaaaatctaatgacagcagtggagactctgaccaataagcagacagagcaagaccagaaatgtatactatcctgaaaagagaggaattagaaccaataatttatttgaccacaacataggatctcttacctccagctagctccttggctctttcctcaggcactttgcttgtgtgaatctgcactttatcaatattcccttggattatgattacaaaaatgratcagactcttctttctgtaacaaacaatagcaaatatctgagaatacttgttaaatatcaaactggcacaaataaaaggctttttctcttatgtttttatttgtttagtttgtgccagtgagtcagcaaataggcatgttttaatcagtgagatcctgtactttctaatagccaatatctccagcacggacttgctataaactttgtcgtgtcttacatctccagcgttaagatattgtcactgaatatgtcctctgcatctaaaattgattctgtcatgtgtgttcagtgaattagtgttaatttaaactataaatgaattaactgaataatcaaaaatataccaagtactt

SEQ ID NO: 431492 - DNA, 577 bp, Homo sapiens
ccaaaatctaatgacagcagtggagactctgaccaataagcagacagagcaagaccagaaatgtatactatcctgaaaagagaggaattagaaccaataatttatttgaccacaacataggatctcttacctccagctagctccttggctctttcctcaggcactttgcttgtgtgaatctgcactttatcaatattcccttggattatgattacaaaaatggatcagactcttctttctgtaacaaacartagcaaatatctgagaatacttgttaaatatcaaactggcacaaataaaaggctttttctcttatgtttttatttgtttagtttgtgccagtgagtcagcaaataggcatgttttaatcagtgagatcctgtactttctaatagccaatatctccagcacggacttgctataaactttgtcgtgtcttacatctccagcgttaagatattgtcactgaatatgtcctctgcatctaaaattgattctgtcatgtgtgttcagtgaattagtgttaatttaaactataaatgaattaactgaataatcaaaaatataccaagtactt

SEQ ID NO: 431493 - DNA, 509 bp, Homo sapiens
tgaaaaaaaattagacaggataattatttgaataagtaatagctaacgatttccaaaaactgattactgatatgaagtcacagatttatggagatatatatagatatatatatataaagtcaggccttccataaatatatatacacgcaaaaactatatatgatatatatatcaatatcatatagatattatatatctatatataatataaacatataatctatagtatataataacacataacacattatagtaaagtatctaaaatgttgaatagaaagagaaaatttataaccaccatctgattcaatgctattcctrtcaaactaccaatgatgttttcatagaattagaagaaactattctaaaattcgtatggaaccaaaaaaaaaaaaaaaagcctgaatagccaaagcaatcgtatgcaaacagtacaaagccagaggcatcacactacccaacttcaagctatacaacaaggctacagtaatcaaaacagcatagtactg

SEQ ID NO: 431494 - DNA, 546 bp, Homo sapiens
atacgaatttagaggattgttttcctcatcttgttaaggtttatttgtttatttatctttatttgtattcaataatctttagtcctagaaaattttaggggagagtaaaagagagtaaagacatccgtaaattgtatgattcatactatgacccaaagactgagatcatyagatattgcagagaaaaaaaatcttttattgaaaccctcaaatagtttagccacagtataaactgtagaagatgaaatgatgaacaaatattcaatgctcatacccaaaaacaggggttttcaagattattatgcttcaggatcaccctgagggtgtgttaacacacagatcactggccttcactccatgctccctcctcctgagtgtctgattcagtaggtctgtgatagggcccaggaatttgcatttctagtgagttaccagttgctgctaggatagagaccacatgagggtcctccacccaggctgtacagtaactcatctccggaatatttatcccctaagttcctcgcataatttattgttggggaaagc

SEQ ID NO: 431495 - DNA, 617 bp, Homo sapiens
cacatatataatatcttactatttggaatctattttctactaacttcaggaattgactcactccaaagctgtaaaaagaaaacagaacatgtgtttcttctaattggtacagtcagtctcattacaaatcctgatccccaaagtaggaggctggcgggggtagaaaaggaaaagakacacaactaaattccatgcaagttttcattccaagactattttctcctgctcttcattttctcattaggcattgagaaaaaagtgtggtcttcttggctgtgggaggcagcatggctggatctcatgctggttgctgtgctttctctgctgtgctctgtctggcccagcccatctgagacactgagagctgttgctgagggccactggcctaaccaccacctcttcccaggcaaatgcacatttggactggtgtaacttgtggcctgttctctttacatgaatagtgctgaccaaccccttcactcattcctcataggtactgtgggccctactaatgactctctcacttggcttacataagctgctctctagcttttagtaaaacattactattcttcatggtaaagacatctgataatcgtctccatcagagaagatga

SEQ ID NO: 431496 - DNA, 566 bp, Homo sapiens
  misc_feature (1)...(566): n = A,T,C or G
aaaatctattaggcctcagaatctctgtggcaacattcacttcagatatatggagcaatttcaacaaaaatcacagaaaaagaatggaccaagaatattgtaaatatgtaaatgatcttttagagctgatggtaatagacattcatatcataacagaattcaagaaatggagtacatttaaacatttgcgaaaattttatttgccaatcaattaatggnacaggatatgtttcaaaataaaacaaaatggagaatgtgttgtaaaagatttaatataggcattagatatatttaatgtggtaaaaagactaaaattctcagagaaaatagaaggtaaatgctacaaattttatattttaaaattaacactaagactaacaaataagaagactgaagtatggaagttggcattataatatatattaatgtcctcattttttataacaataacttaatagagtctaaagtacaaaatttaaatacaacacyattctcttaatgtttaaacttttatttctcaattgtaaagaatatttgtcaatatgatataaacatttacaataaat

SEQ ID NO: 431497 - DNA, 543 bp, Homo sapiens
tcacagataggcagcaaggtatagcagaaccttgggactcattcctcaaggctcaggaaatttgcccagagtagatggagtctcatcttcccaggtcccacttgctccacagctgagcgaccccagaaggtagccacattgaattttgtatccaaggggaacctaacaccctgggcaacatgacaccatgggctaatgtgttaaaggacatcttatttctagggaaacaagggacagaaagtgaaccagaactattccagccagattatctctctctcaggttgttacatacccagcacattctacagtcattcttgagaactaaaactgtagaggaggatgagaggggagaattgcagttctcctgataaccagrcccagatagctcccttagcaaaggtagtacattttatattcccaccagcctcctcatacttgaaggaggagatttgtttcattggatctacgtaacaccttgactgacacaatctcagggcaacatcattgaacgatagccaaaatatacttcattaggcccaggag

SEQ ID NO: 431498 - DNA, 580 bp, Homo sapiens
aatagtgtacttttaagaaaataagggtacgttagcaaaaaaatgagttctcaaaaataatacaaagactgaaaaatacaattaattaaaattatcttagaacacagatataaaagctaaacataacaaaataagagagaaaagtcataatagtacagaggaggaatccaggaaatccaagttatggattcaaagaagaaattagtgcatggggasgggcaaatattcagcaatgtaataaagaaaaatgtttcagagcagaagaaagaatgatttgaagttagagagatttgataaaatgtcttgaactataaaatctgtaagaaaaataatttgaattatctctgtgacaaagtgtaaatattcgcttattcatttaagaaaagatatacactgaaggcaattataatccctaggagaaaaataaatagctgtagaaagaatccttagaagaaataggaggcaaactaaaatatgctgtaattttgaacaaaggatgaaattttaaaaaggaaagcaatttgaacttgaattttataacattttctgttgagtagtgatatctagcgaaatagaatca

SEQ ID NO: 431499 - DNA, 580 bp, Homo sapiens
aatagtgtacttttaagaaaataagggtacgttagcaaaaaaatgagttctcaaaaataatacaaagactgaaaaatacaattaattaaaattatcttagaacacagatataaaagctaaacataacaaaataagagagaaaagtcataatagtacagaggaggaatccaggaaatccaagttatggattcaaagaagaaattagtgcatggggaggggcaaatattcagcaatgtaataaagaaaaatgtttcagagcagaagaaagaatgatttgaagttagagagatttgataaaatgtcttgaactataaaatstgtaagaaaaataatttgaattatctctgtgacaaagtgtaaatattcgcttattcatttaagaaaagatatacactgaaggcaattataatccctaggagaaaaataaatagctgtagaaagaatccttagaagaaataggaggcaaactaaaatatgctgtaattttgaacaaaggatgaaattttaaaaaggaaagcaatttgaacttgaattttataacattttctgttgagtagtgatatctagcgaaatagaatca

SEQ ID NO: 431500 - DNA, 534 bp, Homo sapiens
acaaaagagagtgaagagaaaaagcaaatgttatgaaaaatgactattaaatgttattaattctatcatttaacccaccaatcctattactgggtatatacccaaaggaaatttctagttctaccataaaaagacgtgcacacatatgttcatcacaccactcttcacaattgcaaagacatggaagtaacctagatgcccatgaacagtgggctggaaagaaaatgtacatatacaacatggagtactatgcagccayaaaaagaacaaaatcatgtcttttacaacaacatggatggagatggaggccagtatcctaagtgaattaatacaggaacagaaaatcaaataccatatgttcaaattgataagtgggagctaatcattgagtatacctggacgtaaaaaaagagaacaatagacgccgaagactacttgaggatagagggcaggatgaggtttaggcttataaaattacccatcaagtgctatgcttattacctgggtgacaaaataatctgtgcaccacacctg

SEQ ID NO: 431501 - DNA, 534 bp, Homo sapiens
acaaaagagagtgaagagaaaaagcaaatgttatgaaaaatgactattaaatgttattaattctatcatttaacccaccaatcctattactgggtatatacccaaaggaaatttctagttctaccataaaaagacgtgcacacatatgttcatcacaccactcttcacaattgcaaagacatggaagtaacctagatgcccatgaacagtgggctggaaagaaaatgtacatatacaacatggagtactatgcagccacaaaaagaacaaaatcatgtcttttacaacaacatggatggagatggaggccagtatcctaagtgaattaatacaggaacagaaaatcaaataccatatgttcaaattgataagtgggagctaatcattgagtatacctggacgtaaaaaaagagaacaatagacgccraagactacttgaggatagagggcaggatgaggtttaggcttataaaattacccatcaagtgctatgcttattacctgggtgacaaaataatctgtgcaccacacctg

SEQ ID NO: 431502 - DNA, 596 bp, Homo sapiens
aatttaatactttgaagtcatgagatgcaccatcgaggctacccccaagaagaagcagaagagaagttggtaatgagaggggattagaggtcctcccttcagtagggctgtgaaaacctcatcactggaggtaaaagmacaagcaatgcctgtggacaagatgtcattcattcactcagcaaatgttcatggatcaccggctaccaaggtaccaggcaccatgctaggtattggggaagagagactgaagtcacaacccctgactgctcctcaaaagctaacggttgcacctccaagtggctgggtctgttcttactcttggagggaattctgagaagacagcacagaattgtaaaccttcccttttgacccttttggattttatcaggtgtaaacaaaaagctgaacagttacttcaaagatatgtgtgtatattcagttttttattgttaagctgatattttaaagatttctgagctagcaggcatgtgggaaggaaggctctgtcttcaactctttgaccctccatgtgtaccatagaggggggaaaggtggtattttcactttgatgaggttggtaaatgtttttagatctt

SEQ ID NO: 431503 - DNA, 634 bp, Homo sapiens
actcagctctggtcagtaagatgtgagtaaaattattatgtggcagcttctaggaaatttctttaaaatacacccagaatgtacccttcatctcatcttcttctcctccatccttcttggaacatggatatgatggctggacttcatcctggaccataaggataagggtcacacctgacggatggcagaatggaaagctagaagcaatctgggtcccgcagaactgtagaacctgrattgcctacaataggctttcttttatatgagaaagaaagaaatgtcattatgtttaatccactgtttttaggtcactgttactcacagctcctcacaatagaactgaattctactaacacaatgccctacacacacagtcaattcttctgcttttccttggtctgcttactttcctgacccactcaggctctagggcaagacagtgtctcacagttttcaacacactcaactgccaccccttccctaatctcaccaagtgaccttccagtctttagttaggtggctagatacaagataaacattttaaaattcataacctttctctattccagcagcaagcactacaaaggaaatggggaaagtattgcacttaggcagccaaaattataacacattt

SEQ ID NO: 431504 - DNA, 481 bp, Homo sapiens
ccattctttaaacttttctctatttgcaaatttggggaaatactattttggtcctgttctatggatgtgaccttgtagggtctcatttgtgtgctatgcagactcaaaacaatttcctggggtaaagcttacacctgactttggttttcccttgtgggtragaaagcctttgatacaaccagctgttcttaggtacctcagctttcacaacaggtcaaacctacgtttgaattgtctattaaggcatatggatctgaattttaaacaacacagaatagaattccaggatttcgctgagagtataatctcatcctgtcatcaaatatttattaaaaactcagtaaggagaagcaattttcagagaggattatttgaagcatataaggattatttcagacagtctagtctcaaacacatccatggattaaaccagatcagtagacagctggtaccttgctagacagtgtcatagtttcccaaa

SEQ ID NO: 431505 - DNA, 481 bp, Homo sapiens
ccattctttaaacttttctctatttgcaaatttggggaaatactattttggtcctgttctatggatgtgaccttgtagggtctcatttgtgtgctatgcagactcaaaacaatttcctggggtaaagcttacacctgactttggttttcccttgtgggtgagaaagcctttgatacaaccagctgttcttaggtacctcagctttcacaacaggtcaaacctacgtttgaattgtctrttaaggcatatggatctgaattttaaacaacacagaatagaattccaggatttcgctgagagtataatctcatcctgtcatcaaatatttattaaaaactcagtaaggagaagcaattttcagagaggattatttgaagcatataaggattatttcagacagtctagtctcaaacacatccatggattaaaccagatcagtagacagctggtaccttgctagacagtgtcatagtttcccaaa

SEQ ID NO: 431506 - DNA, 508 bp, Homo sapiens
tccctgttagcctttttgttctgttcagatctacagttgattggatgaggcccacctacattagggaaggcagtctactttactcagtctactgatttaaatgttaatctcatccagaaacaccctcagagacataccaagcaagaatgtttaaccaactttctgggcacctgaggcccagtcaaactgacacaaaaactaaccatcatggtctccaaattgccagtatatttatcagagtaaagagcactagtgctgtaacgaataactccaaaattgcagtagcttacataataaataaataattaacatatcacagtgaatttgagtgtgttcaggctgctttcttcactggtgattgagagctcccaattccttctatcttgyaatgctgccatcttccagggatttcttgttctcttctgcattgtctgcatttagctggctgatgaatgaagacagaaggtgtgtagaggatcatatgggacctttgtaaagccagactggg

SEQ ID NO: 431507 - DNA, 492 bp, Homo sapiens
ttttgaaaactcagtgtctgcccagagagtataaaaaacagtaataaataaacgtattgaatatttagyatgttccagatactgtgctaagagctttaggtatattacctaatgtaatccttacaacaacctcgtaacaagcaggtggtattagtcccatttaagagttgagtaaatggaatattggaggagttaagtaatttattcaacccatttccttaattgtgatgcaatgttgtctcctattatgagccatttctctctctgccattcttcattgtattatttaattggatatgtttacaaatatttctctcacctgtaacagatggtgaaagagtctgaattgaaaaagaaaaaaaggaatctataagatctacaggatcttacagatcctacagaaagaggaatctataagatacaaaaaccaggtcaggcgtggtggctcacacctgtaatcccagcattttgggaggccgaggcaggtggatc

SEQ ID NO: 431508 - DNA, 492 bp, Homo sapiens
ttttgaaaactcagtgtctgcccagagagtataaaaaacagtaataaataaacgtattgaatatttagtatgttccagatactgtgctaagagctttaggtatattacctaatgtaatccttacaacaacctcgtaacaagcaggtggtattagtcccatttaagagttgagtaaatggaatattggaggagttaagtaatttattcaacccatttccttaattgtgatgcaatgttgtctcctattatgagccatttctctctctgccattcttcaytgtattatttaattggatatgtttacaaatatttctctcacctgtaacagatggtgaaagagtctgaattgaaaaagaaaaaaaggaatctataagatctacaggatcttacagatcctacagaaagaggaatctataagatacaaaaaccaggtcaggcgtggtggctcacacctgtaatcccagcattttgggaggccgaggcaggtggatc

SEQ ID NO: 431509 - DNA, 642 bp, Homo sapiens
aggactcagctatgttcaaggcttcatcgagcccaacatacaattatcatttgcattttctgctacaatcaaagaaaacrcattgtgtgctattagtggccattgcaagaaggaagatgctgttttcaataacaggaaatcaagaacaaacaaaataatcgtcttccatttaaaaaaaaaagaaagcctacagaaaagtgaaaaggacagggtcctaaaaacatctagtgatgccaataaaatggaatgttttttaaaaagtgatttgtctcactgaagctgcagaagggtatcccacacttatatattatgtgactgcactaaaaacagacgcttttggtgcactgagcgttacaaaaaggcagaaagctcacaaatagatgcaattttaggtatgggaataaaatgacataaagaaactgaccttgttatcagtttagctgtagagtgaaagataaggatatttcaaggaaaaacctattacaggtagtatatagagtacttgggcccagttgaagcccaggtaatgtgatgatagtaatgataatggtccactgaatgctaacagacaagtatatatagttacagctgtacatggatatcacaaccttacacacaaattctagaaagatcattgtgaaa

SEQ ID NO: 431510 - DNA, 566 bp, Homo sapiens
atcttcacaccatagtctcctgagtagcttggactacaggcatgtcccatcatgcctggctgatgaaatattttgttttcttttctttttttgagacaaggtcttgttctgtcacccaggctgaagtacagtggcgtgatcacagcttactgcagccttgatgtcctgggctcaagcaatcctcctgcttcagcctcctgagtagctgggactacaggtacatgctaccctgtctggctaatttttgtatttttttgtagagatggagtttcaccatattgcctaggctggtctcgaattcctgggctcaagtgatccgccacccttggcctctcaaaacgctgggattagaggcgtgagccayggcacccagcctaaaatttctaatagagacagggtcttgctctgttgcccaggctggtcctgaacttctgaggtcaagtgatcctcccgccttggcctgctaatgtgttgagattacaggcgtgagccactgaacccagccaaaaatattttttctaatctcctagagtcatcttgcccatacctatttttttttttttttg

SEQ ID NO: 431511 - DNA, 566 bp, Homo sapiens
atcttcacaccatagtctcctgagtagcttggactacaggcatgtcccatcatgcctggctgatgaaatattttgttttcttttctttttttgagacaaggtcttgttctgtcacccaggctgaagtacagtggcgtgatcacagcttactgcagccttgatgtcctgggctcaagcaatcctcctgcttcagcctcctgagtagctgggactacaggtacatgctaccctgtctggctaatttttgtatttttttgtagagatggagtttcaccatattgcctaggctggtctcgaattcctgggctcaagtgatccgccacccttggcctctcaaaacgctgggattagaggcgtgagccacggcacccagcctaaaatttctaatagagacagggtcttgctctgttgcccaggctggtcctgaacttctgaggtcaagtgatcctcccgccttggcctgctaatgtgttgagattacaggygtgagccactgaacccagccaaaaatattttttctaatctcctagagtcatcttgcccatacctatttttttttttttttg

SEQ ID NO: 431512 - DNA, 547 bp, Homo sapiens
aggccaggctataaatatatgtggtctccaaaacatttcaaaaacacaaaacctgttttttcccctgtggatgaacaggaccatcctgcttgtttttgtctataaacagattgatttatgtacctggatcataggctcatagacaaacacggcttctgtttccttagaggtgaaaacygccctctggaggctggtccaagccagaatttaaaatttaacttttgctttggtgccaccaagtggttagctttgagatggcttggcaaatacataatgataaaaaaaaaaaatctgggatgtataggaggagctcagaggatttttagggcagtaacaccattttgtataatgctacaatgatggatatatattataatatacatttattcaaattcatagaatgtgtaacacccaagagtgaactctaaactatggacattgggtgattatgatgtgtcaatgtaggttcatcagttgtagcaaaagtcttactctggtgttggaggttgataatgggagaggctgtgcctgtgtggtggggataggg

SEQ ID NO: 431513 - DNA, 547 bp, Homo sapiens
aggccaggctataaatatatgtggtctccaaaacatttcaaaaacacaaaacctgttttttcccctgtggatgaacaggaccatcctgcttgtttttgtctataaacagattgatttatgtacctggatcataggctcatagacaaacacggcttctgtttccttagaggtgaaaaccgccctctggaggctggtccaagccagaatttaaaatttaacttttgctttggtgccaccaagtggttagctttgagatggcttggcaaatacataatgataaaaaaaaaaaatctgggatgtataggaggagctcagaggatttttagggcagtaacaccattttgtataatgctacaatgrtggatatatattataatatacatttattcaaattcatagaatgtgtaacacccaagagtgaactctaaactatggacattgggtgattatgatgtgtcaatgtaggttcatcagttgtagcaaaagtcttactctggtgttggaggttgataatgggagaggctgtgcctgtgtggtggggataggg

SEQ ID NO: 431514 - DNA, 539 bp, Homo sapiens
attctcctgcctcagcctcctgagtagctgggactacaggtgcccgccaccacgtctggctaatatttttgtatttttagtaaagacagggtttcaccatgttagccaggatggtctcgatctcctgaccttgtgatccrcccacctcggcctcccaaagtgctgggattacaggtgtgagccactgcgcccggcttgttttgtttttctaaggtgaaacagaaagtgtgctcccttcctcttaggctagatagggcaacaaaaatagcaattgctattgggttacaatttatcaactcattgtgactattctggatggctcttgcttatactggtttaaaaaaacttgagaaatgaaattatgattaggtaactgtagtgtgacagacaagaatctctcttctattaatctatttatgatccacctcaaaccaaagggcagttgagggttgctgtgatttgaatgtgtcccctccaaaattcagatgttgccaatgtgatggtattaagtggtgggcctttaggaggtgattaggcca

SEQ ID NO: 431515 - DNA, 539 bp, Homo sapiens
attctcctgcctcagcctcctgagtagctgggactacaggtgcccgccaccacgtctggctaatatttttgtatttttagtaaagacagggtttcaccatgttagccaggatggtctcgatctcctgaccttgtgatccgcccacctcggcctcccaaagtgctgggattacaggtgtgagccactgcgcccggcttgttttgtttttctaaggtgaaacagaaagtgtgctcccttcctcttaggctagrtagggcaacaaaaatagcaattgctattgggttacaatttatcaactcattgtgactattctggatggctcttgcttatactggtttaaaaaaacttgagaaatgaaattatgattaggtaactgtagtgtgacagacaagaatctctcttctattaatctatttatgatccacctcaaaccaaagggcagttgagggttgctgtgatttgaatgtgtcccctccaaaattcagatgttgccaatgtgatggtattaagtggtgggcctttaggaggtgattaggcca

SEQ ID NO: 431516 - DNA, 582 bp, Homo sapiens
tacttctcattgtgtggtgcaattatttgtctgtttccctgatgaaactcacttcctgtaaagacttactgaacaccgactttgcgacaggcatcgggttccaggttgggaagcacagcttcacagggttggtgaagaactggttcccatccctgccctcaggggacatggtctggtagagagacagacatagggatgaggcaagtacagtacagcacactgtgagagctactgtactagaggtcagtatccaagtagccccgcggagggcctgattatctgtgtttggctgggtctaggaaggcttcctggaggaartgccatctaggctgatttttgtttggtagttgtacctgttcagtacgtgcctcacccttcctaccaatcatccacagggtgggctgtaatcactactgtcacactgattgttccaaactcttgaatagactataggtggccaccatcagagctgggctgagctttacagattttcactgtctagaatctggaactggaaccctgtaactcaggtgcagatgggatcttggatggagaagctggccacaagcacagtgacaaaca

SEQ ID NO: 431517 - DNA, 616 bp, Homo sapiens
tttatttatttgaagattcatttatctaggacctctttggaaaagaaaatggaagcacatgtgcttttaaatttgctcccctcatgcagcagtcttttgcttggcccttggtccctgggtgattcctggacaagcaccatcttgtaagaacataaactgtatcaattgctcccctgttatcccactgtggtggcccctgtcacctgtgagtagtcaatgaatcaatgaataatttttgaggtcttcaccaatgtatgcattttggaatatggtacatacatgtgctactgttaatctgcatattaaatgaataaacttttatttatttttgtagctaaaaataatcttacgcattgtagagtttgatctccccaccccagtggattttcttsgggcctccttgggttgtacaccactgggtttacagcatccgtttcaagcgcctcactggcaggatctgaattcaggcccattgcattctggcctatctctccttctgcagacttgcctcttgttgctacccagccatgatgagctgtttgagttcccaggattgattacgtcttctctctgtttcatgctatcatccacagcttttcttcttaaggtgactaac

SEQ ID NO: 431518 - DNA, 435 bp, Homo sapiens
ccagggatttgtctatttaggatatttcatataagtgaaatcatacagtatgcaacatattttgtctaacttacttgccttgctgttttcagggttcatccacrttgcagtgtgtatcagtactacatttcctttatacaattgagtaatattccattgcaccaatattttgtttttccattcacccactaatggaaatctgggagggctttgagtgaagttggagagacgagtgtcttgtaacttgccttgtgctgtgctatttactagctatgtggctttggacaagcgcctaagctggcttgtgcctcagtttcctcgtttgttcatgtagataattatattggattcttaaaatagttgaatgaattgtatcaaataatgccagaaaagctcatagcataatacttggcaaataatgggccctcaataaat

SEQ ID NO: 431519 - DNA, 435 bp, Homo sapiens
ccagggatttgtctatttaggatatttcatataagtgaaatcatacagtatgcaacatattttgtctaacttacttgccttgctgttttcagggttcatccacgttgcagtgtgtatcagtactacatttcctttatacaattgagtaatattccattgcaccaatattttgtttttccattcacccactaatggaaatctgggagggctttgagtgaagttggagagacgagtgtcttgtaacttgccytgtgctgtgctatttactagctatgtggctttggacaagcgcctaagctggcttgtgcctcagtttcctcgtttgttcatgtagataattatattggattcttaaaatagttgaatgaattgtatcaaataatgccagaaaagctcatagcataatacttggcaaataatgggccctcaataaat

SEQ ID NO: 431520 - DNA, 587 bp, Homo sapiens
ctcaagttaaagattacttttctccagaaatgctttggtgacccactgcaacccacccacatgccccccagttgtgggtcatgaccatgctgtgtgctctcaaccactttgcattttctccattatttaaataaggtttattctctttatcactcactaggctgggagatctgtgaggacagggactgtgtctgttttttcagccactttagttctgccactaaggacagtgttgaaaagtgtaggtatgcagcaatatttattgaatgaataagggagtaaatgaatgaacttacggccacgaaaaatctcacctgagtccctggattctaaggagtctcacagcaccctgtacttactaaaattatcacactttccccattttttctataattatttttcttttttctatgctatgccattaactatgagttcctcacctggtacacttggcacaaggtaggtaatcagtaaatgtttgttgaattaattrttatataatgtgggggagaattatttgcacaaggagaaaaaaaatttaaaaaaatctcccctaagagttggctcttgagattcttattatgtgg

SEQ ID NO: 431521 - DNA, 587 bp, Homo sapiens
ctcaagttaaagattacttttctccagaaatgctttggtgacccactgcaacccacccacatgccccccagttgtgggtcatgaccatgctgtgtgctctcaaccactttgcattttctccattatttaaataaggtttattctctttatcactcactaggctgggagatctgtgaggacagggactgtgtctgttttttcagccactttagttctgccactaaggacagtgttgaaaagtgtaggtatgcagcaatatttattgaatgaataagggagtaaatgaatgaacttacggccacgaaaaatctcacctgagtccctggattctaaggagtctcacagcaccctgtacttactaaaattatcacactttccccattttttctataattatttttcttttttctatgctatgccattaactatgagttcctcacctggtacacttggcacaaggtaggtaatcagtaaatgtttgttgaattaattattatataatgtgggggagaattatttgcacaaggagaaaraaaatttaaaaaaatctcccctaagagttggctcttgagattcttattatgtgg

SEQ ID NO: 431522 - DNA, 607 bp, Homo sapiens
aggatgatttatctctaagtaacagtttctccatctttaatatgcagttaataatagtcccttcttcatagtgttctgaggactggatcaggtgatatatgtaaagcgcttagctctgtgtctggcatacagcatgtaatcagtaagcacttgttttcttttctctttttcattcctactcattcattaaatattcattgaacacccagagtttgataggtactgtatttgatagagggtgtacagacatgaaagagacggtctcatgaagctcagagtggaatggaagaagtagatatgtagcagatgaaaaaccagtaagtaacaatacagtatagttatatctgtattagaaatataaatgtattaactatggatacccagaagaagaaattcccagccttgtcttggagagtgagaaggtattcagtgtactgtagctcaagtattttgaagatacttatgctcaatctaatttkgggaaagaatgttctctaatattttgtatatgtgggcttcgcttgtataattctttaattttacattttagatatagaaatcaggaatgcttggttgatgatctattgaaaatagcaacaaggttgcc

SEQ ID NO: 431523 - DNA, 582 bp, Homo sapiens
agaaaccctcatttcagacagaggtcaactgagagacttttctttaacatgaggtgacctcacatgggaaacaggcaaattcaactcttccaacaatgaaagtaacaatgtgtttccttttgcttggaagcagaaatataattttgggacaattcaaatggccatatagtyctacagatggccaccagaatgttgaaaaagtctcacttgcaaaccagtaaaatcattctgatgttttattgttgctttttaattataaataattcaagcatacagatgattatagagaataatacgataaacatcagtacagtcactatccagttttggcaaagcttgaaattttaccttatttgcttcagattttttttttctttaataagtaaaatattataggccgggcgcagtggctcacgtctgtaatcccagccttttgggaggctgaggcaggcagattgcttgagcccaggagtttgagaccagcctgagcaacatagtaaaatgccacttcaacaaaatacaaaacaattagctgggcatagtggtgcacacctatagtcccagctactctggcggctgaga

SEQ ID NO: 431524 - DNA, 577 bp, Homo sapiens
ggaatctagacagaacagccattacagtaaattgtggctgcctcagaagaccccacgacctccttccggccaggcacccctcagtttttgttctctcctatcagtgcagggcccagcctggcccacaggcagcacctaccctgcaatgacagaatcttctgtccttcacctacatggcactgagtaggggcagagagacccagctgcagctctgatctctggcctcagttacctggataygggagagtctggggccggggtggaggggcagaacatgggaaaatctcccccgggccgagcagcccccagtggccattcatgcctcctgcctcaaggcaaacctcagagccatctctgggcacctctcaggactccaggtgccttcagagtccaggccttcatatagcagatgagagaggcaagaatacgccttgtgcttatccattgcagagccctgactggcagcaagggacctgccaatattgtgggctgcagacagatgactggcacccccaggcatgccgggctccactccaggccctggggtgagtgatggaggaccctgggtggaccctgg

SEQ ID NO: 431525 - DNA, 577 bp, Homo sapiens
ggaatctagacagaacagccattacagtaaattgtggctgcctcagaagaccccacgacctccttccggccaggcacccctcagtttttgttctctcctatcagtgcagggcccagcctggcccacaggcagcacctaccctgcaatgacagaatcttctgtccttcacctacatggcactgagtaggggcagagagacccagctgcagctctgatctctggcctcagttacctggatatgggagagtctggggccggggtggaggggcagaacatgggaaaatctcccccgggccgagcagcccccagtggccattcatgcctcctgcctcaaggcaaacctcagagccatctctgggcacctctcargactccaggtgccttcagagtccaggccttcatatagcagatgagagaggcaagaatacgccttgtgcttatccattgcagagccctgactggcagcaagggacctgccaatattgtgggctgcagacagatgactggcacccccaggcatgccgggctccactccaggccctggggtgagtgatggaggaccctgggtggaccctgg

SEQ ID NO: 431526 - DNA, 537 bp, Homo sapiens
tgcttaatgtcaatagttatgcctcagtgataagactatgcacatgtgtatagggggttgtaatctttcaatatcctggctttatatattttttgcctgcttgtgactatccttgcccaaatagtatcatggatatcctgaatgacatggcaaaaatcacatcataattgtcctccatctctgttgtcccctgacataaattcagtgctgagcaaatgagccttttggattgaacaggcagcattgtctccattattgcacaagttatttctattgcagaygcccaagctagtgcctagaacaggatactgttcaataaatatgagtttcctttctcttaacccacttgcttttctgctttattctaaaatttccaaactgtttgggaataaaataagtgactctgaaagcccatgccatcactagtttctatgtaacagctaactgcatactgcctttggatcaactggcaacaggctctcagtgacagaaacactggtctacagagttgccctggaaaatgggactgtgttttac

SEQ ID NO: 431527 - DNA, 537 bp, Homo sapiens
tgcttaatgtcaatagttatgcctcagtgataagactatgcacatgtgtatagggggttgtaatctttcaatatcctggctttatatattttttgcctgcttgtgactatccttgcccaaatagtatcatggatatcctgaatgacatggcaaaaatcacatcataattgtcctccatctctgttgtcccctgacataaattcagtgctgagcaaatgagccttttggattgaacaggcagcattgtctccattattgcacaagttatttctattgcagatgcccaagctagtgcctagaacaggatactgttcaataaatatgagtttcctttctcttaacccacttgyttttctgctttattctaaaatttccaaactgtttgggaataaaataagtgactctgaaagcccatgccatcactagtttctatgtaacagctaactgcatactgcctttggatcaactggcaacaggctctcagtgacagaaacactggtctacagagttgccctggaaaatgggactgtgttttac

SEQ ID NO: 431528 - DNA, 561 bp, Homo sapiens
gagtgcagtggttcaatctcagctcactgtaatctccacctcccgggttcaagcaattatcatgcctcaacctcctgagttgctgggattacaggcatgttccaccatggctaatttttgtatttttactggagatggggtttcaccatgttggccaggctggtctcaaactcctgaccttaggtgatctgcctgcctcggcctcccaaggtgctgggattacaggcacgagccaccacacccagctgaaaaggccctttttctgaaccacacatctcctgcattctcagcaggtgaggaagtaagctttaggaaaggwctcattgtcacttggggcatgggggtaaggattaaaaagaccacagattatccctctgctgtctgggagtactatggatccagtttctgactgtggtaggcagaataatggtccccaaagatgtcaggtcttcatctctaaaacctgaaaatgttatctttttaggaaaaagagtctttgctgatatcagtacattaaggatgttgagatggggaaattaccctggattatccaggtcaacc

SEQ ID NO: 431529 - DNA, 561 bp, Homo sapiens
gagtgcagtggttcaatctcagctcactgtaatctccacctcccgggttcaagcaattatcatgcctcaacctcctgagttgctgggattacaggcatgttccaccatggctaatttttgtatttttactggagatggggtttcaccatgttggccaggctggtctcaaactcctgaccttaggtgatctgcctgcctcggcctcccaaggtgctgggattacaggcacgagccaccacacccagctgaaaaggccctttttctgaaccacacatctcctgcattctcagcaggtgaggaagtaagctttaggaaaggtctcattgtcacttggggcatgggggtaaggattaaaaagaccacagattatccctctgctgtctgggagtaytatggatccagtttctgactgtggtaggcagaataatggtccccaaagatgtcaggtcttcatctctaaaacctgaaaatgttatctttttaggaaaaagagtctttgctgatatcagtacattaaggatgttgagatggggaaattaccctggattatccaggtcaacc

SEQ ID NO: 431530 - DNA, 594 bp, Homo sapiens
tcttccactttattcatacatatccatcagccttacaatccacattcttttcttttctggactactaggatgttagaagaaaaatacaggttctggcttatggctctttatctgtgaggttctgtacattgatcacacttctgagtcattttctataatgcaaagataacagwttccctttagttacctataacaaagaaatcagcagatacaagcagttaacacaaggtgtatatatatatagagagagagagacagagagagagagaagaatccacaacattctaaataaactaatgacttgataaagccattttagagagcatatgtcataaataaacaagcaaataaatacgaaaacaacaagcagtttgaatccaggcagacctgggtttgaaacttagctcaaccatttagtagtcttctaaatttaggctagttatttatcttttgagtcctttttttaaaatctgtaatataagggtgatactatctgttatacaggtttattattataaagattaattaaaatgtatggaggagctcatgacaatgtctagtatataatgttattgttatgaatatgaatatcat

SEQ ID NO: 431531 - DNA, 594 bp, Homo sapiens
tcttccactttattcatacatatccatcagccttacaatccacattcttttcttttctggactactaggatgttagaagaaaaatacaggttctggcttatggctctttatctgtgaggttctgtacattgatcacacttctgagtcattttctataatgcaaagataacagtttccctttagttacctataacaaagaaatcagcagatacaagcagtwaacacaaggtgtatatatatatagagagagagagacagagagagagagaagaatccacaacattctaaataaactaatgacttgataaagccattttagagagcatatgtcataaataaacaagcaaataaatacgaaaacaacaagcagtttgaatccaggcagacctgggtttgaaacttagctcaaccatttagtagtcttctaaatttaggctagttatttatcttttgagtcctttttttaaaatctgtaatataagggtgatactatctgttatacaggtttattattataaagattaattaaaatgtatggaggagctcatgacaatgtctagtatataatgttattgttatgaatatgaatatcat

SEQ ID NO: 431532 - DNA, 685 bp, Homo sapiens
gtatataatgttattgttatgaatatgaatatcattaataaagactatcatattaatgttcattttattatttgtgtgttcatggaaaaatcacttaagttcttaagcttcaagtgcctggtctatgaaacaggggtaactgcccttccctcaatgggtaaatgtaaggatttgatgaaatcacacgtgacaatggatggcccagtcaccagggcatagtaggaactcaaaataagccctttctttttcaggctattgagtgtattgtgctcctctccgcttcaatgacaaagaaacctcaaagaagaaaccygattttgatggcttctctttactgacatgttttaaaatagatggccctcaattttatggaaatccaactgacactacttaaaatttgcattgtagatgggagagacttcattttaccagacaattcttcagttagccaaagtgctctaggatttctttaaaaatacaattccctgcattcttctgaaatagaattcaaatgaggaaattgtcattaacccagcttgttaggacccctttattacatagattccacctgtgtgggtcaggactgttctgctctttgtgtgctgacttcagtattcagtctgcctgtcctgcactccggggtccacatcaatgccttcaacttagattgaaagtccactgggtc

SEQ ID NO: 431533 - DNA, 617 bp, Homo sapiens
ctactagtaagccttttgctacaaggaattgaccctgttttccagataagaaaacagagtcttaaaaaatgaaactagagtgagcttgggtgtccctctttttattgataacttcactgtagtgaagtttacatatcataaaattcacccatttcaattgtataattcaatgatttttagcaaattttcccaggtgtgtaaccatcaccataaatcattttcacacattttcatccctccaataaaatctctcatgcccatgtgcttttaacctgctagggatgatacagctttggaagggctgggggaaagaggaggcactccacacaggacagaaatgcatgagtctgcccaaatatctaggccagaatttgagactgggagcagagggctggtgtctaggggcagagatgatcattgtcattcagaacacatgaggctcctycctttacagcactgagagcctcacaagtgtgtggccagaggacactgcaattctgttacaactgcaactttaagggaagctgttttgaagaggaatcagtaaacatgctatatcctcgtggggatcctcagtcctgatacccagacagctggctgtggccaggaggggctct

SEQ ID NO: 431534 - DNA, 583 bp, Homo sapiens
ttatttttaccttttgtgtgaggtatttcactgatatgatctcactcaacccaccacgatgttatgaaggtagtattggttccctagttataaagaagagcaagctggggcataggaaggtgaagtttattgtccaaggtcaaaggttaccaagtagcacagctgagatccccaagattcaaactgaagtgtgccaaaagttaagacatgtgctctttccactgtggtatgaaacctttttgaatgaatgaataaaccatacgtggcagagtgtgataagctaccttaagagaggtccaaasgaatgctaaaggtgctcagctctgaaatggagatgacttctttcccaccaagtcttcagtgaggctgcactaattaccatttatataagatgcctgcctgcctctgctggcgctcagagagaagttttaatttgctggtgaaggagttgggggagggaatggagagtgctgtgaagtgtcccctccaaagtgagagggtttttttgttttttttgttttttttttcaggaaaacactggtcggttactaatggagaagaagaaaaagcagcaaagacaacg

SEQ ID NO: 431535 - DNA, 566 bp, Homo sapiens
tctggcttatttaatgtacttacttctgacaaactcacggctggatttcttatctgtggaagcaagttcctactgaaccttctgaagcaggtatgatttaaagacaatcttttaatggtaccacattttaataaatagaggctttaaaactgtttakttttacttctctttttgaacctctaacttttaggatattcaacaaacatttatttgatatctactgtgtatcagacactgttagacactaggaacatagcaatgaataaaagtaacaacaacaaacccccagagctgccagttattaagtttctactacatgccagcctttcaagcaggttgtacacacccaaaactacacatactgagcgatagttccatactggcaatatatgcatggcgcattgaaaacacaaaggaaaaggagggagatgggggcagggtgaaatccccttaggaagaaatagatactgcttgggacagaagttgggaaaggatactctagcggggacagcatgtgcaaagactattcgcatggaagcataaaagagcatagtcagtacttcaac

SEQ ID NO: 431536 - DNA, 566 bp, Homo sapiens
tctggcttatttaatgtacttacttctgacaaactcacggctggatttcttatctgtggaagcaagttcctactgaaccttctgaagcaggtatgatttaaagacaatcttttaatggtaccacattttaataaatagaggctttaaaactgtttatttttacttctctttttgaacctcyaacttttaggatattcaacaaacatttatttgatatctactgtgtatcagacactgttagacactaggaacatagcaatgaataaaagtaacaacaacaaacccccagagctgccagttattaagtttctactacatgccagcctttcaagcaggttgtacacacccaaaactacacatactgagcgatagttccatactggcaatatatgcatggcgcattgaaaacacaaaggaaaaggagggagatgggggcagggtgaaatccccttaggaagaaatagatactgcttgggacagaagttgggaaaggatactctagcggggacagcatgtgcaaagactattcgcatggaagcataaaagagcatagtcagtacttcaac

SEQ ID NO: 431537 - DNA, 566 bp, Homo sapiens
tctggcttatttaatgtacttacttctgacaaactcacggctggatttcttatctgtggaagcaagttcctactgaaccttctgaagcaggtatgatttaaagacaatcttttaatggtaccacattttaataaatagaggctttaaaactgtttatttttacttctctttttgaacctctaacttttaggatattcaacaaacatttatttgatatctactgtgtatcagacactgttagacactaggaacatagcaatgaataaaagtaacaacaacaaacccccagagctgccagttattaagtttctactacatgccagcctttcaagcaggttgtacacacccaaaactacacatactgagcgatagttccatactggcaatatatgcatggcgcattgaaaacacaaaggaaaaggagggagatgggggcagggtgaaatccccttaggaagaaatagatactgcttgggacagaagttgggaaaggatactctagsggggacagcatgtgcaaagactattcgcatggaagcataaaagagcatagtcagtacttcaac

SEQ ID NO: 431538 - DNA, 614 bp, Homo sapiens
tgttaattgttttcataatcacttcatgtttcctaatccacactgacatttctctttcctccaggcccttccaagtcttccctgaaaaactcaaagaagtacattgttataaaactcctatgggtaagattcaagataagagatgatgaataaaaaaggaaaaagaattccaatcagttgtatgactactgccttggaaatctggcaggagcattaaggtgacatttgaaaatattatcattctcaggagaggcaatgtgatagaaaggatacaccatgagacttagagttaggagacctatatttaaatctcagctccaccacaggctggctgcatgaccttgagataatcacttaatctctctgggcctcagtttcctcatttataaaatgaatggcccagatatgatgatctctaagattactcccagctctaaaattctgaaatgctaaaatggttcagttcattctgatggccaataaatgaagggtgrttcagactaccagagcaattcatattttatttatttttaaattatggaaaagttcctttggccagctatagaggcccaattcactgctggaacaaacgctatgacttcaaagctataaca

SEQ ID NO: 431539 - DNA, 592 bp, Homo sapiens
ttttaattttaagttccggttactgtattaccttcatcatcatcaccgccaacaatcccatcatcattcattatttatttttctgaatagcctatgagtttgctgggagtaagatcccttttgtcttatttttkaatccctaagagcactgaacacaatgcctcacatggcatagatcctcaataaacatggtgtgaaggattaatgataattcacatactcaacatttcagtccaactaaacaacttgaaaattctgtgaagacactgagatcctttccccacgtgcccttacacatgttgtaccttttgcatggcattctttgcccttctgtgctcatttatcgtgctctaagaagcagctcaaataatacaataaaatcttacaaaaatttaaaataaacctctccaatacccccaaatataaaataacagctctagtaaggcctttccagagcctctctggaaatctttatcacccccagcccacagccagaaacacacatccctcttctaatgcttaaagtaatgcattatgtctggttgtataattgtctcttcaaccagatcagggactctgtgttaaaatcacc

SEQ ID NO: 431540 - DNA, 592 bp, Homo sapiens
ttttaattttaagttccggttactgtattaccttcatcatcatcaccgccaacaatcccatcatcattcattatttatttttctgaatagcctatgagtttgctgggagtaagatcccttttgtcttattttttaatccctaagagcactgaacacaatgcctcacatggcatagatcctcaataaacatggtgtgaaggattaatgataattcacatactcaacatttcagtccaactaaacaacttgaaaattctgtgaagacactgagatcctttccccamgtgcccttacacatgttgtaccttttgcatggcattctttgcccttctgtgctcatttatcgtgctctaagaagcagctcaaataatacaataaaatcttacaaaaatttaaaataaacctctccaatacccccaaatataaaataacagctctagtaaggcctttccagagcctctctggaaatctttatcacccccagcccacagccagaaacacacatccctcttctaatgcttaaagtaatgcattatgtctggttgtataattgtctcttcaaccagatcagggactctgtgttaaaatcacc

SEQ ID NO: 431541 - DNA, 592 bp, Homo sapiens
ttttaattttaagttccggttactgtattaccttcatcatcatcaccgccaacaatcccatcatcattcattatttatttttctgaatagcctatgagtttgctgggagtaagatcccttttgtcttattttttaatccctaagagcactgaacacaatgcctcacatggcatagatcctcaataaacatggtgtgaaggattaatgataattcacatactcaacatttcagtccaactaaacaacttgaaaattctgtgaagacactgagatcctttccccacgtgcccttacacatgttgtaccttttgcatggcattctttgcccttctgtgctcatttatcgtgctctaagawgcagctcaaataatacaataaaatcttacaaaaatttaaaataaacctctccaatacccccaaatataaaataacagctctagtaaggcctttccagagcctctctggaaatctttatcacccccagcccacagccagaaacacacatccctcttctaatgcttaaagtaatgcattatgtctggttgtataattgtctcttcaaccagatcagggactctgtgttaaaatcacc

SEQ ID NO: 431542 - DNA, 592 bp, Homo sapiens
ttttaattttaagttccggttactgtattaccttcatcatcatcaccgccaacaatcccatcatcattcattatttatttttctgaatagcctatgagtttgctgggagtaagatcccttttgtcttattttttaatccctaagagcactgaacacaatgcctcacatggcatagatcctcaataaacatggtgtgaaggattaatgataattcacatactcaacatttcagtccaactaaacaacttgaaaattctgtgaagacactgagatcctttccccacgtgcccttacacatgttgtaccttttgcatggcattctttgcccttctgtgctcatttatcgtgctctaagaagcagctcaaataatacaataaaatcttacaaaaatttaaaataaacctctccaatacccccaaatataaaataacagctctagtaaggcctttccagagcctctctggaaatmtttatcacccccagcccacagccagaaacacacatccctcttctaatgcttaaagtaatgcattatgtctggttgtataattgtctcttcaaccagatcagggactctgtgttaaaatcacc

SEQ ID NO: 431543 - DNA, 600 bp, Homo sapiens
ctccccagtgagcgcttgttccagtttctgaccctgtgcattgttcttgttctcacctccacctggagggccatgtcaccccaaacactcatccttcaagttttaactaaaacggcattttactcatgcaacttctctaatagctctctatatattgctttatatcacagccatttgtgtgcttgtctccctcaagaatagggacttctcaaaaatcaagctacatgctgcaagtgcttgtaccyagagctctgaatctgacacaaagtaaggttcatacgcattcaatgaattgatgcaggctgatatttcctacacagttaccaaaaggaaaaaatttaaaagttggacatttggttacaaacatggaaagaatatcgcaagaaggcatagagtgtaggctgagcagcacagtgcattgtttagaagcaagaggtttcaatctaggctccatttccatctctcctacttattaatgataagagggtcacattattaagacttcagtatctccattttttcatccctgagtgaggatggtgatggtatcaatctcataaggctgttatggggattaactatgctaagaacttagtacat

SEQ ID NO: 431544 - DNA, 545 bp, Homo sapiens
acatcactttgtacaacctcagctgagaacacacatgtcaggtgactcaaagtttttgccattttgtgtatgtctgtcgatgaccataaaagcactatgagtactgattttggggttacaaataaattttagtgagtagtcaaatttgcaaatgtggaatctgcaaataataagaatcaactgtactattctcttcacagacgaggaatctgaggctgaaagaatttatgtcatacaactgcatagtggttaagttgagttgaaactgggtagatatgtctccatccaaagacccatgttatttctattattaacacagtaccccctccatgtctggttatcctargaaacagaagtggtatgaacggctacctcacagaaagatggtgaggatcaaattaagcatcttgaaggtgctttttaaaccacagagcatcatacaaacataaagggttgttataagaaggttcaattacagtgaggttatactatctaacactaagaccaactataatgaactccctcattctcccacagtagaaaga

SEQ ID NO: 431545 - DNA, 533 bp, Homo sapiens
tagaataaatgcaggtaccttcctgtattcagcaaggctttattgagttaagtccatgatatatgtaaagtcctgtggtagataccagagacagaataagttttggtttcttctgttaagtaagttttccattttgatactgaagaaaagcctgggaattctggattttcttaaactaaataaagataaatatttttcctagtgtatatcaaatatccaattggctataactaacttcttttctcaaagctaagcaaactgaggcaaaggacatcacggcaattgaaatgtttatatcgtccaaatcayttacttgggtgacatcttgtccctcccatagaacacatttacataaagaagaacttctttttttgttgttgattttattttctgttgatttttttttcgaaggtaggattatgaactactttaaggccctctgaaactaggaaggatgtgagtaaagtacaatgtcatatcattatttttatttgcattttttaaattactaatgaggttgaacacatttccac

SEQ ID NO: 431546 - DNA, 517 bp, Homo sapiens
agactgtctacacttgactcctaggtctgctactgactatttgtgagaattggagcaatctacttcacctctatgtttgttacccaacctggaacatagagaaaataataatgcatacttcatagggttgttatgtaagttaaaataattgataaaaaccaagcatttaatacaatacctggcacatagtaaatgctcaacaaatcccagtgacgacaatgatgagttaycatcatcattatcagacataaggcaagatagtttaattcactaaaccttgagtttcctggaaatatcatataaggaaagatagtttaattcactaaaccttgagtttcctggaaatattccactatggtggtgtcagagataagtagaacacacaccttgctttcagatggtttctattatagtggtgggaaataaagaacaagtgtacaaacaactattttatacacattttcttaagttcttcttaaactggaagaagagcagagcctttttcttacaatacttg

SEQ ID NO: 431547 - DNA, 654 bp, Homo sapiens
ataaaggactagtatccagaatctacaaggaactcaaatcagcaagaaaaaataatatctcatcaaaaagtgggcaacgaacacaaaaagacatttctcaaaagaagatacaccaacagccagcaaacatgaaaaaagtgctcaatatcaccaatcatcagggacattcaaattaaaaccactatgagataccacctcacgcttccaagaatggccattaattaaaaagtcaaaaaacaatagatgttgtggatgtggtgaaaagggaacagttttacactgttttcaggaatgtaaactagtacaacatctatggaaaataatatggagattccttaaagaatttaaactagatctaccatttgatccagtaatcctactgttaggtatctacccaaaggaaaagaagtgttcatatgaaaaagacccaggcacatagatgcttatagcagcacaattcacaattgcaaagacatggaacaaacctaagtgcccattaaccaatgagtggaaaaccaaaacgtggtatayatacaccacggaatactactcggccattgaaatgaatgaaataatgtcttttgcagcaacttggatggagctggaggtcattattccaagtaactcaggaatggaaaaccaaataccataaat

SEQ ID NO: 431548 - DNA, 468 bp, Homo sapiens
ttataatatttttttgtcctgacttttggagctttttttttaaatatatatattaactctctttgctrcagctattaggctctcctactacaatttattcccagaacactgcccagtggaagaatagccaaagtatcttctaaattataggattctagtttctccattattccaggatgtttgtatatcgccatttgcccaagagagctcctattcatatgttttccagcaaaatttaaaatagcaattaatttcattaagaaaattgcctgattcagattctagaagatgttgcatatctaaggaggtggtggattcaagtcaggtccttagtttttaaggggtgaaatatgtaaagaacttagggcccagcaaaagaaacagtctaaagtttggaaagataagaaacaatcacctgaagttaagtaaatgcagattaaaaatatgagtttagagaattttttaaac

SEQ ID NO: 431549 - DNA, 556 bp, Homo sapiens
atttccattgtcctatctttaagtctgctgatttttttcttttgcctgctcaaatctgcctttgaactcatctagtgatttgattttttttaattttaagtcattgtatatttcagctccagaaattctttttggtttctttttagttatttcccttattgatattgccattttgttcatccatcattttcttgattttcaccacatatttctttcattttttaagcctctttaagacagttgttttaaagtcttcgtctagtagatcagccatcacatctctttcaggaacaatttctgttgatyttttccttcaaacgggccattgtctcctgtttctttttatacattgtgatttttttttgaaacctggacgtttcaatcaaatgtggtaactggaaagcagatcctccaccttcccaaggatttgttgagttttgtaatttttttcaatgttgtatgttgtctttatgttaaggttcagcctgcagtacgaacataagttcttctcaggtttttgagcctctccctgggcatgtgtggtcatgttctaatt

SEQ ID NO: 431550 - DNA, 510 bp, Homo sapiens
acatgagccaccatgcccagctgagtttaccttttataaaggttaattttaaaattccacacaaaaagttttttttttcttggaactaggcagtgaagaggagatacataaaacagaatgtaattgtgatattccataccctacagctgcaaattaggtcacattaatactaaagctcaaatatgatggctccaaaatcccatactgagagggaatgccttctaggcactaacacttgagttcaggctggtactctactggcctaagctactctatgccctcaacagtattcctgtcggtctcttctgaactcaggtgacccttattatgccatctgattctgtgtcagtgagaagttatgtatccctacaattccactgggctgttcaagacacaaagtgttccagtagattgtcagattgaggcaaacaaagaatgcattttttttgrttacatgcccacactcaagaatggacttgcccaagctttatcatacttagaacatacaaa

SEQ ID NO: 431551 - DNA, 647 bp, Homo sapiens
gcatattgaagggtttagggataaaatataatgatatctgttattcattttgaaatgtataaaaataaggtggattgatggatggatagataggtagataagtttgtgatatataacaaaatgttgattgtagaatttaagtagggagtaacacaggtgttcaatgacatttctaataattttttatgtatttgataatgttcataataaaatattaggataaggcatagagaagagaaacaatgatatactactggaaaactgagtatcatttgagcatagcctttgttaaaggacttactagaaacatgtctgagaagtagaataaattttacttgtaagagaaattctgtgtcatactttgaacttgaaattatatcatgacttatataggaaaatgttcatgtgatgtgcagatcagatcgctttatttatttaatcatttttatactataattttcgataactatacactatactgaccatatgccagattttaatgctataatgaaaagagacacaatttcatggccrgtagagatcatgtatgtgatggatgcagtctcatgaatagaaaactaaaagataatgttttaggtattattttgaagaaaagacaagaaactttgtaaatacctaaattagat

SEQ ID NO: 431552 - DNA, 545 bp, Homo sapiens
gaatgtaataaattcttgtggggaagaaatttttctttaagtataatatcctggtaatgttttaaaatttaaaaatacatgcatttgtttaattcatctgtctacccatgttgactttattttaactaatttggaaaaaaatctgaagaagtaatgtattttaaagagcactgtatttgttttctgcatgcatagcacattaccaaaaactgaactgcttaaaacaacacaaatttgtcatctcacagtttccctcggtcagaaattctgggcgggaattagctgaaggtctcacaggtgaaatcactctgtcagttagactgcattttcttctggagcttggggtcttctttcaagctcacctgagagtttgcagagttcrtgtgtgtgtgtgtgtgtgtgtgtgtgtgtgtgtgtgtgcatacatgctctgctgtaaaactaaggccctctttctcttgccagctattggaagtggaaggggactttcggctcctggaggcatctcacagttcctttgctttatgagttcaccttttcttctt

SEQ ID NO: 431553 - DNA, 572 bp, Homo sapiens
aacctattgcagtaaccacgatggcagctggccctgacactctgggatcccatcagcctgattgccttcaaggtgcccacttaaaaggcagcatttctaactgtcattgcagcgaatatctgcactgaattcttcacagattctgggcatctcctccccaaatttattttcttacagctttggagatgggaattttctggggtccttttggggacacataattagaggtaaactgtctgtcatatgtgataaatccaccctactcttccaatcttcctaagccatttgatgcatttctccgtaccaagaaaattcaagcatcctaacttcatttagtgagagtaatcctttaatgaaacaagcaagcaagcaagcaakcagagtcactcttagatacttaacatttcaaattcaatttagaatctgtggtctagaatattcataccaacaaattcaagaaaaatattaacattatattccttccaatctgatccaacattcatgaggatctatttctcacatgttcttcaggtttctgacaatactaattggcaaaattttaagaattttgg

SEQ ID NO: 431554 - DNA, 572 bp, Homo sapiens
ttgaaataattacacacacacaaaagaaaaaaaagaataaataaggacaaataaagcctaaggaacatatggggcaccaaaaagcaaacaaatattttgaatttcggttgttccagaaaataaagagaaggtcaaaagagcaatcagaggaggttgctacctaatgataaagaattcatttcagcaaaagaatataacaattctaaatatatatgtacctaacatcagatacataagcaaataataatatatctaaagagataagatacaatataacaatacttgcaaatgtcatcattccactctcagcattggacagctcatctagacagtaaattaacaagaaaagattggattcaaactttayaccaaatggatctaataaacatttacagaatattttgtgcaaagctataaagtacaccttcttctcattggcacataaaacattttccagggtagactatatgttaggacacaaaacaaacctcaacaaattttttaaaaataaaatcacatcaagtattttctcagaccacagtggaataaaactagatgtcaaaaacaagagg

SEQ ID NO: 431555 - DNA, 608 bp, Homo sapiens
tacaccaaatggatctaataaacatttacagaatattttgtgcaaagctataaagtacaccttcttctcattggcacataaaacattttccagggtagactatatgttaggacacaaaacaaacctcaacaaattttttaaaaataaaatcacatcaagtattttctcagaccacagtggaataaaactagatgtcaawaacaagaggaactttagaagctatgtacaaatatatggaaattaaagaacatgctcctgaacaaccactgggtcaatgaagaaattaagaaaattttaaaatttcttcttaaaacaaataaaagtggaaacacattatatcaaaacctacagaacacagcaaaatcaatgctaacagggaacagtgtagcaataaatgcccaaatgagaaaagtagaatgatttcaaattaaccacctaatattcttgcttcttgagaatttagaaaagctagaaaaacaggaacaaactgaatattagtaaaagaaaggaaagaacaaagatcagaagagaactaaacaaaataaatactacaaaaacaatacaaggaatcaacaaatgtaaatttggttttttgaaaagataaacaa

SEQ ID NO: 431556 - DNA, 579 bp, Homo sapiens
tacccatttttttagaagcagtttatgttacaagtttgttctgtttggatgcaagcatgaaaaaatagtaataatcaccatttragttttttttactctgtaccaaacattctgacaataatcgtgtaagtactactattatccttattttacagatgagaagactgagtcatacagacattaagaatcttttttaggaattacatttcgtagacgggtcgattttgcttcaaataagagccactattcgtgtgtatacaggttgtactctaataggtacaatactaaagaggatagttaagaagagactagctgaactagagtactcattactaaggtaatacagattagataaaactaagcaatgacacctttaaaaggtctctaggaatgaagaatcaccgtatttatttatttatttatttacttattaagtaatatttattgaatacctactatggtccagggactggaaacatccttgccattctcatggaacttgtccagtaagagacacagacaagtgaaaggcagctacaacattatacagtgtatagaactgggatggcgccataacaa

SEQ ID NO: 431557 - DNA, 556 bp, Homo sapiens
atctcctcctggtatccctccagcatacagtcctcagaggacactgtcccagggcataaggcaagggagaaaagggcagagaagctatctggatgagcaaatggagaataattagtataggttttaaggtaaaggggatttagtagtatttgcaaatcagataccataaatgcataaataatacttagtactaactagatggggagaaggctatgttcaatttatatataccagttctgtgtcttattaatttaaatatgaaatrctgggcaaggtgcagtggctcatccctgtaatcccatcactttgggaggccgaggcgggtggatcacttgaggtcaggagttcgagaccagcctggccaacatggctaaaccccatctcttctaaaaatacaaaaattagccaggtgtggtggtgggcacctgtaatcccagctactcgggaggctgaggcacgagaatcgagagataatgtaaagtttgtttttcatgtttgttatgattatgtatttatgcaggatgtcaatgttacaaaaaattgtatctgttagaat

SEQ ID NO: 431558 - DNA, 480 bp, Homo sapiens
tttgctgtaggaatggactttacccatctaaattgtaatgtatatccagcattgtgatgacaaagacactaactataaacttagtaactttgttccttcactccactaatatttaattggtatgaaatagattattaatcagagttcatagtatattttgctttggctttgtccctgtagacctatttaaacaagacaatctttgcaattccaacaacttcatttctaartacaataccaagcatgtcccttatatgataattacagtgttaggaactgatggcatcaaccagaaagagtgctaacaacgaaggaaagagtgtgtaggaaaccccaaggaactccaatacttagagaaacacagacaaaaatgcagcttgccaaaacaactgagctagatgaaccagaaacataggagtaatgtgacatcataaaaaccaagtgaaaaaaagaagtggtccacattttaaaatgctgcat

SEQ ID NO: 431559 - DNA, 479 bp, Homo sapiens
tgtaatctacataataatgtattccaaaaagcacccatctggaataggagaagagctagagttagtccacatagaatgagcaagactagataaaggtatttcactctaaatctccagagaagggttaarcagaacaagctctaccattgcacacagacaatgaacacagaaaaagaaaattatgacaaatacacatgacagttgagaatatgagtttacatgaaatattctcacaatatctgtagctacatctcactgaagatatactctgtaactggaaatttataaaatttactctataatcttgatagatgacaaacattacagcctttagttggaagacattcctttctcactgtgaaatatacatcgctttaaaggctgacagcttttactctgaaaaatgagtcatttagcattgtttcatttctttaaaaattaaacaaatggtatttttgtgaattctaaataggccattt

SEQ ID NO: 431560 - DNA, 597 bp, Homo sapiens
gcgtggctttaggggaagggtagatttcctttataattaattctgcttgtttaagaaaccattaagattagtttacagactatccaggcaacacggggatgatgttgaaagcgtaatggtakgaagtaaaatgcagcattttgagaaacgattgatttggtcatttaatgttataatttttaattgagctttttaaaacttcatcttcatataatggaaaatgctgggaagatatatagatgccaagtatcagttcatttgtattcaaggaaacactaatcattcctagccatttttccagctccagtagccttagaagcacaccgagttcgtgctatggtttttagggtgaagctgtttgacaatctcattttaacttttatcctaaaatacttcagagtttctttgtatttagttaaaaatctaaattattctttaaagcaaattttccaaagtaaaatagaagtctaaaactgagtctagattcaaaatagaatagagtaatactctgatttgaaaatgatagaactgtaaaactgtaaaactaagggtctccttaaggaatcaccggtccccactgtcttattttacagatgt

SEQ ID NO: 431561 - DNA, 615 bp, Homo sapiens
acaatcactgcatagtcaagttctcctctccctgttccataaggaccatatctgtttttaaggaagtaaagtttactgtttggtaattagatttacaagactctggaaaaaaaatattaaaaacaaaagtgaaaaaaacatttaaaaaatgatattagaaacctgttctactacactgcctccaataagtgtgtttaaaaaccgcaaaaaaagggcttctttccattcaatatccaaatgtagaatcattctttgcagacaatctacagatgtctagtaactttttccttaagccccgctcggaaatttgcttcccagaccggagacctgcaggtgctgctgcgaagatgacgcaaccagccaaaccggttaaggatttgactgcgattgagaactagtgaggacctctaggaacccaaccttctgcgttcatacacgcgctcgcgcgcacacgcacgcacacacacacacacacacacacacacacrgcaagcaagccatctccggtcacaccccagacaccgccgtcctcccgggacgggcgctcctccacgcgtgctccttggacgcgccagctccccctccatcccgggaccgttgtccttttccctccgg

SEQ ID NO: 431562 - DNA, 626 bp, Homo sapiens
cattttcattgagatttttggatttttagaatttaattattttgctgtgatttttttttctaggtacagaaatagtaaagccatatacacctgtatctggttccttactctcagagttcaaggaaccagttcttcccaacaataaatacatctactttttgataaaaatctatcccactggactcttcacaccagagcttgatcgtcttcagattggttagtatttttacattttttaaacctcatttgtgctctagattggatcacattgtcctctagttatctccatgtaggagtctatcagatatctttaactcaacatgtctacaaccaaagttatcttctccttgtcctacacagcgtggccatgctccatattccttatttttattatttgcagcatcactgttcatccttgatccaatctggaaactcgagtcggccttgattcttcccactttctctttcccagtccagtcagccgctaagttctgttgagtctacatctcagtgactttttcagctacctcttctgccactgtcttayagtaagccttcatcatatcttcattggcttctgtttccttacaattgaccctactgcttcgcagctttgaaacctctga

SEQ ID NO: 431563 - DNA, 613 bp, Homo sapiens
atgggcactgatttctcaactgtgttgattctagattggtaagtgrcatgctccaagtatagttgactgcatttctgatcttgctttgtttttatgggaattaaactcagaatagcccttcttaataggtcttttcaaaaatttggtagaagagaagttggtgtgttaatcaacataagattttagaatgcatttctatttcaattttctctcctactaatcctgttactgtggttaataatcaatgtgtaaatagtgaatatctgttctttactctgtaccaggtaagacaaatatatatggactctgcttttgaagtacttagaatttagtttagcaatcaatcctttattgataatttgtggataagtactttgcagtagtttgtaaatttcagacttcagatggtttggcaaaatagtggtgggaaattatatcataaaacctcattattaatttgactgtaatgatataattcagacatacttaggggcctaatgagtatccttaagactacttacatatcttaaagactgataaatagtctgcaagttaagtatttatactgttactcctcagtgttttaaattcagctagttttggcttcttagtt

SEQ ID NO: 431564 - DNA, 591 bp, Homo sapiens
tgtttttcttttccctagactggatgttgaatttgttctctcagcacctatttctgaatggaatggcaaacagggacatatttcaccagctcttctttctgaatttttgaaaagaaatttggacaaatccaaagttctcgtctgcatttgtggaccagtgccatttacagaacaaggagtaaggtgagtaacagtgtagtaggaaacagactgcccaacactgaagtgaagatctttcataacaagcatctctcagttcttcctgtttatatgaaactgcactttaataatcttacagttttagaaaataacaaagtctttaaatcttcgtatagtttgagttggaggccaggattatgcatattgttagataaaacataraagtaagttacagccagcagtcagtgttctctgctcgtgatggctgccaatattgttacactcacaagattggtgccacaattcttatttgggacattaggcccaacctcttcttccatcaaagcttcataatatatagtaattaataaggaatgttcatctcattgtagcttttgatcttcattctctgtaactgagtgaaagtaaata

SEQ ID NO: 431565 - DNA, 554 bp, Homo sapiens
ggcctttagactccacttttttagactccatatcaatcactcaaatttaaacgttttgttttaattctagggatccctcaatgtagtacattaagtattaaacatccatactattttactactggatttaaggactgaagaggagtattaaaataygagttactttgctcatcatttatttaaaatatctataatttaaaagccctaagattgattccctttttcaattacaggtaatgatttaatgtgtttttctccatctgctaagaaatctttactaataaatgagtgatttctaacataagtctattttcttcattatctaataagataacattgatatgtaactacaacatccaactggcatcagtaggaaatagcagatgttaaaagattcagtcttgagaattaaatactgtcattctttgcaaaattataactaaatataaatgtgcaatttaacgaaaagaaaaatgtattctttgtaagccccaaatatttataatacaatcaagacatttgtagatggcacctgttttagattccaacattca

SEQ ID NO: 431566 - DNA, 532 bp, Homo sapiens
ttattgtaaatctttattcaagctgtaaattggatcaaacaaatttacactaaaccctggatatgcataagatcaatgtttaccttactttgtacattatggatatatttattcttataatatatagaagatttgtcttccagtttctaaattcctttggaaaaaatgaattgagttctaccactacattaaaaactttaatgatagccagctttataaagatgacaaaatattatgcaccttacaaaaaggtggaaataacctattatcttatttaaaactcacagatttaactcttatagaagtagacaacgtaagtttaaaaatgtataaaaaccagtattttaaaatttttgtctatgcactcacaacttgaggcatagaaagactacttctgacctcaactttgatwctatgtgcctgtcttctccccattcaactaaatttgtgaatatcatatgaaatgttgagaaattatatatgttttatacaaataactggcatgtaagtattattacctcagaatttcaaa

SEQ ID NO: 431567 - DNA, 574 bp, Homo sapiens
aaacattttcttcaagaatcttctctcctcatataaaaaaaaactcagcaaaagtaacatttatgttaaaaagaggcattactggaaacaactgggaagcatttgctggtgccaggcctgtatctgcagcatttgtttcctgcagagtgtgatgagataaagtgagctcttttgtccacttgatccaaaatacacatgactcaaaaccgtcttagtgcagggcttaatcaaagaygggaccaaacagtgaacacacagatcattcccaacaagatctttacatatgtgactggctgtggcatggagggtataatccagctgaattgacttgaactccctggaggttataaaaatgaatgaactgtcaaaagcagttttacttgtgtgtttgaattatgcaattccaaattcaaaaaataaaataagatagtctacattgaagtttattaaaaattggaagaagtaaacattactggcttttaaaaatcttctcacccctaaaacatatttcactaagggtagcacataatataaacatgaccaggggtttatctctttgatgctagccaaaaag

SEQ ID NO: 431568 - DNA, 552 bp, Homo sapiens
agcatgtgggtttcttcaagatactggcttcacagcctctttagtgggctcacatttataaaaatacagtcatatagaatgtaattgtaaacctatataacatggagtttaaaagcagaaaatttagaattacatgaacctggaattcatttttgggtatatactagctatatgaccttagacaaattgtttaatgtacttaggcctcagtttccacctctgcacatagggataatgatatctagtttactcagctgaaagacctatgtgaattaatgttaatgctgaaacacttgggctgggaratcccagactcctggcatcatggaggcagctcctggtcctgtaatagtagctgatctgatctagacaggtgtttctggatggcccaccttttctgtgttctaaaaggacaactaatatcaaccaatatttgcccatactttgctctgcccattccctccagcttaaagaagatgtcccagtaaagggtcgtcacagcacaaagctaccctgaatttgtcccttgaatctcatccaaacccattatct

SEQ ID NO: 431569 - DNA, 505 bp, Homo sapiens
taattcattttccaagtatgtatttaaaaataggtaaccatttccatttttctctatgtcctactcaatcctaacattatccaatcttcatcattaatagagctatgagtttttcatcaaaataagtagacactaaaattatcattaaaatatacctctaagactctgtggataaatttgagattataaaatgtttcttgctattcctgtaaatgtttaaagcatcagattgctacaggagcttgtttccaaatttgcctttcttgttcaatcaaaggaagggataacactatcgaagctccaaatattcttytgagttgtattgcataacattttagggttccttttttaagttagaggtttggaaatttttgtccaagatcagttccttagcagcagtgtctagataatataacctcatggtttgatgttacaagcctatatctttgcataatgcctatacaaaaacttatctttcaattagagttgacatgtttaaattttg

SEQ ID NO: 431570 - DNA, 548 bp, Homo sapiens
aaattccccaaaactgatattaggcatatatgtttctgtaagaatgggaaaaatcaaaaattaatagataaatattcataattcattttccaagtatgtatttaaaaataggtaaccatttccatttttctctatgtcctactcaatcctaacattatccaatcttcatcattaatagagctatgagtttttcatcaaaataagtagacactaaaattatcattaaaatatacctctaagactctgtggataaatttgagattataaaatgtttcttgctattcctgtaaatgtttaaagcatcagattgctacaggagcttgtttccaaatttgcctttcttgttcaatcaaaggaagggataacactatcgaagctccaaatattcttctgagttgtattgcataacattttagggttccttttttaagttagaggtttggaaatttttgyccaagatcagttccttagcagcagtgtctagataatataacctcatggtttgatgttacaagcctatatctttgcataatgcctatacaaaaact

SEQ ID NO: 431571 - DNA, 627 bp, Homo sapiens
tggggagtaaatcaatgaattgagtgaagtgaaagaaacactcaagtatgttctttctttaactgaaggaagagtcatcttagtcattttaggaagagycatcaaagggacacaagctcaaataaagggaataagttattatttgcttgtctctggtgaagatgcattctatctgtgaaaactgatttataccctaataaaaacattgcttctcttctctaggaccataaacaactgtagttttgttttatttcttttctcatagcattaatgattttgacatggcatagattatatactaaatggaacataatgcaccaaatgtaatcatcactcaagacaaacaaatattgtcttcacatcgaggtttaggagaaaccacaaaacagcatattaaatattcagcatatttcctctcttcccttcatcagaaattgagtactgcattggactatattcaaagtgaaaagttggtatgtttttcccaataacacacctgctctctaaatagagctagcttctattttgagagacataactgagatcacatcctacaataaatttcttgtttccttgggttgtgttacattgtactgccaggacaagtgagctatatcaagtccaaga

SEQ ID NO: 431572 - DNA, 504 bp, Homo sapiens
ttttaactttcttaattaatttctttatgttagcaccagggatttatggtgtttcttcagacctctgtttatttgtgcataattcacaatgacaatgctatggagmagtgagtgaccaaggtgggcccataggcatggagaaattatggatgtcaaaccctgggcagacttcctccctggtcagggctagtggagagggaatgggtttccttgttcctttctggcatggagtaaatcccaagcaaacagaagcctaggggaaaagggaagttggtggtctagaaccagccttatttgctcttttctttccctcttctcttcctctctccctttctctcttctcttgctatttcagtttagactcctttacatactcagaacagaaatttgctcatattagttcccataatgatttaatgttaaaatccagagattttacctcagtatggtggcatgtgcctgtggtctcagctactcaggaggctgaggctggagaattgcttg

SEQ ID NO: 431573 - DNA, 504 bp, Homo sapiens
ttttaactttcttaattaatttctttatgttagcaccagggatttatggtgtttcttcagacctctgtttatttgtgcataattcacaatgacaatgctatggagcagtgagtgaccaaggtgggcccataggcatggagaaattatggatgtcaaaccctgggcagacttcctccctggtcagggctagtggagagggaatgggtttccttgttcctttctggcatggagtaaatcccaagcaaacagaagcctaggggaaaagggaagttggtggtctagaaccagccttatttgctcttttctttccctcttctcttcctctctccctttctctcttctcttgctatttcagtttagactcctttacatactcagaacagaaatttgctcrtattagttcccataatgatttaatgttaaaatccagagattttacctcagtatggtggcatgtgcctgtggtctcagctactcaggaggctgaggctggagaattgcttg

SEQ ID NO: 431574 - DNA, 382 bp, Homo sapiens
tcaaatctgtaatagaagcactttgagaggctgaggcaggcagatcccttgagtccaggagaccagcctgggcaacatggcaaaactccacctctacaaaaaattcaaaacttagctgggtgtggtggcgtgtgtctgtagtcccagctagttagcaggctgaagcaggaggatcactccagcctgtgaggtcaaggctgcagtgagccaagatggctcactgcactccagcctgggtgacaaagtgagacactgtcaaaaaaaaaaaatcacccccmaaaacaaaacagattttgcaggaacccacccaagaaaaagtgttaggaacaacagaagattctctctctctctctctctctctctctctctctgtctctcatat

SEQ ID NO: 431575 - DNA, 638 bp, Homo sapiens
tgctcatgttttcctcttcagttctcaaaagagaacattttaagcttcagaagcatgaatgaagcaggcatgggagttggaagtcttttgtgttattagttaacataactattcctttgtacagtgcaggatttgggaagaaaaaccttaataagaagtttttgtctaaaccattaaaacagttatcatcagttctcagtgacaattgttatatttaagaatccaaacaaatagacaaaattggtgtctgccttgttatcccaaaaataattgaggtcttctcctgataggatacacttcctatatcctcataaactttatgggttttgggtcaaagctgaaatcaataataaaaarcccatgtagctcaactattgttgctagaaaagacaatatgaaaatatttaatcttgacttggttgataatgtcatagtgtgtaaaaagaaaatcataggtgagtgggtggggcaatcactgaagtcctttcatattattcatattattgacctcatgctttttggagaagggactggatcccaatttcaataccaaatgaactacactgagctgagatagggatgacgggaggtaggccaatgttagctccatttgaaaatgaagtaaatgtttggaattt

SEQ ID NO: 431576 - DNA, 579 bp, Homo sapiens
atgtcctttcctcactttttaatgggattattttgtaaactataaaaattaagttgttttacatccttattctttatatttaaaacgtgattaatatttctataattcttttccataaaaaggaaaacataaattctcactctacatagttaatcaaattcccattccccgcttccgtagcattttatctatcctaaagaaccaatctacaggctgtttcctcacccaaaagcactactaggaattcttatatttatgtrtggcttcattcaccatgcaacaatcattgttgcatcgattttctgtagtaatctactaactggttgcagtctatgttttcagctcattttgcataaaaagaaactgaggttcagaaaggttaggtgagccaatggctagtaataaaaaatgatgtcagtagatgtttactgaatcatatcagatgttttttccccaaaccttatttgaagcaaatttttttgtctgtttgtttgttttttattgtggcactgagagtgtccccggatttacgtttatcatttcagatatcagattcactgaaacttctaaaagtttcac

SEQ ID NO: 431577 - DNA, 598 bp, Homo sapiens
tttttttttttttgagacagagtctcgctctgtcgccyaggccggactacggactgcagtggcaataatgatttttgtctttatatgtaagtactgtagttggcatttaaagatgctaaataaagtgcagttccaataaatatattagaaagttttttctcccaaagatctttgataaaagattattatatatttaaaagagaaaaacttcatccaaagattctgtataggtttgttggctaaatcttctgagaactcaccacatcctcatagtgaaagcatgtttacattgtcctccacaaatgctaaggagcagttactggtgtttttatacaagtatgggctcaaaaagagtggttcctattttggtttaatttataaaccagttgatacataagtagtttcttgggggaaaatatattacttacacattttctatgtagtaaacatgtatatgtatatgtgtgggtgtgtatctaactactttgttggagtgattcctatggtttggagctgcagggcccaagttgatgcaaaaatctacatttttgagtaaactccccatgactagagtaaatttctccagtatttgagagtt

SEQ ID NO: 431578 - DNA, 564 bp, Homo sapiens
tgttatatatgtaaactcatgtcacaagggtttgttgtacagatttttaatcacccaggtactaagcctagtacccaacagttactttttctgatcctcttcctcccccaacacttcaccctcaagcaggccccagcatctgttgttcccctttttgtgtctatgttttctcataattgagttgaggacatgatctctttctttttatggcggtatagtgttccatgttgtatagataccacattttctttattcaatctgccattgatgggcattttggttgacttcacgtctttgctattgtgaatgctgctgcaatgaacaaacaygtgcatgtgtctttatggtagaatgatttatattcttctgggtatataccagtaacagtatggctgggtttaatggtaactctgtttttagctctttgaagaattaccatcttaattaccacttaccagccttccaaaatagctgaactaatttccacttccaccaacagtgtgtaagtgttccttttctctacaacttagacagcattctgttattttctgactttcaataata

SEQ ID NO: 431579 - DNA, 598 bp, Homo sapiens
tttttttttttttgagacagagtctcgctctgtcgcctaggccggactacggactgcagtggcaataatgatttttgtctttatatgtaagtactgtagttggcatttaaagatgctaaataaagtgcagttccaataaatatattagaaagttttttctcccaaagatctttgataaaagattattatatatttaaaagagaaaaacttcatccaaagattctgtataggtttgttggctaaatcttctgagaactcaccacatcctcatagtgaaarcatgtttacattgtcctccacaaatgctaaggagcagttactggtgtttttatacaagtatgggctcaaaaagagtggttcctattttggtttaatttataaaccagttgatacataagtagtttcttgggggaaaatatattacttacacattttctatgtagtaaacatgtatatgtatatgtgtgggtgtgtatctaactactttgttggagtgattcctatggtttggagctgcagggcccaagttgatgcaaaaatctacatttttgagtaaactccccatgactagagtaaatttctccagtatttgagagtt

SEQ ID NO: 431580 - DNA, 598 bp, Homo sapiens
tttttttttttttgagacagagtctcgctctgtcgcctaggccggactacggactgcagtggcaataatgatttttgtctttatatgtaagtactgtagttggcatttaaagatgctaaataaagtgcagttccaataaatatattagaaagttttttctcccaaagatctttgataaaagattattatatatttaaaagagaaaaacttcatccaaagattctgtataggtttgttggctaaatcttctgagaactcaccacatcctcatagtgaaagcatgtttacattgtcctccacaamtgctaaggagcagttactggtgtttttatacaagtatgggctcaaaaagagtggttcctattttggtttaatttataaaccagttgatacataagtagtttcttgggggaaaatatattacttacacattttctatgtagtaaacatgtatatgtatatgtgtgggtgtgtatctaactactttgttggagtgattcctatggtttggagctgcagggcccaagttgatgcaaaaatctacatttttgagtaaactccccatgactagagtaaatttctccagtatttgagagtt

SEQ ID NO: 431581 - DNA, 568 bp, Homo sapiens
tcctagaagcctgggtggcagtggctatggtatgagattcttctgtcttttaaaaggggaaggaagagtgggaaggactgcatctcatagtttgagtacccactcagctgtgatacaatagaacaccaggtagacttctaaggtatttgacactagtccctgattcctgaacagaatctctggaccccacttggggacttcaccaacgtgaagggaaggacacagccctggctggctttgccagctgctgcttgtagarctccagggacttgagtgaacataagcagtagccagcgagtggttacagcaggacttgggtgagacctagtgctgagcttccttcaggtctgactcagtgcagtcatagtagtggtgaccacaggggtgcatgtgtcaatccacccccagcgttaggtggctcagaacaggagagagagagactctgtatgtttgggagaaagcgagggaagagaacaagagtctctatctggtaatccagagaagtctcctggatctggtcaaagatcatcaaggtgctcactctatgagtctataagaaccacagagt

SEQ ID NO: 431582 - DNA, 568 bp, Homo sapiens
tcctagaagcctgggtggcagtggctatggtatgagattcttctgtcttttaaaaggggaaggaagagtgggaaggactgcatctcatagtttgagtacccactcagctgtgatacaatagaacaccaggtagacttctaaggtatttgacactagtccctgattcctgaacagaatctctggaccccacttggggacttcaccaacgtgaagggaaggacacagccctggctggctttgccagctgctgcttgtagaactccagggacttgagtgaacataagcagtagccagcgagtggttacagcaggacttgggtgagacctagtgctgagcttccttcaggtctgactcagtgcagtcatagtagtggtgaccacaggggtgcatgtgtcaatccacccccagckttaggtggctcagaacaggagagagagagactctgtatgtttgggagaaagcgagggaagagaacaagagtctctatctggtaatccagagaagtctcctggatctggtcaaagatcatcaaggtgctcactctatgagtctataagaaccacagagt

SEQ ID NO: 431583 - DNA, 621 bp, Homo sapiens
ttatagaacaccaagcagatttaacccagagaagactacaagatgtttaacaatcagactcccaaaggtcattgataaaggaaggatcataaaagcagcaagagaaaataaacaaattacatacagtggagwtataacacatctggcagcagacttttcagttgaaaccttataggtcaggaaaaaatggtatgacatatttaaagtgctgcaggaaaataacttttaccctagaatagtgtaactggtgatgatatccttcaaacatgagtgagaaataaagactttccaagacaaataaaagatgctggatttcatcaatgctaggaggatattaatgagcaatatataatcacctgaagatacaaaactttctggtaatagtaagtacacacacacacacacacaaaaacagaatatcatgacactgtaactgtgccatgtaaagtactcttactctaagtattatagaaagactaaatcataaactaatcaaaaataacaactacaacaactttttcagtcatggtcagtacaataatacataaatagaaacagaaagttaaaagttggggaacaaagttaaggcatagagtttttattagttttctttttgtttgc

SEQ ID NO: 431584 - DNA, 551 bp, Homo sapiens
tgcagagtgttaaagagtgtcttgcccacagcaggctctgagtcattgtttrttgaatcaatgttatttaaaaattcaatatagactgctaatcaattttaacttacactcatttcctatctctttaagatcttgcagaacgtttactgtttaagatcttgcagaatataacattatgtatttttatattgtgcaaactaatgataatgcaatgtctcatcttctaacatgcagcaaaggtaacatataaaatactttaatgcctacatgtgaattaatggaaaggaatgaattaatcctcagtgtaaatatatatatataggattacaaccattcatttattcttaaaaatattttggcttgtgaaccatagctttatgtttttcactggaaagttgtaaaaaaatttaatctttttttgcactacacttctgcgactttccacctatttgcccctctttcagatataaagctgctgcatcatcttgtgtggttaaagtgtgaccaaatgtcatttagcaaggagagaggtgaagtgacatgaagcatga

SEQ ID NO: 431585 - DNA, 629 bp, Homo sapiens
ttgctttatccagggggtaaatgtacayagtctgaactattgatacagacaggagacagggaaatactgggtagaagagggtggttcccgggcaaaggccccaccctcaagcctggaaacttgcggccctaaatgagaacaggcattcctgttttcatgcccaaaagttgccttttggcccaccaacccctgcatcctgtacccatataaactccaaacccccagcttcacaagcagacgaggagatgaacagaagagcagaagaacagcagcagagtgcagcagagggaaggaatcgagcatctgaacatccggaggagttcagctggcgatggttacagagaagatcagctactggatggccaaactccaggggaatatcatcttctcatggtcaaatgccaggggaagatcatcttctcactccatcccccttcctgctccccatccatcccgctgacagccacctctaccactcactaaaaaccctgcattgacccttcaagtccgtatatgacccagttctttctggacgctggacaaggacctggataccaagagggtactgagctggttaacacttaagccacccaggacagcaaggctaaaagagcgcactgtaaaacaca

SEQ ID NO: 431586 - DNA, 629 bp, Homo sapiens
ttgctttatccagggggtaaatgtacacagtctgaactattgatacagacaggagacagggaaatactgggtagaagagggtggttcccgggcaaaggccccaccctcaagcctggaaacttgcggcyctaaatgagaacaggcattcctgttttcatgcccaaaagttgccttttggcccaccaacccctgcatcctgtacccatataaactccaaacccccagcttcacaagcagacgaggagatgaacagaagagcagaagaacagcagcagagtgcagcagagggaaggaatcgagcatctgaacatccggaggagttcagctggcgatggttacagagaagatcagctactggatggccaaactccaggggaatatcatcttctcatggtcaaatgccaggggaagatcatcttctcactccatcccccttcctgctccccatccatcccgctgacagccacctctaccactcactaaaaaccctgcattgacccttcaagtccgtatatgacccagttctttctggacgctggacaaggacctggataccaagagggtactgagctggttaacacttaagccacccaggacagcaaggctaaaagagcgcactgtaaaacaca

SEQ ID NO: 431587 - DNA, 629 bp, Homo sapiens
ttgctttatccagggggtaaatgtacacagtctgaactattgatacagacaggagacagggaaatactgggtagaagagggtggttcccgggcaaaggccccaccctcaagcctggaaacttgcggccctaaatgagaacaggcattcctgttttcatgcccaaaagttgccttttggcccaccaacccctgcatcctgtacccatataaactccaaacccccagcttcacaagcagacgaggagatgaacagaagagcagaagaacagcagcagagtgcagcagagggaaggaatcgagcatctgaacatccggaggagttcagctggsgatggttacagagaagatcagctactggatggccaaactccaggggaatatcatcttctcatggtcaaatgccaggggaagatcatcttctcactccatcccccttcctgctccccatccatcccgctgacagccacctctaccactcactaaaaaccctgcattgacccttcaagtccgtatatgacccagttctttctggacgctggacaaggacctggataccaagagggtactgagctggttaacacttaagccacccaggacagcaaggctaaaagagcgcactgtaaaacaca

SEQ ID NO: 431588 - DNA, 612 bp, Homo sapiens
aatgtttataccagctttaatcataatagcactaaataactcatgtgttcttcagcaagtgaatggtcaaacaaaacatggactattactcagcaataccctagaatattattcattggtaaaaggaagtgcattgtcgagctggctgaatctccagacaagtatatggtgtgaaaaattccattccaaaaggtgaaatactgtaggattccattctttgtaacattctttaaatgacataattagagaaatgaataacagcttattgatttctagaaatgaaggggggattgggagcaggagggaagcgagtatggctataaaagggcaacagaaatgatcttttwgataatagacatgttttgtatattgactgtattactgtcaatatcttaattgtgataatgtgctgtagttttgtaagttattaccattggggtgtactaggtaataagttaatagtatttctctattttttcgctgcatatttcatactacatataaacctataattgttttcaaataaaggctaatttaaaaatataaataacctttttgtttttaaattccgggggtgagccaggggaggggtgtatgtaaaagaaaatccag

SEQ ID NO: 431589 - DNA, 629 bp, Homo sapiens
cctttttgctcttccagaatacagtggacactattttgctttagagcacaagaaataatcatttcatttcattctgcctagcatttagagaaaacccttctgaaattagtctgcaaagtgggtataaaatatgtataaaattctaaaaaagggaaaaaggggaaaaattaggaaaacatgttttcatttcaagtgatttagtcaacagttacgatgttttaccaaaaatggttatactataattatgccataatttawtttgatttttaaagaaatttatctttagaaatattttcagatttatcttttaaatgttagtcaaaataacaccttaactttattttgttatgacagattgttttgttttttattagatacctactgaaaccctatagtccttagagatttttggtttcagagctgatttactaaaaaaaaaaaaggaccaagggagtatgagattatttaatttattaagtaaattagtagaaaaaccaaagttgattttcaataatttataagcaaggaaaaaggagaatgaaaaagtctatatccatgttcttgtttacatttcaaaacaaattagtcataagataattgtttccaaatttgtaaagtaaaacaacaac

SEQ ID NO: 431590 - DNA, 588 bp, Homo sapiens
taacttcagtgttatattttaaaagttgtttattatatgttgaaatagattttcgttttcatgtaaccaaagtattgatttttatatcttaatttcacaaaaagacaagttattgtcttcttttttatttctaacagtttttcagtcattattctggattttcaaacatgatatatatttcttgagaacaattttgacttcgtcttactaaatttctacatttttctctagtatcattttcgtgacttgaaacatttaytattgctttaacttaaataagaatttttctggcattaatttgctatgcatgatgatcatgttggatttgaaatatagtcattttttcaaagaaaggtacacacctattgtttgagttattaatttaaaaatctggaatgaatagtttattacaagatttttcagctttgtgaaagtgttattatagtttttacagatggataaataaatccgatagtttctaatattatatcatacttacatttctagaatgatccctatttgctctaaatgaattaatgctatgcagctatattacatctgcaatacttgtatttagcattttatatt

SEQ ID NO: 431591 - DNA, 519 bp, Homo sapiens
gatgggtttatttcaagagactgaattctagtccaaattctcctgtttgttggctttgtaattttgactgaaatactccttatgccttggctgccttatttgtgaaattgaatattgatgacattcttataagtttgtgtggataattttggaaaatttcataaaattttattcaaamcattttggaattattatttgaattaatataaacacaagaaaactgcttgaaaggaataaaagataatattcagcatgaaaagaaactaagcttgtttacttttagttaataatacagcaaaggttataaaaatacccatgatatatcattcaagtgggtgtgttacagtacacagtccatagtcactcttaacttagcatttcatgacctcattcccacctactagtatgttttttcagtccacctgctaaactaatgtgcaaatttgttcttgttaatcagtttaatcaatctatagagaagatgaaaaatgtttaatgatgattaactttactcctcag

SEQ ID NO: 431592 - DNA, 493 bp, Homo sapiens
aacaacagacactggggtctacttgagggtgaaggttggaaggagggagaggwgcaggaaagacagctattggttattgggcttaatacctaaatgatgaaataatctgtacaacaaactcccatgacatgagtttgcctatgtaacaaaacttcatatgtacccccgagccttaaataaaactaaaagaaacacaaaagtcacaactcgaccagttgtataaagatagattggaggaaatgcagacagttactagtatgttgaaataacccaacaagagcaatggtggctcaacacctggggtggaagtgaagagaggaatatgtgtttgaaagcaaaatccacaggatttaatgatcaatacttattggcaattttaattctctaatttgagcagagttgtttgggtgttgaagtggaaatgttgtagggattagataatgagtttagtttagcaccaatctaactagaggtgacatgtttagagcaatag

SEQ ID NO: 431593 - DNA, 544 bp, Homo sapiens
tagagtcaacagaaaaatttttgggtatcaaaagaaacttaagagatatgaacaaaatggaatatgcagatcatagggtccttgtgtttttttttaatctttattcatatcagccaacttaaaacaatagaaacagggaaaaactgagcatgacctggatattaaataatattaaagaattatttaattttggggttgtactatttccactgtgttctcatttttttaaagtagcttttataagagatacatgcattctgaaatatttacaactgacatcatatgatttcaggcattttttttttwaaatcagtcctttcccttctcccctgcgaaaaaaagtatgaaggggtgtgagtagattaaacaatatagcaggaagttgattggtgtaaggcttcgtgatgagcattggaagacgagtgcattatcttttcttcctttgtatgtgtttgaaaatatcaatagcaaaaagattttttaaagctctgaatgtccagataaaattcaatttcatatatcttttctctgaaagccactgcag

SEQ ID NO: 431594 - DNA, 612 bp, Homo sapiens
aaaagttgtgtttgctctaaactcatataaaatgtttttaaataataaaaatttactctttccacatgctgttctaaagcaatttttatgaatgagaaaacttaatgctagaaataataatataattgcaagtttttttttctttttttttttttagtttgaggtactatattgtataaggtactactctaagtgtctgtgccaatttgtgattcttgaagagtctggattacaccttggtcttatatatttttttctaaccagatcatgttttttttcttttcctccgatgagtttactaagaagaaaactaagaagaaaactaagagttccaacccccattacattayacaagagatgcagcactttaaatacaaagggacttgattcaacaggaccactatagttgtcagccaaaatagaatgatgtatttggcagtgatttcagctacatgttagtgtttcacctgacacagcaagcccatagattgtagccttcaacataatttatagggttgacattttgctattgagataatgtaagaagataaagcccataactccaacagttgttttgtttcggttcgttgtataatttatgcaaagttagaa

SEQ ID NO: 431595 - DNA, 544 bp, Homo sapiens
cgggagagggtaggaagccttcccagggtgattaattcgaatgacctaaactagttgatgtgtacttttaaatgattttttctcttattattttcctgaagaatactcaaaaatgcattttgtagtttgtattttgtaaaagtttaagcatttgaagccttacrttatggaataattttacctaaaggcagcagttcttaaaattaagggcacaggagattatccagtgtcccactatgatgattttgtagtctgagttggaacctaggaatttgagtttttaacaggcacttcaggtatttgtgatacaaataattcagttagatgatattgacaggaaacttcaagaaatgatagaaacatcacatccacttgagtctttcttccttcttacctacacagattcaccttttgtcaggcagttgaaacagattactttggccagagaagcaggaaaatgtcagctaagttccttcgtgaaaaatgaaaaaaaaaaaaaatctagagctccccacttagaagttgtcctagaaagtagctttca

SEQ ID NO: 431596 - DNA, 612 bp, Homo sapiens
tgatcttttttctaaagctatactaaaattagaaaacgtaagacaaggagaggttgaaataatattcaagttagtggttgtggaggctttttttaaaaaaaaaattaattgcatatccttacagcatacaaaatgattttttgatatatgtttacaatttggaatgattaaatcayattaattaacaaaccatcatgttgcattcttatttttatagtgaaaacatttaaaatttactatttagccattttataatatacaatacagtgctcattgcagtattattcacaatagctaagatttggaagcaatctaggtatccatcaatgaataaagaaaatgtggtatgtacacacacacacacacacacacacaatggaatactatttagtcttaaaaaagaatgaaattctattatttgtgacaaaatagatgagcctggacgatattatgctaagagaaataagacaggtacagtctcacttacatgtataatttgacaaagttaaacttactaaaataaagagtagaatgatggttaagagaagggatgtttaggaagggaataaggggagatggtgatcaaaaggtacaaagtttcagttacaataa

SEQ ID NO: 431597 - DNA, 541 bp, Homo sapiens
attcaagttagtggttgtggaggctttttttaaaaaaaaaattaattgcatatccttacagcatacaaaatgattttttgatatatgtttacaatttggaatgattaaatcatattaattaacaaaccatcatgttgcattcttatttttatagtgaaaacatttaaaatttactatttagccattttataatatacaatacagtgctcattgcagtattattcacaatagctaagatttggaagcaatctaggtatccatcaatgaataaagaaaatgtggtatgtacacacacacacacamacacacacaatggaatactatttagtcttaaaaaagaatgaaattctattatttgtgacaaaatagatgagcctggacgatattatgctaagagaaataagacaggtacagtctcacttacatgtataatttgacaaagttaaacttactaaaataaagagtagaatgatggttaagagaagggatgtttaggaagggaataaggggagatggtgatcaaaaggtacaaagtttcagt

SEQ ID NO: 431598 - DNA, 517 bp, Homo sapiens
gttttaaaaatagtaacattagaaccaaaaatacatttagaataatgaaaaattcattggagttaaacagcaraatggtggtcaaaataaagagtcaatgaagctgaaaataaacaaaagtattgatataaactgaacagatagggaaaaattaaaaaaaaaaataacagaaccctaggaactgtgggacaatataagcaaggtccaacacttctgtaattaggatcccaggagtgagggaagatgcatgatgctaaagaaatacatgtatgtgaaggaacagtaagtaaaaacgtatccgtttttataaaagacagaagcttattcaagaagatcagagaattaaacagaataaattcaaaaaatttctgcccaagtgacagataataatcagactactaaaaaacaaatacaagaaaaaaaatcctaaaataaattacaaagaaaggatgcattaaatctatagagaaacaatggttcaaataattgtggatttttcatcagaaaccatggaggc

SEQ ID NO: 431599 - DNA, 606 bp, Homo sapiens
tagggtacttgtaaggaatggacttgtagaactagaagttactctgggaacgtcagtgagtgagtggtgagtgaatgtgaaaggctaagacattactctgcactactgtagactttataacactctacacttgggctacactaaatttattttaaaaaattcttgcttcaataataagttaaccttagcctatagtaatttcttactttaaaaactttatttttttcaactttcaactctcacttgtaataacacttatacttacacttaaaacacaaacacattgtccagctgtacaaaaaaaaatttctttcttgatattcttattctatgtttcttccattttaatttaatttttttttttgctttttacattttaaactatttcttgttaaaatgaaatcaccaagacacacattagcttaggccaacaaagagtcaggatcatcagtatccctgtcttccacctctacatcttgtcacactggaaggtgttcacaggtaataacacacttggagctatcacctyctatgataacaataccttcttttggagtacttcttgaagaacctgcctaaggctgttttccagtttacaatttattt

SEQ ID NO: 431600 - DNA, 606 bp, Homo sapiens
tagggtacttgtaaggaatggacttgtagaactagaagttactctgggaacgtcagtgagtgagtggtgagtgaatgtgaaaggctaagacattactctgcactactgtagactttataacactctacacttgggctacactaaatttattttaaaaaattcttgcttcaataataagttaaccttagcctatagtaatttcttactttaaaaactttatttttttcaactttcaactctcacttgtaataacacttatacttacacttaaaacacaaacacattgtccagctgtacaaaaaaaaatttctttcttgatattcttattctatgtttcttccattttaatttaatttttttttttgctttttacattttaaactatttcttgttaaaatgaaatcaccaagacacacattagcttaggccaacaaagagtcaggatcatcagtatccctgtcttccacctctacatcttgtcacactggaaggtgttcacaggtaataacacacttggagctatcacctcctatgataacaatrccttcttttggagtacttcttgaagaacctgcctaaggctgttttccagtttacaatttattt

SEQ ID NO: 431601 - DNA, 541 bp, Homo sapiens
cattacaatggttatgacatcattagataggaatttttcagctacattagaaacttatggaaccatcattatataagagattcatctttaatcaaaacattattatgagactcagaaccctatataaataattgcattttatgcaaatagtctaaaactctaattgaataatgaaaaaaaaatggcaartgaagagaatttgtcaccagcagagtggctgtgaaagaaatgtgaaagaaaattattcttatggaagtgaaatataccagtgaaataggcatatatatttcactgttgtctaacataattttaaggccggacttgagtacggaattagagaaagctgatggaatgcgaagcactaacgtgaagaggccctatatgcacacagtggctatgttatgcctggttgcaaccaccttcccttcttctgagaacaagatagaaatgattaaactgtattagaaggatgaagttatgccctagggagcacacttccagatcaggcttgagatgctagacttcagagtaaaaggacttg

SEQ ID NO: 431602 - DNA, 541 bp, Homo sapiens
cattacaatggttatgacatcattagataggaatttttcagctacattagaaacttatggaaccatcattatataagagattcatctttaatcaaaacattattatgagactcagaaccctatataaataattgcattttatgcaaatagtctaaaactctaattgaataatgaaaaaaaaatggcaagtgaagagaatttgtcaccagcagagtggctgtgaaagaaatgtgaaagaaaattattcttatggaagtgaaatataccagtgaaataggcatatatatttcactgttgtytaacataattttaaggccggacttgagtacggaattagagaaagctgatggaatgcgaagcactaacgtgaagaggccctatatgcacacagtggctatgttatgcctggttgcaaccaccttcccttcttctgagaacaagatagaaatgattaaactgtattagaaggatgaagttatgccctagggagcacacttccagatcaggcttgagatgctagacttcagagtaaaaggacttg

SEQ ID NO: 431603 - DNA, 541 bp, Homo sapiens
cattacaatggttatgacatcattagataggaatttttcagctacattagaaacttatggaaccatcattatataagagattcatctttaatcaaaacattattatgagactcagaaccctatataaataattgcattttatgcaaatagtctaaaactctaattgaataatgaaaaaaaaatggcaagtgaagagaatttgtcaccagcagagtggctgtgaaagaaatgtgaaagaaaattattcttatggaagtgaaatataccagtgaaataggcatatatatttcactgttgtctaacataattttaaggccggacttgagtacggaattaragaaagctgatggaatgcgaagcactaacgtgaagaggccctatatgcacacagtggctatgttatgcctggttgcaaccaccttcccttcttctgagaacaagatagaaatgattaaactgtattagaaggatgaagttatgccctagggagcacacttccagatcaggcttgagatgctagacttcagagtaaaaggacttg

SEQ ID NO: 431604 - DNA, 541 bp, Homo sapiens
cattacaatggttatgacatcattagataggaatttttcagctacattagaaacttatggaaccatcattatataagagattcatctttaatcaaaacattattatgagactcagaaccctatataaataattgcattttatgcaaatagtctaaaactctaattgaataatgaaaaaaaaatggcaagtgaagagaatttgtcaccagcagagtggctgtgaaagaaatgtgaaagaaaattattcttatggaagtgaaatataccagtgaaataggcatatatatttcactgttgtctaacataattttaaggccggacttgagtacggaattagagaaagctgatggaatgygaagcactaacgtgaagaggccctatatgcacacagtggctatgttatgcctggttgcaaccaccttcccttcttctgagaacaagatagaaatgattaaactgtattagaaggatgaagttatgccctagggagcacacttccagatcaggcttgagatgctagacttcagagtaaaaggacttg

SEQ ID NO: 431605 - DNA, 524 bp, Homo sapiens
ctgcttgctattaagaggagacatattttaaattcaatggcagaaaatggagaaagtaaaaaaactatagaaagatataccatgcaaacagtaaccttaaagaaaacccagaatggctgtattaatatcawaaaatacatattttaggtaagatatagtaagagaaaaaagaaggacatttcaaaatgactgaaaattctatacatcaggaatatataagtgtaaaatatttaaatctaacacatcccaacccatataaagcaaaaactgatagaggtgaacaaagaaatggcagtttaacaattactgaagatatcaatatagtcctcttgataatttcaagaacaattagaaagaaaatcagtaagcgtatggaaatcttcaacaatactattaccattttgaaaagacaatttcaaaatacttcactcaataacagcagaatatactttctctttgaaagcaggtagactgttattcgggatagaacatgtgtcaagacatacaataaatctaaatacatt

SEQ ID NO: 431606 - DNA, 524 bp, Homo sapiens
ctgcttgctattaagaggagacatattttaaattcaatggcagaaaatggagaaagtaaaaaaactatagaaagatataccatgcaaacagtaaccttaaagaaaacccagaatggctgtattaatatcataaaatacatattttaggtaagatatagtaagagaaaaaagaaggacatttcaaaatgactgaaaattctatacatcaggaatatataagtgtaaaatatttaaatctaacacatcccaacccatataaagcaaaaactgatagaggtgaacaaagaaatggcagtttaacaattactgaagatatcaatatagtcctcttgataatttcaagaacaattagaaagaaaatcagtaagcrtatggaaatcttcaacaatactattaccattttgaaaagacaatttcaaaatacttcactcaataacagcagaatatactttctctttgaaagcaggtagactgttattcgggatagaacatgtgtcaagacatacaataaatctaaatacatt

SEQ ID NO: 431607 - DNA, 590 bp, Homo sapiens
aagttgccatagaatgcttatgagatgaaacaattttttaattaaacattggagtttttggtccagttttcctattcaattaggtagaagagattttatcatgctgagaaataagcatatacagacacagcatgttgaaaaataagtagtccaaataactactctcaagaatgagaagagtgatgggcaattagactactcagataagtgttaataaaagactcacacaaatgaatttgaatatatgatattgatgatgttgatgttataattgagagattaagttcttatcaccatttctcaacacaaaaccttataaacgttttaaaattcttcacagactcaaaatggtatatgagatctctccctctgtaattgaattttttagaaacaraaacaaaatgtgttcatgtgaaatgtaagggtaaaaatgactctatccatattaataataaatactggtagagactgtgaattaatctgcattcccctcaccagtgcttagtagagtaacttgcaaaagtaagcatttaataaatgatttttgaactgaatcacattttattttattaactaaatcagttgtaatt

SEQ ID NO: 431608 - DNA, 328 bp, Homo sapiens
ggctgattggttctagggagaggagcctgagccaagctcagccaatcacattctcactctcaggaccatgaaaacctgagattgaagcacagacatcttagggcggagccccagacctaaggccccctgacctctctacacttgacattctcagcctctcctccaaggtcctctcatttctgctmtagcccttcactcttgcctcttaacatctaggcctctagactcaagagcctaaagactgttgtaaccatgcccttgctgctggccacacttgttggacatgtcctcacatcttgtctatgacacagctcagccaacatgccca

SEQ ID NO: 431609 - DNA, 577 bp, Homo sapiens
ataaaaactcagcagtccttaagttttattgaaaagaaaatttagaaattagaaattagaaaaatatagaagcacaatactaggataatgtgagattatgaaagcacacagggacattcatgcagaagctgaatagtgaagaaggactgagggcaaaagtggaaacattcttctttccagggctgagcctcatggttttgtgcagctgacattaggcctggcctgagtaaaaaaagtaagtcttcatggrcgtttaggtgtctgcaactttagtgtggtatatctacctattttccccaaaatcaatttgcagacttttggagagaataatgataaaatgaaaatagcaaggaaaaataacacttgtaaaagattaggaacgaatttgatggcatattactgccttttaaaattaatgacaattctaaagctagtataaaatggactttatttaaataaacctgatcacattgtaaatatcttaagaagaaacagttttctttgtatcatactgtaatgttagtttgcatgaaaagctctgtggtgcagtggcaaacagggctaaggatgtttgctg

SEQ ID NO: 431610 - DNA, 645 bp, Homo sapiens
ttgtccccccagaatccatatgttgaaacctaactcgtggtgtgatggtatttgcagatgggatctttgagaagtaattaggtttaaatgagatcatgacagtggcaacctgtgatgagatgagtgacctgagagatcccagagagctctctcatgcttttcctgccatatgaggccacagtgagaaggtgctgtctatgaatgyggaagcaggctctcaccaggcactaaactgctggtgccttggtctggaacttctcagcccccagaactgtgagaaacaaatcctgttcatcaaagatgcttcatgacatcatttaggggaaagagtcaatcctgtttcttaaagaggactaaacagtgtccacctgttaattcagaaagccatggcactagcagtgctgtagcaatggcctggggcgtctctcgcctcagaggcaatccagatctgctggggctttttaagggagcaagtcctggctctgtggggctcgccttgagcttagttccttaaaattgcaaagtcaccatggagtcagattagaatggagcccatgtcacatattgagggaaatattttcatgctttttctctcattaaaagcaatctactaaacttgcaggtgactttgtctttaagcacacc

SEQ ID NO: 431611 - DNA, 603 bp, Homo sapiens
cctagtgattatccaggggaaaactgagcccctctgagaaacatatcccccatacaggaaattctgatgactggggccacaacagctattctcagcccctgaggaaggaactgattgcccagattgtattcaaggatgagtccgttttgcctggaaatgtctaaaattgctaagtgtatattcattccctcaacaaatatttattgggtgactactatgtgtgaggcgtgcttctaactgtgagtgcagtgatcctgactayttgtctttgctcaaattacttcacatttgggaaaattcgtgtgctaagaagactgtgtccaggaccattgagtccagtgtccccctttccagaaggcactgggatcagtttagacttttgagataggtaggcccagccaagaggagacaagagcacagaaagacatccacaaacattcctaaaaagagagaactggaagcttttgtggaagcttaggcagtgccgaaaactcctggactttccttcgtggcccatctgcagagtggtgctcctttgggagctggcctggcctccctctcccacccctctgctctccctgggcagatgcaccagcagcccag

SEQ ID NO: 431612 - DNA, 512 bp, Homo sapiens
tgacaattctttttctttctgtatttttgaatcccactacctctggcctccattgtttctgaggagaggtcagctgttagccttcttggggttcccttgcatgtgatgagtcacttttcttgttctgtgttcaaggttttctctttgcttttgcctttcgactagttcagtgatgtctatttmcctgcagtgtggagcctctgatgtctctgctctgagggtgcagccttgagaaggcaaacagtctccctggccagcatagatctgtgagatctgtggtttagttgggtgcactttgactctctttccgtgatctgcctgttttaagcttctggctggtctgcctctattcatgtctcacacagatattagcctccagtaattgctattttctctatattgttttaaaaaataccttggtgtataatgcttcatagtttaattcaattaaagccatgtctttttgcagggcaaggtgttcccatcttcatgtcttgcactgacccaaggag

SEQ ID NO: 431613 - DNA, 591 bp, Homo sapiens
tctgctctgagggtgcagccttgagaaggcaaacagtctccctggccagcatagatctgtgagatctgtggtttagttgggtgcactttgactctctttccgtgatctgcctgttttaagcttctggctggtctgcctctattcatgtctcacacagatattagcctccagtaattgctattttctctatattgttttaaaaaataccttggtgtataatgyttcatagtttaattcaattaaagccatgtctttttgcagggcaaggtgttcccatcttcatgtcttgcactgacccaaggagggctcttcttagcagtttctttccctggttcctctgtcaaacttctagctggtataccatcttgcttgtttctactactgtcatggatagacagcttcctcttactcatcaccaagatctccgttgcttttaacaatgccctcagacatttttctgtcaaactatatgacaaataatgtccattcctttaaggagagttgagggtcttcctgttcttaaaactcccttctccttttgggcagaatctctatgccacaaaaaacagagctgagggtggtgacagtggc

SEQ ID NO: 431614 - DNA, 560 bp, Homo sapiens
cagatgtcacagactttcactgttattactaagatttagtagaatttcttgaacgaatgttccctatctaccatatgcccttaggacaattcccagagactttaaatcattgttttgtgaaatgttctccagttaaaagtttgttttgctggggagagggtttactgaactcctcccaacaccacttttcatgtccccatctgcaccgccctatgatccttttgaagatggagcaaaatctgctctcctctaatctttcaaaaaccatcacaacacagttctacaactgaatgttatgaaagtttattctcccacataatatggtcctagaactttttagcttggattttctagcttttcattttctttgcttgcctttggccagtcagccatttctgctttatttttttggcagccygtgtgtctgtagttactgtctttcatgctttctacttttctgattcaaggctgactggaagattatcagaactgtgggacaattacagtaaaaccattctgactgaaagcctagagaattcttcaacaaaccaagtgctggt

SEQ ID NO: 431615 - DNA, 560 bp, Homo sapiens
agcttttcattttctttgcttgcctttggccagtcagccatttctgctttatttttttggcagcctgtgtgtctgtagttactgtctttcatgctttctacttttctgattcaaggctgactggaagattatcagaactgtgggacaattacagtaaaaccattctgactgaaagcctagagaattcttcaacaaaccaagtgctggtgcttygagtcatgccattccatgaagactattgagagcccctgtggagtcctgcttattttggtgttgatggccttccagaaagggggctcatggggagctgacgggcgctacacaagggaccttgcaggctgctcccagcatcagcagtgatgattgagccagggagtcaagagacttgtgagagtgtcactattttagcatagaaagggaacaccttaccagggttgcttacagggactgatagccagtcctgaggtaaggcaggaagaaggccagaattttcacgtaacacaaagagaccagcactggccttgcagctagtcccacccaaggcttagagtgtcctgatt

SEQ ID NO: 431616 - DNA, 569 bp, Homo sapiens
ttcttccacgagccaactcaacccagaacaatgccyttaaaaacatttcctatgtcttaggtaaactctgcatttggtattctaaagagacttggaaatacatcactgatatttatttcagcatcacttgtaatattggactattggacatattctgatgtccattaagagggatctggtttaataaagtatggtccatctaacaaggcccagagcagtgtatgcagtaaggtctcatttgtattaaaatatatttatatatgtaggtaactagatgtgtatagaatatttctgcaaagatagagaagaaaacagtaacgttctcctctggggaagacaaccagaggggctgaaaggcagagtggagaagaccaattgttttattttattttgtatttctttggtccctttgaattttttattaatttatatatatgtatatttatatttactagaaaaaaattgaaacgtataactagtgggcatgctaagagacctttccatttgggtgcattacctcttaggattacattttctcattttcatctatctgcattaaaaagggaaat

SEQ ID NO: 431617 - DNA, 612 bp, Homo sapiens
gaatttcttacgttctggatttctgacttgatgctctattctctttgcctctactgtagtacttattcctaaaagaattacgtcagaaccagatgagttctggttagaggtaatcagattagatttttcaggcttgcatcggaagctgcacacataaaggaacgttgttaaccctaacatgtagctgctctgtgatagcctgtatcctcaagccattgatgctgccgtagctcagtacacttttatgttcttcatcttgaattgcattcagagaagctgcagaaaatttgtgccctttccccattcaaaccctactcagcttttctccatttgttcaatacccaccttattcactstggatggcttttaggtaactctagaaatgtaaccagcaaatagagttctatgtttttagatgcaaacattttggcacgtttgttttgaaagacttctcatgaccctagtcataaccttctgttaaaatagggaaatcactgaaggggagggaaagccctttctttttaaaagttatcattgttacttattttcctcaagttggtaactaaattggaagcagactgaataaaatatataaacacagtcaattttgaa

SEQ ID NO: 431618 - DNA, 575 bp, Homo sapiens
gggcgaggtggctcccacttgtaatcctagtactttgagaggctgaagtgggaagattgcttgaagccaggagttcaagaycagcttgggcaacacagtgactctatctctacaaaaaataaaaaatgagttggttatggtggtacaagcctgtagtcccagctacttgggaggctgaggcaggaagatcacttgagcccagaagttggaagctacagtgagccatgattgcaccactgcactccagcctgagcaacagagtgagaccttgtcctttaaaaacaacaaacaaacacacaccttttctaggacatacatgcatttaattttacagtttattgtattcgtattacccaaattttcttttcccagttgatattattcctttctgttttctgccttgtatgttccactcctggacaatccttgggcatgtaaggtgggactttgcatgagactcctcacagtgaactaggacattttgagaacatccagctgagggctggtaccttggcaggccctcagtccaggttctccttccagcttcagggatcctcgaagagagctggcccagg

SEQ ID NO: 431619 - DNA, 647 bp, Homo sapiens
tataaagggcaattagatacagttaagagttacaagagtgtaggctatgtgcttatggaaaattgcctaatttcttagtaaattgagtatttctcagaacattttcagagaagttatataatacttccttttttccttacaaataaatgaaaagwtcattacttcacatggcttgtaagcagaattttatattattaaaaagaaaaaagaaatattcactacatgaagcatgccaaaatatttcatttgtttactagcttcgcaaacatcatatatgtgaaaaactatcaataatatttatttgtatatcattggccgcttacagagtacaaccaggtttatggaatttattaggaatcataaaatagcaaaggaagaaatcagcttgtgattttttactctgtggaatgaaaaagttacaagcaacatttgctattgctaagcgctccacctgtattaaatatattctagcaatgagaaaacgagacttcaaaagttaataatttatctgaagtcaagtctccagtgagcgataggacctcaggtgcaggcccaggccagtctgtctgcaggagtccgtgaccttccctgctgacaatcttatgcttccagaaagaccaaactagaatgtgcaggcaaaggcaaaa

SEQ ID NO: 431620 - DNA, 608 bp, Homo sapiens
ccaaataagtcaatgaatgaagcactgggttaagtgcttgtatacatcatctcacttaacctttgtaacaactcttcaaggtgtatataattattatcaccattttacagacaaataaatgaagactcaaggttgtacatctgtacttactaagtacagaaaccagaatgcacacccagctttgactaatacctgagctatttagctactcacaactctatcccacagtacacccccaaaaaagcaaaaaatttctaaatcatgactgcctaactctaacattgtaataatacaccatacttgcttttaactacatcattctgagaaggaaaactgatggccttcataagcttcacgcctactttcccaccttaagcactgaaatcttgaatcatatgagagctgtttatcactaacatcctttttctgaaaactatactttgcccctccactgccatgaaaaacattattggcacccacagcaatgttgtgtataaaacttgtcacaactgttagtggcaatgrtcactaccttaggtgactctggagtctcagaagacttgaacactctaatgtaagttctaaaggtttatgtaagatccaccaca

SEQ ID NO: 431621 - DNA, 392 bp, Homo sapiens
gcaatgttgtgtataaaacttgtcacaactgttagtggcaatggtcactaccttaggtgactctggagtctcagaagacttgaacactctaatgtaagttctaaaggtttatgtaagatccaccacaccaaatgctgagtaaaaccatctgsaaaaaacaaggaaattatatgattaaatatagttaaatgtctctctacatggaacagctatttgagaagatcaattgtatgctatttttgttccaaaagagcaaggtttgcagattttttgtttatataccaataagccaaacatcaaaaccgaaggaaccaaactgtcctgtttttctcaacactcaaagacaatcaggcaagagaagttcatttaccatgacttacatattacttaga

SEQ ID NO: 431622 - DNA, 647 bp, Homo sapiens
aaattcattgatgggaaatgttggcaaattctgaatgaggtctgtgaattggatggtcatgttgtatcagcatcttttctggatttggaaggtttgtgattgttatgtaggagaatgtccttgatgtggtgaagtatttaaaggtatggggtatcaggtccacaacttattctcgaaagttcwgaaagagactaatgctaatgggttgatgtatatagagagagggaagacaatggaacaattggggtaaaatgttaacaactgaggaatctgaatacatggatatgggagttttttatacttttcttgcaatgtttctgtaagtttgaaagtgcttcaatataaatatttaaaatgtgtttataaaaccacaaagtgctggaattgctatccatgcccaccagactcttgataaagagcagggagctcttctcccctgtttgagcagagcctcctaaaaagttctagccattatccacttcagtgaaccaagcacatccccctcttctgctgactgctgcaaaacaccaaaccaaataaaacaaattttaaaatctctcacgagaataaatgagcacccgatactgctttggtaagagactataaagtaaccctttgtttacaatgttaaaagcaaacaactgatt

SEQ ID NO: 431623 - DNA, 647 bp, Homo sapiens
aaattcattgatgggaaatgttggcaaattctgaatgaggtctgtgaattggatggtcatgttgtatcagcatcttttctggatttggaaggtttgtgattgttatgtaggagaatgtccttgatgtggtgaagtatttaaaggtatggggtatcaggtccacaacttattctcgaaagttctgaaagagactaatgctaatgggttgatgtatatagagagagggaagacaatggaacaattggggtaaaatgttaacaactgaggaatctgaatacatggatatgggagttttttatacttttcttgcaatgtttctgtaagtttgaaagtgcttcaatataaatatttaaaatgtgtttataaaaccacaaagtgctggaattgctatccatgcccaccagactcttgataaagagcagggagctcttctcccctgtttgagcagagcctcctaaaaagttctagccattatccacttcagtgaaccaagcacatccccctcttctgctgactgctgcaaaacaccaaaccaaataaaayaaattttaaaatctctcacgagaataaatgagcacccgatactgctttggtaagagactataaagtaaccctttgtttacaatgttaaaagcaaacaactgatt

SEQ ID NO: 431624 - DNA, 258 bp, Homo sapiens
aggtcagtgtgtgtgtagctctatgccatttcctcacatgtgtasatttgtgtaatcatcactgcactcaagatacagaactatctcatcactaccaggagtatagctattccttttattggaccctaaaggtattccagctaccatgctaagcatgattttgtttcttcctaaaacaccctagaaaatagggtctccaattatcttcatttcacacatcagaagactgaggctcaaggtggtcatgtttctcaccca

SEQ ID NO: 431625 - DNA, 556 bp, Homo sapiens
ggcggccgcagcttacgcctccatcccactccctcttcttatccaaccttgtgtttcagatcaggaaattgagagccaaacaacccaaggtcacatggcagatttacagagagcagggattggagctcagcctccacactccgggtccgggactgccgccgtgctcatcaccctgcctccttytccctaacaccctcccatctgcacactctgagatgctccctgaaagctgagctcccctcccgaccatgtgagagaccccacaggcatgcgcttgctcacaatccattgccaatgcctgctcccaagactgcagctgccagtgagatacgacttgtgatttaacgagctcagtccttcccgaggcttgatgggtactgtctcaccactcccaggatctcttggcagcaaaaacccctttccacacaggggccctgctttaagctgcatccccacagactgtcttttcgggtgcctcaccctcacctcctgcttagacacggccactccccagcaaggactgtcagagctgggggcctctgagtagctcacctac

SEQ ID NO: 431626 - DNA, 556 bp, Homo sapiens
ggcggccgcagcttacgcctccatcccactccctcttcttatccaaccttgtgtttcagatcaggaaattgagagccaaacaacccaaggtcacatggcagatttacagagagcagggattggagctcagcctccacactccgggtccgggactgccgccgtgctcatcaccctgcctccttttccctaacaccctcccatctgcacactctgagatgctccctgaaagctgagctcccctcccgaccatgtgagagaccccacaggcatgcgcttgctcacaatccattgccaatgcctgctcccaagactgcagctgccagtgagatacgacttgtgatttaacgagctcagtccttcccgaggcttgatgggtactgtctcaccactcccaggatctcttggcagcaaaaacccctttccacacaggggccctgctttaagctgcatccccacagactgtcttttcgggtgcctcaccctcayctcctgcttagacacggccactccccagcaaggactgtcagagctgggggcctctgagtagctcacctac

SEQ ID NO: 431627 - DNA, 569 bp, Homo sapiens
cagcctaggcactacaaagcagaatatagaacagtgaggttgggctgagagacactatctggcagtctgctttacagccgggggggccacagcaggtgagagagaattaaagaagcccaggggtgcagcatgaaagctaagaagctagggtttgacttatccaggcactgtggctgatgcctgtattcccagctctttgggagaccaaggcaggaggatcacttgagtccaggagttcgagatcagcctgggcaacatagtgagacaccatctctatgaaaaaattaaacattagccaggtgtggtggcatgcacctgtagtctcagctacacaggaggctgaggtaggaggatcgcttgagcccagaggctgaggctgcagtgagcagtgattgcaccactgcacttcagccygggtgacattatttattatttattaaataaataataaaataaagtttgctttgacatgacactttggaaatcatggaactgcaggggccccaggtagctggggttggggtgacacccaagcttgtcatggtactgggcaccagcttgtgcccaag

SEQ ID NO: 431628 - DNA, 608 bp, Homo sapiens
gtctccagcttgcagatagtctgctgtggcacttctcagcctccaaactgcgtgagccagttccactaagaaatcccctctatatatgagtatgtgtgtgcgtgtgtgtttgtatgtgtgtggagagagagagagagagagagagagagagagagggagagaaagagctcctactggatttgtctctcgggagaaccctggctaatagacctgggataatttcccagttattctccctactcaggtgtctccagtttgtgcagctmgcttgctcttcctaacccactgagcatgggtctttttaaatgtgcagccaggttgaaaaccaccgcaactttgtctttcacctccagcccttcctctcctttccacgctgcttggacctgaggcagctctgggaccttcctgctgacttgcactctgttctggcctgagccattgtttcctgccatgatgactatggtgggtgaggtggcttggtgtttgtccagggtcacctttccccagttatcgtccttacagagggtcacagccaatccgtagtccgtgtcctgtgtctcctctgagagggcgtctggagccaccaacctcatcctgcccacctggga

SEQ ID NO: 431629 - DNA, 608 bp, Homo sapiens
gtctccagcttgcagatagtctgctgtggcacttctcagcctccaaactgcgtgagccagttccactaagaaatcccctctatatatgagtatgtgtgtgcgtgtgtgtttgtatgtgtgtggagagagagagagagagagagagagagagagagggagagaaagagctcctactggatttgtctctcgggagaaccctggctaatagacctgggataatttcccagttattctccctactcaggtgtctccagtttgtgcagctagcttgctcttcctaacccactgagcatgggtctttttaaatgtgcagccaggttgaaaaccaccgcaactttgtcttycacctccagcccttcctctcctttccacgctgcttggacctgaggcagctctgggaccttcctgctgacttgcactctgttctggcctgagccattgtttcctgccatgatgactatggtgggtgaggtggcttggtgtttgtccagggtcacctttccccagttatcgtccttacagagggtcacagccaatccgtagtccgtgtcctgtgtctcctctgagagggcgtctggagccaccaacctcatcctgcccacctggga

SEQ ID NO: 431630 - DNA, 395 bp, Homo sapiens
gagatagagataaagcagtgttgaaaggagaatgtatagcactaaatacttacattaaaaaggagggaaagtctcaaattaatcatctaatttcccactttaagcacctaaaaacacaaaataaacaataaacacagttttaacagaagaawgaaataataaagataggagcagaaatcagtgaaattgaaaacaaaaacaatagagaaaatcaataaaacaaaaagccaattcttccaaaacatcagtaaaattgacagtcctctatcaagactgacaaagaaaaagagagaagacgcaaattactggtatcaggaatgaagtaagggatataactaaagaccctgcacgcatcaaaaggataatgaaagagtgctataaataaccctacagac

SEQ ID NO: 431631 - DNA, 589 bp, Homo sapiens
cacttctcagggttgggggctcacagcgcatgccttagagatccccacttccactgcttcccagccttggcctctgcccagagttgtgcaaattaaaggacttccgggcaacatccattcattccctggtctctatcctccrcccgcccctgcgctccagggtatttttagttctgggcagccaggcctggtgagtgattggcagcaggcagagcccacgtttccgaaccctctgtgttgcttctggctcagcatgagaggtggctgggccctaggagagggcttaggcatacctggcacccaagcccacagctgcctcattgtccctgggggaggagctgggctgctgccactgacccgaggctgggagcattctttcctgctgattcatcatggggaatgttttgggcccagctggggtggggcaggggcactggggggacatcttggacacgggcagccaggagtggatggcaggtccctggcagcagggtcattaagacctggctgtcacccaggatcgaaaaggtccatcttgacatcctagctctatcacactctgcctgtccaggcttattcttacttgcac

SEQ ID NO: 431632 - DNA, 343 bp, Homo sapiens
tctctgtggcttggaaccccgtctttccactggacacctggctccccaggagatggacagcaagagcaaaggctccaggatggggcctggggagggcaggtctgcctggcaggcaaagaccagcagcttcttccctgaacatcaccatggtctgtgaggcctggcttctcttccagatcagtcacctcccaatgctagcacctcccaatgccaggcacagggtcaccccaaagcctgacccaccccagctctgcaggccaagcccagggcaacaccgatgktcccctgactcagggtagagctggggcagccaacagagtttctggttccagatacaccaact

SEQ ID NO: 431633 - DNA, 539 bp, Homo sapiens
tcgcttgcataattaaaattaggtgcctgtttatctcttcagcctcgaggcccataaggacagggacctggtagtcctcattccaggcacagcagagctgaacccagggacttggtgctctgggagaactgcatatcctctcaatcttttcaccgaagagcagtaactacagttggcctcaaggaacagaaatgaatgaggacctaggaagctggtagtttggggtctgcgggaagtcctgggcggggctgcccaagagtcccgaggtacgcttggttcaatcatcctgtcgatctttacctcctgtgaggaggctccaggatgccctccagcagacagtaggcactgtcttccsaagcccagccctggaagcccagcctgcctgctgggcctgctttccgctccttgccacatgcccctcggctccctcacctttctctctcccatggggaaggctcgaaagtggccagggaagggcggacaggcagctctgggctgacctgctgggaaggcaggaacaccaggtgagaaaagtgcag

SEQ ID NO: 431634 - DNA, 588 bp, Homo sapiens
tcagcagcagccctgctcctagaagcaggaggagtcccagtgcctctgaggctccaaagcctttgatggctccccactgccctgaaggtgttgcagcagcctcactcaacctctcctcgagctcctgctaacctcccccctgccatctggagggacatcctcctttctcatcaagcgccatacctctcctggtttccaagccttcgcagctactagtcctcccacccaacagtcctttctcatcctgcccatttccaaaatcragtttcacctgggaagtgtttcaggccgctccagcctgaaagtcaccattttcccctcttccttctatagctcttggggtgtagagcataggcctctgttcatctaattctctcttgccgtgctgcaccctaatatttcccactgcacacccagatgcgggtggtggcacccaaagacatggcccaagcttctttctcactttcctctctccccacctctctggcacagggctggtattgaggccctggagtggagtctaccttttagagatgagataaagatgaggcagagatgagacactcaggcccccagaggggaagtgac

SEQ ID NO: 431635 - DNA, 607 bp, Homo sapiens
cagctaaagctggacctaggtactcaaatgatctggttgtgtttctgtttccacttctctttctctgctctgcttgtatccacttctctttgcatgttagtgttactctttcctaccatagatactctttccatatcccaggaaaggtagcttctggtgggcctaggccaacatccttacaacttgctaacataaatgaagagaatagtcttccctcagtagatccaggagaagaacccccagggggcacctttgtagcccagattggacaaattgcccttccctaaaccagccactgtaaatggaggaatgtaatactacagctggcccactgcaggtcactgcccatgtgcaagggcaggaggaggcacaagtcaccttcatggacagccccaccaagatcacatgaagtagaggagcaggttcccaaaggagaaagaggaggatgggagagtatgctcagtacatgacagctataactagcacagttgatctgccaggtatytgaggactcccttccatctcagcagtggggatacatcaccataagccccagacagttacttgggaagcactgcagatggatgacagttctcctgcaatatac

SEQ ID NO: 431636 - DNA, 565 bp, Homo sapiens
cattacccttgaacactgagaccaaggatctcaccacttgctttttctattttccttccatcacccagaatggcaaacattcaaacatttccactcccraaacatgcagcaacgccagaatgtttatccagaaattcaaaatgagctctagtgaggctggcatgaatatactctaacacaatgttttcaaatatcgtggctcaacaacaatgaccagtgctaaggttgctgcgaatgacatcttaggcctgaaattgctctctgctgtaacccagcactgaaggtgactctggcctttgcatgctggctttgaaaggtcccaagtctgtctacttggaaataaattaaaatgttgtctatatttaacagataaccaggccttactaagcaatctaaaacacatactctagaagcacgctgcaagagctcccttcctggccactttgcagaagagaaactaaccttgcgcagcaagtcaggaccctcccccacaaccaccccccagaaaacacaacagtctcacaagttttagtatggtcgcgtctgtaagcaaaagtaaggaagt

SEQ ID NO: 431637 - DNA, 624 bp, Homo sapiens
gacctgcaggcaagaaaaataaatctatacctggaatatttgccaattctaatcacgataaaatattgtccttttcagggtgggagtaaatcaacttgtcaccatcaagccagttggtctcctctaaggatggtgccatctcagggtctcagaattggcttttgtggctagcggtttgaatgtttagcagcatcaggagctagatcatcttcagaattcaggagctcctgctgttgggcctgtgggtagcrtctatctctgtcatcatggctgctccattcatgagccattgcataagccctggatagccaaggacagaggccggctgaagtctcctgtccagtggtagttaagcacctcttccatcatcagtgctcactggttggccttaacacacaacacagagctcatgtcacttggtgcccactcccacaggtccagccacatgcccttggacagacttccatttcctcagtcttctaatctagttttacccaagcccctgacccaccatccaagccttgcacgactgtccatgagtctgtatacatctgtctttaccacgggccacttttctcttcatgcaaagtgggtgaacagtcctgcttcctgaagctttgccca

SEQ ID NO: 431638 - DNA, 624 bp, Homo sapiens
gacctgcaggcaagaaaaataaatctatacctggaatatttgccaattctaatcacgataaaatattgtccttttcagggtgggagtaaatcaacttgtcaccatcaagccagttggtctcctctaaggatggtgccatctcagggtctcagaattggcttttgtggctagcggtttgaatgtttagcagcatcaggagctagatcatcttcagaattcaggagctcctgctgttgggcctgtgggtagcgtctatctctgtcatcatggctgctccattcatgagccattgcataagccctggatagccaaggacagaggccggctgaagtctcctgtccagtggtagttaagcacctcttccatcatcagtgctcactggttggccttaacacacaacacagagctcatgtcacttggtgccyactcccacaggtccagccacatgcccttggacagacttccatttcctcagtcttctaatctagttttacccaagcccctgacccaccatccaagccttgcacgactgtccatgagtctgtatacatctgtctttaccacgggccacttttctcttcatgcaaagtgggtgaacagtcctgcttcctgaagctttgccca

SEQ ID NO: 431639 - DNA, 541 bp, Homo sapiens
gcaacagtggtgagtgacatagtgggggtgggcctggtcatctgcccctgcagcttgtgacccccggccctgctcatgtgaaacctggggtgtacctcttctactttatgaggattgttgctgggccttcttgaccttatgacttgctggatctgactgtacttagttcaagatttrcagctctgcccatatggtcacttgctgtttcatgttcagatgttcagttttcaccaagtttcaataactaccaggagctgttttcagaatggtgtataatcctttacttacaatggcattgtctcgctcctgaaccctcagggtctgcactactggagcatgcccaaggcaccacacagcaccttcattcaccacagctgccattagtgccttgagatgtgcctggtcacgtggcccaaatggcaaggctgcttgtattgcagccgggagctgccgcagctctttcttgccctgggtgccactcaaaatgggcagtcttttctgctacccattttatagatgagacgttttgtgtttagagaga

SEQ ID NO: 431640 - DNA, 541 bp, Homo sapiens
gcaacagtggtgagtgacatagtgggggtgggcctggtcatctgcccctgcagcttgtgacccccggccctgctcatgtgaaacctggggtgtacctcttctactttatgaggattgttgctgggccttcttgaccttatgacttgctggatctgactgtacttagttcaagatttacagctctgcccatatggtcacttgctgtttcatgttcagatgttcagttttcaccaagtttcaataactaccaggagctgttttcagaatggtgtataatcctttacttacaatggcattgtctcgctcctgaaccctcagggtctgcactactggagcatgcccaaggcaccacacagcaccttcattcaccacagctgccattagtgccttgagatgtgcctggtcacgtggcccaaatggcaaggctgcttgtattgcagcckggagctgccgcagctctttcttgccctgggtgccactcaaaatgggcagtcttttctgctacccattttatagatgagacgttttgtgtttagagaga

SEQ ID NO: 431641 - DNA, 498 bp, Homo sapiens
tatactgagtcattttttaaagaaaacttttatttyatatgttagttttccttataaaaataagttgtattgaggtataatttatatacagtaaaatgcaaccatttcaagtgaacagtgggttttgacaaatgtatatacccaagtaaccactaccctaatcaagatataaaaacttccataatgccagaaagttccctcatccttgataaaagaaaaacttcagccgaattaaatttaaaggagtttaattgagaaatgaatgactcgcaaatcaggcagcccccagaatcacagcaggttcacaaagactccaatgcagccatgtggtggaagaagatttacagacaaaagaaagggaaatgacatagtacagaaaacggaagtgaggtacagagtggcgggattggttacaagttggcatttgccttatttgaacacagtttgaacacttagcagtttataaatggttgaagtatggccacagggattggccaa

SEQ ID NO: 431642 - DNA, 498 bp, Homo sapiens
tatactgagtcattttttaaagaaaacttttattttatatgttagttttcyttataaaaataagttgtattgaggtataatttatatacagtaaaatgcaaccatttcaagtgaacagtgggttttgacaaatgtatatacccaagtaaccactaccctaatcaagatataaaaacttccataatgccagaaagttccctcatccttgataaaagaaaaacttcagccgaattaaatttaaaggagtttaattgagaaatgaatgactcgcaaatcaggcagcccccagaatcacagcaggttcacaaagactccaatgcagccatgtggtggaagaagatttacagacaaaagaaagggaaatgacatagtacagaaaacggaagtgaggtacagagtggcgggattggttacaagttggcatttgccttatttgaacacagtttgaacacttagcagtttataaatggttgaagtatggccacagggattggccaa

SEQ ID NO: 431643 - DNA, 547 bp, Homo sapiens
ggactcagctaataaggcatttctgatgcttttgtgttcttatgcaaggatggaccttttccagcattgtaaatgacagcaggaaatactcaatgggccacaggaaataattaacatcatctgggatagtctgactcagaagttaaaagtaaggactttaaaatctgacctgggaattaattctagttctaacatatgttaattctgtggattwgacgagtttcttagtccctctgagtcccacttctctcactgagttgttgtgaaggtgaaatgagaacatgtttgctattagctaagcatagtctttggctagtagtgagtggtcactaaattgtagttgtttcattatcatttttaataataataatatatggagtagttaatgattaatgacaagacttaccttggggaaactagaataaataataaaacataagtataatgtttttgtcattagcctaattttgagtaattagttgcctgtcatatttctcactaaatggtgacatgtatgaacaattctgaaattaagtggactagaaag

SEQ ID NO: 431644 - DNA, 577 bp, Homo sapiens
tttgagcctgccatgggctatgatcacatcactgtactccagcctggacaatagagcaaatatgtctcttaaaaacaaaaagatcagagatgccctgataaayatgaattgattggatttaaatagaagaagaattttgaaatcctcctccatcaaaattctacacagtagacgcttgacattttcagtggatacatctcaagcccttggcaaatccccaagtttgcaaatgcagaaatatttgcataggctcttgacttcctcctgaatcaggttccattccagagtgaagaggttcctatgactattcacaggctaccaattatttgccttttcaatttgcactcaaggaaattaagtttctttcacctccagagagtttctgtttccctggtggcatcttgggatggggttactgggtctttgagaagactccctctctagctaagtgacttgttctttgctgtggctttgcaacatacagttcacatttgtgctccagagaaaagacaaattgccatgtggtgtggctattaggggttgttcacaaataactgaaaaagtgttgaatctacaa

SEQ ID NO: 431645 - DNA, 577 bp, Homo sapiens
tttgagcctgccatgggctatgatcacatcactgtactccagcctggacaatagagcaaatatgtctcttaaaaacaaaaagatcagagatgccctgataaacatgaattgattggatttaaatagaagaagaattttgaaatcctcctccatcaaaattctacacagtagacgcttgacattttcagtggatacatctcaagcccttggcaaatccccaagtttgcaaatgcagaaatatttgcataggctcttgacttcctcctgaatcaggttccattccagagtgaagaggttcctatgactattcacaggctaccaattatttgccttttcaatttgcactcaaggaaattaagtttctttcacctccagagagtttctgtttccctggtggcatcttgggatggggttactgggtctttgagaagactccctctctagctaagtgacttgttctttgctgtggcttygcaacatacagttcacatttgtgctccagagaaaagacaaattgccatgtggtgtggctattaggggttgttcacaaataactgaaaaagtgttgaatctacaa

SEQ ID NO: 431646 - DNA, 584 bp, Homo sapiens
ctctggggatactacatgatatgaaaggaatataatatctgcccactgtgactatattcttcagaaaggagggagggacgtggatgaagagggcatgagaaatagaggctcattttrtgcagtgtgggaactaacacagaaacattagtatatcaggcaagaaaagaagggaatagctgttttaagtctagcttgttgagaagaacttaccataagctgtttgaatttcacacacagtaaatagtgcatgccttcccagtttaactccagagaacttgttgagaccacagaatgtagttaaatcacctagatttggattctgagaacaagttacttgccttaaagccttagaaatgtgcccgaaattgtctgtgcatctgtcttttcatctatgaagtgtggaaaatagctgtaatttcctaacagcaatattgtgtgaattaattgttattttggttgagttacacctgaaacacttataagagtgcatatcttataactagcacaaaagtttagaattacatagttttactctttctgtacatagttctgaattaggtgtgaagatggagcaatgcaaccag

SEQ ID NO: 431647 - DNA, 606 bp, Homo sapiens
tgaccctcttggagctccattcactcagcatctgggggaatcagttcctcagagcagcttttcatgtatcacctactcatgtcctgtcctagcctcatgaagaaaattwctctgaggccctgacctttggaggacatttgaaatctcagaagagaagagaatgaccaagacatttagtgagtcagagatcagagctttattataacatgaggtaaaggaggaaaagaagacttgcaattggggtgttacatcaagcacgaagttcttccaggaaagccccatgagtctttgtggtctctgccaaccaatgaatggaatgagaggaagtggaaagagtatccatcaggccgtagcaggttcttggccattcagtcccaagagctcttctgtagcccaggtcagcagcagcccccagagctgtggcagcagccagagcccccagaaggttcactctcacagcagtcggggctctggtgccggcgccggtggaagagacggggcctgtggtggctcagggagcagccaccagccccagagctgcagcagcccccagagctgggaccacagcagctcccagagctgggaccacagcaagaagagactgca

SEQ ID NO: 431648 - DNA, 523 bp, Homo sapiens
ggttgctacaaacatctcttcacagagaatgaggaaactcaggctgacaacaccaaagaaaaatttggactaatgaaagtatctcacatatctcattgcaaagtagtgattcaggagatgaaattcagagccacctgctttggacctcatgggcttttctcatgcaaagaagtgyttcagagattctagtggactgtgagcttctcaaggttagaggttgtgtctgattcacatccaaatcccaaattccagactgatgtccacagacctcatctggtgtgctaaatgaatgtccatttaaccaaacactttgttcattttttaaatctattttacatttggcctgaaagcttgtggagggtagggaccttgtctgaaaataggtaataaataaatagagaatggagcacctctaaaagagacttttagaggtcatatgtttctccttatttgggaacctcagtgagggagtggccactgccatttagttcacagctttattctgctcctcaaacaatgaatg

SEQ ID NO: 431649 - DNA, 598 bp, Homo sapiens
gttcattttttaaatctattttacatttggcctgaaagcttgtggagggtagggaccttgtctgaaaataggtaataaataaatagagaatggagcacctctaaaagagacttttagaggtcatatgtttctccttatttgggarcctcagtgagggagtggccactgccatttagttcacagctttattctgctcctcaaacaatgaatggtacaatgactgccttcaataaatgaaaaaatctgtctaacccaactcttccctgatttttcaatgtcaagtgtactcaatccctcagtcaatgtcatctcccattcctcattcccagggataactggactccagatttagaagctccccaggatggcaagcccttctcaggccacttgttagagtttagggataagctccttaaaagtagcaaccgtaagtgaccatctttcaaccccccataaggcctagatgctgtcaatttgttttagcatgcattattgagcatcttctacgtacaaaacacatgctacatattttcatttcttaatgttcaaatcaatgagtattagggtactcattgatcattttaaaaagaacacagat

SEQ ID NO: 431650 - DNA, 523 bp, Homo sapiens
ggttgctacaaacatctcttcacagagaatgaggaaactcaggctgacaacaccaaagaaaaatttggactaatgaaagtatctcacatatctcattgcaaagtagtgattcaggagatgaaattcagagccacctgctttggacctcatgggcttttctcatgcaaagaagtgcttcagagattctagtggactgtgagcttctcaaggttagaggttgtgtctgattcacatccaaatcccaaattccagactgatgtccacagacctcatctggtgtgctaaatgaatgtccatttaaccaaacactttgttcattttttaaatctattttacatttggcctgaaagcttgtggagggtagggaccttgtctgaaaataggtaataaataaatagagaatggagcacctctaaaagagacttttagaggtcatatgtttctccttatttgggaacctcagtgagggagtggccacygccatttagttcacagctttattctgctcctcaaacaatgaatg

SEQ ID NO: 431651 - DNA, 598 bp, Homo sapiens
gttcattttttaaatctattttacatttggcctgaaagcttgtggagggtagggaccttgtctgaaaataggtaataaataaatagagaatggagcacctctaaaagagacttttagaggtcatatgtttctccttatttgggaacctcagtgagggagtggccactgccatttagttcacagctttattctgctcctcaaacaatgaatggtacaatgactgccttcaataaatgaaaaaatctgtctaacccaactcttccctgatttttcaatgtcaagtgtactcaatccctcagtcaatgtcatctcccattcctcattcccagggataactggactccagatttagaagctccccaggatggcaagcccttctcaggccacttgttagagtttagggataagctccttaaaagtagcaaccgtaagtgaccatctttcaaccccccataaggcctagatgctgtcaatttgttttagcatgcattattgagcatcttctacktacaaaacacatgctacatattttcatttcttaatgttcaaatcaatgagtattagggtactcattgatcattttaaaaagaacacagat

SEQ ID NO: 431652 - DNA, 557 bp, Homo sapiens
aaaaaattagtggtctagataatagatcaaaccagccacaagatttccttaagccaaaacctattccagagcaaagctctaactctcttcaattccatgaaggctgagaaatgtgaggaagctgctgaagaaaagttggaagctaacagaggttggttcatgatgtttaaagaaagaagccrtcttcaaaacctaaagtgcaaggtgaagcagcaagggctgatgcagaaactgcagcaagtgatccagaagatgtagctaagataattgataaaagtgaatacactaagcaacagatttttaatgtaggtgaaacagccttatattggaagaagatgccatctgggacattgatagctagagaggagaaatcaatgcctggcttcaaagtttcaaagaaaggctgattcttgtggtagggactaatgcagctattgacattaagtctaagtcaatcatcatttataattccaaaaatcctagggtccttaagaattatgctaaatctactatgcctgtgctctataaagtggaacaacaaagcctggatggcagca

SEQ ID NO: 431653 - DNA, 561 bp, Homo sapiens
atgataataataatgtcttccttgaagagctgttgtgagttaaacaggttaatatatgtaacatgctaacagcagagactgtcctaaaatgaagcctgtatttgtcgttgttgctgctggtgttttgctgtgaaaagtgagtctgggttgccagaaagtctagactaggaagctgaaccaatgtctcatttccatttggacttactcaacaatcatacccaccacaggaggccacagctgaaggccatcacccttgttgcttttcttgcttgccaggggccaagaacaggtgagagctgagaatacatttttagaacacccacagccctcaagatctaaccagaatatctgttttctttccaagcttaatcctctggccatgatagggcctatgactcaggaaaatgttggggaaatrgctcaagtaccaacagggaaataaagacaactttccctagtgtcaaactgagaagagtctatgtagagaaaattccagacccagattgggctgagattcgataacagagtggctctgcatgttatacagctatctgctcctcc

SEQ ID NO: 431654 - DNA, 593 bp, Homo sapiens
ttcgctggttatccattgtttaaatttaactggccatcttatattttatcttgcaagcctattccaaggcagtgaaaacagatgatgtcaagacgtggaaacagagggtcttcaagcagggtgggtcagatatttgggacatgtwttccctgcagccatttgtgaatgctgaaagtgaaagtggtggctaagaagctgagaggccaaatcaagattttagcatctcaccaggaaggagttcagagcttgacaagaaggagtgcaagaaacaccaggcctcaggtggatccccaagcactaatagtagaagaagtttgtgcatgggatgcctaatcattcttggaactgtggtttgatatcttttgtcagtatgtcaaaattcagagtgattatttcttcatgtactgcttatttctgttctctctcttcttctgggattccaagtattattatctagatattagaacttttcactatagtccatatatattttgtattttttttttattttctggttgtttgtcttcccttgcttcaatattttcttctgtccaatctaacagttgctaattatctcttctgttgtgctgtct

SEQ ID NO: 431655 - DNA, 603 bp, Homo sapiens
gggtaatgtgatacctccagctttgttatttttgcttagcattgccttgggtatttgggctcttttttggttccatttaaattttaaaatagttttttctagttcgtgaagaatgtcatttgtagtttgacacttgatttgtaagtattttgttgagaattttygcaccaatgtttatcaaggttattggcctgcatttttctcttttgttgtgcctctgccaggttttttggtatcaggatgatgctggcctcacagaatgagttggggagtcatccctcctcctcaatattttggaacagtttcagtaggtatactaccagctcttctttgtacttctggtaggattcagctgtgaatccacctggtcctgggctttcttttttttttttttttggttggtagcctgcttattacttattcaattttggaattcatcattagtctgttcatggaatccattcttcctggttcagtcttaggagactgtatgtgtccaagaatttatccatctcttccaggttttctagtttgtgtgcatagaggtgttcattgtagcctctgatgggtgtttatatttctgtagggtcagtggtaacctcc

SEQ ID NO: 431656 - DNA, 628 bp, Homo sapiens
actcatgacacacagggtatgataatccaactgaatgcagagcaaggaaaatgtcagcctgcaacatgcccagtcgatgtctgctccaagtaaaaagaaacttcatctgttcccattgtatctacaatgcctagagtggcacctggcatgggagatacactcattgttgggagaaaagctgagtgttgggagacaagctgagtcagggcttggaacatgtctgggttccaggatctaaaacccccttgtggcctctggaatgtgtctagacttgctggctcctcgcttctagcattcccattattgcaagtagccatatgtttcaaagaaaatgctaaaccatcacagctgtagctcattcacttaatacattgcttcctttcaacccccacatcctcaccacctgtttctttgatcacaaataaatagcatgggctcccagagctcggggcctttgcagtctccatactagcattggccmcctggtcccactttatttcttaactggtcttttctcattcctttgactccaccggacttcgtagcccccccccagcctggtgttgggtctgatcaccccaacactcatcaaatgtttgtgcaatctcagtctctatgcaccctgaaa

SEQ ID NO: 431657 - DNA, 628 bp, Homo sapiens
actcatgacacacagggtatgataatccaactgaatgcagagcaaggaaaatgtcagcctgcaacatgcccagtcgatgtctgctccaagtaaaaagaaacttcatctgttcccattgtatctacaatgcctagagtggcacctggcatgggagatacactcattgttgggagaaaagctgagtgttgggagacaagctgagtcagggcttggaacatgtctgggttccaggatctaaaacccccttgtggcctctggaatgtgtctagacttgctggctcctcgcttctagcattcccattattgcaagtagccatatgtttcaaagaaaatgctaaaccatcacagctgtagctcattcacttaatacattgcttcctttcaacccccacatcctcaccacctgtttctttgatcacaaataaatagcatgggctcccagagctcggggcctttgcagtctccatactagcattggccccctggtcccactttatttcttaactggtcttttctcattcctttgactccaccggacttcgtagccsccccccagcctggtgttgggtctgatcaccccaacactcatcaaatgtttgtgcaatctcagtctctatgcaccctgaaa

SEQ ID NO: 431658 - DNA, 559 bp, Homo sapiens
tgccactgcactccagcctacgtaacagagcaagactctgtctcaaaaaaaaaaaaaaaaaaaaagaaccactcatctcaaagcagcagtaataagctaaaaggacatatacttctgggctgagtgacagaaggagtgaggaagagcaaatagctaataatttgagagggtgacaggcaggaatgtgttttgggaagatcagatttgggttacagaaagaggctgaagggaatgtttccagaaaagggtgagaacrcagagaacatcttagtatttatggctataatgtagcccatgtctgtcagcctcaaggaggaaatgtattccacaatgatctgacagtcatcatctaatcattcacttcctttacctgacccaattcgccaagtgagtcatccacttcttaagggatcttacaatgcagatttcaataattatatttaatacatgctgagtttattgccatataagaaatcaagagtttcagaagaacacacaaaatatatacagtgaagaccttggcagggctgaggcaccagtgctgtgtacatcctctccc

SEQ ID NO: 431659 - DNA, 581 bp, Homo sapiens
tggcttcagttgctactatttcagaatgtaaactctacaccatcccattcagtattaatgttaaatatacccaaacaggatgcttcttccatttgcttcagaagttaattttacaacagaaggtaaacagcataaattccaatttagtctgatattcagacaaattccttgaatatattattgtgtccttttcaacaggcttctgttgaaccctcttgctctgttgtccctcctccattctacaattccagagaaatataaacatgctccaggcataatttagtaccaaagggagactgaattttgaaaagggtaccattcagtctaacacagaatatttttcaacttattctaaagcttgagatgaaaacaatctgaggggcagaccatagctttgagagagaattgaatrcaaaacccacacaagaaaacacatttggtcacgtaacgtttcatagtattatggggaggtaagacgtaactagtgagttacactccaatatcttttttttttttttggacctggggtcttgctctgttgcccaggctggagtgcactggcacaatcacagctcactgca

SEQ ID NO: 431660 - DNA, 610 bp, Homo sapiens
gcctttcctctggttcccagctccacccctccaccctggctctctacagccagttctcctcccagcagacatgggatcttttgcaaaggtaaatcagtccctccctgcccttgaccctgcaaatgttcgtagtcttgtttgctggaccatgggttattggagcgtaaaacttcaccatatctttrtacccatccatcaccccacagcactgagtcaagtgcttccacatcataggcacttggtaaattatttttgaataaattattggaaaaaggtgaatttcttaacagagtttttactagctggaatcttggaactatatttcattagtaaaggtatttatgggaagtggaaaacaaacctccgatggtttccttttgcacctagagtaacagtcctaactaacatggcctcttccacaccctcctaaacaggccaagttcatctggcctcagggcttttgcatttgctgtagctcctacccggaatacttttccctcagatccttgcagggggagctcctgcttgtcattcaggtctggcttaaatgtctctcttcagagaggcctccctgaccacctgcagctaacgaatcctgtacccccacccc

SEQ ID NO: 431661 - DNA, 610 bp, Homo sapiens
gcctttcctctggttcccagctccacccctccaccctggctctctacagccagttctcctcccagcagacatgggatcttttgcaaaggtaaatcagtccctccctgcccttgaccctgcaaatgttcgtagtcttgtttgctggaccatgggttattggagcgtaaaacttcaccatatctttatacccatccatcaccccacagcactgagtcaagtgcttccacatcataggcacttggtaaattatttttgaataaattattggaaaaaggtgaatttcttaacagagtttttactagctggaatcttggaactatatttcattagtaaaggtatttatgggaagtggaaaacaaacctccgatggtttccttttgcacctagagtaacagtcctaactaacatggcctcttccacaccctcctaaacaggccaagttcatctggcctcagggcttttgcatttgctgtagctcctaccyggaatacttttccctcagatccttgcagggggagctcctgcttgtcattcaggtctggcttaaatgtctctcttcagagaggcctccctgaccacctgcagctaacgaatcctgtacccccacccc

SEQ ID NO: 431662 - DNA, 325 bp, Homo sapiens
caataatgcatccagacattgccaaatggtttcatattacacatackttcgggcaactggcttttcaacttacatttttgttgttgttgttgtatcttaacaatagattttggtcatctttccatttcagaacatctggaccgattacatccttcagtctattgtatcatgatttatttaacctggtatcttctatggatgatcatttggatcatttttaattttcttacttttacaaatgtagcttggtgaaaaaaaatatttaaaacccaaactgtctgtagccacttgtaagggaagaagaaaggcatatttcatagcagag

SEQ ID NO: 431663 - DNA, 325 bp, Homo sapiens
caataatgcatccagacattgccaaatggtttcatattacacatacgttcgggcaactggcttttcaacttacatttttgttgttgttgttgtatcttaacaatagattttggtcatctttccatttcagaacatctggaccgattacatccttcartctattgtatcatgatttatttaacctggtatcttctatggatgatcatttggatcatttttaattttcttacttttacaaatgtagcttggtgaaaaaaaatatttaaaacccaaactgtctgtagccacttgtaagggaagaagaaaggcatatttcatagcagag

SEQ ID NO: 431664 - DNA, 325 bp, Homo sapiens
caataatgcatccagacattgccaaatggtttcatattacacatacgttcgggcaactggcttttcaacttacatttttgttgttgttgttgtatcttaacaatagattttggtcatctttccatttcagaacatctggaccgattacatccttcagtctattgtatcatgatttatttaayctggtatcttctatggatgatcatttggatcatttttaattttcttacttttacaaatgtagcttggtgaaaaaaaatatttaaaacccaaactgtctgtagccacttgtaagggaagaagaaaggcatatttcatagcagag

SEQ ID NO: 431665 - DNA, 325 bp, Homo sapiens
caataatgcatccagacattgccaaatggtttcatattacacatacgttcgggcaactggcttttcaacttacatttttgttgttgttgttgtatcttaacaatagattttggtcatctttccatttcagaacatctggaccgattacatccttcagtctattgtatcatgatttatttaacctggtatcttctatggatgatcatttggatcatttttaattttcttacttttacaaatrtagcttggtgaaaaaaaatatttaaaacccaaactgtctgtagccacttgtaagggaagaagaaaggcatatttcatagcagag

SEQ ID NO: 431666 - DNA, 611 bp, Homo sapiens
ccacttgcctacatagctgagtttgcctcctttctgcttctctgctgatggtcactgtgatgatacaacaatctctgtcagtgacacagtcaccagtcctggaggtactagaatgacagtctgtgcatacctgtgcataccctcctctctggactctggccacattggccttctttcagtttcatgaacattccatgatcacttcccattctcccaccccaaaggatctgcacttgcactgtttcctcctgcctggagcactctttccccctttgtgtctcttccccacgaaaggttcagagggctagttaatatctcagctttcttcagatatcatctggatcttcattccctcaaagaaaccttgattctcttcttcctccttcttccacaagtcttgattaagtccttttgttaaaaactctcaaagaaccaattctgyagtacatttatcctaggttataaatatattctcatttgtgtgattatttgattaatttcactttagtctatctctcaggctcattcgcattctaccagttaatttctgtctcctgagtccattcattctctctaataatcatttactatacctcaaaagaattgcctac

SEQ ID NO: 431667 - DNA, 652 bp, Homo sapiens
ctttacctctgcagctttgaattgacctatttttatatttgggtctctgtttaagatttcattgccgtggtagggagagttccaatgctaaactaaaaattcagctgtggggcagagagagcacgtgacggtgagggttcttcttcagagcctctttaactgggaggcctccttgctctcctctttgctctgctgagccagcaaggccctgcagccagcataccagcctctcagggctgtcttctgtgacctcaggcaggtaggagccaccagctgccctggagtcctgcttagaaagtgaggcttcctctgttgcctcaacatcaggagtctgccctggggctgggattgaggtgagggaaccccttcatgtttctccccaaggcttctctccgggagtagtctttgaatggtgggtacccagaggtgctccartgtctgtatattaggacatctgaccctttccaggacacaccaggaccctgacaggcacgtgtgtcctgggcctgttgtcaccctttccatcccctcagtgttgtctcctagtgtcggaaccccaacccccagctgagttcagctcttctctgccctggttatctcaaatggaaaatgagaacagaggtttgctcagccagattccttccctgcagtc

SEQ ID NO: 431668 - DNA, 553 bp, Homo sapiens
acttgccttgtctcagatgagactttggacttggatttttgaattaatgctggaatgagttaagactttgggggactgttgggaaggcatgattgtattttgaaatgtgagaaggacatgagatttgggagcggctaggggcaggatgatatggtttggctttgtgccccgaccaacatctcaygttgatgtgtaatccccatgtgttggaggagtggcctggtgggagatgactgaatcatgggagtggacttcctctttgctattctcatgacagtgaatgacttctcacaaaagctggttgtttaaaagtgtgtagcactttccccttcactctctctgtctccctcctgccaccatgttaagaaggtgtttctaattgtgttgtagtcctttgaatctttcaaaatataatctaaagtccttcaatctctaaactattatattaagtttagaaacagcaacacaaaaaggcttgaatgtcatattaatgacagatagaaatcaaggatttgtgttgcctgttgtgcatttactaactgggtgccagatg

SEQ ID NO: 431669 - DNA, 598 bp, Homo sapiens
tccatccctaattttatagagcttactagaaaattagaaagaaaatcatgctatgtgttgtggttagcatactttcttaacttagtgtgtgtgtgtatatatatatattttttttttccatgacattctataacattatttgtaaaggctgaagaatggtccatgacaggatgtaccgcactttaacccatcttcctgctcctgttcctcactagttaaaacactacagcgaataggtaggtgttcttttaaacacatgggattactgagcccaaagkttgcacatctttaaggctttggcttcatgctctcctgttactcctcaaaacacctgatccatttacgcatccactactgcccattttcccacaggcttgacaattctgggtattcacattttaaaaagactatctagagaaaatggtaacttgagtaaactttttattaatgaatatgcatatttaaaatgtgatcatatacatgtcttctttgagaaaattttctgttcatatcctttgctcatttttctattagggtatttattttattattgataatatctttatatattaaagatattaagctagtatctttggta

SEQ ID NO: 431670 - DNA, 625 bp, Homo sapiens
ttgtctactgatactccaaaaccacgggaatatcctgttcccctagcccctaaactcaatggtctcagcatcctctggtgaccagttattcaccgtggttgtaatagtgacttctgccattgttttcacatttattagttggcattctcctgtaaagaagcatttcactgaccctctccctttttgaaaatcactgtagactcatgaatttttttgtcttataaactgtggaatataccctttactaccaatcttttgatgttcaaatagtccccaaacttgaacagtgggagctgttcaaggctcttgtattattttagtatctctacattaaccttgctttctggcccaataagactctccaasatttcttcaataagccctcacttcttttactggaaaacggtagtcagaaaccaacatatggaactaggtatactcatgctactggggtgtcactgcagagacaagaaatacgtatgtgtgtgtgtgtatagataaaatgtatatatatgtgtattgtgtatatatatatacacacaattttatatatacacacacacattttattatgtatatctatctatctacatatatatagagagagactttttttttttttttc

SEQ ID NO: 431671 - DNA, 572 bp, Homo sapiens
  misc_feature (1)...(572): n = A,T,C or G
gacatacaggcatacctcggacatatcgtgggttcagttgcagaccacagccataaagcgaatatcacaagacagtaagtcacacaaatttttatcttctcagtgcatataaaagttatgtttatactatactatagtcttttaagtgttcaatagcattatgtctttaaaaacactgtatataccttaattaaaaactactttattgctaaaacaaaaaaaaatggtaaccatcatttgagccttcagtgtgttgtaatcttgctggtggagaatcttgccttgatgttgatggctactgactcatcttagtggtggtggttgaagattggtgtggctgcagcaatttcttaaaataaggcaacagtaaagtttactgcatcgactgatgtttcctttcattccatctctgatgacagatttctctgtagcatgcgatgctatttcatagcattttatccacagtagaatyttttcaaaattggagctaatcctctcaggtccttccattgctttatcaactaagtttaggtaatattctaatcctttgttgtcatttcaancaatggtaa

SEQ ID NO: 431672 - DNA, 618 bp, Homo sapiens
gattaagtttaagacttcgcgagaacagaatttcttttggcacctcctctccgcgcgttcttggggtgaggctgggtaattgttcctgcagggtggtgggtgatagtggccagttgactgcgactgtgtttgggtggtgggaagcctgaagaaaaggttgtttcttaccggtcgctgcctcagggaggtagtgcggtagaattttccgctatgggtcattctcggtgtccgcggggaagggcgtgacaaygacgggcgtgacggcgaagcaacagtgtctcgagagcgctgccgcccggagggcgccaggagaagtgcgtccgagacgccgcgcggtgatgctcctgaaaacgtctgcccggcgtagcgggaacccagcatgattttcagggtagtaaagtgtccctgtattttacttacagactgtccgattttttagttttatcacgagggtgggtgttgaattcaggctggaagcctgttagttctcgaccatattttaagttttttgtttaaaataatgtggatgaggctctaaaagtatgactgcccttttctttatccaaaaacgtgattgttcttaaagttcagtgttagccagatttaataacctagtat

SEQ ID NO: 431673 - DNA, 500 bp, Homo sapiens
ggctgagcagtgtgaataaatttggcatgacagacaaatagcaaggtgtctatttgtggcctcaactagttatcccttttgcccttctcctttccttaccttctccttggaatgcagatgcagagtctggaggtgcaacagccatctttcaaccctgaggacaagcagacgctctggagttagactgtccccatccaatcccaggtctgcttttgctagctatttcattgcctctcaaactatcagtggcaaagaagcrgttgttttctcccaatccactgcagaccaataattttgtaaaataaaataaagcaaattacttaaaaagaatgaagttttaaaaagaaatgaacatatgaaatacaacgccaacttaaaaaaaagtttattcaacttacttaataaaattactctatcaaattgctacaaatcacttatactaaatttctgtactcattttttagcagaccactgacaagcagttatgtccaaggtcaaaa

SEQ ID NO: 431674 - DNA, 579 bp, Homo sapiens
cctctctaaaaatgcaaggtcctgagggagagcctaaggtactcgggccacaaccccttaattaatacagtgtatgtgccaaactctatctcatttgagccttacaacactgcttggaggtagactaatgtatgtatcttttcattagtttaytttttaaaatgtgttaaaaggcacacagcataaaatttatcatttaacccttttctttttttttttttggtgagacagactctctctgtcacccaggctgaagtgcagttccgccccttgggttcaagtgattctcaggcctcagccttccaagtagctaggattataggtacccaccattatacctggctaatttttctatttttagtagagacaggtttcaccatgttgaccaggctggtctcaaactccttgaatcaagtgatccacctgccttggcctcccaaactgctgggattacaggcgtgagccactgtgcctggcccatttaaccattttttagtgcattgtgaactgtgcattcactgttgtcatccatccatctccagaactctttgtagtttacaaaacaaactctatacctgt

SEQ ID NO: 431675 - DNA, 579 bp, Homo sapiens
cctctctaaaaatgcaaggtcctgagggagagcctaaggtactcgggccacaaccccttaattaatacagtgtatgtgccaaactctatctcatttgagccttacaacactgcttggaggtagactaatgtatgtatcttttcattagtttactttttaaaatgtgttaaaaggcacacagcataaaatttatcatttaacccttttctttttttttttttggtgagacagactctctctgtcacccaggctgaagtgcagttccgccccttgggttcaagtgattctcaggcctcagccttccaagtagctaggattataggtacccaccattatacctggctaatttttctatttttagtagagacaggtttcaccatgttgaccaggctggtctcaaactccttgaatcaagtgatccacctgccttggcctcccaaactgctgggattacaggcgtgagccactgtgcctggcccatttaaccattttttagtgcwttgtgaactgtgcattcactgttgtcatccatccatctccagaactctttgtagtttacaaaacaaactctatacctgt

SEQ ID NO: 431676 - DNA, 578 bp, Homo sapiens
  misc_feature (1)...(578): n = A,T,C or G
tgttctcatttataagtaggagctaaggcatgggtatrcaaaggcatacagagcgttatgatggacattggagactcagaaatggggagggtggtgggggggtganagatttaaaaaaaatcacctatttggtacaatatacactctttaggtgacaggtatactgaaaccaagacttcaccactttacaattcctccatgtaaccaaaaaccacttgcacccctaaaactatcgaaataaaaataaataaaaaattaaaatactaaaaaagtgctcaagtgatgccttttaagagtacaaacaaggcattgaggggaggatttgagggtttatggagattatcgtctgaatacacatcagctctgtgagggcagaattgtgtctgcgtggctcaacattttacacacagggtatatataataatatgggcataataaataatacaataaataattgctgaatgaagggtctcagccaaccaatatttctcacacctattatataccaagcagtaccattattgactgacattataaaagcatccacttatttgggtaccgtgtgttcagcacaaaca

SEQ ID NO: 431677 - DNA, 578 bp, Homo sapiens
  misc_feature (1)...(578): n = A,T,C or G
tgttctcatttataagtaggagctaaggcatgggtatgcaaaggcatacagagcgttatgatggacattggagactcagaaatggggagggtggtgggggggtganagatttaaaaaaaatcacctatttggtacaatatacactctttaggtgacaggtatactgaaaccaagacttcaccactttacaattcctccatgtaaccaaaaaccacttgcacccctaaractatcgaaataaaaataaataaaaaattaaaatactaaaaaagtgctcaagtgatgccttttaagagtacaaacaaggcattgaggggaggatttgagggtttatggagattatcgtctgaatacacatcagctctgtgagggcagaattgtgtctgcgtggctcaacattttacacacagggtatatataataatatgggcataataaataatacaataaataattgctgaatgaagggtctcagccaaccaatatttctcacacctattatataccaagcagtaccattattgactgacattataaaagcatccacttatttgggtaccgtgtgttcagcacaaaca

SEQ ID NO: 431678 - DNA, 550 bp, Homo sapiens
tcacttcaccctccaccccaccaaaaaaggcctgatctcaggggaagataatttaagcccttctagtgattaattttatctgtgttgtctccagcttgcaactcacccctcattatagaagcgttactagacttcttcatctggtggaccagagaagagggccaaaaaaagagacaggatttgatcatagttaatctttttgtgtcttttgtttatttgctcctttgttctcacaacaactctgcaaacaaggtatttttacctccattttacagattaagaccctggggcttggagacagcaagtgactgtcccaagatcactcagctgataagtgatggagccaggattccagcctagactgtctgactgcaaggggcttgaacttttcaccgtaacgcrggtgggagtctgtggagttgggggtggggtgatgtttcccagctaccctccacacaaaaaatggaaagtcactgtcctgattatttatctaccctaaatgtcccggggtaaaatcccatttcttccaagagaccctgccttgtttatc

SEQ ID NO: 431679 - DNA, 535 bp, Homo sapiens
aagagtcctgctttagacatattgagatagaggggcctaaaggatattttatccttgattccctcaaaggaaggcctgggacaaaggtttttgcatgggtcatttatctgggaagtgatcccaagaacaggagagagggatcagggagggtgggataaaggaaaatggaaaaatggaaagccagtaatggatgtgtatcatattggtcactgccacaggacagtgatgctggacccctggggcctccaagaagcatttacgctgcatttcaggactgtccacctgagagagataagagggagaagcggttatccactgattcttgtacttcagtaatcctgattccacatraagtgttatcccaacccccacccccaatctgggttgcacacgcccaagtgttaggcatttccacaggcaaccagaatgactaggcatccaggggcatcagagaagccccaaggcacgaagcgtggtctaagccaattgttgaaaaaagttactgtctgtgtaaattgagtcatagccagggtag

SEQ ID NO: 431680 - DNA, 581 bp, Homo sapiens
aaagttcctgctgcattctgttatttttatgttatttcaaaatttataaaaccccaatttattgaatttaacttgacaatgcacattagcatctaaaaattaggttcaaaggctttgtcaattgttttctatattgaaatttccataagagtcaaatacattatttggttgagtaagaactgaaaaaaaccacaggagaatcattgtggkttttttttgttgctgttgttgctgctgtttattttgttttgtttttgttttttccagataggtacagggcaactccttctgaaccataaataatagctaacaaactggtcagattagaaaaaaaaatgagctaatactacattcaagtggtaagaatatggaacttctgtatgtctttttatttttaaaaattctccatcaaattcatattttttattatatgaacaatttgcaatttggaggatgaaccatatcatatttgggactgtgaagcatattcctcatagaaaacattgaatagtatttccctgcatgtgtggataatctaaagaacaagaattatcattaagaaatattagatgaacaaaaaa

SEQ ID NO: 431681 - DNA, 581 bp, Homo sapiens
aaagttcctgctgcattctgttatttttatgttatttcaaaatttataaaaccccaatttattgaatttaacttgacaatgcacattagcatctaaaaattaggttcaaaggctttgtcaattgttttctatattgaaatttccataagagtcaaatacattatttggttgagtaagaactgaaaaaaaccacaggagaatcattgtgggtttttkttgttgctgttgttgctgctgtttattttgttttgtttttgttttttccagataggtacagggcaactccttctgaaccataaataatagctaacaaactggtcagattagaaaaaaaaatgagctaatactacattcaagtggtaagaatatggaacttctgtatgtctttttatttttaaaaattctccatcaaattcatattttttattatatgaacaatttgcaatttggaggatgaaccatatcatatttgggactgtgaagcatattcctcatagaaaacattgaatagtatttccctgcatgtgtggataatctaaagaacaagaattatcattaagaaatattagatgaacaaaaaa

SEQ ID NO: 431682 - DNA, 600 bp, Homo sapiens
gccaattttccgtcctcctttccccattgattcatgtaaatagggttagtgggtattaatttatagtttagtttttttatgttgaagaatatccagatgggttgtgcctgaactaaaaggggaattaacatcacccagataagaatgtgatgagggaggtgagagcaccgtcatttgtacaagcatagtagtatcatgttcattggaagcatagagtgattgctattggtaatgaaaggtggtgaaaagtacaagggtgtgtgtgaatgccgagtagctaagaaggtgattcatctgacgtccgccccagctacacatccacgcttctatagcctgttctgtacggctgaacctacaaactacaaactacatttccaactgtcttgcttgttggccttctattrggttttgccagtgggaggcactgtgaggaggacagaagcaggaagaaagaaaacgtccagtttctagctccaagagctgagggctttgttgacagctgctgtgtcagcaggggacaaagcacctgcagcctcaagcattccagacagaagaagcatctcttctgcattttctgcctcttcggtagtggaatgttgt

SEQ ID NO: 431683 - DNA, 523 bp, Homo sapiens
aatattaattcattcgacagctttataagatgcctctactccgtggcactctgccaaaggccaggactagggcagtgaaaaagatacatatgattcctgccctcatggggctcagtctaataaagaaactattttaggtcgatttacttaggtaaagatagaggttagttacaaggaattatagctattaataaaagataaacattttatattctatatttttagttagtatttaaaaraaacacatattctaattagtttaaaatgtcactgtaaatgttatgctagataatgacgaataagtttggcatagtcagatagctatgctgttttagcaaggtagacttgaagtgtgaagaaaaaacatatttcaggattctaaggcctaagcttctaaaaaggaatatggctcatgagaatttggaagctctcaaaagcagaactttaattacgcaattgcaatctacacaatacaggtcacaaatgtattagacagtaatcctttgtgctacttctctgtgat

SEQ ID NO: 431684 - DNA, 599 bp, Homo sapiens
aacagcatattaagttctttattacatataaaatagaatggcatgaaaaaacagagaaagacattagtaaccattaatatcattaataccatttaaattttaaaatatagtcggaagataaaagctatcttctgtaatctgaaggcaaagatttctagaactccctaataccaacatttttctcttcttgtcaaatcattgaactacattttctgggccccatgcatctggactgagatgtgaaggagcaattggccgtctatgagggtctagttttcccatctaaggtaggactctaaggccctggggaatggtggattcactagatggaaaaagcctgtctttaattgacacataggagtttaaaaagggcaacataataatagcaggggacttcaatactccactgacagtactagacaggtcatcaagacagaaagtcaacaaagaaacaatggacttaragtataccctagaacaaatagacttaacagatatttgtaaaacattctaccccaaaactgcagaatatacattctattcatcagcacatggaacattctccaagatagtccatatgataagccacaaaatgagtc

SEQ ID NO: 431685 - DNA, 592 bp, Homo sapiens
ctcctcagccatactacccacatttcaagtgctcaatagccatatgtggataggggctattgtattggacagcaaaggtttagaacacatgtataagatgttaacacagaggaaaagttaaaagttaaatcaatgccaaactattgggaatgttttgtctaccrggtttcaagaaataatgacatgactgatatttttcttattgaatcagctgctcggctggttggctcaactaatagagtcaaacagttgctgggttttataaacaaatcatctccttttttatttggtcctccaattttcttaaggcaaatatttgtgccaaattatgccaaagtctgtctctcctgaatatccctgttatcctcgaatattgttgagtgtcccatgaatataactgttaaatgctgttttgagttaaaaccaagaacacctatattgagaaaaaaattaaatgtagttaatgttgtaccaccatgttttgttctagcttctcaactgtctcatgtaaataagcacaataaacatctactgagtgattctgtaatagtttggatctataggtccatcatttgtgatgacacatagaagt

SEQ ID NO: 431686 - DNA, 483 bp, Homo sapiens
gtaacctgtcttgctagaagactccctctttttgatacagcaagtggtcacactggggaggcccatatgggaagaaatgagggtgaacgccaggcaacacaaaactrgtaactgagagcagccttgagtcaatagccagaaaaaattgagaccctcagtctcgacagcctacaacaaattgaaaactatcaacaaccacctgagcttgcgagagatccttcctcattggaaccttcagatgggatttcagtcctggccaacaccttgactgcagtcttttgagaccctgagcacaggacccagttagccgtgccagactcctgactcacagaaactatgagattctaaatgtatgttgctaagttcgtggtgataccatgacacatcgataggtaactaacacaggaacaccttactgtgtgactgtagcaaatgaaacaggtagaattcaacagcaaaacatgatatcattctcatccagac

SEQ ID NO: 431687 - DNA, 489 bp, Homo sapiens
acagagaaaaaaaaattatggaatatatggtgcattaaaattcttgtgacaatgattgtaacaagaataggaaaggatacccatttatgttattccaatctagagaaccccataggatggtattctcgagacagcaatcatttacgcatccctgagtcatacatgtgaaaatatccatttatgctgttttttccttaaaaataattgcatagattttctactattcaacaaaaaakagcattgaaaataagattttcatctcagaaaaggggcattaatattgttaacatttcagttaagactttatatttgagactaaagaaaaggtttttttataagtaaaacctgttgttcatatgagatttatttggtctattttttcatgtaacacttttctttgaaataaaataggagagtaggactgaatgaattaacctttttcaagaccctttagaatgtgggatagaccgaaagagcagttaggagttt

SEQ ID NO: 431688 - DNA, 554 bp, Homo sapiens
ggtaggtgcataatgaataattggtgaatgaataaattagtcaagattgcttaacgacytgttttaaattttaagcttattattactcaggccctccaggcctcatctcaacctcagcaaccttgtattttagccagctgtgaaagagaccttctctgtacaccactgtccaatgtaggaatgctctggttatgtagataaaattgggagctcaaactgtaaggagggtgagtgtattggaggtgagaaatattctcaagttatgccaactcttcattcttttattcttccctatagtggttacttttctcaggtgagcatagaataaacaatccttagtttagatagtaatttggaaaggagaggtgaaagggtcatactccaaagaattttaccaggatacatcatctcttaatttgtagtcaggacacatcttatttgccagtcctacctctatttttctgatgagaaaaaatatataattaagaatatgataaacacaagttatttgaagatagaaattaaagtaagaagatggtgctactaataacttg

SEQ ID NO: 431689 - DNA, 602 bp, Homo sapiens
aattgatcagaaagggtcagccatgactctgcatgtagttaaatgatggaagcaccagttaaagtcacagttgcatgataataagcaaaagaagaacaaatgagcttagaggaggaaggcaaagaagcttagaagttttgcaggatcttcaagttcagaacaaaggcattatagagtatataaattttaaatacactgsattttgcctccagacttaaacctttttttttccagatgaactgaaatcttgtctgaaactgtctttgttacatcaaagaactactcagaaagctaaaagagacagaagaagcataaaagggcatagtttaaaatgattagtgacaaattccatactgacgagctagaaacagatttttaatgaaagttttatattattccaaaaggaataattctgtttatctttttctgaactgctttattgtaacagtgaaaggaacttggagccaccctggtttgtgaacctaatccaattttcctctgagagtaaataatttgtcatttgtacttttaagttgatgagaattattataatctacaaacagtgtaaaatactaggcttgagaaaatctgtttatttgccc

SEQ ID NO: 431690 - DNA, 485 bp, Homo sapiens
aaaccttcctttgatatcatgagcttttctagctgctgccccattttctaatcccttttagaataaattccctctaagtgttgtctaagctcactgtatctgccctttaccccctcgttgtcttcacaaccttagctcagactgctatgcccagcactgcactgcatctgytctttgcaaagttatcaaatatctgcacttggccaaatgcaaagtttcaactcccagtcttcttcctccttaaactctcagccgagttgatacagctgatacgttcttcctttttcatgtgccttctttctttactcggcttccagtctgcaccttctcagtttttctcctacctcactgaccattccttctcagtatcctttcctagagaggcctcctcctgacctcaacattttggtggattccagggcttggttctcagacctcttctatactcattctatcaacactcacttcctagtttatttcaccat

SEQ ID NO: 431691 - DNA, 609 bp, Homo sapiens
tctagaaccattcaaagagatttccctggtagattgtaccaagcaggtatgttgaagtcagaacagatttkccggagactcaactagactagaaaaagtggtatgcatgttccaacttgcaaaattgagtaagggcaggagaagggataactctgagaagggtaattgtataaaacacatagggaaaaaagtttactttttatattttcatgggtgagcattaaggctggaatacactgtattcagccattcatgtttatttatcattccagaaaaatacaattttagctaacttcccttcctccaaaaaaaaaaagaaaggaaaagaaagccattgtgttcacatgtagtggtgtgattaaggcagcaatggatgatatcggggggaagaatatgagatctggactgcttcagtgttcaattgtttggtctgttgaacaaagagttaaatgaaaaaggtactttaatatttgcttcactaaattccctccatgttttcaattagataaacagaagtacaggtgggaatgtgctgcatattcatttgtcttgctgtttgggggccggcttttaagactgaaatactaatgtaattgtgttgaaatgaac

SEQ ID NO: 431692 - DNA, 565 bp, Homo sapiens
  misc_feature (1)...(565): n = A,T,C or G
gccatctataggcagggaggtagcacataaataagcaaaagtccaaaatattgtaaaataccaattagcatagcatcctttgttgagcaaacttacctttggtctcctttttactataaaacaagccttatagaccacacatacacatsgttagaattttcatacccagagaccctccattgttgtggtatttagggcttgagtttaaagtgagtggtattaacccttcattttccttaagtaagaattagtaacacttgaataaatagcaggtatcaactcataaccattatttgtgtttaaatccgttccccaaaatgaatgaactcttccttcctctgctttgtgtatacactgtgaagtcacatacatagcaaagaactggaaggaggccatgtgtacctgcaggttacgttagcagtgcacctgagacatggtgacagggtactgtatattttagatgtcagtggagatggatgccatctctgaaaggatatgcaattgattgacaaagactgagtgnnnnnnnnnnnnnnnnnnnnnnnnnnnnnnnnnnnnnnnnnnn

SEQ ID NO: 431693 - DNA, 565 bp, Homo sapiens
aaaccatagatgacacaaatgaaaacaaatcccatatacatggatgggtagaatcaatattgtgaaaatgatcatactgccaaaagcaatctgcaaattcaatgcaattcccatcaaattaccatcaacacaattcccatcaatgcaattcccatcaaaataccaccatcattcttcacagaacttgaaaaaaatcctaaaattcatatgtaatcaaaaaagaactcacatagccaaagcaagactatgctaaaaggacaaatctggaggtaacacatcacctgacctyaaactatactaaaaggccatagtcacaaaaacagtatggtactggtataaaaataggcatatagaccaatgaaacaaaatagagaactcagaaataaagccaaatatttacagccaactgatctttgacaaaagaaacaaaaacataaagtgggtaaaggacaacctattcaacaaatggtgctggcataatttgcaagccacatgtagaagaatgaaactagatcctcatctctcaccttgtacaaaaatcaactcaagatggaacaaagactta

SEQ ID NO: 431694 - DNA, 601 bp, Homo sapiens
catccaaaaaccctctaaaactgttaaataaattcagcaaagttttgggatacaaaattaatgtacacaaatcagtagcactgttatacacaaagagctaccaagctgagaatcaaatcaataacttaaccccttttacaataactgcaaaaataaaaagtaaaatacttaggaatctacctaaccaaggaggtgaaagacctctataaggaaaactataaaatgctgctgaaagaaaccatagatgacacaaatgaaaacaaatcccatatacatggatgggtagaatcaatattgtgaaaatgatcatactgccaaaagcaatctgcaaattcaatgcaattcccatcaaattaccatcaacacaattcccatcaatgcaattcccatcaaaataccaccatcattcttcacagaacttgaaaaaaatcctaaaattcatatgtaatcaaaaaagaactcacatagccaaagcaagactatgctaaaaggacaaatctggaggtaacacatcacctgacctcaaactatactaaaagsccatagtcacaaaaacagtatggtactggtataaaaataggcatatagaccaatgaaacaa

SEQ ID NO: 431695 - DNA, 614 bp, Homo sapiens
acaaaaacagtatggtactggtataaaaataggcatatagaccaatgaaacaaaatagagaactcagaaataaagccaaatatttacagccaactgatctttgacaaaagaaacaaaaacataaagtgggtaaaggacaacctattcaacaaatggtgctggcataatttgcaagccacatgtagaagaatgaaactrgatcctcatctctcaccttgtacaaaaatcaactcaagatggaacaaagacttaaatctaaaacctgaaaccacaaaaattctagaagataacattggaaaaatccttctagacattagtttaggcaaagactttgtgacaaagaacctaaaagcaaatgcaaccaaaagaaagataaatagttggaacttaattaaactaaaaagcttctgcacagcaaaagaaataaccagcagagtaaatagacaacccacagagtgggagacagtcttaaaaatctttacttctgacaaaggactaatatccagaatctacaagcaactcaaacaaattagcaagaaaaatacaaacaatcaagtcaaaaagtgggctaaagacattaatagacaattctcaaaagaagaatggccaagaaa

SEQ ID NO: 431696 - DNA, 545 bp, Homo sapiens
ggatagctaatttctacttttaaggtaaattgatatgggcaaacagggaatgagttagttagcgaagctggtgaaacctaaaatctccaaaatayaatagtttaaataaaatccatgttaatttgtatctcatgtaatagcttcaaagtgatcaaaacagactgtgctccatgtggtcacttaagaacccaggaactttctcttatggggattttggatctctttgggtgttgtacacgactgcatagttgaacctgagaacatgatcatgtcctcattccagtccaggggaagggctaaaagagaacaagtaggcacacacccagtgttttctggttaatacccaaaaagatgcagattgtctttcactttctattgacacaaacacatactactggtatttcacctggccatgactaattgcaagggaggttagtaaatgcagtttctagataaggggcaaggctatcactaaaagaaaaagaggagaatggatgccatgcaatagttagtagttttcgcttttttttttttttttttttgag

SEQ ID NO: 431697 - DNA, 545 bp, Homo sapiens
ggatagctaatttctacttttaaggtaaattgatatgggcaaacagggaatgagttagttagcgaagctggtgaaacctaaaatctccaaaatataatagtttaaataaaatccatgttaatttgtatctcatgtaatagcttcaaagtgatcaaaacagactgtgctccatgtggtcacttaagaacccaggaactttctcttatggggattttggatctctttgggtgttgtacacgactgcatagttgaacctgagaacatgatcatgtcctcattccagtccaggggaagggctaaaagagaacaagtaggcacacacccagtgttttctggttaatacccaaaaagatgcagattgtctttcactttctattgacacaaacacatactactggtatttcacctggccatgactaattgcaagggaggttagtaaatgcagtttctagataaggggcaaggctatcactaaaagaaaaagaggagartggatgccatgcaatagttagtagttttcgcttttttttttttttttttttgag

SEQ ID NO: 431698 - DNA, 539 bp, Homo sapiens
gtggaaaccgaatattactttgcagaaggcaaaaactgacatgctgatgtgatatgaggaggactttccaagtcatttattaaattgactatagagtaaagccaccatttttttttaaccagttttgggcagaagaccatcaggcttcctttgcttggttcagaactacctgtgtaaggaaatgccataaacagacacagtcagtctatgagtggacaatagcttagactgagatacttgcttaaacatgtagtgcaacacacgaccatcccagaggcatccaggacacaggccaaacactggcctcagatcattacctaatttgggtttattagatgatcaaggatacctcatctccagtgtaaggcccacagtatttgtctcaatatgtcacaatctctgatttgaygatgcaaaggtggtgtggcatgggtgggtaggtgccatttgcaggattgtgttaaataatttgaccaaaattatatcaggatcctcagagcattttactgccacctaggtagaagaaatctgcttgactc

SEQ ID NO: 431699 - DNA, 516 bp, Homo sapiens
tatgtgatattttgttactgcagccctggaaaatgaatacatatgctttttagcaagtgctgaatagtccacataatccagacaactaaaaaataataatagttacttaatagctgtcaggcattttctacagatgttaacccattcattcctcacaaaactctataaggtgctattataatacctattttgaaaataagaaaaacaaggctcagagagataaataacttgtccaagtcattgagataataagtaggaggactgagattcaaatataggcagtctgatttcagagcctgctcttttaaccatgatgctatactgccaacataatagtgatgataataataatagtaataataacaatcataatgataatctgttctgtccatacttggatgatgtcatatcactarggcttgaactttgcgttatttttctagcagagggaatagatttttgcttacacattcaaacagtctggccaaatttcctttgcaaccaatagtatgaata

SEQ ID NO: 431700 - DNA, 593 bp, Homo sapiens
tgctatgtagctaagaactttaaatttagattatttagcaattcaagtttgaaaattaaaggatgaagggtaaggagaaagaataccgaagaagaacaggcagtgacttatttcaatagttttaaaaacaacaggcagttggaccatggatacattatttggcatttctatcttaccagattattctgtaccactgctaagccacacagttgctggcagaagctgtactgggttgtaaagtaacagttcctccccagtcttcacaatcagggagcagatgatgaatttgcagagtgctcagaggrcggcatcccagggcttcaatggcccagagttctgtttccttttctaaatcagaggtcttttgttctgccacagagtgacctttaaaatggtttcagcacctagatctccctgctgtcatcaccacagactgctagctgacactcacactccgactcccccagcctctctctcacaacactttccgacttactgactggcctttggcaaggatttaactgttgccaaagagtaagtgaaaacgtttgcagtgatgtcagcccgtcagcaaggcctgattaagagaccaa

SEQ ID NO: 431701 - DNA, 567 bp, Homo sapiens
ggtttagtgggatccccagaaaaattgatcttgatatcaatactcaaagaatgcagaggtttagtttgtttgtttgtttgtttaaaaaaggtcttaggcaaatgaaattagattacacatgtcttctgacatgtggcaccatcattctatgagaccaaggtttggacctgtggtccttaggacagaatcatctccaaagagtagttaccagacacagtgtgaggttaagactcactgagtgaacttaactcggttatttcacctgttagagtcttggcctaactgaagttgaatttagtaataaccaggaaaacctcatgaaacatgaaataaggcatttaaccaacgttccttggatgaattgtcagatgggagtgaagaakcatcatatgatcacaatgtatgtaaagatatagtcacctaatcctagagaaaatgccagccttatacagtggcttggttttcctgctgataaacagctcattgtgtggaactcagaggaaaacaagataccaaaaaatctaacatagtcacagtctcagtgatgacaaaaaatgagataaagtg

SEQ ID NO: 431702 - DNA, 523 bp, Homo sapiens
ttctccctccccacagcccctgataacctccattctatgttcagtctccatgagtttgactactctaggtatctcatgtaagtggaatcatacaatatttgttcttttgtgactgactggtttatttcacttaacataatgtrccttcaaggttcatctgtattgtagcatgcatcatcatttccttcctttttaagactgaataatatcccattatatgtatgtaccacattttgtttatccattcatatccaggtgtcagtggacccttgggctgcctccaccttttggctcttgggagtaatgctgctatgaacactggtggacaaatatctgttgaagtctctgctttcagttctttggtgtatatacccagaagtgagattgctagagcatatgataattctatgtttaacagagaatgacttttttaaaaaagctataagaattatgttcaaaaaactagaagatggaaaatttcaccagagacttgagatctgcaaaaacaaaatttaaaaaaaag

SEQ ID NO: 431703 - DNA, 569 bp, Homo sapiens
gcctttagctctcttgtcctcaaactctttattcacccaggttacatttctaagtccctcatatcctattttaatctcgtttgtttaatcaatttctctttctctctctctctggctctctctctctctttctctccctattagaagaaaaagagctgctcatttcagacagaaaaytaaaatgaacccctccttttgtaatgctggacaatcccattattaaatatttcttaatctctctggtgtgagacatagttccctgaagtgtacaaagtgttttgatatagaaggagatgaagggcaaacaacattattccagctacaaaaagatatcggcatcttttctgtattgatgtcattttctttaccagccttctaagaatacttatgacccagcaagcaaacggtatttagtgactgcccatgtgtacacagtcctctgttaggcagcataccagttatataaaaaaaaaaaacccagctctggccttctaaacacttaattctgcaataaaacgactgtatgagcaaaaatgagtgtttcagtcacatgattctattagcctttg

SEQ ID NO: 431704 - DNA, 569 bp, Homo sapiens
gcctttagctctcttgtcctcaaactctttattcacccaggttacatttctaagtccctcatatcctattttaatctcgtttgtttaatcaatttctctttctctctctctctggctctctctctctctttctctccctattagaagaaaaagagctgctcatttcagacagaaaattaaaatgaacccctccttttgtaatgctggacaatcccattattaaatatttcttaatctctctggtgtgagacatagttccctgaagtgtacaaagtgttttgatatagaaggagatgaagggcaaacaacattattccagctacaaaaagatatcggcatcttttctgtattgatgtcattttctttaccagccttctaagaatacttatgacccagcaagcaaacggtatttagtgactgcccatgtgtacacagtcctctgttaggcagcataccagttayataaaaaaaaaaaacccagctctggccttctaaacacttaattctgcaataaaacgactgtatgagcaaaaatgagtgtttcagtcacatgattctattagcctttg

SEQ ID NO: 431705 - DNA, 571 bp, Homo sapiens
ttttcatcctattcaggcttttcaaataaggtttgggatcaactacataaaaactttttgtgttgatttctttaatgctcttcccttaatttgtcccactactcactcccttccactctgctaccgcaaattaggtttcacagcaagggttttaaagtaagtaaaaccttgaaaaggaagacgctactgttcagagattcrttgctatagaatttacatgggccatatgaactttctagataagagcaaagcaaaatctaaagcatactgcttataatataaactttttctgctgtttcatgtagcttacatgtaagaagagctcttgaatttttttgtttgttttgctgctttttaaaaaattcattattagagatgagaagcagaacttattttaaactcttctgaaactggttttaaggagtcttaaggagcctttttttcttctcttttgccttcagccacatatcaacagcattagattgttgtctttattttgaatgtcatgtttgaaaggtcttaaaaaatctgatctttctatgaatggaaaattacttgtttgaaaagagtt

SEQ ID NO: 431706 - DNA, 618 bp, Homo sapiens
catgttagcttcctccccacatttcctcagtgcttagaggcatgaactggagcttctttcatttattctattaattcatatttttccattattcatgtgtttccgtattttccagggacaaaaacaatttgtttatctatttcttcattcccccaacatcccatttctgttttctctcaataaatagctgattgggagatttcaaattatgaggaaattctcctgttgcagtccccacatggtatacagagatgatcagatcataatatattttcccatatttttgcctgtttgtagtcagagcttttagctttgttcgtactaaacatgtgcacctatgtatgtgcttaaagatgatatttttgttatactcagattaggaaaaataataaaaaagtaatgccagtataagacgccatttcagagggtaagggcagtagaggaagacaaagattagcaaataagaaccagagagggatgtttgaggaagagatatgtggtgaggactgcttttaagatgtggggtatagcatgtggtaggatctgtgwtcattgtaaaatgattttttcttgatggaactcttggtggcattgggcacctgagtgctctttcagaat

SEQ ID NO: 431707 - DNA, 616 bp, Homo sapiens
tctagcccgcccatcttcgggggtatgaactagtagtcagtgatcatggccagtgggaatatttgtagcttcctggtctcagaggccagagatggccagagcagaggcatgaagcactcccacaatcagcagtctttggctcaaaaacagtgaagaccctcaattagaaagtgagggatgatctcatgaaattcctggggaactgcctggcaaaggtactgaatcctttggtctgcttcctaacagatagtcatctgggtaagagcagccctacttcattagcgtgatagagtagttttggtttttttaatatttttaatttttcaatgtgaagttaggggtggtgttaaaaatacaaattttcaaacttcccctcagacctaccaaatcagaatctctggaaataaggcccaagaattcatgttttcaggagggaaataaacatctcaaaagctccatcaaattagactaaaattaagtcatctgctcatgtctcatacaatgtctcatacaaccaggagaataagaccaggygactaaaccagtcataccaggcctggtgatttcctgagcacatggtctcaaaggtgtgaacattaggattaggttctgcctc

SEQ ID NO: 431708 - DNA, 555 bp, Homo sapiens
ggatggacagatatgtaaattaaaagtctggtttgctgtggcagggcacagtagctcatgcctgtaattccagcactttgggaggctgaagcaggtggatcacctgaggttgggagttcaagaccagcctggccaacatgrtggaaccctgtctctactaaaaatacaaaaattggctgggtgtggtggcaggcacctgtaatcccagctacttgggaggctgaggcaggagaatcgcctgaacccaggaggtggaggttgcagtgagccgagatcacagcattgcactctagcctgggcgacaagagcaaaactgaaaaaaaaagtctggcttgctatagaaataatctgaataatggaaatgatgatgggtttctaagcatttatttttttcatagactgtagattcttatggatcagggatatcaatacgttgttctggtcatatctcattctctcatgcttcgtatagagttagtcaaggctatctcatataaggaattatagattctttctcaactagaaagtagaagttttaattttttaagaaaatta

SEQ ID NO: 431709 - DNA, 515 bp, Homo sapiens
gtcaagaggctggagtcaaccaatgagcacagctgtgaattaatgcagatcctgtgttaggaaatcagtgaaagtggagaggaaatgtcaaatctgaaagatgtttgaaaggaagatcaatgggtgataatcgagcaatgaaaagaaaggggaaaaaaatgcaggaggattcggaggtttctagcctggcagactaagtggagccttggcctcaaggtaagagttgtgaattctggaggactgtgtacatttgaggaagaactctaaagaacggatagaagagatacatrtaataaaagttgtaagcaattcttatagaattggaagctccagatttatttctactgtgttgagacctgaattatatacttttgtgtttagctctgtgtatttttcagttggaacatacttggtagattttttttaaagaggataatgtcttaatgagacagacaactgatgtttttgaaatccttacacactacatttaatcgacaaactaagggcatgttgat

SEQ ID NO: 431710 - DNA, 515 bp, Homo sapiens
gtcaagaggctggagtcaaccaatgagcacagctgtgaattaatgcagatcctgtgttaggaaatcagtgaaagtggagaggaaatgtcaaatctgaaagatgtttgaaaggaagatcaatgggtgataatcgagcaatgaaaagaaaggggaaaaaaatgcaggaggattcggaggtttctagcctggcagactaagtggagccttggcctcaaggtaagagttgtgaattctggaggactgtgtacatttgaggaagaactctaaagaacggatagaagagatacatataataaaagttgtaagcaattcttatagaattggaagctccagatttatttctactgtgttgagacctgaattatatacttttgtgtttagctctgtgtatttttcagttggaacatacttggtagatttttttwaaagaggataatgtcttaatgagacagacaactgatgtttttgaaatccttacacactacatttaatcgacaaactaagggcatgttgat

SEQ ID NO: 431711 - DNA, 515 bp, Homo sapiens
gtcaagaggctggagtcaaccaatgagcacagctgtgaattaatgcagatcctgtgttaggaaatcagtgaaagtggagaggaaatgtcaaatctgaaagatgtttgaaaggaagatcaatgggtgataatcgagcaatgaaaagaaaggggaaaaaaatgcaggaggattcggaggtttctagcctggcagactaagtggagccttggcctcaaggtaagagttgtgaattctggaggactgtgtacatttgaggaagaactctaaagaacggatagaagagatacatataataaaagttgtaagcaattcttatagaattggaagctccagatttatttctactgtgttgagacctgaattatatacttttgtgtttagctctgtgtatttttcagttggaacatacttggtagattttttttaaagaggataatgtcttaatgagacagacaactgatgtttttgaaatccttacacactacatktaatcgacaaactaagggcatgttgat

SEQ ID NO: 431712 - DNA, 599 bp, Homo sapiens
aagggcaagtttttggagagagaatttggaactaataccatgcctattttcagtgtctattcaaggtctatctgagattagctctagcttaaaattcaagaagtaaagcaaaagttcaaaatgtttgttgtttattttgctattgtaacagttttaaaaatgttttctagttaagctctaagaaatctgccatcagtgaaagtaaaattatctttatccagagtgtttgctccttagctgcctctgtaaagagcaggtgcrtgtctcaaaagggctgaaatattcctgaaaagtcatgtaccatggagaaagtactttaggattcttacttgggctctccctgcagcgtgagaaaacctgaaagtgttgagaaagaggctgcttgagagaagaaaactctaactgtgagctgaaccttagaacctcaggctaggcccatgggaaagctacttttgagtcgagcatatgggaatcaagccgaatgaagtctaaattgttgagattctagcacagcggaaggctatggctatcatgaacattctagaagattgtttttcctttctgtgaatcaagagtaaaatcataagtttctttagaca

SEQ ID NO: 431713 - DNA, 582 bp, Homo sapiens
tctatagcagcttatagccttcagactgcaaacctaccactcttctacttccttaaggctatatatgatagaaaaaataaggtgggtgggtgaggataaatatcttccaagtacattaaaggggaaaagggaagggaaataagattcgatgagagttgcttaacacacaatttgatttcatctttatttacagatgtggaaacaaagattcttggaacctaagtagcttatctacatagttaagmagtaattgatatgggacggaagcccagatctctctgatcctgaagcctgtggtctgtcccctgtgccatatcacacagcatacacactgtgggcacttgaaagaatttccagaatgatataaattgatggcacgaacatacaaaagacagtgcccaaaagagaaaaaaaaaagagataaaagtataatacaaggaaaagttaaatttaataggaaatatgttattaatttatctacttgtactttgtcctcctacagaattcaagtattttcatagtaatgcattttcactgccagtagcaaaatcggtggcaaaggaagaataattgttttcagga

SEQ ID NO: 431714 - DNA, 442 bp, Homo sapiens
gtctaaaaccacactcccatttatattaaataataatgaatgaggacaaatctggtatccaacaacattttagaaaagtctgactccagtttttatccagctatagggatggaggttccctattcactgaagaagcaacagtgtgatatcagggaagaattcagttatcactcacyatgtaaaaccaccactgtattcagaaagtgggcattttgcacatataacatttccatgaaccatacatgtatgcacacaagcactcatgtgtgcacacacatatacacactcacaggcaaggtgatttttttccttcatccctgtcagtgccctgtggtggcggtcattgatctctatgtgacccaaactcccatggggcatggcaatgcatctgtgctatggcgacaaagttcaacagctcacacacttggatgctatggtaata

SEQ ID NO: 431715 - DNA, 603 bp, Homo sapiens
cttagaaccaaatttaaacatttccaaatgtttcatcataaaagcaatacatattcaagataaatattcaaacaatacataaggatggaaagtgtgaaataaaagtgtaaaygggactttttgctcacattctgagaacactatttcccaaacattctctgctgtagaaataatactttcttgattccaattctcatagaccaatacttttgtaaaatacattaaaattactgagttgggcgtggtggctcacgcctgtaatcctggcactttggaaggctgaggtgggcagatcacttgagcccaagggttcgagaccagcctgggcaatatggcaaaaccccatctttacaaaaaaaaaaaatgacccaggtgtggtggcatgtgcctgtagtcccagttactccagaggctgaggtgggagaattgtttgagcctgggaggcagagattgcagggagccaatattgcaccactgctctccagcctgggtgacagagtgagatcctgtctcaaataaaaataataataattactgaaataattacaaaaaagtacccaaatacatataaagtacaaactcattagaaacaatacaaagttc

SEQ ID NO: 431716 - DNA, 603 bp, Homo sapiens
cttagaaccaaatttaaacatttccaaatgtttcatcataaaagcaatacatattcaagataaatattcaaacaatacataaggatggaaagtgtgaaataaaagtgtaaacgggactttttgctcacattctgagaacactatttcccaaacattctctgctgtagaaataatactttcttgattccaattctcatagaccaatacttttgtaaaatacattaaaattactgagttgggcgtggtggctcaygcctgtaatcctggcactttggaaggctgaggtgggcagatcacttgagcccaagggttcgagaccagcctgggcaatatggcaaaaccccatctttacaaaaaaaaaaaatgacccaggtgtggtggcatgtgcctgtagtcccagttactccagaggctgaggtgggagaattgtttgagcctgggaggcagagattgcagggagccaatattgcaccactgctctccagcctgggtgacagagtgagatcctgtctcaaataaaaataataataattactgaaataattacaaaaaagtacccaaatacatataaagtacaaactcattagaaacaatacaaagttc

SEQ ID NO: 431717 - DNA, 598 bp, Homo sapiens
cgaggtcaggagattgagatcatcctggccaacatggtgaaaccccgtctctattaaaaatacaaaaattagctgggtgwggtggcgcatgcctgtaatcccagcgactcaggaggctgaggcaggagaatcatttgaacccaggaggcggagattgcagtgagccgagatcacgtcactgcactccagcctggtgacagagcaagactccatctaaaaaaaaaatagaaagaaattgctaagtccatccttgggcacatttttccttatgtcatcttcataaatgaatcagtgtacatctttcccatgcatgctttctctctggttaagtgagggaagaagctggctgttcactggcagtcgctgaggacttcgctcctgggatgtgcccaggagatgtatgtggacactacagtttcaggggcagcaggaactgcctcccttgtgatacagccttcaagatgctactttgttctgcatcatcacagaccacggcaaggccaatccaaattgcatttcacaaggcacaactaaataataacttgtgacattattgccatgttgatttaggcagctaggcagaaggaaggaaggaagg

SEQ ID NO: 431718 - DNA, 598 bp, Homo sapiens
cgaggtcaggagattgagatcatcctggccaacatggtgaaaccccgtctctattaaaaatacaaaaattagctgggtgaggtggcgcatgcctgtaatcccagcgactcaggaggctgaggcaggagaatcrtttgaacccaggaggcggagattgcagtgagccgagatcacgtcactgcactccagcctggtgacagagcaagactccatctaaaaaaaaaatagaaagaaattgctaagtccatccttgggcacatttttccttatgtcatcttcataaatgaatcagtgtacatctttcccatgcatgctttctctctggttaagtgagggaagaagctggctgttcactggcagtcgctgaggacttcgctcctgggatgtgcccaggagatgtatgtggacactacagtttcaggggcagcaggaactgcctcccttgtgatacagccttcaagatgctactttgttctgcatcatcacagaccacggcaaggccaatccaaattgcatttcacaaggcacaactaaataataacttgtgacattattgccatgttgatttaggcagctaggcagaaggaaggaaggaagg

SEQ ID NO: 431719 - DNA, 561 bp, Homo sapiens
tttcattcttgccaaagttgcttggcagattcttagaggctgcagagcatgttccttgaaaaccaactggatgtcatgaccaggcttaaaagcatctctttaattacagccacagagatgttcctcttccctttcatctggggcctctaaggagctcagctcctgcccattctctcgtgaaaggttatccgtgccacatcaccattcagtttgtgcatccaaacagaagccttggagcattttctcctggctttggttggcacggccggcctgtggggtgcgactctactactctccscgtctgccttttgctctcctcttgaggacttatcagattagtggcctgctctgtgccacatgtgtccttcacgagagcattcacttcaggccacttccttgaaggggctgtgactgcgctcctctctctcagaagatgcgaaccaggaaaatatttgctcctctctctctatagagttggcttattttaaagttgacttgattgagttgcagagactgctatagagtatttaaaaatgatttgcaacaattactgaaagtcag

SEQ ID NO: 431720 - DNA, 561 bp, Homo sapiens
tttcattcttgccaaagttgcttggcagattcttagaggctgcagagcatgttccttgaaaaccaactggatgtcatgaccaggcttaaaagcatctctttaattacagccacagagatgttcctcttccctttcatctggggcctctaaggagctcagctcctgcccattctctcgtgaaaggttatccgtgccacatcaccattcagtttgtgcatccaaacagaagccttggagcattttctcctggctttggttggcacggccggcctgtggggtgcgactctactactctccgcgtctgccttttgctctcctcttgaggacttatcagattagtggcctgctctgtgccacatgtgtccttcacgagagcattcacttcaggccacttccttgaaggggctgtgactgygctcctctctctcagaagatgcgaaccaggaaaatatttgctcctctctctctatagagttggcttattttaaagttgacttgattgagttgcagagactgctatagagtatttaaaaatgatttgcaacaattactgaaagtcag

SEQ ID NO: 431721 - DNA, 561 bp, Homo sapiens
tttcattcttgccaaagttgcttggcagattcttagaggctgcagagcatgttccttgaaaaccaactggatgtcatgaccaggcttaaaagcatctctttaattacagccacagagatgttcctcttccctttcatctggggcctctaaggagctcagctcctgcccattctctcgtgaaaggttatccgtgccacatcaccattcagtttgtgcatccaaacagaagccttggagcattttctcctggctttggttggcacggccggcctgtggggtgcgactctactactctccgcgtctgccttttgctctcctcttgaggacttatcagattagtggcctgctctgtgccacatgtgtccttcacgagagcattcacttcaggccacttccttgaaggggctgtgactgcgctcctctctctcagaagatgcgaaccaggaaaatatttgctcctctctctctatagagttggcttattttaaagttgacttgattgagttgcagagactgctatagagyatttaaaaatgatttgcaacaattactgaaagtcag

SEQ ID NO: 431722 - DNA, 546 bp, Homo sapiens
acaaagcagtaacctgatagacgacaaatactatgagcttaatggctgatgtccattacggatgggtcttgctcactctttggaggagattggcactgaagggattactgagcaaacagagcacctgaaaaaacttgcactccacagtctgtcatcagggctctgatcgaaggcattacctgagaacggcggctgttatctgaagctgcaaaccgctgccactgccaacaattctcaacaaagagtggcgatcatgaaaggctgagccaccgaggcaggcggctgggtacgccatttctccatagcccaccccctttacggatcacctgagcccaagcaccaggccgccctttaattgtggaaaaccacagcaactgaggacaggcatcctagatctgtgwgtgttgaaaaacaaaaaggctccaaatattattctcttgtttagcacttaaacggcatctttgatttcacaaccagctaaggcatgtgtctgtacacatgtttacggttctggtggaaatctttggattctgatgatattgaaag

SEQ ID NO: 431723 - DNA, 524 bp, Homo sapiens
tactggaggctgagatgtctaagctcaaggtgctggcaggtttgatgtctggtaacggcctgtttcctggttcataaagggtgccttcttgctgtgtcctcacatggagaaagagcaaggcatcactccacggtctctcatataagggcactaatcccattcctgagggctctaccctcatgacctcctaaaggccccactcctgatgccatcaccttggggggttggatttcaccatatggatttgggggggcaggggcacaaacattcagaccatagccaggggacactctgctcagactgaaagaarctctgtttgaacacgtgctttccccatccctgtggcaggaagaatagagctgaacggtctcaccctggtggttagagctctgaccacacgtgtccttttcacccaacctatcattaggaactagccacttgaccacacctaaacaaccagaaggagaagaaatatgatactcctgctggcctgaaggaagggacatggtgtcagtgtgccatag

SEQ ID NO: 431724 - DNA, 588 bp, Homo sapiens
ttaagtaacatgactgcagataagccttgatctccaagatacacatctccttttgtgttggaaccttttctscaaattgtacttgtctccatttgactggattcaaagccagattgagaaagtagtttcagatatgtcaaaataattttttagagcaagagtgtcacttaatgctatagtgtggcgttttactaaatcgaactataggaaagttaatttagtcccttttgcccaatatttcagttactgagatgatttaacagtcaaaataaagtccattacttaaatgaaactggtatgttcacagttctgtgttcactagaaacaatacccaccttatagtagatattgaatgaatgtttcttaattgccccctagaatatacaaatgcaaatgttacttgcttctgaaatttggtttcagagatgagttaagtgtgttaatcctatgaggatttctaatacaatttgtcactattatttgaatgagagtctgtcataattgactgtaaatgcactttaattacattttaataaccttcatatggaaaatggtaaataattgtaagtaagtcatcttggataaact

SEQ ID NO: 431725 - DNA, 588 bp, Homo sapiens
ttaagtaacatgactgcagataagccttgatctccaagatacacatctccttttgtgttggaaccttttctgcaaattgtrcttgtctccatttgactggattcaaagccagattgagaaagtagtttcagatatgtcaaaataattttttagagcaagagtgtcacttaatgctatagtgtggcgttttactaaatcgaactataggaaagttaatttagtcccttttgcccaatatttcagttactgagatgatttaacagtcaaaataaagtccattacttaaatgaaactggtatgttcacagttctgtgttcactagaaacaatacccaccttatagtagatattgaatgaatgtttcttaattgccccctagaatatacaaatgcaaatgttacttgcttctgaaatttggtttcagagatgagttaagtgtgttaatcctatgaggatttctaatacaatttgtcactattatttgaatgagagtctgtcataattgactgtaaatgcactttaattacattttaataaccttcatatggaaaatggtaaataattgtaagtaagtcatcttggataaact

SEQ ID NO: 431726 - DNA, 588 bp, Homo sapiens
ttaagtaacatgactgcagataagccttgatctccaagatacacatctccttttgtgttggaaccttttctgcaaattgtayttgtctccatttgactggattcaaagccagattgagaaagtagtttcagatatgtcaaaataattttttagagcaagagtgtcacttaatgctatagtgtggcgttttactaaatcgaactataggaaagttaatttagtcccttttgcccaatatttcagttactgagatgatttaacagtcaaaataaagtccattacttaaatgaaactggtatgttcacagttctgtgttcactagaaacaatacccaccttatagtagatattgaatgaatgtttcttaattgccccctagaatatacaaatgcaaatgttacttgcttctgaaatttggtttcagagatgagttaagtgtgttaatcctatgaggatttctaatacaatttgtcactattatttgaatgagagtctgtcataattgactgtaaatgcactttaattacattttaataaccttcatatggaaaatggtaaataattgtaagtaagtcatcttggataaact

SEQ ID NO: 431727 - DNA, 501 bp, Homo sapiens
cagctaaatgctttttggcaggttgtggaatgcacactccacattaagtggggtgttgaacaagataatgatactaaccttgtaacaacttgaaatttccattaagaggctggtagatgtactggcatcatgtacttaaccaactaaaattcttattaagggagaaaggtgtgtttctactggcgactactaagaaataattaagactttccactccataactgtaaagggaagcatcatttcacgttaccatgaacagaaataytggcgaatgtgccaagtagtagctctgtgatactgtagcctagacttcaggcaaagcaatgtaataatcaacatttcccccactccctgcctccacaaaattcactttttcctgtctctaacgttgattttctgtagcccaggccatctttctggcatcctgttctgcataccccaggcatattagctcaagtaggctatggcttggcaggaacagaccatgaagtcacattctgt

SEQ ID NO: 431728 - DNA, 595 bp, Homo sapiens
acccactttataataacacaagtgtttccttgctaatcccttggcaggttcattatctgtgcagcctcaggcaatggttagcctatcgtgaaagtgaaatttaaccctcagcatgaaattaatcctcaaagacttatgtctgctcagtctagaaataatacattctaagtgattttataatccctgactctttctttatgcatgggtgctaaattgttatcgagatgttatagaccatgctaggaaattgatttttgtttactttagaaaactggacaaatctataagaacaaaaagtctgatttcccagttcacatttgcagttgtaaacccaacatggtgggatgactattttttaggcattaatagggttaccatttgttggtgatcatacttgtgtttatgctgttctttacctaatatatctaggaaaagatttttttttaatgtcayttgacaaaaaggccctttcgttgatctcattgacatttgacatggaaaaactgggaagcaccatgagaatgtcaaaccagtgtgaatggctccttgtagagtcagaaaacctttaacaagagtaaaaggaagtgaggctgtg

SEQ ID NO: 431729 - DNA, 562 bp, Homo sapiens
tccatctactgtaataaagtgagcccagaagacataaagatacagcctagttaattagctgcctttaaaacmaatagcgttggttttgtaaactcacctggcaaacagtggcagatatctctatttaccatgtgtccatgcatcacgcctcacttcccctttatctcagagcatcttatgaaagttggcctagtctcttttgtacttgttattcctttaaaaagagtgattgaaatgttcacaggtgggtgaggggactatacattatgtcgttgtaaacccagaacagtcttcccatctaccactctgcctcctctgaaagtgcttgaatggccattcttcctgaaataaggcaaaaataggagttaaacagaactcaagatactctggtgatgtaggtagagaaagacataaaactaatatttattttcttcagtgtaccatgaactatgctagaatttttttgcataaatttttatcaacacagcactattaacacaacatagaatcctcatgcccatgttttgtataaggtaactgaagttaaataacttacccaaag

SEQ ID NO: 431730 - DNA, 599 bp, Homo sapiens
taaacatgtggttttactatagctcataaaagatgattgtgtgaaaacctcagaaaaattgaaactcggcacagtataaatgaatgccttcccttctagttttatcgctgtgtctcgctcaaggcttgaagatgtgattagaaatgggtgtctagaggccagacaaggtactaggatttagtaagttgcctccatttgtctgttgtgttgttgactctggagtgtgggttgratagaaggggtctatagatacatgtaggtgtgtgttcatgggtgctctgggccaggcatgcaaagaaaaataaatgactgtaaagtaatcagtaggggcataatgagttggttggtgcaggtggctgagactctctgcaaaaattccaggagaacttgacctcaaatcattgcttcagcattttccattttctcaagtaaaataaaatgtgaaatggacttgtttttagcagtagcattttgtttttatttgcccacaaggggacagaacaacagtgcctttgaaaagccagccatgtgtgtagccctggggcttgctctctggatcatggggtggtgagaattggtgtgcttttagaataccggaa

SEQ ID NO: 431731 - DNA, 599 bp, Homo sapiens
taaacatgtggttttactatagctcataaaagatgattgtgtgaaaacctcagaaaaattgaaactcggcacagtataaatgaatgccttcccttctagttttatcgctgtgtctcgctcaaggcttgaagatgtgattagaaatgggtgtctagaggccagacaaggtactaggatttagtaagttgcctccatttgtctgttgtgttgttgactctggagtgtgggttgaatagaaggggtctatagatacatgtaggtgtgtgttcatgggtgctctgggccaggcatgcaaagaaaaataaatgactgtaaagtaatcagtaggggcataatgagttggttggtgcaggtggctgagactctctgcaaaaattccaggagaacttgacctcaaakcattgcttcagcattttccattttctcaagtaaaataaaatgtgaaatggacttgtttttagcagtagcattttgtttttatttgcccacaaggggacagaacaacagtgcctttgaaaagccagccatgtgtgtagccctggggcttgctctctggatcatggggtggtgagaattggtgtgcttttagaataccggaa

SEQ ID NO: 431732 - DNA, 590 bp, Homo sapiens
gggacacaggatggggtgggcagggtgggtggtgggggatatgaagggaaatgtttgtagtgggtcatttgggaatccttcctcacctcaatgaagagtcctactccacaaggctatgtagcacagaaggaaccaaggcttgagaagtaggtggtyggcagttcaaatcctggatctgtcacttgctagatgccaggcctcaggctacttgcttaatctcttagaaacttctttcgtcatccacacaatgaggatgcaaagattgccacgtcttattgccaacaagaaccagggagctctgaccttacatgccaggtccaggttcaaccctggttttcactgtgtggtctgagaatggcttgtaggtatttggggcctgattgctgaaggcttgttttggttttcatgtattagcagactgtatgctgtgttctgggcatggtggggcacagggaagggagtcagtcatgcagcctgctggttgagaggtaaagcatgagcacaggtcactaatagggtaaggtagaaagtgaggcaagctccacaaagggcagatggtgaggctgaggcaaggctaggagggagtgttc

SEQ ID NO: 431733 - DNA, 405 bp, Homo sapiens
aggcaataaaaacaaaaataaataagtgagactacattagactaagaagcttctgcacaggaagtcattgataaagkgaaaagacaaactacaaaacagaagaaaatatttgcaagctttatatctgataaggggttaatctccaaaatatgtaaggaactcctacaactcaataggcaaaaaacaaactattaacctgatagttaggttactaaacatcaacgttcaacatcaataaacatcaaggaaatgtaagtcaaaaccacaatgagctaacatctcacacttctcaggatggctattatcagaaaaaccaaagtgttgaagaggatgtggaaaaactggaatccttgtacattgttggtgagaatgcaaaatgttgcagctgctatagaaaacagtata

SEQ ID NO: 431734 - DNA, 568 bp, Homo sapiens
gtatggatggaattttttttgcacattctgttggaaaaggtagatatccacatgcaaaagaaggaagttgtagctttatgaccatgaatggatgtatttctgggctctattttgtttcactgggctatatgtcagtttttatgttagtatcatattttgtaatttgttacagaaccatttgttgaaagctgtatctcttctccactaaattatcattgaacctttgtcaaaagccagttgtccatatmtgtgagggcctatttctagacttcttatttatttcattgatttatttgcccatttttatgctaatttcacactgtcttgattactctagatggttaggctttgtgtctccacccaaatctcatcttgaattgtaatccctgtaattcccataatccccatgtgtcaagggagggaccaggtggaggtaattgaatcacggaggcagttcccccatgctgttctcatgatagtgagttatcatgagatctaatgattttatgagggccccttcccccttcactgggcatttctccttcctgccatgctgtgaagaaggtgc

SEQ ID NO: 431735 - DNA, 458 bp, Homo sapiens
actgtttctgtcatatattttactttaacatatatcataaattatacactacagttatttttattctaaatgcaattatcttttaaagagacttaaataagaaaatcctatacagatggtctctgagttaatgatggttcaactcatgatttttggattttatggttgtacaaaaactatatgcattcagtagaaagctccactctcctatgtggctgagcagcagtagcaagccacagctcccagtcagccacacagtcaggcagataaacaaccaatactcctacagtgtattgtgttgccagatgattttgcccaactgtaggctaatgttaagtgtttggagcatgtttaaggtagggtaaactaagctatgatrttcagtagtttaggtgtatgaaatgcatttttgacttaagatattttcaacttacaataggtttatgggagatgcactc

SEQ ID NO: 431736 - DNA, 553 bp, Homo sapiens
cacctgttagagacatcaatttyttaaacatgtatgaaggaaggggatgtagtagaacagtggagaaatggcttttaaataggaatgtggctagttcatttaccataatggtcataatgggggagacatggaggtggatgtctaaggaagggctcttctaattgctgtggtttccttaatggtagggaaacatgtgctaagctaactctccaatctcccacctgagaaacaggatggagatgagtgcatttgccaattttagattcatggcctcaatgtgaatcacatatcaaaattcatgaatgatgtcctagaaggagctcagagagcaatcagttcctgattcttctacttagtagaaaacccagagttacttcctcctgaaaacagcattaatggggaacatcaactatggaaggttcagtttcaaggataaccttggaggaatctggaggactgtcctgtgggaggtggtcaaggtctgctttgtattgctttaggagcggtgagagaaagacatagggacatggattttgagtgagcataggaaaga

SEQ ID NO: 431737 - DNA, 565 bp, Homo sapiens
tcttttggctagttttgagttgtagcttttataataaaatgaattgtaaatatagtgctttcccgagttatgtgagttattctactgaattatcgaacctgaaagagctatggaaatggctgactttgaagctagttagaagtgtgaatggctgggggacctcggagcttgcaattagtgtctaacgtgagggcaatcttgaagaaaactatgcccttaacctgtggagtctgcactaactttgagtagttagcactggaattatgttgcaccataactatatgagctgggttgggcctgaaaaacagattagaggtagtttgaggagaacaaggttagagagaagagaatagaaatgacccacaagaagcygattaaaacattatttccactcctagctgttctgagcactggtagaaggtggcctgttatctgtactgttgaagtattgagatactttcatccccattggcaaagagctgctatcttgagcccattaagtacgccaccatgcctctcttacaagatcttctccacactgatcaccctaagattcagaaactaa

SEQ ID NO: 431738 - DNA, 565 bp, Homo sapiens
tcttttggctagttttgagttgtagcttttataataaaatgaattgtaaatatagtgctttcccgagttatgtgagttattctactgaattatcgaacctgaaagagctatggaaatggctgactttgaagctagttagaagtgtgaatggctgggggacctcggagcttgcaattagtgtctaacgtgagggcaatcttgaagaaaactatgcccttaacctgtggagtctgcactaactttgagtagttagcactggaattatgttgcaccataactatatgagctgggttgggcctgaaaaacagattagaggtagtttgaggagaacaaggttagagagaagagaatagaaatgacccacaagaagccgattaaaacattatttccactcctagctgttctgagcactggtagaaggtggcctgttatctgtactgttgaagtattgagatactttcatccccattggcaaagagctgctatcttgagcccaytaagtacgccaccatgcctctcttacaagatcttctccacactgatcaccctaagattcagaaactaa

SEQ ID NO: 431739 - DNA, 575 bp, Homo sapiens
ataaacatgtgcatgcaggtttttgtgtggatgtcagttttcagatcagttgggtgaaaatacatgggagtatgatggctatgtcatatggtaagactgtgtttagctttgaaaaaaaactgtcttctaaagtgcctgtaccattttgtattctcatcagcaatgaataattccttttgccccatacccttaccarcaattggtattgtccgtttttggaattttagccattctaataggcatgtagtgatatcacattgttattttaatttgcatttctgtaatgacaaatgattctgaacatcttttcatatgcatatttgccatctgtatatcttgggtgaggcatctgttcagatctcttgcctatttcttaattgggttgtttgttttcttattgttgagttttaacagttctttgtatattttgggtacaagttctttttcagatatgtgttttgcaaatcttttctttccctcttgtgaaagaatcctcttgtggcttgtcctttctcttaagagcaacttagcagaagttttacattttcataaagtcctacttcccagttttttct

SEQ ID NO: 431740 - DNA, 528 bp, Homo sapiens
agtctgggcttgcacagaccaggttgggttctccccagctgtactataccctagttccagacccttgatctgttggagcagatcctgtgattccccatatttgacctgaaactgattttatagagtagaaagggaccttagagttccttgagtccaaccactccctgtttcagataaagttgaggcccatgatggyacccatatctctgtactccatcatgacctgagggccctccatcactgcccgtattatattgttcagcattgctgtgggccattgtggtccttgatctccatgtgaagggctccatgaagccatggcctgcattttattaatcacaggacttgacacccagcaaatgctcagtgtttcaatgaatgaatcaatgaatggggtgacttgcccaaagatgcatagttgttgatagtggcagatccaggacaccctgtgctagcattggctcagtgttcctgatagggccccacactatccaccaaggggtgaagcagaggcattaactacaccag

SEQ ID NO: 431741 - DNA, 528 bp, Homo sapiens
agtctgggcttgcacagaccaggttgggttctccccagctgtactataccctagttccagacccttgatctgttggagcagatcctgtgattccccatatttgacctgaaactgattttatagagtagaaagggaccttagagttccttgagtccaaccactccctgtttcagataaagttgaggcccatgatggcacccatatctctgtactccatcatgacctgagggccctccatcactgcccgtattatattgttcagcattgctgtgggccattgtggtccttgatctccatgtgaagggctccatgaagccatggcctgcattttattaatcayaggacttgacacccagcaaatgctcagtgtttcaatgaatgaatcaatgaatggggtgacttgcccaaagatgcatagttgttgatagtggcagatccaggacaccctgtgctagcattggctcagtgttcctgatagggccccacactatccaccaaggggtgaagcagaggcattaactacaccag

SEQ ID NO: 431742 - DNA, 528 bp, Homo sapiens
agtctgggcttgcacagaccaggttgggttctccccagctgtactataccctagttccagacccttgatctgttggagcagatcctgtgattccccatatttgacctgaaactgattttatagagtagaaagggaccttagagttccttgagtccaaccactccctgtttcagataaagttgaggcccatgatggcacccatatctctgtactccatcatgacctgagggccctccatcactgcccgtattatattgttcagcattgctgtgggccattgtggtccttgatctccatgtgaagggctccatgaagccatggcctgcattttattaatcacaggacttgacacccagcaaatgctcagtgtttcaatgaatgaatcaatgaatggggtgacttgcccaaagatgcatagttgttgrtagtggcagatccaggacaccctgtgctagcattggctcagtgttcctgatagggccccacactatccaccaaggggtgaagcagaggcattaactacaccag

SEQ ID NO: 431743 - DNA, 609 bp, Homo sapiens
tctactttctccccccttttatatttttttcacaggaatacttccaataaacctcaataaatcttagcatctactccccagaggcctcaactgacacatgctgtgggacctgggacaagttccttaacctctccagccttcattttatcctctgtaaattgggcttatgttcatatctgactcataggatgatatgggccatcccttagggagtaaatgaatcctggtaaggggctggaatagcacctggcacaggtaggcgctctatacatgttagctaatgctattactgaggaatcctgcttgtccgtggatttcagttgcatggaatcctacatctaagtaaaggaactacagaaagcctgtagcccttgaactcatccacacacacagctggatgcatgtgagataaggtcataaaaatgcaaactctgctyctttttccaaggcacccactgtggagctaacagaggccaggggctgggatctggctgcagatctggtgggggtcaggcctgagcaaatgctgtctctctcctgggagataaggttctgaaggtgaggaatgtcctgactaccttcccagcctcagtgtctcaactggacacc

SEQ ID NO: 431744 - DNA, 525 bp, Homo sapiens
tcctttgggtcactgctcctcctcctttgtctcccatgtggtttgggtgtgatgactttaagctggactctgaggggattgagggagtcagcatacccctcttgaaccacagagatttattgggggagttaagtgagaggaacacaaaattcaatctaggtcaatgagttgtgagatgtttgctaggggcttcaccagagatacttccttttcttctgcaggaacatcycagaagagaagctgtgtgtgtccagatagttttgtaggcactatggtggtggggaagagtgtggtggccagaagagaaaactggcctagaagtagagcagagccaaggaactcaaagagaaatggagccagagcccttctgacaatgggaacccctggatcaaaccatgcctgaagccagagtctctacaaacttttcaatcattaggccaataaattgttatgctaccaagctaagtgtcctgttatttacaataaaaaggatcctaactgatacaattaggaacctcagaaaag

SEQ ID NO: 431745 - DNA, 577 bp, Homo sapiens
cctaaatgcatagaggaaagattgttttccctcccttacaatctgatattccccaacccagacctcctagggactggatgctgcagtacatacctctggcctgagagatgaattgacagaggccagggttacaatggtgtgttttgttttgttttgtttttaccacccgataggaagtaaacttcctgccccctgggacaagaagacaagaggaggagggaaccagactacctccccttaaaccctctcacatccagtgtgaaaggagagggcagggctaccttgcatctggaactgaaataaaccccgaggtgctctgtctgatcagggcaagttaagggtgaaacagatctattccaacaccttgmccaggacccaggggcttcctaatctcagcccctctgccccaacgcataaggcccagctacctcacccctctactctgctttgccgcccaaaatgtcatgcaaattgccaagcagaagcatttgacaggtcctgctgagttcaccgcagctggctgcagaactgccaagaataggattgtctcaatcagaagaagaaaggcacggcagcc

SEQ ID NO: 431746 - DNA, 577 bp, Homo sapiens
cctaaatgcatagaggaaagattgttttccctcccttacaatctgatattccccaacccagacctcctagggactggatgctgcagtacatacctctggcctgagagatgaattgacagaggccagggttacaatggtgtgttttgttttgttttgtttttaccacccgataggaagtaaacttcctgccccctgggacaagaagacaagaggaggagggaaccagactacctccccttaaaccctctcacatccagtgtgaaaggagagggcagggctaccttgcatctggaactgaaataaaccccgaggtgctctgtctgatcagggcaagttaagggtgaaacagatctattccaacaccttgaccaggacccaggggcttcctaatctcagcccctctgccccaacgcataaggcccagctacctcacccctctactctgctttgccgcccaaaatgtcatgcaaattgccaagcagaagcrtttgacaggtcctgctgagttcaccgcagctggctgcagaactgccaagaataggattgtctcaatcagaagaagaaaggcacggcagcc

SEQ ID NO: 431747 - DNA, 497 bp, Homo sapiens
ttactaagcacagtgtccagcacatagtaagcataatcatttttaccccttttaacatatggagccaagtagttatgatctgatttcaaccctgaaaactatatactattatctctgttttacagatggggaaactgaggaactgagaacttaaataacttgccagatttcaacaatggatccttgtgacttcccaacctggccttttaacagcccatttgcgggggacgtgacaaggacaggtcttcactgasgtttgttgtaggttgtctgagctgtaggggcagagaagagacactggggcttccagtgatgactgccaggtctggaagacaggctgaagatgggctgcatcttctgggtctgccaggctgcatgctttgcaggcacctgttgtaaatccagagttgggattaaggaggtcttttgctctttggcttcactaagattgtgctaaagagcaggaagtgagtggctgagctctggggaccaagtct

SEQ ID NO: 431748 - DNA, 546 bp, Homo sapiens
tgctttcttgaaccactgaccttgccatgagaatatgcccagtacagcctgttggtggatgagagaacatggagcagagccaagtttctcagtcccgctggccaagggtagcttgcagcagccrattgctagcccacctccaggctccaggcatatgagcaaacctggctgggatcagaagaaccatacagctaagcctcacctaaatcactgacctactgtgtaaatgttcatggtttaaagccactgagttttgggatggtttcttagatagcattattgtgacaatagatagcaaatacaacagctctaatgtagagattgtcaaaccacacatttgcaaactaaccaggtagaaaagaatgctgaactactgagaaagctgagttcattatttccaggaaacagatttttggagaattgcttcttaaggcctacaataacttaaggtagatgttaagccattttcaggttgaggaacatacttactttaagaaaaaagataaaataaacttgtaatttgcttatggagatagcactgagagt

SEQ ID NO: 431749 - DNA, 470 bp, Homo sapiens
agctgactcccttgaccgatctttctccctttttccttctcaastgatacttctcaaaaaaacttttgcattcccaattccactttagcttctacttcccagagagtacaaccagctgggggttggggtgggaggcagccgacgctgtaggtccttcattgttgtattagtctgttctcagactgctaataaagacatacctgagactgggtaatttataaaggaaagaggtttaatgactcacagttccacatgactggggaggccttataatcatggcagaatgcaaagatacgtcttacatggcagcaagcaagagaacatgtacaggggaactgccctttataaactcatcagatctcatgagacctattcactatcacaaggacagcacaggaagaacccgcccccatgattcaattacttcccaccgggttcctcccatgacacgtgagaattataggagctat

SEQ ID NO: 431750 - DNA, 564 bp, Homo sapiens
cataagacttaactcaccgatgtctgttgtactgctcaaagccaggggtgggtaaggggccaggcaagtgaagccatccagtcaggtgaggtctttgtctcatctttgaacttaaatcatgcacattcaggcctgacaacatgtgttctgtgttgggattgaggatatgcatgaaatgagtctacaggggctgatctgcatgcccagggacaaggggtagaggggacatcaccacttgttccaggtatttcagatctttcattgcttaccactctgggtctagttgttttgatttctaagccagaagtgaggatctctgttctcttctgtcatttaggaggttggggtttccatactgaacactgccagagcctcacccatatctcctcagttgcacaccagccaacttcaaatgcctccttgcacctgagtggtttttttgtttatttttattatctatatattttttgagggctttccttgtcctctamatccttcattgcctgttcatggcaggctggaattgctgaggaactatcagcccaagagcagctctcaacccgt

SEQ ID NO: 431751 - DNA, 564 bp, Homo sapiens
cataagacttaactcaccgatgtctgttgtactgctcaaagccaggggtgggtaaggggccaggcaagtgaagccatccagtcaggtgaggtctttgtctcatctttgaacttaaatcatgcacattcaggcctgacaacatgtgttctgtgttgggattgaggatatgcatgaaatgagtctacaggggctgatctgcatgcccagggacaaggggtagaggggacatcaccacttgttccaggtatttcagatctttcattgcttaccactctgggtctagttgttttgatttctaagccagaagtgaggatctctgttctcttctgtcatttaggaggttggggtttccatactgaacactgccagagcctcacccatatctcctcagttgcacaccagccaacttcaaatgcctccttgcacctgagtggtttttttgtttatttttattatctatatattttttgagggctttccttgtcctctaaatccttcattgcctgttcatggcaggctggaaktgctgaggaactatcagcccaagagcagctctcaacccgt

SEQ ID NO: 431752 - DNA, 579 bp, Homo sapiens
actgcattaccaaccacaatttgcttatggcacttatttgacctcagctgtccaagaatatgacaaggattctagtataagaaaaaatggcttctgggcatttacaaagtcctcatgataatgtctatgcattaaaatcctaaaaaagtctatttaaggaagaacaattcagactgtcactcagaacctattaactcttgctttatatacaatactagtgaacttgatttttctggtctgacataacactttagtactagtaaataatgggtaagattgaagtaggtaagggatggctctgctaatggtagcaaccctgtcagcagcaagaggtaataactggcagagctaaggcaaagaaactgtaaaacgagggtgagagggcactgaaatttggaactttttcaggcaagggcaaasagttttaggctcttgggtctctgtattagtctacttgggtgccataacaaagtgccagagactggttggcttaaacaatagacatttattttcttacagttctggttcttggaagtccagaagctagcagagttgatgtattagtcagggttccttaga

SEQ ID NO: 431753 - DNA, 554 bp, Homo sapiens
ccagagactggttggcttaaacaatagacatttattttcttacagttctggttcttggaagtccagaagctagcagagttgatgtattagtcagggttccttagagggacataactaataggatagatgtatatataaaggggaatttattaaggagtaataggtcccacaataggccatctgcaaactgaggagcaaggaagccagtccaagtcccaaagctgaagaacttggagtctgatgttcgagggcaggaagcatccagcacaggagaaagatgtagcctgggaggctaagccagtctggtcttttcatattcttctgcctgcatttattctggyaatgctggtagctgattagattgtgcccagacagattaagggtgggtctgcctttccagtccactgagtcatatgttaatctcctttggcaacaccctcacagacgcatcaggaacaatacttttcatcctttaatccaatcaagttgacactcagtgttaatcatcacagttggtttctggcaagggacctcttcctagcttgcagacattg

SEQ ID NO: 431754 - DNA, 554 bp, Homo sapiens
ccagagactggttggcttaaacaatagacatttattttcttacagttctggttcttggaagtccagaagctagcagagttgatgtattagtcagggttccttagagggacataactaataggatagatgtatatataaaggggaatttattaaggagtaataggtcccacaataggccatctgcaaactgaggagcaaggaagccagtccaagtcccaaagctgaagaacttggagtctgatgttcgagggcaggaagcatccagcacaggagaaagatgtagcctgggaggctaagccagtctggtcttttcatattcttctgcctgcatttattctggcratgctggtagctgattagattgtgcccagacagattaagggtgggtctgcctttccagtccactgagtcatatgttaatctcctttggcaacaccctcacagacgcatcaggaacaatacttttcatcctttaatccaatcaagttgacactcagtgttaatcatcacagttggtttctggcaagggacctcttcctagcttgcagacattg

SEQ ID NO: 431755 - DNA, 554 bp, Homo sapiens
ccagagactggttggcttaaacaatagacatttattttcttacagttctggttcttggaagtccagaagctagcagagttgatgtattagtcagggttccttagagggacataactaataggatagatgtatatataaaggggaatttattaaggagtaataggtcccacaataggccatctgcaaactgaggagcaaggaagccagtccaagtcccaaagctgaagaacttggagtctgatgttcgagggcaggaagcatccagcacaggagaaagatgtagcctgggaggctaagccagtctggtcttttcatattcttctgcctgcatttattctggcaatgctggtagctgattagattgtgcccagmcagattaagggtgggtctgcctttccagtccactgagtcatatgttaatctcctttggcaacaccctcacagacgcatcaggaacaatacttttcatcctttaatccaatcaagttgacactcagtgttaatcatcacagttggtttctggcaagggacctcttcctagcttgcagacattg

SEQ ID NO: 431756 - DNA, 490 bp, Homo sapiens
agaaattaaacctttgtagagaaacttactgtatctgacaacacaatggactttgggaactcagggggaaaggagtgggaaaggggtaagggataaaagactataaaytgggtgcagtgtatactgctttggtgatgggtgcaccaaaatctcacaaatcaccactaaagaacttactcatgtaaccaaacatcacctgttctccaataacctatggatataaaaaaaattttaacaaaaagccaaaaaaaaaaaaaaaaaaggaaaaagaaaaatccctgtctccattctcgaccttgaatttagttcttaaatttctcctgaaaagtcatctcattgagtccttgtcctggtccaacaactgcttctttggatcaggccagatgtgtggatgagcctcctaacttctggtttatccagattcagtttctccatcaggataggattactaccaagttaatcctcttgaaagaacattttgaacataaat

SEQ ID NO: 431757 - DNA, 617 bp, Homo sapiens
aggaatccaggccttgaagcaaactccaagtggtagtggctgcccattcaggcctttgtagagtaggcagagyagagcaagcccagggaggaggcctagagggcctatggccaagccctgtaggggaaacaagcaggaggctgaggtcagaggtgtatacggaacaggaggacactgctggtcagagaccaggccagtgaagcctgctacatgtgttccaaataagccagagcccaagagcaggaatttgcagccagaggtccagggacagtgccgctcccaaggcaggggctatttcctgtccccttgcagcttcagagtggcattgggtagaggtgagctgtcagttcggttcaacagacatttatgaagcatctactgcataccagacactggcctagccatgaggattcagagaggagagaatgagtgcaggtcctcccttcagggtagtgcaccccatttcccaagacaagacacatactttgagactgtggcattttaaaatctgtctgcataatagttaatattcttcccttcataaattccttgaatgagcctaattcccttgaatgtgggctggacctagagatttttttgtagtccagagaaagtgt

SEQ ID NO: 431758 - DNA, 617 bp, Homo sapiens
aggaatccaggccttgaagcaaactccaagtggtagtggctgcccattcaggcctttgtagagtaggcagagtagagcaagcccagggaggaggcctagagggcctatggccaagccctgtaggggaaacaagcaggaggctgaggtcagaggtgtatacggaacaggaggacactgctggtcagagaccaggccagtgaagcctgctacatgtgttccaaataagccagagcccaagagcaggaatttgcagccagaggtccagggacagtgccgctcccaaggcaggggctatttcctgtccccttgcagcttcagagtggcattgggtagaggtgagctgtcagttcggttcaacagacwtttatgaagcatctactgcataccagacactggcctagccatgaggattcagagaggagagaatgagtgcaggtcctcccttcagggtagtgcaccccatttcccaagacaagacacatactttgagactgtggcattttaaaatctgtctgcataatagttaatattcttcccttcataaattccttgaatgagcctaattcccttgaatgtgggctggacctagagatttttttgtagtccagagaaagtgt

SEQ ID NO: 431759 - DNA, 490 bp, Homo sapiens
agaaattaaacctttgtagagaaacttactgtatctgacaacacaatggactttgggaactcagggggaaaggagtgggaaaggggtaagggataaaagactataaactgggtgcagtgtatactgctttggtgatgggtgcaccaaaatctcacaaatcaccactaaagaacttactcatgtaaccaaacatcacctgttctccaataacctatggatataaaaaaaattttaacaaaaagccaaaaaaaaaaaaaaaaaaggaaaaagaaaaatccctgtctccattctcgaccttgaatttagttcttaaatttcycctgaaaagtcatctcattgagtccttgtcctggtccaacaactgcttctttggatcaggccagatgtgtggatgagcctcctaacttctggtttatccagattcagtttctccatcaggataggattactaccaagttaatcctcttgaaagaacattttgaacataaat

SEQ ID NO: 431760 - DNA, 518 bp, Homo sapiens
tcacccaagaccagtaccacagaggtaactccctaagcagcacaaaccccttggaaggtggggacggctgtgatcctttcctaagttggtccttgtcacagcaatgagagcagcagtggacaaacggacaaggttagtgaatgtttcagaggagagtgtgtttggccactgagggccacaggagtttcccagagggactagcatgaaagctgaaatgtgaaatactccaggaggaggggagagtgttctacaggttgtacaaagtcactaccatgtaagggagggtggcttgagggaaaatggtgcacagtggctcctgtacctgaagaggaaactccagcattcggggggctctggccaatctgcctggctttggrattctcagagcaacttgagctcaccctgaccctgaattgtacttccacaaagagcacaaacagctctttgaggtttcagcttggttgctaattagtggtgaagtctttgccagcaagctcacctctccgggcttcagttta

SEQ ID NO: 431761 - DNA, 599 bp, Homo sapiens
gggtgacaattgttttaagctaccattgccttcttgcttttcaagttgttcatttacttctcaagtctagctaggtgcctgggattttccttgaaggaactcaagattttatttccatgcttggtggggtgggcagcaggcctctaagagggaaccctgctctgtctcaaaatgagagatgtcctcggggagcttacgctggtatagagacatcaggaaggtctgggccttgagggatagatgacattatgctaggaagagatgaggtcagagaggatgtttccaggtggaggaagaacaagtgcaagggtggcagagaagcgggtgtgttcggggaagagtgagtggcccagtatggctgtcttctttcacatcctctccaaccctggagaagccagcatttgggkgcttcaagatgacagctttccaaaaataatttatcttcagctttggtgtgtgtctgatagttttttgctcaatgattcacattttactcagggtgatagtaaagtgaattatttccctgagcacagagactggtgaaattgagtgtgtgtctatggagcgggggaggtggtgggtggtagggaggaggcctg

SEQ ID NO: 431762 - DNA, 546 bp, Homo sapiens
acttttgtacagtgaaaagcataaataaattcagagaaaacacaaaaattgtttgataaatgtaataagaaaaagttactatccaaaayatacacacttgataaaatatataaggttgattctcattccacaaaacatgagatcaaaagagatgagaagaaaggtgcgaactcaatgaatttagatggcaaatcattctcaaggaaaaaaaaaagcattcacagtgtcaattaaagaaatgcaaatgaaaacaactttaaggtgtaattatacacatttaatgagcaaaaccaaacaaaccattttagggaggcgagaatgggctattttcgcagtaggtctcccactgctgtaggattttcttaaccataactcacatggggtctattactcacaggcctccctgagcagctcagaagtggcatgattgattctaactgattcagactttgcatagataaaaagaaatttgaaagctgtaagatgctagacaatttaccatcaacatcaccatcattattattactcacctgcgtgactcactta

SEQ ID NO: 431763 - DNA, 546 bp, Homo sapiens
acttttgtacagtgaaaagcataaataaattcagagaaaacacaaaaattgtttgataaatgtaataagaaaaagttactatccaaaatatacacacttgataaaatatataaggttgattctcattccacaaaacatgagatcaaaagagatgagaagaaaggtgcgaactcaatgaatttagatggcaaatcattctcaaggaaaaaaaaaagcattcacagtgtcaattaaagaaatgcaaatgaaaacaactttaaggtgtaattatacrcatttaatgagcaaaaccaaacaaaccattttagggaggcgagaatgggctattttcgcagtaggtctcccactgctgtaggattttcttaaccataactcacatggggtctattactcacaggcctccctgagcagctcagaagtggcatgattgattctaactgattcagactttgcatagataaaaagaaatttgaaagctgtaagatgctagacaatttaccatcaacatcaccatcattattattactcacctgcgtgactcactta

SEQ ID NO: 431764 - DNA, 553 bp, Homo sapiens
atgtatttctagatgcttgggatattacggtggctttataatgtgtggacttagctgaactgcatttcccagaattcccttccctgtatgtttttggattagagccacaacagaaatttgcagaaggtttgaaaggcagaagtgaagcaattcgagacttattctctgaaggaagaaattcagtctgtgttgtaacttacaggctttgyttgtttgtttgtttgtttgaggtggagtctcgctctgttgtcaggctggagtacagtggcaatcttggctcactgcaacctcagcctcctgggttcaagtgattctcctgcctcagcctcctgagtagctgggactacagtcacctgccaccatggctggctattttttgtatttttagtagagacaggatttcaccatgttagccaggatggtctcgatatcttgacctcgtgatctgccctccttggcctcccaaagtgctgggattacaggtgtgagccaccacacctggccaactcacaggcttgttaaataatctgttgacttcctttgctggtgtggg

SEQ ID NO: 431765 - DNA, 553 bp, Homo sapiens
atgtatttctagatgcttgggatattacggtggctttataatgtgtggacttagctgaactgcatttcccagaattcccttccctgtatgtttttggattagagccacaacagaaatttgcagaaggtttgaaaggcagaagtgaagcaattcgagacttattctctgaaggaagaaattcagtctgtgttgtaacttacaggctttgcttgtttgtttgtttgtttgaggtggagtctcgctctgttgtcaggctggagtacagtggcaatcttggctcactgcaacctcagcctcctgggttcaagtgattctcctgcctcagcctcctgagtagctgggactacagtcacctgccaccatggctggctattttttgtatttttagtagagacaggatttcaccatgttagccaggatggtctcgatatcttgacctcgtgatctgccctccttggcctcccaaagtgctgggattrcaggtgtgagccaccacacctggccaactcacaggcttgttaaataatctgttgacttcctttgctggtgtggg

SEQ ID NO: 431766 - DNA, 553 bp, Homo sapiens
atgtatttctagatgcttgggatattacggtggctttataatgtgtggacttagctgaactgcatttcccagaattcccttccctgtatgtttttggattagagccacaacagaaatttgcagaaggtttgaaaggcagaagtgaagcaattcgagacttattctctgaaggaagaaattcagtctgtgttgtaacttacaggctttgcttgtttgtttgtttgtttgaggtggagtctcgctctgttgtcaggctggagtacagtggcaatcttggctcactgcaacctcagcctcctgggttcaagtgattctcctgcctcagcctcctgagtagctgggactacagtcacctgccaccatggctggctattttttgtatttttagtagagacaggatttcaccatgttagccaggatggtctcgatatcttgacctcgtgatctgccctccttggcctcccaaagtgctgggattacaggtgtgagccaccacacctggcmaactcacaggcttgttaaataatctgttgacttcctttgctggtgtggg

SEQ ID NO: 431767 - DNA, 589 bp, Homo sapiens
ggctctgcagcaagagggccatcttctcctgcaggtcatccayggagaggggttggaggcttggagatgagagagacaggaaaagctttcagcttgttactctttggggtccagctatcctactttttcccactttacaagctttttcttttccaacacttgccctatgacttcaggctcagtaccaggcacacacacacaaaactgaacttagatttttactgtctcccctgtaatgtccgatacttcagagaaagcacatattctatgccatgtctattgtatctctagctgatgcagaatatagtgtccaaagtggttccagaaaacaaaatcataggaatgccttctctgaattgattctgggtcaattgtgattggtcatctgatctgattagatttcaaaatattaatgattatgtttccagtggtaaggaaggcactggtagtctatagcaagcagtggcaaaacagctatttaaatgatcacttgtaaacacctgtactgaaatgcttgtagaaaacaaggctttgggtagctaagtggtttctgtcatataacattttaatgaccataaggaatataatg

SEQ ID NO: 431768 - DNA, 575 bp, Homo sapiens
tactcttgcatgaggagcttggtctcccctggcctgaggcacctgtaattgccttccctgaggcagttgccttgaaggaactacaygtactgatcctcctcaggacctaccccacctctcgttgcttagatctatgaatacaaccagactcaagtccagacagacccctgagtgtgaggaggtgcaatacacaccaaaagaattacataatctttttccgttttacataaaaatctggataatatatgtgggaatggaacttgagtttattaaatcagaatgctagaaatataatgttggattaggcataatttattcatatgagctcactaagcagagattctggattcaagtgttggctctagtggcggggagtggctctaacagtctgcttcattgattgactaatacctgagccccatgatggcctacactcaataaagtggaaatgccagttttctcttgttatactgaagaggaagttatttaaaggctcagggagatgggaatgctagaataaatgtgtatataaggccagcttctcctccccaaaaactataacctaaaagacagtt

SEQ ID NO: 431769 - DNA, 520 bp, Homo sapiens
gtcagatttctcttagtgtcataattttgcaaaggtggtttcagggtcccctgtaacaaaagacagactaacaagagaaaagcaaacagaagattcttaacatgtatacctcatatatacatgaaaaatacccagagaaaagagtagatctcaagaggtggcttagaattcaggcttaaatactactgtccactgaaacaaagagtgtgggaaggctatggggaaatatctaggaaaagagcagcaaacaagagtaaggcttgttatgtagatttaagtcagtgatttctccgttaataagagtttcctgtgattttgtcatcctttctggtacagaggaagaaacattcttacaaatgaagacattctttataaatgtaaattttccttacaaaagggtaatatttttttgagagcttctcttgtgcttgctgtttccaaaaataaccagctcaaaatartcctatgcctaaaaagcatattttggggtggcatattctgtttggtctcctataccact

SEQ ID NO: 431770 - DNA, 505 bp, Homo sapiens
gaacctccccctacccagggaagcagtgagtgaatgtgcaaccctgggaacccatgcytctcccatggatctttgcaaccctcaggtcaggagatcccctcttgaacccactctaccagggccttcagagctacgtggaatctcagcagagcagctgctcaggcatacgtggagacccaggagccttagaaacttgggctctctggacttcccagaaaaagtagctgcaactttggcaaagtaggaggttagactcctgcacttacccataggaattaggctgaatccggggggctgagcagcaacagtctgcagtccccacttctatggcacctcgcaggataagacccactggcttggaattctagccagccactggcagaagtgttataccttgctgggatggagctcctgggggaggggcaggccaccatctttgttgtttgtgcgacttagccattccagcctttgggctttggagagtccaagctgaccagggacagaa

SEQ ID NO: 431771 - DNA, 505 bp, Homo sapiens
gaacctccccctacccagggaagcagtgagtgaatgtgcaaccctgggaacccatgcctctcccatggatctttgcaaccctcaggtcaggagatcccctcttgaacccactctaccagggccttcagagctacgtggaatctcagcagagcagctgctcaggcatacgtggagacccaggagccttagaaacttgggctctctggacttcccagmaaaagtagctgcaactttggcaaagtaggaggttagactcctgcacttacccataggaattaggctgaatccggggggctgagcagcaacagtctgcagtccccacttctatggcacctcgcaggataagacccactggcttggaattctagccagccactggcagaagtgttataccttgctgggatggagctcctgggggaggggcaggccaccatctttgttgtttgtgcgacttagccattccagcctttgggctttggagagtccaagctgaccagggacagaa

SEQ ID NO: 431772 - DNA, 605 bp, Homo sapiens
aactccagcaactcaaatggccagtgtgttgtatgtcctccagataaccatgccagttctccaacaagaattcttaaccaggcagaactggctagaataacagaaatagaattcagaatgtgaataggaacaaagaccgctgagattaaggaggatggcaatacccagtccaagtaaaataagaatcacaataaagcaatacaggagctgaaacacaaaatagctggtataaaaaaaaatggaatgggtctgataacataatacaagaatttcacaatgcaatcacaaatattaacagtagaataaaccaatctgargaaagagtatcagaacttgaagactgtttctctgaaataagacagtcagacaaaaataaataaaagagtaaaagtgaatgaaaaaaacctctgagaagtatgagattatgtaaagaggcaaaatctctgaatcactggcatccctgaaagggagagggagaaaacaaagaacttggaaaacatgtttcagaatatcatccatgaaaacttccccaactttgctacagaggccagcagtcaaattcaggaaatacagagaactcctgcaagattctacccaagataatc

SEQ ID NO: 431773 - DNA, 605 bp, Homo sapiens
aactccagcaactcaaatggccagtgtgttgtatgtcctccagataaccatgccagttctccaacaagaattcttaaccaggcagaactggctagaataacagaaatagaattcagaatgtgaataggaacaaagaccgctgagattaaggaggatggcaatacccagtccaagtaaaataagaatcacaataaagcaatacaggagctgaaacacaaaatagctggtataaaaaaaaatggaatgggtctgataacataatacaagaatttcacaatgcaatcacaaatattaacagtagaataaaccaatctgaagaaagagtatcagaacttgaagactgtttctctgaaataagacagkcagacaaaaataaataaaagagtaaaagtgaatgaaaaaaacctctgagaagtatgagattatgtaaagaggcaaaatctctgaatcactggcatccctgaaagggagagggagaaaacaaagaacttggaaaacatgtttcagaatatcatccatgaaaacttccccaactttgctacagaggccagcagtcaaattcaggaaatacagagaactcctgcaagattctacccaagataatc

SEQ ID NO: 431774 - DNA, 522 bp, Homo sapiens
cacagaccccacacaataatagtgggagacttcaccactccactgacagtattagagagatcatsgaggtagacaattagcaaagatattcaggtcctgacctcgacactgaatcaaatggatccgatagacttctacagaactctctacccccaaacaacagaatatacattcttattgcacatagcctataccctaaaactgacaacataattagatataaaacaatcttcagtgaaggtgagagaactgaaatcataccaaacacattcttgaaccacagtgcaataaaaataaaagtgaagactaaaaaaattgcttaaaaccatgcaattacatggaaattaaaccacatgctcctgaatgacttttggataaataataaaattaaggcagaaatcaaggagttctttgaaaataatgagaacaaagatacaacataccataatctctgggacacagctaaggcagtgttaagagggaaattcatagcattaaatgcctacatgagaaagttagaaa

SEQ ID NO: 431775 - DNA, 566 bp, Homo sapiens
gtagctgttagccagagtatgtatacatgaaaatactatttcagaaatattgtttcttcatgtgttaagaagtctaactttccctttgtgccttctctcaggaaggcattggtttccaaagacatgcagggagattctgtcttattccggtttatgagcagtgttttttaaatgccctgatgaggatatgaatcacattctttataccatcataatctagcaacaaaacttggcatagaattcttcttcttgggcttaaaataccactcataactgtttttgctgaaaattaaaagggaactttttatctcatatttgaaacataagtcacaagaatractaacatttatgctttaaattattaatcctagttttcagaattttattattataaagatcactgtactttaagtgataagatattaaacttactctgtgtcgagcatgaggaatctcaatgtactttgctaggaagaaagctacagctgaattctaaccaaaagcaacctcaactttataagtacttcctttgaaatattagacactaggccttcatgtgtcaattc

SEQ ID NO: 431776 - DNA, 635 bp, Homo sapiens
atatccaaataaccacaataaagtcaggctataataaagtgtggagtgggggaaatggggtgtcattgctaatcagcaggggatttcctttggtgtgatggaaatattctagaattagattgtaattatggttgcaccactgtgtgtatactaaatatgatagaattgaccactttaaatgggtgaattgtatagtatgtgaattaaatctcagtaaaaaaatcaggctgtgataagcactgtgtttgtcttataaatgaagcacggtgggcatttgtgaaaagagattaattctgactggggtatatgagacttctagagggaggtaaaatttgagctgggacttgaaagatgaaaactctggtaagcaaatactaggaatgaagttgggaagaaagggcagtccaggaaaggaaatggcttgatgaaaggcattgatataggaaagttaatggcagtgttatacaaattgtggtccgtggaatgatgcttgtctgcaaaccatttgttattggttgttgatcacataagtataaaaactgagagtagttccttagaaacttatatagtaaygtgacattgttgttacatccaaacatcatcattttttctaataatccattcttatatttcat

SEQ ID NO: 431777 - DNA, 564 bp, Homo sapiens
gactaccaagaacattcagtaaaacttgtttgcaatactgttgactattgagaagggagagtatgttagttttctaaggatgctgtaacaaatttccacaaactgtgtgacttaaaataacataaatttattcttcacagttctggaggttagaagtgtgaaatcaaggtgtcaacatgccctctttgaaggctttaggaaatagtccttattcatctctgctagcttctgggggctgttggcaattctttctaatatctggcttttagatgcatcatcacttcaatctctgcctctgacttcacattgcattttttcctatgtgtcagtgtctctgtgtctgggttagggctaccagtcattgggttagggcctactctaatccagtattaccttaatttactttatcatgtctkcaaaaactctattttcaaataaggtcatattcacaggttctagggagatatgaatttattggaacactagtcaaaccaatacagacagcttagtatattgtgaagttgaattaagtagaatgcaaggatattgttgctgggaaaatac

SEQ ID NO: 431778 - DNA, 521 bp, Homo sapiens
gtcatagatggcttttattaccttaagatatgtcccctgtatgccgatttcactgaagggttttaatcataaaaggatgctggatttcgttaaatgctttttctgtgtctattgagataataaggtgatttttgttaattctggttatgtggtctatcacgtttattgacttgtgtatgttaaaccatccctgcatctctggcataaaacttagttgatcatggtggattatcttttggatatgctgttggagtttgttagctagtattttgttgagattttttcatctatgttcatcagggatattggtctgtagttttctttttttgttatgtccttccctggttttggtattagggtaatactggcttcgtagaatgacttagggaggattctctgtttatcttttggaayagtgtcaataggatagtaccaattctttgaatgtctgatagaattcagccatgaatcattctggtcctgggcttttgttgttgttgttcttggcaattttttttttt

SEQ ID NO: 431779 - DNA, 558 bp, Homo sapiens
tagaatgatttatattcctctgggtatatacccagaaatgggattgctgggttaaatggtagttctgcttttcgctctttgaggaattgccacactgctttccacaatggttgaactaatttacaatcccaccaaaagcatataagcattcctttttctccacaatcttgctagcatctgttacgtttcggctttttcataatagccattctgactggtgtgagatggtaactcactgtggttttgatttgtgtttctctaatgatcagtgatattgagatttttttttccatatgcttgttgkctgtatgtatgcttcttttaaaaagtgtccttgttttttgcccactttttattggggttgtttgttttactttcgtaaattggtttaagctctttatagatgctggatattagaccttcatcagatacatagtttgcaaaatttttctcccattatgtatgttgtctgattgccctgttgacaatttcttttgctgtgccgaagtttttaagtttaattcaagctcactaattcttttattctgcttgataaat

SEQ ID NO: 431780 - DNA, 646 bp, Homo sapiens
aaggcctgttttaaccacttcctggctatgtttgctcaagaccttggggctctgcaacaagcaggtggcaatgccagccaagactgtttcctttccttcaggatggagaggtcccctaggccccaggagtgtccagaaatgccatccgggagtcagggactacagtcacaaactttagaagtctaccttatgttctattgcactgcagctcagctgacactcaaaccataagatacagtccttcccattcttccctcacctttgcaaaggcagagaagcatcccccagtagctaccaccatccmagagcatgagaagtactgccagactcctaaaggttcaagggctattaattcagcttgtgaatgctgccttgcctgggactcaccattcacagcagtgggctcccttgtggcctagcacatgtccggaatgctgtccaatagccagggtctgaattgcatactccaagagcccacctgattctctactaccgtgtgtctgagctggtacctaaggtataaaataaagtctcctttacatttctctctgcttttctcaagcagaaggagttttgccccatagccaccacagctgggaatgtgctgagtctcacttgaaaccagcaagtctcagagtcttaccta

SEQ ID NO: 431781 - DNA, 646 bp, Homo sapiens
aaggcctgttttaaccacttcctggctatgtttgctcaagaccttggggctctgcaacaagcaggtggcaatgccagccaagactgtttcctttccttcaggatggagaggtcccctaggccccaggagtgtccagaaatgccatccgggagtcagggactacagtcacaaactttagaagtctaccttatgttctattgcactgcagctcagctgacactcaaaccataagatacagtccttcccattcttccctcacctttgcaaaggcagagaagcatcccccagtagctaccaccatccaagagcatgagaagtactgccagactcctaaaggttcaagggctattaattcagcttgtgaatgctgccttgcctgggactcaccattcacagcagtgggctcccttgtggcctagcacatgtccggaatgctgtccaatagccagggtctgaattgcatactccaagagcccacctgattctctactacygtgtgtctgagctggtacctaaggtataaaataaagtctcctttacatttctctctgcttttctcaagcagaaggagttttgccccatagccaccacagctgggaatgtgctgagtctcacttgaaaccagcaagtctcagagtcttaccta

SEQ ID NO: 431782 - DNA, 646 bp, Homo sapiens
aaggcctgttttaaccacttcctggctatgtttgctcaagaccttggggctctgcaacaagcaggtggcaatgccagccaagactgtttcctttccttcaggatggagaggtcccctaggccccaggagtgtccagaaatgccatccgggagtcagggactacagtcacaaactttagaagtctaccttatgttctattgcactgcagctcagctgacactcaaaccataagatacagtccttcccattcttccctcacctttgcaaaggcagagaagcatcccccagtagctaccaccatccaagagcatgagaagtactgccagactcctaaaggttcaagggctattaattcagcttgtgaatgctgccttgcctgggactcaccattcacagcagtgggctcccttgtggcctagcacatgtccggaatgctgtccaatagccagggtctgaattgcatactccaagagcccacctgattctctactaccgtgtgtctgagctggtacctaaggtataaaataaagtctcctttacatttctctctgcttttctcaagcagaaggagttttgccccatagccaccacagctgggaatgtgctgagtctcacktgaaaccagcaagtctcagagtcttaccta

SEQ ID NO: 431783 - DNA, 570 bp, Homo sapiens
tgttgcctaggctggagtgcagtggctattcacaggtgaccatagtgcactacagccttgaactcctgggctcaagtgatcctcctgcttcagcctccccagtagctgggactacaggtgtgatgtgaatagtgggagtgagagacagactagagtgagaatatatattttaaataaatacatgtttgttccttccaaatatactatttacaataggctattgaaagttgattcctcattcatttcttcattgtccatttaaaatttttcccaagggagtgtatatttagggcaactcgaatctatgctcctgagttgcrgctctcaagcttggcccagataaactctttactcattttaagaaaaaaacaaacaaacaaaacaaaaacagctactgcttagtaaaaacctttaggtgggccattataggaaatagattaaaatggttgattagggtcacttcagttatttctgccatagatggaaggttctgaaggactctaagtgggagtgaggtatgggtagtaagtagaaccagtttggttttctgtctttaaacaactccctgga

SEQ ID NO: 431784 - DNA, 603 bp, Homo sapiens
catagctcttggggtgcacacctgtcttccatttccctttagcctgagaatccttcaatctgatgtgaggactaaggctcagacaggctgtgtgtgattgttcaaggtcacataatcaataagttacagagcttggtctataacccagggtctaagatgcagggactctgattcagtgttctttccattccagtactgcggaaacaaatgagtgtgtctgcagtgtgggaccccagcactgcctgcttgctccgcttgtcaactattttcccttctttctcatctcccttcacaagcacaggcaaggcagaaatcatacaaaatgggaaaactttgtgacttttggttgctctctgcagaagcctggacaacagatcaaaaagaagaagcccctttgtgctgttattggaaacttggcccttcccagcatactttgtgtttgtgggctaaagaggaactctgagcacagttcccttttctcgcattcaggccmtatgcataggtagtatgattttcagagccttctgtttcctaatgctctcttttattgccctgtctttggactcaaaatagataccattaattactactttaggtaaacac

SEQ ID NO: 431785 - DNA, 521 bp, Homo sapiens
gtttagcaaaatcccagactttttggaggctttgttcatattttcttattcttttttctttgtctttgttggattgtgttaatttgaagaccttgtcttcgaactctgaattcctttcttctagttgtacaattctattgctgagactttccagaccattttgcatttctgttagtgtgttcaatgttttctgaattttttgtttttctttaagctgtctatttccttgaacatttctccctttaattcttgtgctattttttttgtatttccttgcattgggctttgcctttctctgctgcctctctgaytagcctaataactaacctcccgaattttttttttctggtaaatcagggatttcttcttggtttggatccattgctggtaaactagtgtgattttttggggggtgttgaagagtcttgttttgtcatattaccagagttggttttctggttccttctcatttgggtaggctttgtcagagggaaggtctagggcttaaggctgttgttcag

SEQ ID NO: 431786 - DNA, 613 bp, Homo sapiens
gcagcacaccaacatggcacatgtatacatatgtaacatgcacattgtgcacatgtaccctaaaacttaaagtataataataataaaataaaataaaataaatttaaaaaagaagttaaaaggaagaagactcaaattggcaatatgaagaataaaatgagaaacaacactacagatcctatggccattaaaaggatattaaggagatagtatgaataacttcatggtcaaatatttgacaattgttccactgaaataaagggaacaatttttctaaaaccacaaactgtaaaaacaaccaagaagaagtagacaataaataaatagtctcataaatattaaagaaatttaatartaaaatttctccaaaaaaagaaaatctgcagacccatatggtttcactggagtattttactcatcacttaaagaataaacaacaattttacacaatctcttccagataatagaagaaaaaccttcccccactcattttgtgatgccagtatcatcctgctaccaaaataaaagatagtacacacaaaaagaagccttcagatcaatatgtcctgtgaatttagccacaaaaaattgaatccagtaataaacaaatgtt

SEQ ID NO: 431787 - DNA, 513 bp, Homo sapiens
actcttcactaatttgtgatactggataaatcacaaccttgttgatgctcacttgccttatctataaaactgtgctactacctttcctatccatttcacaagattgttgggaagaacaaaaaagacaatgtatgagaaactaatgtgagaactacaaaatatattcacaagacagaattataagtttagagggatttttgattaaagtacaaattggtctcttcmtacaaaataaagaaataacaatacccatttcataaggctgctgtgacagttaagtaagtgaatacatgtaaaaacaattagatcctatgcctggcacgtcttaacagatcagtaaatattatttgctattcttgttgtaggcattcagccaatcaatattaaggacatatacaggcctgaaagtaagcttaaggagttatccatttcaatcccacagtttttcagaaaatgacaatatagttttgcattgcttaatgatgatatgttctgggaaatggatcgttagac

SEQ ID NO: 431788 - DNA, 513 bp, Homo sapiens
actcttcactaatttgtgatactggataaatcacaaccttgttgatgctcacttgccttatctataaaactgtgctactacctttcctatccatttcacaagattgttgggaagaacaaaaaagacaatgtatgagaaactaatgtgagaactacaaaatatattcacaagacagaattataagtttagagggatttttgattaaagtacaaattggtctcttcctacaaaataaagaaataacaatacccatttcataaggctgctgtgacagttaagtragtgaatacatgtaaaaacaattagatcctatgcctggcacgtcttaacagatcagtaaatattatttgctattcttgttgtaggcattcagccaatcaatattaaggacatatacaggcctgaaagtaagcttaaggagttatccatttcaatcccacagtttttcagaaaatgacaatatagttttgcattgcttaatgatgatatgttctgggaaatggatcgttagac

SEQ ID NO: 431789 - DNA, 637 bp, Homo sapiens
accaagtgggggcacttaatcaccaaagacaaggtggtcatagtaccataactgaagcagagtcaaagcattaatcagaatagtctgactcgtagagacctatggtgttggctagttatcatgatgttcctagaagtgaaatggatgggaagtctactaattttttacttgatctgtatatgtggaagaattctaggtcaagtgataaaaaatttaatttgaattattaaattggagactcacggcttctcaatcaatacccagacttgtaccagtttacaaaaccagaccccttgaatgaaggggagcctgggtccccttgaggaaggacactgccaagtatttatactgttaatcttcctcccagcctcctccaaatggacctatgtggccttttagcagggtgactgtgcgttacagaaaaggaaataatctactactgagcattagctctgaaatgaccctaattccagkgagacctaaaatgtaactgtggtccaccagtcaaagtagggccttataaaggttaagtaatcaatggagttttagctcaggtctgtctcatgtaggcccagtgggtccttgcaaccttcttgtgggttattttccctgttccagagtacaaaattgaaacaga

SEQ ID NO: 431790 - DNA, 491 bp, Homo sapiens
tcctttcttcctcttaattgatgtggctattgatacttgtgtatgcttcatgaagttctcatgctgtgttttttttttctttttatctcaatcaggtcatttactttcttccgtaaactggttattctagttagcaattcctctaaccttttttcaaggttcttagcttccttgcactgcgttataacatgctccttttgctcagaggaatttgttattactcaccttctgaagtctacttctgtctattcatcagactcattctttgtccagttttgttcccttgctggcaaggagttttgatccctggtggagaagaagtgttctggtttttggaatyttcagcctttttgtgctggtttcttcccatcttcatggattcatctacctttggtctttgatgttggtgatcttcagatggagactctgagtggacatccttttggttgatgttgatgctatccctttctgtttgttagttttccttctaa

SEQ ID NO: 431791 - DNA, 599 bp, Homo sapiens
aaataccagaatgttttatacattgagaaaaaaaaacagatgatatatttgaagcaatatgactgaaagttgcccctctttcccaattaatgtcagacagcaaaccatagatctataaagttcagaaaacaagaagcaggataaatgcyaaaaaactactctcaggcaaattatatttaaacttcaaaatatcaaaaataaagaaaaaatattgaaagacgccagaagaaaaacatacctcgccatggaggtacaaaaataaaagttacatatggcttcttcccagaagccatgcaagcaagagtgtggagtgaaatatttagagttttgagaaaaaaaacatcaacctagatttctgttaagaattaaacatgacaactttaacattgctgttacatcagaaataaacttatgtgatgatctggtaaaaaattaataaatacagaaacattgagtgatacaaaagcaacatgtaaaaatcagttgaatttctatttaataacaatgaattttccagaaaggaaataaagaatacaatctcatttacaataacatcaaaataataaaatactgaggaataaacttaaccaaggaaataa

SEQ ID NO: 431792 - DNA, 540 bp, Homo sapiens
taggtatgctataaatcataaaatacatgttgatactagtgtattttatcatttttctaccataaaatatacacaaatctattattaaaaagttaagatttatcaaaatgtatgcacattaacacttacacataatgccatttgcagttcagagaattgtaaacaaagaaagtattaagtcatawctgcataaaattaactgcagtacatactgtactactgtaataattttgtagccacttcctctttctattgtggtaagctgtttactaaattgtgtatcatggtaaaaagtgatctattgcaattcttatatactttttgttgtgtttagtgcaatactgcctaccttaaaaaacactatgagacccatatgaagtgccactagtgacactggaagtgttctaaagcagaagagaaaagtcatgacattatgagaaaaaagttgagttgcttgatatatgccatagagtgaattcaatgtaaagacctttgtaaaaaaaagtaaaggaaatttgtaaagccattgctgcagctatg

SEQ ID NO: 431793 - DNA, 587 bp, Homo sapiens
caacataccacctgggcatcttatgccccctatcccacaaatgaagaaggtgacccagacccagcatttcctaacctccttacctagaaacaaaagacagcccaagtgggatcattcattatatggatccaaaggtaatctctgtcacagcaccagcaaggtggagggtacgttgggagtcctactaaatataagagatcaggggaagtgctctccttccctgaaggtcttgagactgctgagagataaccacatgggcaggtctaaccaacaagagagacccagttacaaaacagcccagccttggaggcctatttttacacatgtgtactgagattctcttcactctgagactgtcggacaaggcaatcagatttttcttgaatcctrcagggctaacactcccctcacatgcctaaagacactacagcattgtcattgtaaccttagccaataaaattttaggatgtaataaaaatcacttgtaatctcaaaagccaagaaaatcacaactcgaatgaacaaagacaatcaagagataccaacactgagatgttgacttaactataacaaagagacacaaatag

SEQ ID NO: 431794 - DNA, 571 bp, Homo sapiens
gcttttctttttaatgaaaagcagcctcaagtcattttctaacaaagagaagtctgtaaagtcgagctgcagacatagacaagcaagctgggagcttgcacaggtgaatgccagcaggaactaaggactagacatatttaagatggcagctacatcttcccttatctttgtcagccacgtgtacagtaaagagcagacaagatggtgctgatcaactggaaagtccatttgcataataagattgggggggagaccagccttccccgcawactatgtaaatgtcatacctgattgaacctatctgagccctaagtaaatcagataccacctccccaaaccggactataaaatctgatacattcactgccagccagtcctttctgctcagagactcctttctctattgagaggactgtttccctttctcttctcttctgcctattaaacctccactcctaaactctttgtgtgtgtctgtgtcctagattttcctggtgtgtgacaatgaaccccagggtatatactccagacaacatagccactgcaaactctgtgagacagccgaaaaact

SEQ ID NO: 431795 - DNA, 504 bp, Homo sapiens
ccaaggagagtctgagctcagacacgcctaaccctgacctgacctgacagtacccgccctcatacctgaagacaaagaaataatctcttgggagctctatggccctgcccattgcctgagaaacccaaatacttatcctggcgacaagttatcctaaactctctgtgtgtgtctgtgtcctagattatgggtacagagcaagctcaaatccctcctataatactagagctgatgctttcttgaaagtgtcacctcctggttgagggaaaaccaactcaagacattacaacaacaagtcataaaagaacaacccagctccaagaaaggagaaaacaacwgctaattgcaccacctgcaacattctggctaaccaggggtcctgagtctgtccacatgacaatgtcacagctagcacaaccagcatttgagaaaaccagtgcactaaacaaaactacaaccaaggatcctcagggggcccctcagtgtgatgttggctgtgggttt

SEQ ID NO: 431796 - DNA, 534 bp, Homo sapiens
tatatggcaggccctatactaagcacttgaggatacagagatgaataaggcaccatctctgccattaagcaactcaagttgtgctgggaaatatacaaataattcattttaatacagcttggtaagcacaatgctagagaaatgtagagggtgctatagatatttcaatgaaagagcaagtgcaacagtctacgagatagatgttattattctatattatcatatgaaaaaactgaggttcaattgggttaagtgacctgcccttaacttctcagttacctgrattatcagtgcactaaaacccaggtcttttgactacaagtatagttcaatccttttctctccacactacagcttgtgactatagaaaaactgctgttggcaggaaagcagttcccaatggcaagagagataattgaggactcaagtgtagtagcagtgtggtgacagttaaagatttcatatgatctacccttgagaaacagctgttgatcatatgaatacagaatgagaatggagacagaaaaagttgaa

SEQ ID NO: 431797 - DNA, 258 bp, Homo sapiens
tagctgaatgttagagcttttaaaatgtttcccaagaagttgtctggttttagaaaatcacatatgataaataagtactaaataatttgttttgaaatacagagacataaaaaatgtattagcaaaaaatatattatcatttccaaaatgctgaattaatgtttgaagaacgttggcttggtaggaaaytaaataattaccctgcctatgttaaacacatatctctccttagtctggcagtaacatttcctggtattc

SEQ ID NO: 431798 - DNA, 577 bp, Homo sapiens
tttcagcaggggtgtgttaagtaagttactatgaggatgaaatgagataatgtaaataaaatgcctcatgcatagtgggtgctctccaaatagcagttattatcattattactctggcaggatactgaatgaagttgaaatcttgaatgacattgggaccagaatggctaataagggtggatacagaactaggtttcagatcgggtggcagataagccagccaggagccaggtatggcagagactggatagggatggatccagatcaggcaaagaagctattaccactagggctatcacacagagccagttctccaaggaaagccgcagacagccagggacatctcagcgctaagttcyctcagtaccacaatgagtatctctgcttaaatgaatccttaggaaggcatgaccatggagctttctgttgacccttcccaggttcactgtggccagggatttgtagagactccaatgcctgatgacattttggtggtccagagtttcagtttctggggagttaattaagcaatcttctccttagcatctctctgagccaggtgttccagattcatctc

SEQ ID NO: 431799 - DNA, 593 bp, Homo sapiens
gacacaacatttgggaagggacatagatccaaaccatgttagattattcctaggtcatagctgacgctgactcaatctttctacagcatatgactatgttgaccaactaatttattgtttatcttttcttccttgaggaaataaaagaggaataagatttaacacttagcatgtgctaagaggtttatacctataattttatttaattctcacacctttaaggtattaacccaacattgcaaataatgatacagattctgagaagttaaaatgaatttgcctgaggctacacagctgtatgttatcgcatccagagaagatwggtttatgcagtagaaggaaccatgattctgattgagacacttcaaattctggctccaccataactaggtttgtgacctgagaaagtacctgaattctatttgttccaattcttcacttgtaaaattgagagaagaatagtatctacctcagaatacttatgaagtttacatgagataattatgcttataaaagttaaacagtcagtagtcaggcacttgaggacccagactgtttctcaggtaaccagctctttgctgccatcgcctgac

SEQ ID NO: 431800 - DNA, 502 bp, Homo sapiens
tctatttgttccaattcttcacttgtaaaattgagagaagaatagtatctacctcagaatacttatgaagtttacatgagataattatgcttataaaagttaaacagtcagtagtcaggcacttgaggacccagactgtttctcaggtaaccagctctttgctgccatcgcctgacaaatctagtggttttaaggaatagtgagcaattggaacaagcagattttcttaaaagtaaaattgtctgtaaactccctacctgaagagccactaaattcaaggctctgatcttgcattgaattcagtataacattttagaccccacttattacactaaagatattytactaaattgaaataggtaatgaaggccatgatcccaaataattcagacagtagacaatcatgtagagttttagagcagagctgaaactgttgagtactgtgctttcagaaaattaaatccacctaatcagtcataagaaagaaataaaagagggagag

SEQ ID NO: 431801 - DNA, 532 bp, Homo sapiens
tgaatagtattccactgggtatatatatatgccactttttctttgtccagtcatccaatgatgaacacttgggttgattccatatctttgctattatgaacagtgctttgataaatgtatgagtcaggtatctttttgatacagtgactttttytttcttttgtgtatatacctggtagagggattgctggatcaaatggtagttcaattttcacttctttgacaaatctccatgctgctttccatagaggttgtactaatgtgaatttcctaacagtgtataagtatttctctttctttgcatcctcaccaacatctgttattttttgacttttctaattatagccattcttactggtataaatgattttgtggtttaaatttgcatttctgtgatgtttagtgatgttgaccattttgcatatgttcatgggccatttgtatgttttctttgaaaaaatgcctactcatgtcctttgcccactgtttaatggggttgtttttgttgttgggttccttataaattgtaaat

SEQ ID NO: 431802 - DNA, 613 bp, Homo sapiens
gcagcacaccaacatggcacatgtatacatatgtaacatgcacattgtgcacatgtaccctaaaacttaaagtataakaataataaaataaaataaaataaatttaaaaaagaagttaaaaggaagaagactcaaattggcaatatgaagaataaaatgagaaacaacactacagatcctatggccattaaaaggatattaaggagatagtatgaataacttcatggtcaaatatttgacaattgttccactgaaataaagggaacaatttttctaaaaccacaaactgtaaaaacaaccaagaagaagtagacaataaataaatagtctcataaatattaaagaaatttaatagtaaaatttctccaaaaaaagaaaatctgcagacccatatggtttcactggagtattttactcatcacttaaagaataaacaacaattttacacaatctcttccagataatagaagaaaaaccttcccccactcattttgtgatgccagtatcatcctgctaccaaaataaaagatagtacacacaaaaagaagccttcagatcaatatgtcctgtgaatttagccacaaaaaattgaatccagtaataaacaaatgtt

SEQ ID NO: 431803 - DNA, 587 bp, Homo sapiens
atactattataaaaatgaacatcctattatttcataatgattagcatatcagcatatttaagagcaatgcctatatctttaccttcattattattttcatgtttaaaatcctgataattctagaaaaacaaggttgtaattatccattcataataaaagtcacaccaagttattcttgataattaacttggcatagtggagtgcactgagcaattaataattaattacgtggttactagctcaaattttattgagaaccaaggagttaaaattaatagtattgtgtttgcaatgagttaattactttgtttctttgttttttttttttggaatagtgccataattagtatcctaatagaaacagaatataaagtgggtttctgagtgcttgcttgtcgaggtgtgtaacaacatatattttaattataatttgagtcactaattgttgtcaaatacaattttaatttcttagttcagagattaaaagatatgtaaacagytccaaaaaagaatatgataagatggtttatacaagtaaataaataactatatgacttcagaagttttatttaacaacagttgtataa

SEQ ID NO: 431804 - DNA, 551 bp, Homo sapiens
agcatatggatgataaccagtgtgtagtttaatttcaacttgtggtgtcctttgaatatgcaggtaaagatagattagattgtccaggatataatttggttgctaaattacatagtttaggcataagaaacactgtgtttattacacgaagacttaattatttttgcatcttttttagctcaaattgttcatgttgcaatagtcaatcaagtggatttgaattgtagccaatttttaakgccagaaaatactgattaagacagatgagggcaaaaaacacccagtagtttattaaatactttagatatttcaaaatgctggattcacaaaagcagtatcacatttgactttacaagtcttcattctcaaatatgtttccatagtaaatatgccctttaatattaaggagttaagcatttaaacacctatttatatgataagctatttaaacacagaaaatatttttaaaaccttgtgtaattatatgtgtatcaatcaaacttgcatgcacaccagcgttggcatttgtatagagaggaaatgtatggatt

SEQ ID NO: 431805 - DNA, 607 bp, Homo sapiens
tatgttcagctctggtgatgtgaaatgtttctccttatttgcatcctcaggtacttttccagttgtatttcaaaacccttcataaaacataatatggaaacataatgcatgtgattagtttagcaacaggaggttgaataaatgtatttcttttggtttatgtttctaataaaaagtaattttgatttaaagtagcactatctttttttttaggcctccattcctttgaaggaattggagcagtttaactcagatatacaaaaattgcttgaaccactggaggctgaaattcagcagggggtgaatctgaaagaggaagacttcaataaagatatggtaaattggttgtgataaaagtgtgaatgaactaggagtggaaataaatatttggaaagaacttagataagtctccaactgaattttcagagcacatattacacattttatgattctaatgaattttataaatgcagaatattcttggccttttattacaaatgctgawttactatggtatggtaatataggagcacttacggtttctaataaatagcccagcaattttcttttgacctgacctacttttgaacttatcaagggcaaaatg

SEQ ID NO: 431806 - DNA, 601 bp, Homo sapiens
cccataacagttatccactggaataacattcttgaatttattttgtcacatgtgaggagcaaaaacaagacaaaatacacaaaaaagagtagaattagggtatcacgacatttgtctaacattgttcaacgttaacacttacaaataataaaggtaccaaaatggtattttcttgtgtataaatattttcatcctctggatttgaatctgtttttgtttgttttggtgatataaagaactcataatagtatcatttcctgatgatatttggaatccaaaaattaattcaaaacagaagtattacattttctgtccttttcataattgtaaacaatgcatcaagatcaaaaacttaacaaaatgcgttaatgttattatgcatgcttttttcacattctttatttcccagtgatcataatgactaataattaacataattatttgtgattgacaaaagactctaacgttcatcmttttagttaattattatttaagaaataattggtctggatataatataagccaattaaatttgtattctgaaaagttttgagaagtgaaaaaaaatttattttttatttggtaaaatactttatttctg

SEQ ID NO: 431807 - DNA, 619 bp, Homo sapiens
tctttaaaaagtctatagtttagtcttagatatctctttgtactatattccatatactgttcattcttaccaatgaatagtatatatagatatattttacttttttaaaaaatactgctttattctgtgtattattttaaatataacagtcaattagaaacatgttcccaggtaatgtatatagatcttatacattctttgtgaaagtcttagatgatgaatcaaaatgtattctattattcttctacatttctggattattatattttgattagaaaaggtggcctatcaaatctttctttttgatgcttttaaaagtttcctctctatgtaatttttgatgtcccaagtaaataggagaatatgctttttccagtgtgcacaaaatacggattaaatttagcttgtcggttttaaaccacctctattcttgttttttatttgtattttttgtctattttaatctaacaaattacagaagagttgtatgtaaggtaccaactacagctatgattttatcatgttctccttttatttctagtaatttttaccttatgtagaatgcacccaawtgtttggggcatagcaattaatgactactgtgctttgggaagaagtg

SEQ ID NO: 431808 - DNA, 593 bp, Homo sapiens
tatactagatatgtaaacgaaaacttttatgagaagagtttgggaagagttatcaaaggttaaaatgattttttgaatacaagtcttctcatacccttcaatttgctaatagacattatgatacccatgaagaagctaaaatcagtatatcttaatatcgtctatatgtcattacctcaaataattgcttatgtttgtattcaagtataatgagtcagattagtaactaaaagacaatttaaggacctaagcacgcatgtacaatagcatgtagctaatgtgctatgaattgaagaaatgcgacatagtgaaatcagatataccttttaaatctatgacaataaagattgcattataaaatgaagaaaatattcctgtttgaattctgaatattcctaaatataaattataaatgtaaatcccagcaattgtaaccacatatctatcttataattatcctgttaagttgatacttgtttyttcattaatttatccaacaaatatttttgataacatactgtatgctaggtactaggcatgagtctttgctgcatttattttttgctgccttataagttggctagggtgtataa

SEQ ID NO: 431809 - DNA, 530 bp, Homo sapiens
aatttgggtttgaaatttcatttaaggaagttaaatacaagttagcagacaaaagtgagtatattttgagtgtctttttcttcattatatttgaccatacagctaagtttcttgctggctataatccacaattactatatttattaagcaccaatatgaatttaagatagctgagagcatctcaaatgaaagtaatgaagactgagaaaactacatatcaaagaagaatcagaaaatagataaaaasatcttagaattatttttcttttaagaaaaagtgatgaggacatgcatcaaaacttttctgaattcccactgcttttgttaaggccacccagatttttttctaaatattttcaagatatgtccaattctgaaacaactcccttgattaaacaacaaaacaaattaataaataaatgaaaaactacaacttgtcttctacttactctgttcctgataacaaaaacctttgttttccaaaaacttacaggtgtaaaatgtatcattaaaggcagatttaattgcac

SEQ ID NO: 431810 - DNA, 535 bp, Homo sapiens
ctgttaacaatgtacagctttttaaaaaccaaaatgaagactgtacttgttgtttttgatcagaatgaagacaatgagggtactgtaaaagaattgttgcaaagaggagacaacttacaacaaagaatcacagatgagagaaagcgagaggaaataaagataaaacagcagctgttacagacaaaacataatgctctcaaggtattagagctaaaattataatataccttgcctgtggtttttttttaatatatagggtaaaatataatgtgcattaataaaatctgcttcagacttagtcatcagaaactcactttttctgttcaatgtgtatgctttatttaacatttttgagtggtatttgattttgaacgatgtgttgcttaaaagttatggctttttaaagacatatttttctaagtagtaattgaaagatggraatgcattcatagtacttatacatttaattttctaatgtgctttatttttatcagctactttatattgaaaaaaacctgcctaactgccagaataa

SEQ ID NO: 431811 - DNA, 516 bp, Homo sapiens
tttttttgttgttctttttgttcttgttgatgctctgtggcatctggagaaatgggcagrtgtaattctgaataaaggacttttttcttagatatctaatgtgctgtgaggaaaccataaggaaactcagccaggaaatgcatgtggacttctattccactgttcaacagctaatgtcttgtaaaagtaaagtagaataaacaaggaattacctgaatagctcacgtctgaccatacctgaatatctatctacaatggttgaacagagtaacaaatcttagaggttcaatgattgaattcaaattggattttcataagcaagttcaactcaactttttacttcaagtcaacagatatttattaatgctacaagtgctatgcttaacattctaaaagataagaaagaaatattaaggaataatccttgtactctggtagttgataacattattgaatatacatattatagttatacaaacaagttagagagtaataaagacattaaggacatcatcc

SEQ ID NO: 431812 - DNA, 612 bp, Homo sapiens
tagtttttagcaaatttattgagaataaatatgtttagatttttctttcttcccgtataacccatttgtggtttgtgatttttccgttaaatagaatataaacaaaacattatggattaaatttatgggaccatctattcatttattcaacaaaaaagcttttgccatctatcatgtgccaagcacaggtttgagctttggaagcccaacagataacaacatccctgtagtcatagatttcaaattagtggtatatacmggctacttgatatatattttaatgttagtaataagtactataaagaaaagggaagagtaatgccaggaataaagagtgattgctggtgctatttaaaatagagtagtagagaaggcccctttaacgtgagaaagaagtaagggaaccactgatagaaatgtgggttaggaaaactatttttggcaggtagaacagcaagggcagaaatcttgaagcaagaatgtagttgttatactcaagtaatgcaataaacctaatgagggtgaagtgttgtggactatgaagagactgggaagagatgagcttggaatggtaggtagtatacaaccaagtcatgtagagatttataggtc

SEQ ID NO: 431813 - DNA, 298 bp, Homo sapiens
atacaatggtagattcttgaatccttggagagatttagaagctatgcattcctgaatacacaaatgttcagtacagccttcatgtggtgttctcaacaaaaatctgctgarttttttagtaagccaatttgggttaaatcaaaataaatttgagctagtaagaagggctatattggtatttttcttaaatggtacatgtatggtagtattagctatgaccgcaataatgctgtgacacaaatcaccctagaacttgctgactgaaaacaacaggcatttctggctgtttaggttactt

SEQ ID NO: 431814 - DNA, 581 bp, Homo sapiens
gggcctactaaatgtcagatgttatactctattgtcgttagtttctttctgataccatctttactatcctgtaagccattagtgagtgtttcccacttttagaaaatgacttcccaaagactaagagggtagaacagttcaaatgctatcatcaaaatgaargcagtttctagactacaaattgctgtacagccataagatggcattattgtgtaacaacaaggtccctgtcaaacatcaagaaagtaatgttttaaaatcagtatttccttcttggaattctacttagtcagatatgttgggttgacttacccacccatataagtagttaaattcaagatggttctgagctttagatatgatgtaaaatagacatgagactaagagtatttatttctatattattacatttctatagcaaaaaaagaaacctctaaaaaaattagagaaagaagtataagggcatttaattaatcaaatgttcttattaataatatttcataaaataaaggaaatgttgaaaaataaaatatgaacacagtgttgtataaagtaagtcagaaataagagaacacttactg

SEQ ID NO: 431815 - DNA, 590 bp, Homo sapiens
atatccccagtctttttctcaaagtaattgaacatttttgtttcccaggatagttgtatacaagcattttcatcctcaccatagatgattcttgttcttcagtatatgaggggactgtatttgcctgcttgttatctaaataaacatttttattattgtcaaaggaaaaagactctaatacagaaagaaattttgtgtccataggactagcctcattttggagrctgatattaatatttgactttattcattgtgtatttcttggttttgtcatttcacaaatttcccttctctaaatatgcattttttctctacctggaatagatgagttttaaaagacattactgtaaaataaaactgtgctaaatgtacttttcccagaaactctctttattttatcaattataatttgctttggctaagtgttacagaagctcaaggtagaaatgacttaaataaaagagaagcctatttctttctcctgaaaaaccctggaagtttgcagccaaggcagatatgttggccccgctcatttctgttttctactgagtgagttatctttacttggtggaatttcatccacatgttgc

SEQ ID NO: 431816 - DNA, 590 bp, Homo sapiens
atatccccagtctttttctcaaagtaattgaacatttttgtttcccaggatagttgtatacaagcattttcatcctcaccatagatgattcttgttcttcagtatatgaggggactgtatttgcctgcttgttatctaaataaacatttttattattgtcaaaggaaaaagactctaatacagaaagaaattttgtgtccataggactagcctcattttggagactgatattaatatttgactttattcattgtgtatttcttggttttgtcatttcacaaatttcccttctctaaatatgcattttttctctacctggaatagatgagttttaaaagacattactgtaaaataaaactgtgctaaatgtacttttcccagaaactctctttattttatcaattataatttgctttggctaagtgttacagaagctcaaggtagaaatgacttaaataaaagagaagcmtatttctttctcctgaaaaaccctggaagtttgcagccaaggcagatatgttggccccgctcatttctgttttctactgagtgagttatctttacttggtggaatttcatccacatgttgc

SEQ ID NO: 431817 - DNA, 577 bp, Homo sapiens
tgcattttttctctacctggaatagatgagttttaaaagacattactgtaaaataaaactgtgctaaatgtacttttcccagaaactctctttattttatcaattataatttgctttggctaagtgttacagaagctcaaggtagaaatgacttaaataaaagagaagcctatttctttctcctgaaaaaccctggaagtttgcagccaaggcagatatgttggccccgctcatttctgttttctactgagtgagttatctttacttggtggaatttcatccacatgttgcaagatggagctctcatgacatccacattccaagaaggatgtaagaaggccagaagaagggtcaaagggtgcataccaattgtcttttagggaagtttcgtgggagctgccatgttatatttccacttaygcttcattggccagatgtctgtcacatggccacatctaagctgcaagtggggctgggaaatgtgtttatttcacatgtgctctgctaaaaactgttcagtcatgaaaaaaaaaaagaatattggaagagaactaacagtcttcaacatgtatattta

SEQ ID NO: 431818 - DNA, 624 bp, Homo sapiens
ttctcactcaaaagctgtaatattctagaatgaataagtttcttgagaaactctttggttaacagaatctccatttccatcatagtgtattcaataaattattaatgcagggtaaatttccttatatttcctttcatttcgctatamtaaggtcaaatcatgacttttaggtgtggatacagcaatatataaaataatctaagacctggatatatgtttttctaattagggaattggagatacatgaacagtctctcatagagaaaaatatatccattagtcactaaagtcagtataacattctggtgaaaggtttgcttgcttgcttgtctgcttacttgcttgtttcaccttctattctaggaggatgtttgtcacaattatgaaattctaacgctttaaaaatctgtttaccctatgaaagttgcaaattcttgcctgtaaggcaattttcacaagaattattttcatattagttttagtttatccgtggatagtctcaaattcctcttgaaaatatcagtgttctcaagggaaaactgcccattacaagccacagatgtggttttttgagagatttctgcctgaaatacaagttttaaaatattctttgtagtttcctag

SEQ ID NO: 431819 - DNA, 571 bp, Homo sapiens
accaccccccatgattcagttacctcccactggatccctcccatgacatctggggattatgggaactgcaattcaagacgggatttgggtggggacacagccaaaccctatcactgcctttaagatctatgaattgtttttctacattgaagaaatttgtagacatttgttttttattctctttttggtttgctgagagcagtagtctcttggaagtgagtttcatttacattttttcctttgggtgtcaaatatataaaatattttttaaaatcaatggctgagggataaatgagggttggtagaaagggaaaggataagggttgtagttaacggaccatgttttaatgtgtctataattagatggaagttgtctcttaccattcaacatcctggatggccttcctatagaggacattttcatcttcttttgtcgtccagagctagcatatgtgtttcatgtctttagatagtgaaaatcaattcagattttcatggaaaatgctctctcttcatcctaaagacagaattrtcacggctatttcgtttattgaaaagtgaaacctgctac

SEQ ID NO: 431820 - DNA, 464 bp, Homo sapiens
tatttcgtttattgaaaagtgaaacctgctacagttagcatatagttaattccatatatgttacctgtatcatttaatacattcacaaagtaaaaaaccaaattttgccaagttcttgatagtaacaatagtaaaatggaatttctgttggcatattttcatgttattctgaaatgctgaatggatttattaagattgataacaatatgttgtacctttatrttctaaaatttaataacagttattcttccaaacatgccagcgtcctcaatagttgacagtctgcaaaatattctattatgcaatcagccatatctccttcttgagctttctttaagtacttgtatcctgtatttttccctgaaatctagcagtaagttgaagaaatgataaacaaaattgtatcattgtatataatggctatttataaatactgatatacattttcataatgttatttaaat

SEQ ID NO: 431821 - DNA, 464 bp, Homo sapiens
tatttcgtttattgaaaagtgaaacctgctacagttagcatatagttaattccatatatgttacctgtatcatttaatacattcacaaagtaaaaaaccaaattttgccaagttcttgatagtaacaatagtaaaatggaatttctgttggcatattttcatgttattctgaaatgctgaatggatttattaagattgataacaatatgttgtacctttatattctaaaatttaataacagttattcttccaaacatgccagcgtcctcaatagttgacagtctgcaaaatattctattatgcaatcagccatatctccttcttgagctttctttaagtacttgtatcctgtatttttccctgaaatctagcagtaagttgaagaaatgataaacaaaattgtatcattgtatataatggctatttataaatactgatrtacattttcataatgttatttaaat

SEQ ID NO: 431822 - DNA, 527 bp, Homo sapiens
ggggaaaatgtattttaaggcaataatcatatacrtgagtgtatatttacaagccgcagtaggtgctatgaatgaaaagtataaggagctatgagatattctaacaaaaagaaatgctgcagtctagagactgagagtaattatctgtgaggaaaagtattgaagcagagacctgcaactcagtaaagagtgtagggagtcacatgaacaaagtcttgagatgttggtagagatcttggaatgttcgaaattctaaaagaaagcccttgtgtatggggtatggtgagagagggagagcgtggcaagttttacgttgtacaagtcattgtaggccacaaaaataagtatagattttatctaagtgcaacggaaaaccattacaagtttattttttgattcttaaattttgttttacttatttatttatttcaagacacaatctcactctgttgcccaggctggagtgcagtgacatgatcacggctcactgcagccttgaactccttgggctcaagcaatcctcccat

SEQ ID NO: 431823 - DNA, 592 bp, Homo sapiens
ggagccttgcatggatcattgataacaagtgccataaactgaaacacatgattaactcaaccttgccacataaataatttttaatgaagttttaccagtctaagcaaaagaagaaaacctattcatagcacaaaatgtgatccttgatccttgttatatcctgccttgaatttgtcttttgttttatgagtagtaatcatatttcctcaactaatttttaagaacctaaaggaaggataatggattgtaatttcttttcttgtcctttatagtgccaaggactgtaaactcctcatgacattcaacctgtgctcttctaatgcaggggtttttgtctttgtttakgcactgctcctactatgctatgcagcaggcaccgttctaggtgcttagggtgctttggtgtgtcctaagcacctagaacagtgcctgttgcatagtagcagcagaagatgttcttgatgaataaattaagttagctttttgaaagcagtatcaaccatggattcatctctctttcatcagaacttactacagaatcttgcacatagtagatactcagtatatgtgagttcttttcgtttgttctgct

SEQ ID NO: 431824 - DNA, 607 bp, Homo sapiens
ctaatatgtaactgtctttccaagggagttcagtttccagtatgatattttaaatttcattttggtatttgttctttgtgacattttgagtattaatgcttaaggggaaattcaattttcctttaaatatattacttgtaacaactttctagttttggaaaaatgagtttactaaactgttgtaaacatattgctaatagtcattatgttctataatttctcttaataaattttgaattttatttgaggtattgttatgtttattattgagtcttttaaaattrcatttttgtatatcacttattacatggtcatttgttacttttgttacaaagttggtgtctaaaaactaattgcttatcagaatatgtcctcaattatttcttagaattcagttataaagcacaatttgttttataggcttttttccttttcaggaaaacttccatttcataaagtaaatcatgcctttaacatctgttttcatctctgtaatattttgttgtgtttattttgaaaagaacatgcaattgctaaaaacgatatcaatcataaaagtgacccaaagggttgaaatgggatctataaaataagataaaataattcc

SEQ ID NO: 431825 - DNA, 552 bp, Homo sapiens
gtaaaatatagagaaaattgataaattcctggaaacatgcgatctattaagattggatcaagaagaaattgaaaacctgaacagactaataacaagtaatgagctcaaagcagaaactgaatgacttcactgccaaagtctaccaaattttcaaagaagaagtaacacaattctcaaactattccaaaataattgaagaggaagaaattttctctaactcattctaaaaggccagcattactctgatatcaaaaccaggcaaagatgcaacaatcaaaaaagaaaactagagaccggtatctctaagaaacacaaatgcaaaaattctcaacaaaatactgacaaaccgaattcaacagygcatcaaaacataatatatcatgatcaagtgggatttatctcagggatgccaagatagctcaacatacacaaatcagtaagtatgatacatcacattaacataattaaagacaaaaaccttatgatcacctcaaccaatgtagaaaaagcatttgatgaaattcagcatcccctcatgattaaaaacgctca

SEQ ID NO: 431826 - DNA, 467 bp, Homo sapiens
ttcccaccctaagcattgtcttcactgagggctgggaagaacttaggaaggcctgtggcacttcccacgcccctggaagggacacctgtatccacatcttactccctgtcttattccctccctgtgctgggccgcagagccccgcagagctggctttgcctagcaccaatcatccacactgcgctctgaagccaccgcaaccagccagcccaccttgcatccttgttaccagggtctccgtgccacatcccatacctcgccagtgatctgaacccggtacggttctgctcagccccaactctgacccaaactccctcctggaagaygttccctgggccacatgacattttcggccgttttcagcactccttctcccatagcctcacccttgttgattggggtcgaacattggcgttgaatgtaaaagagtggcgggattaggaggggagcctctatgaagagagata

SEQ ID NO: 431827 - DNA, 658 bp, Homo sapiens
ggagcagacagggctttcttccagccagaaaattcacagttcaattgaggaaatgatgaacatcaattgaaaaacaattccaaaatacttcacaaaattgcctttcatggtttttcacttgcttatttctttttacacttggccartgggtcagaccccatttccccgagtgatcaagaataaccgaatgagctgaatctttgagaacaattagagtcctagagtcctgtcaactctgctaggaaacacgtagttcttggtgagtccagtgtctttcagtgaaatttggttttccttcaaagccatccacatgtattgtgtttagaagcctgaaggaaaggctgggggatttggcatccatgtgctcaccacaatagtttatcgtgtcagcttatttttgatgtggattttgttttgaagtgccttggagctattgattcattttggaaagaaaacaaaataaccaacacatttatattccattttgtttactaatatgttaaggcagtcgcttttactgtagacctaacagaaactcttttaaaacctcatcatgtggaaattaaaaatatggctttagcaataaacataaatgcagaacagcttcattgaaacatctctgaacctgctggctaccttggctgttggggttggatgg

SEQ ID NO: 431828 - DNA, 658 bp, Homo sapiens
ggagcagacagggctttcttccagccagaaaattcacagttcaattgaggaaatgatgaacatcaattgaaaaacaattccaaaatacttcacaaaattgcctttcatggtttttcacttgcttatttctttttacacttggccagtgggtcagaccccatttccccgagtgatcaagaataaccgaatgagctgaatctttgagaacaattagagtcctagagtcctgtcaactctgctaggaaacacgtagttcttggtgagtccagtgtctttcagtgaaatttggttttccttcaaagccatccacatgtattgtgtttagaagcctgaaggaaaggctgggggatttggcatccatgtgctcaccacaatagtttatcgtgtcagcttatttttgatgtggattttgttttgaagtgccttggagctattgaytcattttggaaagaaaacaaaataaccaacacatttatattccattttgtttactaatatgttaaggcagtcgcttttactgtagacctaacagaaactcttttaaaacctcatcatgtggaaattaaaaatatggctttagcaataaacataaatgcagaacagcttcattgaaacatctctgaacctgctggctaccttggctgttggggttggatgg

SEQ ID NO: 431829 - DNA, 560 bp, Homo sapiens
gacacgtgtccaaaacagcactctcattgcaataacaattgtattgttattattgattattagaaatctgttatccgaagcaatggaggccatacctttgtgacgaggtgactacacatggaggtccaaaacgatgttacaaagccttatttgttcatttttaaaataagtattttatttaatgaggtatgtagcaaacacctctgctcctctcccatcacacctcctcagcttactttttttttttttttgggatggagtctcactctgttgccgaggctggagtgcagtggtacaatctcagctcactgcagcctccacctcctggttcaagtgattctcctacctcagtctcctgagtagctgggattacaggcgactgccaccatgcctggctaatttttttttatttttaatagagacggggttttgccatgttggccaggcttgtctcgaactcctgacctcaggtgatccacctgcttcggcctcccaaagtgctgggattacaggcgtgagccaccgygcccggccacatgtgattttaattaaggcatgtg

SEQ ID NO: 431830 - DNA, 568 bp, Homo sapiens
aacagcaaatttatcaatcttttcatctgacaatactttgaaatatatcattgtcatctagagttgtttgatagattatctgcaggcacacagcctttttcaaggtcaagttgaagattcttgtttgctgtttaactgggttgtttcaaaactcaraacaatgcctgcctgttaaattttcacttgttctcatggggcattcgaaagcaagttttcctattgaccaggtctctggacatttcatcctcttgagctaaattcagcaaacaaggcttaggaatgaaatcaacagaagaagaaatgagatttaacttagcatttgcaaatgccagagagattaagtcgtctttcatatctgctcaaagtgtgtactaatttttgtctgcatgttgcaggctggttatggccaaacacatctcaactttgactttattccagtgggaagcagtgaacacactcccctaaaccagaaaggcaaagaaattgtggccactcttgtttttgccagtgcataacctgttgttctaaaggcattttaaaataaagtcagctacttctaagtcactat

SEQ ID NO: 431831 - DNA, 582 bp, Homo sapiens
ccttcccttttcatttctaacatttttcaatcccaatctgacctacggacagagcttcagttacagagagagcctcttatttttgtcatcacttctctaatccagttggtcatcctaaccaatttctataccattcggaattcactgtatttggaaggaaaaattgagagacaggctgctgatcttccaggtttttatttgtttgtgttgagacagtctttgttgcccaggctgaagtgcagtggcgccatcatggcacactgcagcctccacctccctgggctcaggtgatcttcccacctcagcttccctagtagctgggactrcaggttcacatcactacacgaggctaatttttttttttttttttttttgtagagacggggcttccccatgttgctcaggtggttctcaaacccctgagcacaacatatccacctgccttggcctcccaaagtattgggattacaggtgtgagccaccactcccagccccaggttttaatttatcatctaatatgctaaattatatgcctcaagtattaatagaaaatatctctaaataaatgtataaaaagcaagg

SEQ ID NO: 431832 - DNA, 493 bp, Homo sapiens
ccaaattttatcacaagtaagtagcaaacaaattaataatgttacctgtgctctcttggataattactactgcataaaaactgctttgaaatgttgcagatagtattgtacctcatttttttaatccccttagagtaacaaggatttatttgtctcaaactttctatgttgcatgcaccacttgactttcttgttctgtttagaatttttagaacttgcaacataacaaaaaatcatttttaaccagcctaggaaggacatatcacctgatgtaacattattttaaattatattttgtattttactttactcttttcaaaayatatactgtatgttttgatactattgctagattttattttttacttatgcctggtagaaaatcagctattaaagaagcagaggaggctggacacagtggttcatgtctgtaatcgctagcactttgaaagagtatgtatgacagcaggatagcttgagcccaggagttgga

SEQ ID NO: 431833 - DNA, 527 bp, Homo sapiens
cagaatgggtaaataagttgtggtatattcgtgtattagaatatttgcaatgggtgaatcacaaccactagcatcagcatgaatgaatcttagaattataatgttgagaaaatggagcaaaatcacagaacaatgtgtgcatttttcatttacttattttttatttctagaaagcttaaaaaccggcaaaattcaacaacataccgcttagaactacatgcacaagtgataaaactatgaagaaaattaagaaaaaattagagcaatagttccctccaggaggaaatgaagaggaatgcaattggtgggcttctggggcatggtaataatctagctatggccttgctcttgggaatgcgggcattcgtgttattatcaatctttaaattgtgtgtatgtgttttcattcatccttttgttattcatgggttatttaacagtttgaaaaayatgcatacaaaaaaacatgaaacaacataatttagactcgagacaaaataaactcttctctacttagacttgacccc

SEQ ID NO: 431834 - DNA, 556 bp, Homo sapiens
aaggtggaaccttgagtcacagagaattagcccaggccttgaaacctaatggcgttatgctgaaacaatttcaaaattgtttggactagtgactcaattttccccttctactttctcccctttcaaacaagaatgtctatagctattattgacatttatgtcaatacaatgcctttcgcactattgtatttgggagcaagtaatctataatttcacaagtctacatatggagagaaattttgtcccaggatgaattataaccagagtctcaccatacctaatttagatgatrcaaactaggacttctgaagctgataacacttagatgaaagtttggacttgagttggtgctgtaatgggttgagactttgggggatattgggatgtggtaaatgcattttgcatgcaggataggcatgattatttgggggccagaaggttgactgtagtagagtgaacattgccccccatgaagatatctactttctaatttctggaaattttgagtatgctacctaacaaagtaaaaagaactttgcagatgtggtaagttaca

SEQ ID NO: 431835 - DNA, 629 bp, Homo sapiens
caaattaataaaagaaaatatggaataaaaaaggttcattggttcaaaacaaggcaaaaaggagagaagaagaaatataaaacaggtcaaatagaaaacaacttgttaagtagtaaacacaaacccaactatygtattttcacttaaagtaaataaataaagtatgacaattaaataaaataaaactgacagattaggttagaaacccaattatatgctgattacaagaaacacattcaaatatagaaataagataggctgaaagaaaaaagttagaaaaaaatacaccatgcactcttaaccaaatagttaagcagacattaagctaaagagcattactaaagataaaagcatttcataatgatagatattactgataacttcacaagatgagatcagtatctaaattgtgagtacccaacaactaagatgtaaactatgtaaagtaaaaatggacagattaaaataagaaatagatacatctataatcatggtagaaaatttaatacttctattttgatagttggatatgatgccaaaaaattaataagtatgtaaaagatggaaacaacaaaattaatgggttgacctcattgaaatatttagaactcttcacccatcagtgataa

SEQ ID NO: 431836 - DNA, 553 bp, Homo sapiens
agtcctgaaaccataaaattcctagaagaaaacataggagggaaagctttttcacattggcctttggcaatgattttttgaatataataccagatgcacaagcaacaaaaaacaagaacgaataagtaggattatttcaaactataaagcttcctcacagcaaagaaaacaacaaaatgaaaagacaacttaaggaayggaagaaaacatttgcaaaccatacatcttatctgataaggggttaatatccaaaatatgtaagaaactcagcttaacagcaagagaacaacctgatttaaaagtgaacaaaggaactgaatagacatttccccaaagaagacacacaaatggccaagtatatgaaaaattgctcaatatcacttatcatcaggaaaattcaaatcaaaaccacaataagatatcacctcactcttgttagaatggctactatcagaaagacaaaagataacaagtgctggtgaggatgtggagaaaagggaacccttgcacactgttgatgggaatgtaaatagttcagccactgtggaaatcc

SEQ ID NO: 431837 - DNA, 624 bp, Homo sapiens
gaggacgagggggagtgtgaggaaggaggaagagaaaatagccatggggaggcccagacatgatggaagctggttccacagagctaagaaaagaactgtttcattggtaccaaacccagattttctcccatttttgcatcgctgaaattggacatctcttgcaatgaagttattttaccattttaattggcagaattgttttttcttaatgtcacataaaataaygttgcatcttatggttgatgatatttcagatttactgaaatatggtagtcgtgttagactcgagaaaaagcgtaagaacttacaggaaaaaaggctgaagaactcaacaggtgggcacaccatgcaactagtagtaagggggttgaattttatctcaagtgtaatgagaagccattaaaggattttaatagtggactagcttgatcagatttgtatattttggaaaataactgatatagtttggatatttgtcccctccaaatctcatgttgaaattccacccccagagtctcagccttgccactgcccaaagactgctgagcccctgtctgtccaccgccaccacccactctggacacagaacatccagtcatggataaaaatgagctggttcagaag

SEQ ID NO: 431838 - DNA, 569 bp, Homo sapiens
ttaaagttgcagatgaactagttaaccttatgacattcattaccccttactgtttctccctttctaacacttagaacaatacctggcatgtagttaatgctcagttaacataaactactattactggcccccagagattcatgcccctatgccaacccctccccttgggtatggactgaacttactgactcatttctaatgaatagaatatgccagaagtaatggactatcacttccaatattatgttataaaaagactgtggcttccttcttgggtagtctctcacgtgttcaccgtctctggctctctttctgtcttggatcactggctgccatgtcacaaagacactcagatagctgcggagaggcctgcttggcaaggaattgagcacttctatgtgagcatgctcactgccagcacttatgagtgagcttggatrtggatcttctgaggcctgatagtagccacaggagtgagcttggaagtgaattctccagctctgcttgaggtttgagtaactacagccttggccaacagcctgactacaacctcataagagatcttaagc

SEQ ID NO: 431839 - DNA, 535 bp, Homo sapiens
ctaaaaaacttggcaagaattaaaagaaaaatcagccctgaagatgtgccttctgagaaacagggaaggaatgattattatatctgatttgtaaacagctgaagtgtggcaaagagaagtttaattgttggctattatttatatgacaacatataaataaagaggaaacaaaagaagttaaacaactatcacacaatgcacaagtgataaagttgaaatagaacattggtttttttatgcagwtatcacaaataagattcatttttctctttataataagaattcatagagacatactcaagtgagatgctttttgaaagagcagtagcaattccatctggtcacacttctaagtccattttgggctgtgattatactttcaagccttgacatttattaagaataatccgtgactatccagtgataaaaaatatattactaaagtgtaataatagaagtcttacagatagaaaagactgaggaaggaagagttgaacaggtttcattatgaagctgaggggaacagaaaggaaag

SEQ ID NO: 431840 - DNA, 566 bp, Homo sapiens
gagaataatggagaggtatttcaaatatctgaatggtagtcaaataaaacagaaaaaaatatatatcctctgtagtttcatagcagggaaaacgcacttgattaagcatgaggaaagctgagttctagggctggctctgcaaagatttcattgtatgtccttggatgagtcattaaaaygttctgagcctcagttttcgaactggaaaaaaggggaaaaattttacaacagataaggccatttgtaaacagaatggtctgtttcaaggttcattcttcatggctagatttaggtaagcaaaagctagaaactcatctgtcatgctttggtaggaggcatttctgtaagacagagaagctgtactctaagtcactgctaaacttgtactcatgaaaggatcagggactctgtcagactcatggtacacaacaagcacagaatacatggtaccactgaacatatagcacacgatgggcctttttcaaatggatggatggatgaatttatggagagaggaccaccaacattctatgattcaggtctggctctggagagcagggacattt

SEQ ID NO: 431841 - DNA, 646 bp, Homo sapiens
ccattttgggctgtgattatactttcaagccttgacatttattaagaataatccgtgactatccagtgataaaaaatatattactaaagtgtaataatagaagtcttacagatagaaaagactgaggaaggaagagttgaacaggtttcattatgaagctgaggggaacagaaaggaaagagattcgggatcagagaagcaaccttagtgttgatgtattcttcaagtccctcaaaactgtcattcttctgcwactattttccccacactctagaccagcgaatcctgcacctgcaagtacatcagagtcctctgaaaggcctggtaaaactgattgctggacctcacccccacagtttctgattcagaagtccagagtggggcctaagattctgcatttctagcaagtgcccaggtgaggctgctgccactggtccagaaccacactattgccctagaccagaggtccccagtctggtctgctgcctgttagaaccgggccacacagcaggaggtgagtggtggaagagccagtgttatagcctggatctgcctcctgtaaaatttgtggtggcattagattctcataggagcacgaaccctgtggtggactgtgcatgtgagggatctaggttgcacgctcctt

SEQ ID NO: 431842 - DNA, 576 bp, Homo sapiens
caatctggccaatgagcaagatgggcagcctgcaggcactccagtcttagctgtagtgycatcagggtcacaagcagttctaaagccagagaccattcccagaccctaacagcatttcagacatgcatcaccaagtttaatatttttcacattagaaagacttcagttgaatctaatctcatttttaattagtcctcacatcgcctggtgaggcagattaatatgattatccatattccactgatggggaaaaatgggacaaagggtcgtgccccaaggtcacttggggaatgagcgatagaggtgcaaattaaacttaactattttaaacttccaaaccggcaggcaaacatgaggacattggggagtcaatttcatctctgtttgttcaaaggttttcacatctggataatgcatattcaatttactacttggtttctctaattaaaaaataaattagaaataaagtactaattctagctctgaactgcaatattctatatttaatgcataagaaatttcccaaggaatatatgacaagaacagccaaagaagagaataaaatgagcatcactt

SEQ ID NO: 431843 - DNA, 627 bp, Homo sapiens
atctggtgaccgactgacctgatgactgattggacacaatcgatgtctccaagtcatttgtgaattatggatctcagttggtctttattggtatgaccgatttcccttttcttttcctttcctttcctttttcacatcctcagtttacaactaattacattggggctacaccagcagcaatgcccctgcattctgctttactcattcagtaaacattcacgaagtggctaatagcttaaataaatgacaccagtaagaatctcttacgggccaggcatgacactcaatgcgttatgtatgctatcacatgcatccctcttaacaactccttaaaatagctttgttgmcccagttcccaatacagaggctcacactactcagctgacccaggattggaatctagggtcgtttgacttcaaaagttttccattaactaagttgccattccttgcccatatgcagtttacgaaagaaacagaagatacaaggagtattcaggtctcaaaggccaaatgcaagcaacaactagaaaaatagaattgaacgtaccaacaattttggattgcagatatgtagcatacgtgtgttcttgctgggacaatgggaacacaagcagcaacaactggc

SEQ ID NO: 431844 - DNA, 645 bp, Homo sapiens
cagacagtagtatcagaagtaaaatgttaccataacaaacaaacaaaaaacctaaaatgtatgagattggctctggaatggaggggcaggaagcaaaataaatgtttcaggaggctggaaaaattaygttcttcatttatgtggtagcaaagtatttcataaaatgtttcctatagttacttgaaagagaaattatattgttaattgttattacttgcaggccaaaaatttagtaatgccctattggctttgaataaagaagttttgaagaagaatattactaggattagttggtggttattaccttaatttgataaggtactgcgagaagagatgagtgcagaaaaggttattgctttgccagtagaattgaccgggaatataaattattagaaattctaaaacttgtagtactgaaaaataaaaccgtttcttatctctggccagtaaaagatcaaatttcataataatctgcattagaaaggccttctaagactgaagttaagacaatgttaggcaaagaaacaaattaaggagtgaaccattacatcatttgttaggaccttcaattggattaaatcaacacgtaggagatccttgcagtttacaaaaggactctgaggaaacagcctaagaactttgtcc

SEQ ID NO: 431845 - DNA, 535 bp, Homo sapiens
ttgtgtaagagctgaagggtctgccagggaagatagtgagcaatgaggctggagaagtaagcgaagccctgctagattgtgcagacactgaaactatcttaatattcaacttttccccttaaatagagtggcaggtaggctggtcattcattttcatgyggggaaataacataattggatttgagttttttgaaggccatttttgctgcaaagtggtgaatatgttgaaggagaaaagactggagacagaaagatcagttcagaggtgaaaaatgataatagtctattatagagacttggcagcagggatggagagaaacaagcatatctgagtcagtaagataatgacactcagagttgataactgatttgagagaaggtaaagggcgctgaggagtctcaggtgatgtgcaggcacccggttcaaccagcttcatggaacacagaaagatatgcatatttgaaaggaattataataggctctgttttgcatagttaagagtttgagatgtagacacgatatccaagcagcaat

SEQ ID NO: 431846 - DNA, 586 bp, Homo sapiens
ctgttttgcatagttaagagtttgagatgtagacacgatatccaagcagcaatatccataggcagttggtcttatgggccttatggcccttaagggaagatactatagtggcaggtatgaatttaggaatcatcagcaygcagatggtaactgaggctacagggtgaatgagcatcatgcctgacaagttggaaaagagaactcagagaaacatcaattttaaagaaataggcaaaggaaaaaaagctagaaaaggaaatcaagggtggacagacaggaagaaggaacatcaatcagggagcaagatggaagagaatcaaggaagaagagtttcaagaaggaaggtgtggccaaaacactataataaagatcctgactccatttttaagattggacagcccaggtcttatttatgtgtctgtctttattcctaacccagagactggcatagagcatgcaggggatgaatatgccatccgtgccatccctgggtagaatgagacaaagctggaacagggacatcagaggaagtcaaatccagcacttatcattcttttgtcttgaaactatggacttgaaaagaagc

SEQ ID NO: 431847 - DNA, 580 bp, Homo sapiens
gcctgctagtgtcagagaatcacgacatggcaagactcctccaggccagctctgttgtctgctttccagttgctcctccagacctgttctctacccttctctactctgctctgggccagggaaactgactccagtgggtttcatgcctctgacttgtacttgcattcagatccaggacacagtgtcagcagcctggagagggagaggagaagagggaggccagggtgctgattctccccactctctcccaagggtcgctgcagattggctgcatcttctggaagcctgctctamacagtttctgctccttcctgtgattctgcactcctaaggtaaacctttcaggcctaggggtgatgactgagtcccttcacctgggatactgcaccatcgccttgtgattttcctatatcctgcctgcacatttatgagtggtctcttgattaaattctctcaaattgcccacttttgagtatgtcatctgtctcctgctggcactcttattaataagccagctgataatgctactgaaaataattacctccactgagaatggtgctgagagttaatgcatacaagg

SEQ ID NO: 431848 - DNA, 606 bp, Homo sapiens
aagtttgtgttgccaagtaaatacataacctccattcttgctgccttggacattttgtcatgattgcattaagcaaggatgaggtggctagctagggagaaagggcaactgatagacacataatttgtcatcatgtccacttgattgtgaagaactttttcttctgagtttgttccttgatgaatattcacctgggacacaaatatcttcacttttagagaagctatccgaataccttttctctagacctctttgtcaccagttttccaattgtgttcttagcaattctctgaccrtctggctaaaccattagtcactgcccatgacttactatacatttgtacctctgaccatcacttattccaggcaaaatgagtaaccagatatgtttgttaaagttcttctcattggaaggattttccttcaaggccagtcctgagtgagactataatgctgcagctgtccactttggtgtagtatcagtgcagcatggagtaccatatataaatcaaactttttccttctattttaactggctatagggaatgccccataagaggaaggaggaaatgtagcaagaataggagtcatggttatctggaatat

SEQ ID NO: 431849 - DNA, 582 bp, Homo sapiens
ctgctaatgagtcattaggagtaatagagattgatgctacttccatttccactccttgattcctggaccttaaatcctggctacaggagaagcagcaccatgtattggacactgattcagagcatacacaaccttctggagaaccttgatccatccctgcaaggcattgccacctagctggtgctgtaactgcgtcttcaaaaggccatctcacagttctgtcaaaccagctgttgaggatgttggggaatatggttaagaccagcraattctgtgagcatggacccattattgtactacttttgctatgaagtgggttctttgatgagaagaaattctgtgtgcaataccatgatggttgataggtcattctataagtacatagatgaatgaatggatggatggtagtcttgagagaagcactgcatccaggaaaggcaaaactgtatccagagtacatatcgatttcagtaagaacaaactactgcctcttctatgatgaaagtggtccaattgaatcaacttgccaccaggtagctggctgattaccatgggagaatggtgccatatcagtgactcagt

SEQ ID NO: 431850 - DNA, 582 bp, Homo sapiens
ctgctaatgagtcattaggagtaatagagattgatgctacttccatttccactccttgattcctggaccttaaatcctggctacaggagaagcagcaccatgtattggacactgattcagagcatacacaaccttctggagaaccttgatccatccctgcaaggcattgccacctagctggtgctgtaactgcgtcttcaaaaggccatctcacagttctgtcaaaccagctgttgaggatgttggggaatatggttaagaccagcgaattctgtgagcatggacccattattgtactacttttgctatgaagtgggttctttgatgagaagaaattctgtgtgcaataccatgatggttgataggtcattctataagtacatagatgaatgaatggatggatggtagtcttgagagaagcactgcatccaggaaaggcaaaactgtatccagagtayatatcgatttcagtaagaacaaactactgcctcttctatgatgaaagtggtccaattgaatcaacttgccaccaggtagctggctgattaccatgggagaatggtgccatatcagtgactcagt

SEQ ID NO: 431851 - DNA, 575 bp, Homo sapiens
tttacagtaataatagttacttagttcatgaggtgtgcgactgaactgcaccccacaatagggtgacaggtgaacccatactaagataatgttacttgattcattacaactctgtgatattgcataacaggtgataactccattttacagactaaggaacaaaattcagagaaggttcaagaccactcagtaagccatggaatttggacaagccttgactcttagtcagtttagaaatatgagtgttgtagtaaaatgtagttcttatatagtgggaaactgaattagtttgttgttaccctgcygttaagagtcaacaattatattgaccttctatgctccttctgtaaaaataatggatgctaggtctttcttcgcccgttgatgggtcctttgacttgctttcattagcgacttacagattttttcttaagaaatgcatctcttgtttatgtctcaagaggcaggttgctatagtacagatgctcattatctctaaatactcacatagtattgatggtaggcaggaacagagtcatcttagtatgtcatttctaaagtattgaaccatttgc

SEQ ID NO: 431852 - DNA, 531 bp, Homo sapiens
ataagcccaccattctaaagaggactataatgtaatttttggttcccttaactagaaatcaactcacatcccatgtctaagagttctaaaaaaatctgggtattacctcttttcctatcgcacagttgccttgataaatggccagactctatgaggaacaatcaaaggaatgtttatcatatatacttgtggttttgttgcaggatatttccttaagggggcttcgcttctcttcaatcaatggactcagtgtgtgaactgacataaatataaaatagctgaaggactactattttgcaytgcagcagctatgttggatatagtccaagtcaagtaacaactttagttggctatcgatctgcctgacttcttgggacacagtaatctactagccattggaaatggtccccatgagttagagcacccctactgttattctggcctttctatccattgtttacatccacgttgtctctgatgtataagtgccacacctggcctctggcattcagaaactcttctaccaacaag

SEQ ID NO: 431853 - DNA, 618 bp, Homo sapiens
cattaggtgcatataatatattcaacatcaaaggatagtgtagaaaggaccaggtgcttggtgggagtgttaggaataaatcaacaaaggaaacatggctttctttgtaaatagacaatttctttttctgccaattgttttgtatttaccttccctgtttctttagcagtgtgaccatcctttcaytatgttatatactttgaagtctttcatacacaaccaggacacatgatgtgggaacagactccctggtttgtccggcaactaaataggagcctcattggtacttttaccaacacaaacactccactgcctgtgttccaagggcagagaaagccacaacactcacagagagtgtgcattttaaaaaatgtatttgagaatcccccacttttaatcacaatgcattccctcaaaaagcgaaaaatgtctgaatgtatgaaactcaagacatgtatgttatagaattgtaatggtttctgtatccagataattcaaacttaattataatcacactttaaaatctacctttaaggatatgttttatcatttttatatgttttaaaattttgttatttactcttgcagttactaaagtgtaccccaggctaacagaca

SEQ ID NO: 431854 - DNA, 595 bp, Homo sapiens
acttttcatcttacttgtaaataagatttgtaggtgttatttatatttaaataatattagatctttgactaatcttttgtaattttttggctggcttttctttttccttcctttttttttttttttctttttgccacataggcatatatatgcttttttattttatggtttccagttttgtgttacacttttaraaaatttttctctactctatcattataaaaaatttacttatgttttcttacaacacttccaggattttacttattgcatgtatatctgtaatacttttggaattaattttggtacaagaaatgaaacaatcatctaacttttttcttactggttagctagtataatatgtatttcacaggccttatgaatattagtaacaagactagttaaatctaatagtctaatcaacagggagactatagctgcttttttattcttttggctgtatagtgaagcagacttgttttggaaacaagaaggctcttagagatgaacttttaatctcagaaaaactgataatttacttaaaaattaaagaaaagaataccacattttttgtattagctgatctattttcagt

SEQ ID NO: 431855 - DNA, 595 bp, Homo sapiens
acttttcatcttacttgtaaataagatttgtaggtgttatttatatttaaataatattagatctttgactaatcttttgtaattttttggctggcttttctttttccttcctttttttttttttttctttttgccacataggcatatatatgcttttttattttatggtttccagttttgtgttacacttttagaaaatttttctctactctatcattataaaaaatttacttatgttttcttacaacacttccaggattttacttattgcatgtatatctgtaatacttttggaattaattttggtacaagaaatgaaacaatcatctaacttttttcttactggttagctaktataatatgtatttcacaggccttatgaatattagtaacaagactagttaaatctaatagtctaatcaacagggagactatagctgcttttttattcttttggctgtatagtgaagcagacttgttttggaaacaagaaggctcttagagatgaacttttaatctcagaaaaactgataatttacttaaaaattaaagaaaagaataccacattttttgtattagctgatctattttcagt

SEQ ID NO: 431856 - DNA, 555 bp, Homo sapiens
ttaacttctcacagcaatattttatagttttacgtttacaggtcttgaacctcttttgtcacatttattcctaagtatttaatatacttgatgctactgtaagttgaactttaaaaattttaatgcacagactagaactttcagtaaaatgttaaatagaagtggtgaaagcaatcactcttatcatgtttctgatctcaggaagaaagaatttgatgtttcaacacttgttagcctaagggtttaggtagatgtcatacatttggatgaakaagttcccttctattcctagatgaaagttgttttaaaatcagaaatgaaattggattttgtgaaatgattttctgcatctattgggatgattatgatttcaacattttactctgttaatatggtaaattataatacactgattgcttttcaaatgttaagataatcttgcatttctgatataagccccacttggcaatgatgtattatcccttttatatgttattggatttaatgtgttaccatttcatttagaatttttgcatgtatgctagtaattgatac

SEQ ID NO: 431857 - DNA, 601 bp, Homo sapiens
taaatgtaaattattaccataatagaatactattacacatttgttagaatatctaaaattaaaaattaaaaggattgatcatactaaagtactggtgagagtgtggaacaattagaaccctcatactgttgggaatgtaaaatgttagactatcttagaaaaacagcttggcaatttctttaaaaattaaacatatatgtctcatatgatccagccattctactcctaggattcacccaagttaaatgaaagcataaaatcgtacaaagacctgtatacgaatactcacagtagctttactgtaatagccaaaattggaaatattgtaaatattgatcagcaggtgaatgtgtacacatagccatacaatgaaatactactcaacaataaaaaccagtgaactcttgatatgtgaaacaacatggattaatctaaaaataattatgcagagtgaaagaagccataccaaataagaatacakactgcttgagcccatcatttaaattcaatgaaatgcaagctaaactatagtgacagaaagcaggcacatcattgactaggacttggtgggcaaggaggggcatgagggaaagattacaaa

SEQ ID NO: 431858 - DNA, 628 bp, Homo sapiens
ctttgcctcgtttcttccttatcctcttctggcactccatttgtcaaagttagtgtctttggtatcagtgaaaatgcattcccatccaagccttccaacaataaatctgttgtcaatttgagctatttttaagctaatgaatacacaggattaacatgtatatttgaaggcatgatgttcaacaaagccaaagttaatagtacaatcagtgaagattattctgctaaaatttttgctatctcctctgcacttaaaataaatgaaaaaatattcagctaatgatagtgtggttaatatatactaggaagtctaccaggggcttctaagattgagaaataatgctattaactcagaactcctcggaagatataattgtataaaatcttttatcttggttgttttgctactctgccatgcagcagggatttctgccatatcagatacaaggaaatgtgattctgatgcctaagtgtaaaggaaatagtatagaagttatcaatagaaaattaaattagcattaaattatacaaacrtttttttattcaggaaataatttttaaggtcctatgattaaagatttgcatttggcacagtcatagattttgttgtattgtttttctgaaaatac

SEQ ID NO: 431859 - DNA, 471 bp, Homo sapiens
tttactgaatgcattttgtatcaggcatcatggtagataactacataaactcctttaatcctcctaaccaccatgcaaagtaggtgktgttgttgttgttatgtgtggagctagtttttaatttataaacattttacatataactaatgtttggtgcagtcttttgtttcaaaatccatgctctctttagcacacattataataaatatactctgtaatcaacacatgatgccctgtctattcctcacaaaaactgctctgcatcagtgagaggataaagttccaggacattgctgctgcctgtcttttagattgtggtattgtaagcatctgtctatatcttaatgacttttgagatataagccacaactactacctctactctaccaaaatttactcccatcaaattctgtttatccatacactttcagtaggcctagtgaaattatatgcaatgtgatttgatcaaca

SEQ ID NO: 431860 - DNA, 570 bp, Homo sapiens
cagtgaaatgtaaatatcacaatgatgttccatgtacccccactcaaatgcctaatatatacatatatatttaaaaataaacaactcaaagtgctggcaaggaygtgaaacaactgaaattctcaccgactactgttggaaattcataatggtacagacaccttggaaaaactcttattataacatgtagcaatccatctgttactcatttattcaatggaaacaaaaacaaccacacaaaagcctcaattatttgagcagatttattcttaatagccctaaaatgagaagaactcaaatggtcatgaacttctgtatgcataaataaatcatggcacatctataatatgaaatattacaaagtagtgaaaaagaataaattactgataaatgaagcaacatgattccatttatatgacattggtatataagtaagcttatccggacagaaatgaggtcattggttgccaagggctggaggtgtgagaagtggattgatcccagacaggcactgggaactttttggagtgatggaaatgttatacatcttgattgccattgtggttatac

SEQ ID NO: 431861 - DNA, 570 bp, Homo sapiens
cagtgaaatgtaaatatcacaatgatgttccatgtacccccactcaaatgcctaatatatacatatatatttaaaaataaacaactcaaagtgctggcaaggacgtgaaacaactgaaattctcaccgactactgttggaaattcataatggtacagacaccttggaaaaactcttattataacatgtagcaatccatctgttactcatttattcaatggaaacaaaaacaaccacacaaaagcctcaattatttgagcagatttattcttaatagccctaaaatgagaagaactcaaatggtcatgaacttctgtatgcataaataaatcatggcacatctataatatgaaatattacaaagtagtgaaaaagaataaattactgataaatgaagcaacatgattccatttatatgrcattggtatataagtaagcttatccggacagaaatgaggtcattggttgccaagggctggaggtgtgagaagtggattgatcccagacaggcactgggaactttttggagtgatggaaatgttatacatcttgattgccattgtggttatac

SEQ ID NO: 431862 - DNA, 574 bp, Homo sapiens
aaagtttctaaacttattttaatgtgcagctaggcttgaggaccactaatttagttgcctctatgtcccatgtctgggatgagctttgtgtcctgccaaaagatcacttattgttcccacctcccttacctcataaactgccactttcctccttgctcacctcactccagccatgttagtttgaacacaccaagaactctcctgccccaggacctctgcacytactattgcccccacctgcatagctctccccccatgtagattactcccatgtcaggcctcttattaaatgttaacgttttccttcatcctatctaaatgtcaacctcatcactctccattcatttactctgcttttatttttcttcataacactcatcactgcctgagatatattttgttaatttgtccagtatttatccccttccagtagaatattagctcattagaatgagaacttagttgatgatgcacaaaatgaacaagaagagaggactggagttagaagcctattatgacactagtccagaaaagagtgacgagaatctgaactgaagcagcaggaagtgagagg

SEQ ID NO: 431863 - DNA, 557 bp, Homo sapiens
agctttgaagtgggctttgaagaacagtcagttagtaagtgtataaatatgtgctgagactttatcatgtaccaggaaaatttctttatactgggatatagtggtgaacaagacaggcaaagactgaatttatacggtagtgtaaaggagatgaggctggaagagacaaaggggaaatgaattctagattggggaaagatcttggcaaagggcaagagttgggagtgtgtgtagtatgcaataggaattatactaaaaatgtacttactaaatcagagagtgcatgctaaaaaataatgagggaatatttgggtgaaagtggtgttgaattgctagggaatttgaaattagagaacaattctggacttgatgcaggatgtagaaggcactagtacaggtttttatgcatatattttaatgctctgaaatcacagactggttatttycaaataattttagaatgcaattaccaaatgactaaagtgcgaaggtagagtagaaaaaagaaagcagtagagtggatccatcaaaatatctgagagcagtttatatctggg

SEQ ID NO: 431864 - DNA, 528 bp, Homo sapiens
tctagctttgtcttctaactamagagcaataatatacacagtgagaaagagccatataaccagaaaacctggcaacttttgtgaataaactagtggcttagttgggagtctgtggaacttgagtcagagttatgcttggcaagattagacccacctgataaacaactataacatttatcacattgaggtcacattcaaaatgaactcttataaaaaacagtaacaagtcaaacaaaacaaaggatgcagtgacagtttaggaacacaggacaatgagagttcatagcaataatgggtctaaatgtcaaaaggatgctgtgaaagtgactttgcagaatgagagcaacttagcaagtgctagaataaagtgaaagtttctattcacttcaagatagtcttggatttgtccactccttctctaaccactcagtaataatgaaaactaaattgtaataccatctctaagattctttcacacattttttccattttgaagtaagccgtgcttcctatatggagtgaagttca

SEQ ID NO: 431865 - DNA, 592 bp, Homo sapiens
gacgttattttatcagggcactcccctccttaccaaaggccagagaacctcaaatgtagacttccccattaatccctttgaaggcagttcttcactacaaatacaaattgtratgttattattttatgatcccagaaaacaaccctagtttgacttcatatagattgccttgaaattcctcgtatatacccttggttctgtagaggaggtatgcaggtgaagagctgtgttgaccattcaatagctcccaatactcatccaggaatagcaatacacagatcttaaacataatctaggttagagaaaaggaatttaccaaagcccctatcatgacttctaaacatggaaagcctaatttcagtgaactcttggaaaccatggaaactgaaaactccaataaatgcaaaggattgtagaaccttgatttttcctaaaacaaacttcaacctgtcagtagaagtatatttgaaggcttacctctaaagctagtggatttgtcccactgccagtgggattgaagaggtggattataagatttgtattgtggttaaacccatttattgagggtaacgtgaaaaaaaaaaaacctcat

SEQ ID NO: 431866 - DNA, 657 bp, Homo sapiens
tgaaattccatcattattttttcattctaatgatgatagatatttaaactatttctgtaataagaatatgctactctcagcattttttacatgtctcttggtgtgttctatctatgtgcttctgggtattttatttaggaatgcaataggaagatttccaaagagaaaaagtgacccataattctggagtcacatctcctggtttcattctcattctggatcatagccccttaattcttcactgtatttagctgttttcgaaccttcaaaaaatattttatacagttcctctcagaagtagttttcatctgttattatcaatagtaaaaatctcacggtacatcctctttaagtgattttaacttataaacatcaagcttgaggttcataaaatagagttatattttgttccaaattttctagttctgaagtaacatttgttctctcccgtgttactgccaaactttcagtatgtcaatactaattaaattagacatcrttgaacataaagtggggttcaatagacatttgatttattattattgtctactattaacattagattcaaacccataacaagtaatcagaggggcaaaaacaatactatactggctgtagctaccaaaatatatacatgaaaaatgaaaatgaaccagt

SEQ ID NO: 431867 - DNA, 657 bp, Homo sapiens
tgaaattccatcattattttttcattctaatgatgatagatatttaaactatttctgtaataagaatatgctactctcagcattttttacatgtctcttggtgtgttctatctatgtgcttctgggtattttatttaggaatgcaataggaagatttccaaagagaaaaagtgacccataattctggagtcacatctcctggtttcattctcattctggatcatagccccttaattcttcactgtatttagctgttttcgaaccttcaaaaaatattttatacagttcctctcagaagtagttttcatctgttattatcaatagtaaaaatctcacggtacatcctctttaagtgattttaacttataaacatcaagcttgaggttcataaaatagagttatattttgttccaaattttctagttctgaagtaacatttgttctctcccgtgttactgccaaactttcagtatgtcaatactaattaaattagacatcattgaacataaagtggggttcaatagacatttgatttattattattgtctactattaacattagattcaaacccataacaagtwatcagaggggcaaaaacaatactatactggctgtagctaccaaaatatatacatgaaaaatgaaaatgaaccagt

SEQ ID NO: 431868 - DNA, 543 bp, Homo sapiens
ccctccccaattttaaaatatcaaattaaatgtcaccagatgaaacactgcatcttaaaagtcatttttaatcctcgactgtacacaatccaaatcttggtagcagcatctgacagggtaaataccaactcttgtgcaagggtcktttatatcctcaacccctctgattctggaaccggttccctaaacaaaggcagacttcttcagcttcttccagaatagacattagacatggtgacagtgataaacctttggggtgggctagtctttttcaacattgatggagcagaatttacaccctctgattcaatccatctcagtaaatgtcaatgatgccttcctatctacttctgctatccaggaacccacctctttagagtcaatgcatgtgaaaggctcatgatttgtaatatcaagaagtaggaagacaaagaggtttgaaggattctgccaaaggcaaagctgtatgaggctctctcctgactacatgtacaccctatatttggataactcattcccaactgagtctgctcttaagggtac

SEQ ID NO: 431869 - DNA, 429 bp, Homo sapiens
gccaacagctgggcttgtgccctccgggtttctggagatatgtcctgtttggctgcgctgagggccgagggcagaggccaggtgcgacggagtatatacttggggagcgacatctcggcgacccagcacacacctgcctatratgttcagtcatcttaagatcattctccagaggcaggagaatcgcttgagactgggaagtggaggttgcagtgagctgagatcgcgccattgcactccagcctgggtgacagagcgagactccctctcaaaaaaaaaaaaaaaaaaaaaatgtcgggcgtggtggctcatgcctgtaatcctagcacttggaaaggccgaggcaggtggattgcctgaactcaagagctcgagaccagcctgggcaacacagtgaaaccgtctctactaaaatacaaaaaattagcc

SEQ ID NO: 431870 - DNA, 615 bp, Homo sapiens
aggccagtattaccctgatacccagaacagacaaagattgcacaagaaaagaaaactacagaccaatatctcttatgaatatggatgcaaaaattctcaacaaaacactagtaggaagaatccagaaacataaaaaaaagattatacatcataataaagtggaatttatcccaagaatgcaaggttggtttaacatctgaaaatccatacactatatcaatagactaaaaaacaaaaactacatgatcatttcagcagacacagaaaaagcatctgacaaaatataacaccctttgtgatttaaaaaaaaaaagctttaacaaactgcaaatggaatctttgttaatctgataaaagatgtttaccaaaaaaaatacagttagcatcatatttaatagtaaaagactgaatgctttctccctaacatcaggaataagacaaggatacgtgcyctcctcacttttattcaacatcatactggaggtcctagccagaacagttgagcaagaaaaagaaagaaacaacatccagactggaaaggaagaaataaaactctatttgcagataacatgatagtatatatagaaaatcctaaggaatccactaaaaaactaa

SEQ ID NO: 431871 - DNA, 603 bp, Homo sapiens
atagtgcggggagagaaagctatgggagactagagaagggaaaaatggttgggaacactggtgggggggtgaggatcatttcccaatcaccttatatgaccatgactcagaacagtgcttggcatcatgtgtaatatatattgttagaaccgaacatctagttcaggcaacaattcataaaacgttgcagggaataaactgtgggaaagggtctttgacaaagaataaatttcagttgaccaaagactgaattgggagktgtacttctaaggcaggggcaataagatgaggcccaataacaaaatccaaaaagaacatggtctgagcaattgtacgccaggcatttcaggggccacataaatcatgtataggagatttgtgaaaacctaggctgggaaaccagatggtggtcatattgagaacactcctacctctgtgcaaggaaagaagagcaattgctgctgtttatgcaagaaagttagagcatcagagtttgtaaagatgaaactgatgacactgcaaagcaggagccaataagactacaaaaccaaagcaacctgataattacaattattaatataaatttaaaggagctgggcagaa

SEQ ID NO: 431872 - DNA, 525 bp, Homo sapiens
tcagtgactggactgtaagaaggaaaatttctgacctcctaacttccaggccaatggatttcttcatttcacctagttgcctcattactttaaaaatcaaaataaccctcctatccatggaaataagcaagaaaggctgaaagagagagagaagaaggaatggagggaggagtccttttgcaccttgtccactacatcatttgtttacccagggatatgaattatcctcctaacacgtaaacatattgtcctggtaaaagtagagtttgaatggatcaagtgtcagtttctaaatcttcttttaataactgaaggcccagttattattacaaaatataayatggcagtattttacagacactaaaaatgtggagagtgtttgggccgtcatattaagtgaaaaaaaaatatgaataatctgaactcagtacattatatagatacataaagatacacacagaaaaagaatccactcaatttaacagcaattatctctaagagacgggacaatgaatgttttcacag

SEQ ID NO: 431873 - DNA, 525 bp, Homo sapiens
tcagtgactggactgtaagaaggaaaatttctgacctcctaacttccaggccaatggatttcttcatttcacctagttgcctcattactttaaaaatcaaaataaccctcctatccatggaaataagcaagaaaggctgaaagagagagagaagaaggaatggagggaggagtccttttgcaccttgtccactacatcatttgtttacccagggatatgaattatcctcctaacacgtaaacatattgtcctggtaaaagtagagtttgaatggatcaagtgtcagtttctaaatcttcttttaataactgaaggcccagttattattacaaaatataacatggcagtattttacagacactaaaaatgtggagagtgtttgggccgtcatattaagtgaaaaaaaaatatgaataatctgaactcagtacattatatagatacataaagatacacacagaaaaagaatccactsaatttaacagcaattatctctaagagacgggacaatgaatgttttcacag

SEQ ID NO: 431874 - DNA, 533 bp, Homo sapiens
gttttttttttttctatccattttaggaactctttaaatattctggatatgaattatttgttggtttagaggtctaaacaacttttaaaaatgtacttaatcatgccagtagttctaaatgggaatatgaacaagctgtgctgagttgaaattaaccctccaaatgcttccgtccattccagagaaccatattttactcaaatatcaaagtccgtaggttacagaaaagggagcaaatgacaaaagcattttatgagcagtagacttctctagcccttgaattatggtagataactrgccttgagttcctgccaccagaaattccctcctctaaaccctgtggtggttgaggagccctttcctgagctgtggtattctctgggaagacacaggttggaactagagtcagtttccatcagtagatagtattttgcagaacaatttacttggagaagaaagaggacagaatttctgtcacgtcgatcagtggtttattctctcactgccattgtctagccatatgtccctaaaaa

SEQ ID NO: 431875 - DNA, 546 bp, Homo sapiens
aaggcagattttccttattggtcttaagctgtcaaagacagcagaaagatattatccactgccaaggaaagatgggaaccaaaaacaaatacttaaagtttcccaaaactttcaaggaatcttccagctgtggcaacaagaagtccttagtagccatgaaagctctcacattatagctatgtttgactcttgggttgaagtaatgaacaggtgaacactgacaattagtcctcttaaatgtgcccargcagttggtaattataccctgcatttatttagtgttttgtttacaaaattctgttctcccttttgatgatatgaacagcccagtacatatataggacagctatgattattcccactttacagatgagaaaactgatgccagagaggttctgtcatttgccctacactacgcagctaataaaaggtagagacagtagagacaggtcttcaacccttttaatgcctagtccaggaaatttttaatatcaatattgcatttaactcagtaatttctgaggatgagtaacaggaagatgtatt

SEQ ID NO: 431876 - DNA, 363 bp, Homo sapiens
acttgaactctgttggttaaccttatgggtcagatcatgcagattcccaaatgcctggacccttgcctgggagggagtggactctcaatatgcaagagtgctgagagacgagggatgatggctccactgttgtgctgsccacattgtatttggtgagtccaggctcctgctcttatcagaacagcaatggtagctgctggaggaagagctggcctccctcaggatgtagccatttctgctgcctgattcatattgggcaaggtcttctttgggcccttccatagctatagccatctatgtgctattggcgattgcactgagacctctactctgtcaaaaagaggtaaggaagaatgtgatagt

SEQ ID NO: 431877 - DNA, 570 bp, Homo sapiens
tgggatggaatacttgcttttgaaatatgccctaaagagtgtgctatccctggggaaatccacttgtctcaggcaatattaatctgctctgcgaacagcttgttggaaatttgctgataatccattttttttttgtcattccatatctcagtgtgagagagtaagaraatttggtaaaagttcttactttttagcttgaccttctgaggtctgaggagcactcaccttcccagtctcatcttccatccctctctaacacaccctcaagttccctgaggaaacaacattatatcctggttccagtatgtattatagttggtgccttaggaaaattactttctttttcagagacccctgccccacccttcctcatctgcttaggggagactgtaatactcatctttcagtgctgggtaagcctagcatgttccctagtatgcttataatcagagctcagttatgatcctttcacttttatgtctgtccttgacatgatgttctcttaacctttgcttgctctccaacattattttgtactaaataatggactaaaatgcccttcagcccatt

SEQ ID NO: 431878 - DNA, 540 bp, Homo sapiens
ttggctattgtaagtaatgctgctatgaacatgggtgtgcaaatatctctgctggaccttgctttcagttcttttaggtataccagaagtataattgctgggtcatatggtaattatttgttccatttttttgaggaatccccatactgttttccatagtggctgcaccattttacattcccaccagcaatgcacaaggattccaatttctctacaccctcagcaacacttactattttctatttttttttgatagcagtcatcccaatgggtatgaggtggtatcttattggggtttctgcctggcatctaaggccctctgtacctaggctctttcataaatttgaacttaattygaggtaattctctgcccaagcgtcccactacagccaggcttgaaagactcaggtcaaagagagagagactgagctctgaaatcatcttgattgctttctaggctgagactttgggtaaataggctgtgtgatttttcaccttcttgattaagattttttaaattgttttgtttttgtttttttg

SEQ ID NO: 431879 - DNA, 611 bp, Homo sapiens
tgtttgtttctaagaatatagaattgttttagaataacaatatgtattgctgactagttccttcaaagaaagaacaaactgttttatggaaaatgtgccccaaatcttaaaattgaacttcagtaatctgaaagtattcccaagtctcttttctggcctcaagttggtagagtaaatttcctcttaaacataaataaaaatgaataaaatgtctttatggtcagctccaccctaaatgacacacatgcaacatttgcccccaaaatggtacttatgaccattaattaaaattcaattctctctatgttcactattgcatgtatgagggaagagataacatatgtccacattttctgacctttgcatatacttgcatttattaagagattagtgcctcccccaagcacactttggtgacccacaaagtaacttgccaccagacctgagccttggaaggagaagaaggaagaaatkttaaaaggtggacatattttctccttagacattatatttgtctccttctattagatttatttttggcacacagaagagcacatccatatggggaacattttaaaattgcttgtgaagaacaggcatatttccaagag

SEQ ID NO: 431880 - DNA, 393 bp, Homo sapiens
agcacactttggtgacccacaaagtaacttgccaccagacctgagccttggaaggagaagaaggaagaaatgttaaaaggtggacatattttctccttagacattatatttgtctccttctattagatttatttttggcacayagaagagcacatccatatggggaacattttaaaattgcttgtgaagaacaggcatatttccaagaggaaatgtaaccttcccttcatctggcatatcagatcaatgcactgtaaaagatcatgttcagttacctcattttttttggattagaattaatggctcattagtcttgatcatatcaatattataacaccacttacatttgatagaaaagggaagaaggctgatggagtgcacttattccctttt

SEQ ID NO: 431881 - DNA, 178 bp, Homo sapiens
gtggtacagtgggaggatcacttggagcccggtgtttgaggctgcagtaagctactgtgccactgtactgtagcctgggcaacagaggaagacccccyccaactcaaaaaataaaaataaaaaagaagtgacctatataaatattcttttctctcttaacccttggagaagctcacaa

SEQ ID NO: 431882 - DNA, 459 bp, Homo sapiens
atcagggacttaatacaaactccactcagaacaccatctcttygcttaggccttttgccttcagaaacatctctagctactactaataaacatttcctttctttcagcccctaaaagctcagtcacaggggcacagtatcacggtgtttggattttgtgttggagaaccacagacccggtcagaacacagccgcctgcattttggttggctgagagggctcttagtgactgacgagtggtgcagcttatgagcactccagattttccgcccactaattctacaagggtagcaaaccaggcccaggagacactgattggaaagcaaaactagaagagagaaagagtgtgtgcagtataatctggtgtaggacacaagtctcatgagtgaaagatgagttttataattggttctaaacaaaatgagaggcacagtgcttgttcaaagaaggaaagaaagag

SEQ ID NO: 431883 - DNA, 562 bp, Homo sapiens
ggaatctgatttccatgtaaggggttcacaagcagggttggttccctaacaccactgctctaagtgctgtggcgagagtataaattcctcaatgacaatcagttagtcacaatgtccagatgagggccagyggaacatacaggtgaaccacataatggcaaaaacccaaagaccagaaagggctattgctcaggaatacacagcctcgggaattttaggttaccatgggctcgagttgaacatgaaagagctgtaggccagatttaaaaagtaacctggactttaaaagaagtcaaatctgatccaacctttctatttttttttttttttttcagaaaagaaaaaggagatgcatagaggttaaataactggcctatggccactcagctaagagttgaagggcaaggactggaagcagagtcttctaactgtatccaagccacttgagcctataagcagcactttcaggttgccctggagacaatggcagaaggtacacagagcgacatcctattaaagagacatgggaaaagatggctaaatattgatactgtttttagat

SEQ ID NO: 431884 - DNA, 562 bp, Homo sapiens
ggaatctgatttccatgtaaggggttcacaagcagggttggttccctaacaccactgctctaagtgctgtggcgagagtataaattcctcaatgacaatcagttagtcacaatgtccagatgagggccagtggaacatacaggtgaaccacataatggcaaaaacccaaagaccagaaagggctattgctcaggaatacacagcctcgggaattttaggttaccatgggctcgagttgaacatgaaagagctgtaggccagatttaaaaagtaacctggactttaaaagaagtcaaatctgatccaacctttctatttttttttttttttttcagaaaagaaaaaggagatgcatagaggttaaataactggcctatggccactcagctaagagttgaagggcaaggactggaagcagagtcttctaactgtatccaagccacttgagcctataagcagcmctttcaggttgccctggagacaatggcagaaggtacacagagcgacatcctattaaagagacatgggaaaagatggctaaatattgatactgtttttagat

SEQ ID NO: 431885 - DNA, 550 bp, Homo sapiens
aaaacaagtaccaggtacactttaataccagccagcaagtcaaacctgtctcagattaatttttttaataaataytcccttaaatttgcaccaaccaaagtatcgccctcagagtgcaaatgtattcattaatgataaaccctccccacttccactccaaatccacttggtaatagatttgaaaatccagaatggctggagaattgatttgccttccaaggataacttccagtattgaatattgtcctcatggaaagttgggccagatttagatcccccaaaccctgactcagaattgcagtgataagcattgacttcagagaatttttgaaaacaagccacaataaagcaaaaaatatgttttacttatttactaggaagaaacttacttcttattaattaattttctgtgttttaacgatgttaaagattcctttcagttcttacattacgtaattttatgactattaccatcattttattttctcaccacctttgatacagtttgctgagatactattaggaggtatgaattgttattgataacgga

SEQ ID NO: 431886 - DNA, 550 bp, Homo sapiens
aaaacaagtaccaggtacactttaataccagccagcaagtcaaacctgtctcagattaatttttttaataaatactcccttaaatttgcaccaaccaaagtatcgccmtcagagtgcaaatgtattcattaatgataaaccctccccacttccactccaaatccacttggtaatagatttgaaaatccagaatggctggagaattgatttgccttccaaggataacttccagtattgaatattgtcctcatggaaagttgggccagatttagatcccccaaaccctgactcagaattgcagtgataagcattgacttcagagaatttttgaaaacaagccacaataaagcaaaaaatatgttttacttatttactaggaagaaacttacttcttattaattaattttctgtgttttaacgatgttaaagattcctttcagttcttacattacgtaattttatgactattaccatcattttattttctcaccacctttgatacagtttgctgagatactattaggaggtatgaattgttattgataacgga

SEQ ID NO: 431887 - DNA, 568 bp, Homo sapiens
tctgattgtttcacgtttctcaccaaagggggaagcaagttcacacatgagagtagggatggtggaagaaatgcaagagtgttcaagttttaaagggagaggaaaaggagcgaaatagtcacctctagagagagggagaaccagtgacagcattcgagatactagaaaatgattagcatccatataagaaggaaacactgggacctgggtgtgcaggggtgaactggttgatattccactctcctgtcttctgatcattatcaatagcggtaatttgaattgagagacaggccatgccaaggaaagttcttgaggcaatggcaaagcccaccttaagacattrtaaaaatcatcacacacccgatattgaacaactttcctctcaactgctaagaggcagaattaagataatatcatgcattcctctgttggaactgaccaagttacacctcacagataacatgcatttaatcgtatatgcttataaatatataggtttttaaagcagtgacttaattcatcaatagaaaatccaaaaagagagtccaaaaagaaattgaataagttc

SEQ ID NO: 431888 - DNA, 568 bp, Homo sapiens
tctgattgtttcacgtttctcaccaaagggggaagcaagttcacacatgagagtagggatggtggaagaaatgcaagagtgttcaagttttaaagggagaggaaaaggagcgaaatagtcacctctagagagagggagaaccagtgacagcattcgagatactagaaaatgattagcatccatataagaaggaaacactgggacctgggtgtgcaggggtgaactggttgatattccactctcctgtcttctgatcattatcaatagcggtaatttgaattgagagacaggccatgccaaggaaagttcttgaggcaatggcaaagcccaccttaagacattataaaaatcrtcacacacccgatattgaacaactttcctctcaactgctaagaggcagaattaagataatatcatgcattcctctgttggaactgaccaagttacacctcacagataacatgcatttaatcgtatatgcttataaatatataggtttttaaagcagtgacttaattcatcaatagaaaatccaaaaagagagtccaaaaagaaattgaataagttc

SEQ ID NO: 431889 - DNA, 550 bp, Homo sapiens
aaaacaagtaccaggtacactttaataccagccagcaagtcaaacctgtctcagattaatttttttaataaatactcccttaaatttgcaccaaccaaagtatcgccctcagagtgcaaatgtattcattaatgataaaccctccccacttccactccaaatccacttggtaatagatttgaaaatccagaatggctggagaattgatttgccttccaaggataacttccagtattgaatattgtcctcatggaaagttgggccagatttagatcccccaaaccctgactcagaattgcagtgataagcattgacttcagagaatttttgaaaacaagccacaataaagcaaaaaatatgytttacttatttactaggaagaaacttacttcttattaattaattttctgtgttttaacgatgttaaagattcctttcagttcttacattacgtaattttatgactattaccatcattttattttctcaccacctttgatacagtttgctgagatactattaggaggtatgaattgttattgataacgga

SEQ ID NO: 431890 - DNA, 584 bp, Homo sapiens
tctgtgcctgttttgacactggcccttgtccaagtctttgacacactcaatttactacaaaattggcaaccctctgtctcctaaaggtatccaagtgtaacaataaatattggtctccatacacactatgattaacataagtcagagtagacttaatcagtrtcaaattatttggcttccataattttagtattttatattttcatctctttcttaagatatttttataaaatcctgatttaacaagatgtgctagaggcagccgggtttttgcattctcttagggatgtggagatcggacccaagtgaggaaaagggacgctcaggttaacacaagcagttcaatttcaattatgtggagtaaatggtctttttcaggtctgatgatttttgaaaactatttgaaggtctgctgtgatttacatgcagtttgccttgatctgctaaaagaagggctttcatattacttgactcaagtatttgaatgtaattatgaaatatctccttgccataaacagatattcctaaggaaatatttaacaaccaaccaaacaatccctaaagaattgtcggatataaaataa

SEQ ID NO: 431891 - DNA, 584 bp, Homo sapiens
tctgtgcctgttttgacactggcccttgtccaagtctttgacacactcaatttactacaaaattggcaaccctctgtctcctaaaggtatccaagtgtaacaataaatattggtctccatacacactatgattaacataagtcagagtagacttaatcagtgtcaaattatttggcttccataattttagtattttatattttcatctctttcttaagatatttttataaaatcctgatttaacaagatgtgctagaggcagccgggtttttgcattctcttagggatgtggagatcggacccaagtgaggaaaagggacgctcaggttaacacaagcagttcaatttcaattatgtggagtaaatggtctttttcaggtctgatgatttttgaaaactatttgaaggtctgctgtgatttacakgcagtttgccttgatctgctaaaagaagggctttcatattacttgactcaagtatttgaatgtaattatgaaatatctccttgccataaacagatattcctaaggaaatatttaacaaccaaccaaacaatccctaaagaattgtcggatataaaataa

SEQ ID NO: 431892 - DNA, 550 bp, Homo sapiens
aaaacaagtaccaggtacactttaataccagccagcaagtcaaacctgtctcagattaatttttttaataaatactcccttaaatttgcaccaaccaaagtatcgccctcagagtgcaaatgtattcattaatgataaaccctccccacttccactccaaatccacttggtaatagatttgaaaatccagaatggctggagaattgatttgccttccaaggataacttccagtattgaatattgtcctcatggaaagttgggccagatttagatcccccaaaccctgactcagaattgcagtgataagcattgacttcagagaatttttgaaaacaagccacaataaagcaaaaaatatgttttacttatttactaggaagaaacttacttcttattaattaattttctgtgttttaacgatgttaaagattcctttcagttcttacattacrtaattttatgactattaccatcattttattttctcaccacctttgatacagtttgctgagatactattaggaggtatgaattgttattgataacgga

SEQ ID NO: 431893 - DNA, 254 bp, Homo sapiens
aatacaatgctttcagctggtttttcctggtcagctataaatgttaacaggctgatattaaaagttgatatcaatgttgatatcaaaagtatagatctgccttatgttaaaataaaaaggaaaaagaattagtctcagtaagaagatctgggttctagtgccatgttaggagtgctacaaacttgctgtataattttaattggactaatayataacaacattagtaggagttttgtttgaaccagagatcacct

SEQ ID NO: 431894 - DNA, 407 bp, Homo sapiens
tcctctcaattttgctgtgcacctaaaattgctcttaaataaataaagtctaaaacagctagaagagaagattttgaatgttccttacacaatgaaatgataaaaatgtgaggcgatggatatgtcaataacctagattaaccattatacattgtaggcttatgtcaaaaaatcwccggtaccccataaatataaataaataaataataaagtctatttcaagaactgcacagtgcctaagagggaaagcatgtttagtttcttctgggcaacacaggatggcaagcagcactttgtgagagctcagggggagagtggacactgctgtaggaggaaagatcccaggctcagaggccagcaggtagaagacaatctcagtcaaattcatatttttgccctgggccaga

SEQ ID NO: 431895 - DNA, 595 bp, Homo sapiens
aaacagctagaagagaagattttgaatgttccttacacaatgaaatgataaaaatgtgaggcgatggatatgtcaataacctagattaaccattatacattgtaggcttatgtcaaaaaatcaccggtaccccataaatataaataaataaataataaagtctatttcaagaactgcacagtgcctaagagggaaagcatgtttagtttcttctgggcaacacaggatggcaagcagcactttgtgagagctcagggggagagtggacactgctgtaggaggaaagatcccaggctcagaggccagcaggtagaagacaatctcagtcaaattcatatttttgccctgggccagatgtgtctaaaagcttcacgcttttgcacagctcctcccccaggagtagcaactgacggaggggtcacrtgcttatttccccagtctcaccccctgggtaaacgtcagaagatctgctgatggacctttcaatttcacttccttcctttgcctcctgtggatgatggtttgcagggagggaggaattttaataacacatgaaactttcaattcctgtgaataaaacggggaaggcttgtca

SEQ ID NO: 431896 - DNA, 565 bp, Homo sapiens
attctagactagatcactgccctaggctatgcttggcttctaaaaatccttcaagaactacaggatgattgtatatttagagtctaccttacccccagctctctccacccctgtcatgaagagaatgaaaacattacatcagttgtcctgacatgggaaaggatccttgcaactccttagtaatagacaaggagggtcaattcctaattgcactcattcctacctcctttaagaggtgggcccagcaaagagtggtttgctgtttgttaggcactaactccacaaaattgggcctcctacaaaaggagagaataataaaaatatatttacacatgtaaactatatttctactgccatgttttgagccatagaatttaggatggcaaggaattatatactatatctttaaaatatagaaatagtataaaaataatcatcaagaaagcctgcatatacctctttgttacgatgaggataccaacttggttttcatttgaaawttttgaaaaagagtggcaaccaaaaatacatcatattatatcaaatatgtctctggtttttgggg

SEQ ID NO: 431897 - DNA, 582 bp, Homo sapiens
cgtcacagtccgtcacattaagataaattttcagaagaaacgcaagccctcgggaaatacctctgcccagagtcaaatggatcctacctgcttttttaaatgcctgcatttccattgctaactcatacaacacattttacgattgtgcaaagtgcaggacagttgagccccaatgtcagcctcagagctccttgtcacattcagcttctttttctytctctttctttcaacacaacgctatggtgaagtcacataagtgatcaaaattaacataaatcactattagttattaggatttgctctaaattacactgtgaatatcgtaccagccccatctgccgcccctgctctcgcagcaatagattgcagataaaataaatgtccttaccccattagaaggttcctgtctctgtagccaaaagccaaacaaaagcaataaataccgggctttttctctccactattcagctgtgactcttttcatcagctcttcttctagaaaagctcaatagctgcctgaaaatattgcattttatatcaccaaagggcgattaatattgcattaactgtatttaacatttt

SEQ ID NO: 431898 - DNA, 545 bp, Homo sapiens
gttttgcacagtttcctactacataaaataggaaattcattttcatgatgttttattaacataatactcttatttttatgtggtaaaggttttatttaaagcaaattcttaaattcttaatacctacattgttcattattatataatacacgtgtttgcctgcaacatttctgcttgaggcagacttwaaaaaaaaccctttgtaaatcttttcatttgttctgtcctgtttttccaacaatgaaatccagtcatacttttctataaaataacggtttttttacaaatgcattttatttaaaactgatgatgtttcaagtcaataacagcaaaaacaaatcaactttttatggaagagttctatgtttaaaaatacctctagtgctttttttttttaacattaacaactgtttaaaatcgcagcttttaaaatgtactattctttttgaacatcaagtgttttccttcacagatttgccggtgaaattaaaaagatttggctaaaataagatgacttcagatgatataatctcagctcttaagaa

SEQ ID NO: 431899 - DNA, 611 bp, Homo sapiens
agttgaggccaaccctgaaggggatgaaggttgaagagtgtctgctgacagttctcccaacaagtggggtagcaagatccccctgaaataaaatctatgtggtttatctgtgttcagcacatatttttccaagaaagggctagcctgtactgtatacatagacagagacacatgtatggtctcacagaacatgagcacttagagggcagggctgttgtattggaaggatgagctagcatttgtagctattgaaaaaagtcaccccaaaatgtcagtggcttataacagtaaagatttatttctaacttatgtttcaagcctgttgcatgtggcttgagtttcttctctatgctgccttcactgtaggagccaggcttacagagaagcctctactgacgtacttccagtactcacagcaaaagaaaaagtggcatgaggaagtagacacatacttctaaagtttgartgtggaagacacctatcggtattacttctactcatatttcactggccaaagaaagcaccatgatcaagacaactttaataggactgtaaatataactgtcttccaggaaggggaggagaagcagattttggtgaccactattata

SEQ ID NO: 431900 - DNA, 611 bp, Homo sapiens
agttgaggccaaccctgaaggggatgaaggttgaagagtgtctgctgacagttctcccaacaagtggggtagcaagatccccctgaaataaaatctatgtggtttatctgtgttcagcacatatttttccaagaaagggctagcctgtactgtatacatagacagagacacatgtatggtctcacagaacatgagcacttagagggcagggctgttgtattggaaggatgagctagcatttgtagctattgaaaaaagtcaccccaaaatgtcagtggcttataacagtaaagatttatttctaacttatgtttcaagcctgttgcatgtggcttgagtttcttctctatgctgccttcactgtaggagccaggcttacagagaagcctctactgacgtacttccagtactcacagcaaaagaaaaagtggcatgaggaagtagacacatacttctaaagtttgaatgtggaagacacctatckgtattacttctactcatatttcactggccaaagaaagcaccatgatcaagacaactttaataggactgtaaatataactgtcttccaggaaggggaggagaagcagattttggtgaccactattata

SEQ ID NO: 431901 - DNA, 611 bp, Homo sapiens
agttgaggccaaccctgaaggggatgaaggttgaagagtgtctgctgacagttctcccaacaagtggggtagcaagatccccctgaaataaaatctatgtggtttatctgtgttcagcacatatttttccaagaaagggctagcctgtactgtatacatagacagagacacatgtatggtctcacagaacatgagcacttagagggcagggctgttgtattggaaggatgagctagcatttgtagctattgaaaaaagtcaccccaaaatgtcagtggcttataacagtaaagatttatttctaacttatgtttcaagcctgttgcatgtggcttgagtttcttctctatgctgccttcactgtaggagccaggcttacagagaagcctctactgacgtacttccagtactcacagcaaaagaaaaagtggcatgaggaagtagacacatacttctaaagtttgaatgtggaagacacctatcggtattacttctactcatatttcactggccaaagaaagcaccatgatcaagacaacttyaataggactgtaaatataactgtcttccaggaaggggaggagaagcagattttggtgaccactattata

SEQ ID NO: 431902 - DNA, 584 bp, Homo sapiens
ctgagagggctcttagtgactgacgagtggtgcagcttatgagcactccagattttccgcccactaattctacaagggtagcaaaccaggcccaggagacactgattggaaagcaaaactagaagagagaaagagtgtgtgcagtataatctggtgtaggacacaagtctcatgagtgaaagatgagttttataattggttctaaacaaaatgagaggcacagtgcttgttcaaagaaggaaagaaagaggaagctgggagatttctaaaatagttttattttaacagagagtcacagtcagaaaggttgaaaggtgggaaaaggaaagggcttggcaggaaaatatggtggaggataggaaggtgtgagtgggtgatttagccatgtaaatctcatggctctagggctttgagcaagtcgaattgtccagccctgtggatgctagcytagaaaacagggaccttaaagagttcacaaggagcaagaaaggaaatctgtgacagtggttgacaaactaaaaacacacttttagtcatcctcattgtcatcattgctctcttaccctttctctttttgtaatttt

SEQ ID NO: 431903 - DNA, 620 bp, Homo sapiens
attcctttctgttatgctttacatttacaaaacttccttaataacctccttatatgagaccctctagatatgtgatatttgccttttctttaattttctgcttttggagttctcattaatggtggccatctccccactcatctctagaaattatgtaagcctgttctaggacatttctttcttcctttttcagacttgtatattgttggaaaaatcactggtaaaatatttatatgcatctagattttgaggcactttctaatctttgagcatatgtattatatgggatatattcaatatatacccattattaaagtcattgatcatattaattagcagatggaggtcacgaacgctacttatattcccttaaggcaagaaaagatcagtgagaaagaatgtagaaatatagattggtttaagaacggcttcaaggtatgcataaaaataaatrttataagaacaataggaagcaatgattctccaacctggatacatattaagatagcgcaggaagattttaaaaaatacctgctcatgggtgatctccaaattataccattggactcagaagttttggtggtggggctttgtgttaatattcttaaaaagtctcccca

SEQ ID NO: 431904 - DNA, 549 bp, Homo sapiens
ctcccaaggcccaagtgattcttctgcctcagcctcccaartaggtgggaccacaggtgtgtgacatcatgcctggctaatttttaaatttttagtagaggtggagtttcgccatgttgcccaggctggtcttgaactcctaggctcaaacgatacacttgccttggcctcccaaagtgctgggattacaggtgtgagtcaccatgcctggcctgaaatatctttttggtggtaggggtgggggtggggttagggggtggcagctggggatgattttcgtattgctatcattccttcattcctatttaggtgtcatgcattagactctgtctcaaggagagggattattccactgcctttcttttcttttcttttctatttttcttgacacccaggctggagtgcagtggtgcaatcttggctcactgctgcctccgcctcctgggttcaggcaattctcctgcctcagcctcctgagtagctgggattacaggcacctgccaccacgtccagctaacttttgtatgtttactagagacagggttttgc

SEQ ID NO: 431905 - DNA, 549 bp, Homo sapiens
ctcccaaggcccaagtgattcttctgcctcagcctcccaagtaggtgggaccacaggtgtgtgacatcatgcctggctaatttttaaatttttagtagaggtggagtttcgccatgttgcccaggctggtcttgaactcctaggctcaaacgatacacttgccttggcctcccaaagtgctgggattacaggtgtgagtcaccatgcctggcctgaaatatctttttggtggtasgggtgggggtggggttagggggtggcagctggggatgattttcgtattgctatcattccttcattcctatttaggtgtcatgcattagactctgtctcaaggagagggattattccactgcctttcttttcttttcttttctatttttcttgacacccaggctggagtgcagtggtgcaatcttggctcactgctgcctccgcctcctgggttcaggcaattctcctgcctcagcctcctgagtagctgggattacaggcacctgccaccacgtccagctaacttttgtatgtttactagagacagggttttgc

SEQ ID NO: 431906 - DNA, 549 bp, Homo sapiens
ctcccaaggcccaagtgattcttctgcctcagcctcccaagtaggtgggaccacaggtgtgtgacatcatgcctggctaatttttaaatttttagtagaggtggagtttcgccatgttgcccaggctggtcttgaactcctaggctcaaacgatacacttgccttggcctcccaaagtgctgggattacaggtgtgagtcaccatgcctggcctgaaatatctttttggtggtaggggtgggggtggggttagggggtggcagctggggatgattttcgtattgctatcattccttcattcctatttaggtgtcatgcattagactctgtctcaaggagagggattattccactgcctttcttttcttttcttttctatttttcttgwcacccaggctggagtgcagtggtgcaatcttggctcactgctgcctccgcctcctgggttcaggcaattctcctgcctcagcctcctgagtagctgggattacaggcacctgccaccacgtccagctaacttttgtatgtttactagagacagggttttgc

SEQ ID NO: 431907 - DNA, 585 bp, Homo sapiens
cacctgccaccacgtccagctaacttttgtatgtttactagagacagggttttgccatgttggccaggctagtctcaaactcctgaccttgggtgatccacctgccttggcctcccaaagtgctgggattacaggcgtgagccactgcccccggcctccactgcttttcatagatctcggtaaagactttgtaatgaaaaatatgtcacctgccttaaaaacagtgtgttgtcagtaaattatcagcccrcttccagagtccaatcaaatatatcagtataactggagactctactatgtgttccatgaaaacatagcatctgaatgatgaatggtctttgccttcaagagatttatatcctggtggtaacaagaacatattgaaaataagagtaataataatttcctttaaattatctttattaattgaattgtttaaactatttaggtacacaacaggggcagctgctttaatttgaacttctccagcgggaaacctgaaacacaaagtagataggtgacctgtttcagtctccttgtgggatcagccatagattcactgctgctgaggcctcctgctttctg

SEQ ID NO: 431908 - DNA, 535 bp, Homo sapiens
cctcctgctttctggcaagctgggcagtaaagctgatacctatgtgcctggccatatctcatttatgactgagatccaaggcaagattgtgaaatatttattcctaggaatatctattgacaaytgatgtacttcttgggaattttcacaaatttgacaattagataaaaagaaatggcaaattcaataaaattttaaatcaactataacaccttgcacttacaattaaatgaccaggtttattttcatttttatttttttattttgatgccccagactagctatgctgtatggacaagtgtttcaagttagtctcacaatagggaatcatcaagcagttcattaagtatttcctgaggacctataatgagctaggtacagtctgaaaaacacaggcaaaatctctgatctcatagagattctattctagttgaggtgtggtaaaatggggaagatggcaatcaccaagtaaactattaagaatgtgccctaaaggaaataaaataagactatgtgataaaggaaaaataggaga

SEQ ID NO: 431909 - DNA, 535 bp, Homo sapiens
cctcctgctttctggcaagctgggcagtaaagctgatacctatgtgcctggccatatctcatttatgactgagatccaaggcaagattgtgaaatatttattcctaggaatatctattgacaactgatgtacttcttgggaattttcacaaatttgacaattagataaaaagaaatggcaaattcaataaaattttaaatcaactataacaccttgcacttacaattaaatgaccaggtttattttcatttttatttttttattttgatgccccagactagctatgctgtatggacaagtgtttcaagttagtctcacaatagggaatcatcaagcagttcattaagtatttcctgaggacctataatgagctaggtacagtctgaaaaacacaggcaaaatctctgatctcatagagmttctattctagttgaggtgtggtaaaatggggaagatggcaatcaccaagtaaactattaagaatgtgccctaaaggaaataaaataagactatgtgataaaggaaaaataggaga

SEQ ID NO: 431910 - DNA, 608 bp, Homo sapiens
ggcttataagcaacagaaatttatttcttacagttctggaggcttagaagtccaagatcaaggtgccagctggtctagtgaggcccacttcctgcttcatagacagctgtgtctttttgctgtatcctcgaatggcagaaaggacaaaggagctttgtgggacatctttttaagggcattaatctcacttatgagggcttgaaccttttgacctataggccccagaagcccttacctttaaatattataccatcacctcctattggccctrccccaaataccatcactttagggattaggtttcaacataagaatttatgggggacacaaacatttagtctatggcaccatattttcttttggaaatgcatcctaaaacatgaactatagaatactttggcaaaaggcaaaggatataatacaaaggaaataagacaaaaatcttgataattgttgaatatgtgttatgagtaaatgggagtttattatgttctccctacttctgtgaatggttagaattgtttatattaaggaaaaaaaccccagcaaaacatggtccctgcttccagaaaagtagttaatgaaggcatgacatgaaaatatatgaa

SEQ ID NO: 431911 - DNA, 631 bp, Homo sapiens
acatataaagtcaaagtttgatgaggcaagtggactgacttccccaatgtcccccttgttcctcctcaagaaggcatttctgaattttggcagtcttggccacccactgggcttgctgcatttacccattttgttggaattgccattgagaaccagaaaggcaaagtgaattgctcaaggatagtagcgtagcactagagcttattagttttttggtactcaggtgtggtattcttttaccacatttgttttcttcaaacacgtcctgtttttctgtgtgatagactatgagaaaatatggtcttaggaactttttgttgttagagatgctctttagtttagttataccacctcaaaggtcataccaataggacttccatttctcttttactagggacagaaatgatcttgtatctcttagagctrtttggacaaggggaactggcatccttttctctctcatccagaatgtatgtatcagttaatattgcaagctgaaaaatcctttaagcttctgttagattctggcagaatacagttccgatatcaattgtagctcccaaactgctctgcagtgttttttctggcacaatgaagcctttggccatcactgctactttgaaaatcaaag

SEQ ID NO: 431912 - DNA, 604 bp, Homo sapiens
tggtaatattttgggaagcattctttatttttgagtagtctttctgtgtgtaggcctctaagttcccaaagatatcctttgrtagcaactgacttactatgtagtagcattatttgattttaagtcatttgatttttttatctgaggagatacctttattataaaaaattttacttgaagaaatttatcttgataagcaaatgtaaggctgtcacttttgcttattggcattaaataaacatactacagtttttccatttaaaaatgtgggttatttgattatgccagagtagttacaatcaagaactaacaaacatttgtacttaatgtactgaaaggtctttgcccactttttaaaagttctcttgcagaactacaactctgtgaagtactacatttataagccaaaacatttttaacaaagaagaaaaattcccatcattcatttaaccaaatacagtagtaaactttgtctttaaaatggggaggcttgttattatagttgcttttgtttttgttatacctgtggtttttgctgtgtttttttagaagttgaagggagcgtgctctctctgggggttcagttaattgcagtgagtaaatc

SEQ ID NO: 431913 - DNA, 551 bp, Homo sapiens
cctaacctatactaggtactcaaaaattgtttcctgagcttaacacagtactcattcttggtggaaataacagcaagataatcccggtgtaaaaggagtagactttttgtgaataagggaattctttttcagtcactctccaaaatgttctctttcagaaagtgtacaaaaaaaattttttttttgcctagtatattggaatcacaagcactgacttcatatttcaaagttgaaagaaatgagatagatgtcccacacagctgtaaaatgccaaaaataagtagtgctgacataaattaaaggccagtgctctgwaaagccacagaaaagcttcagatcaagggtggctataattgaaagggcccaaataagtatttaaaaccacccctcctgggactgctaagatttctgaatttcaaattggcattttatgtttgacaaggtgacattatataagaaatgtattgtaaaacactgctgtatgataggaaaatgattgaatgtaaatatttcaagatgtagaccactgttcaaatgttatcataaatctt

SEQ ID NO: 431914 - DNA, 602 bp, Homo sapiens
tgtccagttttgtgaaaatgttctgctagtatgaaagaaaacattttctatatgaagacatttgttttatgttaggtagcttacattttctcctctgcgtgtgtgtgtatgtgtgtaaaatcagaaatttagcatactatggaaagaaggcatggagcacttgggtttagaggaacctaaaacatcatagcttcattgttccagatgtaacaggtttgaaagagctcatcgccaagttcttgatccacttgcattccaggggagttttcttttgagtagtatgtttcttgtttgcatgttcctgttctttgtggaaactatgcatggtagcatttttgcttgctgtgttttccatacttaagaaaaagaggtttcagttggctgatagaatatcttttatgtaggacaaaacttttctgtgaagagtgttgagggggtgaagataggtaagaggtaagcacaatttttaatttaggctctgaaaaagtgtattgttctaaacgtatttggtatgcctatataggtctttaaaaatgggtwtgtatgctgtttaatgtgcactgaacattttacattaatattgtactgttttacattaatac

SEQ ID NO: 431915 - DNA, 508 bp, Homo sapiens
gatttgataaaaatattttaaaaggtagtaacatttgccaaaacctatcaaatacacaacaccaaaagtgaaccctaacataagctatggattttgggtgmtaacgacgtatccaggtagatttattgatggtaaaaaaggtaccactgaggtgtaggaagtcaatagtggcagaggttgtacatgtgtgggacaggggcagatgagtactttctgctcagttttgctgtgaacctaaacctgttctaaaaaataaagttcattaatgaaaaatgacaaaaacacttttgtaactgctattcctggtatcaataactttaaatatattgatatgctaggagcccataattttgcttctagtgataaatactaagtgatttgtttaaaatgtagtaaaaattatgtgtggagatgcttagtacaactttataataatgaaaaacaaatagcaagcaaaacaaagcaaaacctaattgtcaatgagcatttcacactaaagacagtacaa

SEQ ID NO: 431916 - DNA, 508 bp, Homo sapiens
gatttgataaaaatattttaaaaggtagtaacatttgccaaaacctatcaaatacacaacaccaaaagtgaaccctaacataagctatggattttgggtgataacgacgtatccaggtagatttattgatggtaaaaaaggtaccactgaggtgtaggaagtcaatagtggcagaggttgtacatgtgtgggacaggggcagatgagtactttctgctcagttttgctgtgaacctaaacctgttctaaaaaataaagttcattaatgaaaaatgacaaaaacacttttgtaactgctattcctggtatcaataactttaaatatattgatatgctaggagcccataattttgcttctagtrataaatactaagtgatttgtttaaaatgtagtaaaaattatgtgtggagatgcttagtacaactttataataatgaaaaacaaatagcaagcaaaacaaagcaaaacctaattgtcaatgagcatttcacactaaagacagtacaa

SEQ ID NO: 431917 - DNA, 447 bp, Homo sapiens
gcctcacattctggatgtccccagtccactgggcttggctctgacttggayggggacagtgagaacttttgtggaactgtatttgccaactgccacatgagtagtggcctattcctggtgagccccagaggaagctgttattgacgtaggtgatgcgtgatctgaggctaggcatagagaggaagctcggtgaaccaaactgctgggatagctgagtgacaacagaacggggcctttgaccaatgtcacatcagctaatccccaaatctgccaacaaggacccagtggatactatcagaaaggccaagaggtgaatcgtatagaatgattatttcagagtttgcaaactgaagttgctgtttgctctatttctctgtacataagttaaagttcaactttactgaaagtagtgaatgttttttgagctcctactgcatgctgggctgt

SEQ ID NO: 431918 - DNA, 447 bp, Homo sapiens
gcctcacattctggatgtccccagtccactgggcttggctctgacttggatggggacagtgagaacttttgtggaactgtatttgccaactgccacatgagtagtggcctattcctggtgagccccagaggaagctgttattgaygtaggtgatgcgtgatctgaggctaggcatagagaggaagctcggtgaaccaaactgctgggatagctgagtgacaacagaacggggcctttgaccaatgtcacatcagctaatccccaaatctgccaacaaggacccagtggatactatcagaaaggccaagaggtgaatcgtatagaatgattatttcagagtttgcaaactgaagttgctgtttgctctatttctctgtacataagttaaagttcaactttactgaaagtagtgaatgttttttgagctcctactgcatgctgggctgt

SEQ ID NO: 431919 - DNA, 587 bp, Homo sapiens
gttcttctgggcttgcggggaggtggtgacaagttgtgggaaggtgaggggcagaactgcactgggaacaaaggttgtcttacaatgaagataaagcctctcaggtaatatccttcaaaagaatagatgaaaagtctgtctgggtggggatgtggtgatgacctttgttttcatctttggtgattaattcttcctggttaataagatttcagacagggattaaagacaattatatttcttttggaraaacttccctcagtcaaataagaaaacttcacagaaagagagagagagagagaccttccctacccttgggggaaaaacaagataagagagaccctaattctgaagcagcttctaagaccttccaattttctttaattcagagtgcttggcatgccaaagcaccatatattgttttctgagccccaatgctataaatgaccgaatattttctgattgaactagctaaagtcgattttgttgtttgtaactaaaaaccttgactgatatgccctccctttcttgtgtgtcctgggcactcaaactgaggactactgtacacagttgtgcagatagtgcactgt

SEQ ID NO: 431920 - DNA, 587 bp, Homo sapiens
gttcttctgggcttgcggggaggtggtgacaagttgtgggaaggtgaggggcagaactgcactgggaacaaaggttgtcttacaatgaagataaagcctctcaggtaatatccttcaaaagaatagatgaaaagtctgtctgggtggggatgtggtgatgacctttgttttcatctttggtgattaattcttcctggttaataagatttcagacagggattaaagacaattatatttcttttggagaaacttccctcagtcaaataagaaaacttcacagaaagagagagagagagagaccttccctacccttgggggaaaaacaagataagagagaccytaattctgaagcagcttctaagaccttccaattttctttaattcagagtgcttggcatgccaaagcaccatatattgttttctgagccccaatgctataaatgaccgaatattttctgattgaactagctaaagtcgattttgttgtttgtaactaaaaaccttgactgatatgccctccctttcttgtgtgtcctgggcactcaaactgaggactactgtacacagttgtgcagatagtgcactgt

SEQ ID NO: 431921 - DNA, 587 bp, Homo sapiens
gttcttctgggcttgcggggaggtggtgacaagttgtgggaaggtgaggggcagaactgcactgggaacaaaggttgtcttacaatgaagataaagcctctcaggtaatatccttcaaaagaatagatgaaaagtctgtctgggtggggatgtggtgatgacctttgttttcatctttggtgattaattcttcctggttaataagatttcagacagggattaaagacaattatatttcttttggagaaacttccctcagtcaaataagaaaacttcacagaaagagagagagagagagaccttccctacccttgggggaaaaacaagataagagagaccctaattctgaagcagcttctaagaccttccaattttctttaattcagagtgcttggcatgccaaagsaccatatattgttttctgagccccaatgctataaatgaccgaatattttctgattgaactagctaaagtcgattttgttgtttgtaactaaaaaccttgactgatatgccctccctttcttgtgtgtcctgggcactcaaactgaggactactgtacacagttgtgcagatagtgcactgt

SEQ ID NO: 431922 - DNA, 558 bp, Homo sapiens
ctttttcctcattctgctgcttcctgattgaccttgttcttccctgtgtggctctcatggtgtgacatgcccctttctcttggaaactgtaataaacttttcttttaaaagaggatgtctccatgtctgtcatctcgccacatagtatcatattccaaagtgtttatctcttatcatgaaytggatttcccgagacagagccctgacattttaactgtcttctgcctcaggaaatttacttgcaggattccccagcaatgccttcctcctcattgctatgatgaagacttcatccagatgttagggacaggtcctgggccatcagactcaaagccacttttatcatttatttcagggaacctacatgctccatatgagtaagattctgtagcctgctcttgtagaatcttggatacaaatacatagattaagtttccacagtatgctgactttattcttatatttgggaaaaagcccagaatgcctttatcatttgtagttactctacccaatccttaaacatttagggaatttcagagtgaaaaagaaccccaggaa

SEQ ID NO: 431923 - DNA, 558 bp, Homo sapiens
ctttttcctcattctgctgcttcctgattgaccttgttcttccctgtgtggctctcatggtgtgacatgcccctttctcttggaaactgtaataaacttttcttttaaaagaggatgtctccatgtctgtcatctcgccacatagtatcatattccaaagtgtttatctcttatcatgaattggatttcccgagacagagccctgacattttaactgtcttctgcctcaggaaatttacttgcaggattccccagcaatgccttcctcctcattgctatgatgaagacttcatccagatgttagggacaggtcctgggccatcagactcaaagccacttttatcatttatttcagggaacctacatgctccatatgagtaagattctgtagcctgctcttgtrgaatcttggatacaaatacatagattaagtttccacagtatgctgactttattcttatatttgggaaaaagcccagaatgcctttatcatttgtagttactctacccaatccttaaacatttagggaatttcagagtgaaaaagaaccccaggaa

SEQ ID NO: 431924 - DNA, 436 bp, Homo sapiens
atgggttttttattctttttttcaatagagcacctttcctggttggtgaaggtgcagagctggatgtttaggaaatacagcctttcaggagaacttccttgagttttgctgattggcctagattttgtcactgtttgcaggrccatgaggtgggtggtgagctcaacttggaatggcctggaagcatttcaatgttttggggtggttgcttctctgtttgtgttttattttttaaatctgtaattcccagagttgtttgcaaagtcagatctaaaaatcaagaaatgtccacctcctgtgtactcatggaagttgatttggaatcaaggaagaggcagagggaatggaagattcagttacttcccaaatgggtggtaatcaaagcccccaactttgatacttaatatatacttttcccactggcctccttgcagag

SEQ ID NO: 431925 - DNA, 630 bp, Homo sapiens
atcttgtagatgaaagactttttcttcaaggcgactttttgtgtagttagactttcatatccgtaattggcaagtgaaacctggggcctgagtgaacagtttaaagattaacctttttaattacccaaagccacattaactatgagcctttctttaggatgactttagaaccacagcagtgactggacaccatgtccagagattgtcccgccacctcggataacctcagattgtgagcaacagtgttgttcacaccgttgtggctggagtcagtgccataacctttgagaggaggcaggttgctggaactggttacacatgcaaatgcaaactgcagaagcagakgtgttaggaggttacaaatgggcagaggtgtgtcctgggtggcctgagacaatctgatgcctccaggccacatgccatccttgtttctctgagttcttcaaaaatgtcatgaccaggaactccacagtactctctgcctcctctgttttctatccccagattaagttgtgttcatccttcaggggttccttattctaactaggacaggtctgtatgttgcatgctcccttataacatgcaacaaacttattcaacatctagtcttcctgctagaccacaacaaag

SEQ ID NO: 431926 - DNA, 491 bp, Homo sapiens
aagctgtgtggccctcctgacacttttttttttttttgagatggagtcttactctgtcacccaggctggagtacagtggtgtgatcttggctcactgcaacctccacctcctgggttcaagtgattctcctgcctcagcctcctgagtagctgggactacaggcactgtagactgggaatggcctcactatcaggaaacactgagtctacacacacatggatgtagcctataggtccttcccaggatgattatcaactccatacccatgtgctaataccagagatacaaaggacrttgtatagtgcttagtccagagcaagaaggcataagtggtagatgttattatcattatcatcatcatcattattgcacagtgatgtggtttggctgtgtccccacccacatctcatcttgaattgtagctcccataatccccatgtgttgtgggagggacccggtgggaggtaactgaatcatggggacgggtttt

SEQ ID NO: 431927 - DNA, 532 bp, Homo sapiens
tattcccagagtgggtacagaagatgtgagccccatgatccaagaagctcactcccagagatacacaaagaaacccagagacccttgttgccacaagcatttaaggatgatgtttatgtgaacagcatctcagtcacccacattcctcatggcaccatgtgtgatgcctccagtcacagacctgctaatctgtgacaccaggtaggtgatacttgtatgagartttcccagcactcagcaggcaacagaggttgagataacaaatgcctccgtatagactggggcctgtttattaagacaaactcctctgacagcttggcatggtcacataaagagtatactgcttgtaaatttgtgtcttgagttactagcctgtcagggctagctgcctggcacaagctgacactttgcaccccttcatctctgacccaggagtctcgtgtcttctaccagcatccatgaaactgtggcaggtcaccttttgagcttgttagtagtggggtaagatctgagcctcttcacagttataatc

SEQ ID NO: 431928 - DNA, 532 bp, Homo sapiens
tattcccagagtgggtacagaagatgtgagccccatgatccaagaagctcactcccagagatacacaaagaaacccagagacccttgttgccacaagcatttaaggatgatgtttatgtgaacagcatctcagtcacccacattcctcatggcaccatgtgtgatgcctccagtcacagacctgctaatctgtgacaccaggtaggtgatacttgtatgagagtttcccagcactcagcaggcaacagaggttgagataacaaatgcctccgtatagactggggcctgtttattaagacaaactcctctgacagcttggcatggtcacatraagagtatactgcttgtaaatttgtgtcttgagttactagcctgtcagggctagctgcctggcacaagctgacactttgcaccccttcatctctgacccaggagtctcgtgtcttctaccagcatccatgaaactgtggcaggtcaccttttgagcttgttagtagtggggtaagatctgagcctcttcacagttataatc

SEQ ID NO: 431929 - DNA, 532 bp, Homo sapiens
tattcccagagtgggtacagaagatgtgagccccatgatccaagaagctcactcccagagatacacaaagaaacccagagacccttgttgccacaagcatttaaggatgatgtttatgtgaacagcatctcagtcacccacattcctcatggcaccatgtgtgatgcctccagtcacagacctgctaatctgtgacaccaggtaggtgatacttgtatgagagtttcccagcactcagcaggcaacagaggttgagataacaaatgcctccgtatagactggggcctgtttattaagacaaactcctctgacagcttggcatggtcacataaagagtatactgcttgtaaatttgtgtcttgagttactagcctgtcagggctagctgcctggcacaagctgacactttgcrccccttcatctctgacccaggagtctcgtgtcttctaccagcatccatgaaactgtggcaggtcaccttttgagcttgttagtagtggggtaagatctgagcctcttcacagttataatc

SEQ ID NO: 431930 - DNA, 517 bp, Homo sapiens
gtgagtgataatctgacatttatctttgttgtttcacttttatctgttaacataaaagaaaacatcaaccaacattcatatttaagtcacacacattcatcaatgacatggtgactttttctatgaactagatagccaacatagtctaattttgttaaacaayggctgaattgtaactgtaggttggctacagatacaagagttcaacaaaaccaataaatacattctgtgtagttatatgaaatttaaaataaagaatattgtatattttgttattatttgtaaattgtattacacatactttatatcagtaaaatttataataaacttatgtccatatgtacgtgcatacttttatctaccagaacattacttcataggccccccaaaacttggactcaacactgggcacagtagggaatctccatcctggttaaaattaggtttccattcttgatggaatgggaaccagaatatatattaaattcagttatagagaaaagaatgttatatctat

SEQ ID NO: 431931 - DNA, 535 bp, Homo sapiens
tggtttataggttaaaaaaaattaacagttggatacaatgttcactattggggtgataggtacactagaagacctaatctcataattatgcaattatccatgtaacaaatctgcatatgtactccctgtgttaatctgttctcacactgctataaagaaatacytgagactgggtaatttataaagaaaagagatttaattgactcacagttccacaggctgtacagaaatcttggctgaggaggcctcaggaaacttacagtcatggcagaagcaagcacatattcacatggtgacaggaaagagagagagagagcaaagggggaagtgctacatgcttttaaccatcagatactgtgaaaactcactcactatcacgaggacagcaagggggaaatccacccccatgatccaatcaccttccaccaggtccctcccccaacactgggagttacaattcaacatgagattttggtggggacatagagccaaaccatactaccttctgagtttaaaatttaaaaaaagatacaga

SEQ ID NO: 431932 - DNA, 535 bp, Homo sapiens
tggtttataggttaaaaaaaattaacagttggatacaatgttcactattggggtgataggtacactagaagacctaatctcataattatgcaattatccatgtaacaaatctgcatatgtactccctgtgttaatctgttctcacactgctataaagaaatacctgagactgggtaatttataaagaaaagagatttaattgactcacagttccacaggctgtacagaaatcttggctgaggaggcctcaggaaacttacagtcatggcagaagcaagcacatattcacatggtgacaggaaagagagagagagagcaaagggggaagtgctacatgcttttaaccatcagatactgtgaaaactcactcactatcacgaggacagcaagggggaaatccacccccatgatccaatcacyttccaccaggtccctcccccaacactgggagttacaattcaacatgagattttggtggggacatagagccaaaccatactaccttctgagtttaaaatttaaaaaaagatacaga

SEQ ID NO: 431933 - DNA, 495 bp, Homo sapiens
tgttaatattaaaccagatgttagagaacatcttcaacctaatgcaaaacaatttcatttctgaggcccagacttgtatccctagtcagcaggaagaagttagagtagttgtcacccctcatccctcacaattgaggaatttacatagaacagggggaattgaaaccatgccccaaagagttaaagaaatcagtggttaaattcttggacttacaggataacagacaagaaaatagcttgctgaaaagctgaaactgaagctgtgccccrcaaaataagaaaccagtaactaacagaaattcttgagtttgccagataacagataagaaaagaaacaagctgctgaaactctctccacttgtgagattaagaaaaacctggctgaaattggttggaaccaagatggctaactggagtttgcacagaataagcttgctgatgtcacagcccgaatttccaccacatgttttgtactaactccccctgaatttgcac

SEQ ID NO: 431934 - DNA, 590 bp, Homo sapiens
ctcctctgtgagcttttctaccccaggaaagaagtgtgcttttgtgtatgtgtgtgtgtgtgtgtgtgtgtgtgttttaaatgtgatctaacacacagttgacttatataattatttcattaactgatctcctctactaagtctattctggctaaattcagacaacactcatcatacccctcttgtgcattcttcagcacgtacacaacatgtactttttttttttgagatggagtctcactgtgtcgcccaggctggagtgcagtggcacaatctcggctcactgcaacctctgcctccccaggtcaggtaattctcgtacctcagcctcctgagtagctgggactacaggygcacaccaccacgcccagctaattttttgtatttttagtagagacggggtttcaccatgttggccaagctggtcttgaactcctggcctcgtgtaatctgtcgcctcaatctcccaaaatgctgggattacagatgtaagccactgcgcctggccaatatgtaacatttttaactttttgtaaaaccagagaatattttgaaatgtgtccgaatgccctgcctagattctagactct

SEQ ID NO: 431935 - DNA, 622 bp, Homo sapiens
tggattatttactttttctctaagtttctttactcctttttgctttgttcattcttttgtctgtatctgaaatgtcctgaatcaccacctcccccacttaaagaaaaccagggccaatgattaaaaaaaaaaaaaaaggtattaagaaactaatgcaataagagaattgagcttagttctgtatctattctgaggtctcgctcctgttgcactagttcctgaataaaatgtttttaccacttcaactactgtttggctctggttttcttcaacagcckccaaagtacacatcagtttcctactcatctttcaaaatccaggtcaaatgccgcctactcttgtcttcccagcatcctcttccctgattttttagcaattgaagttcatccagacagtgtcagctgcaacttcttccctgatttccagaatactatatatattctgatacacctcacactgcccagaaatagactgcgcatttcctgtaaaaggtgaattgtctattgctgtcttctcccttagattataaactctttgaaacaggattcttctgggtttagaacagcgcctggcatgtgatagacccttaatactcactgaatgaagtggcttgcccaaagta

SEQ ID NO: 431936 - DNA, 622 bp, Homo sapiens
tggattatttactttttctctaagtttctttactcctttttgctttgttcattcttttgtctgtatctgaaatgtcctgaatcaccacctcccccacttaaagaaaaccagggccaatgattaaaaaaaaaaaaaaaggtattaagaaactaatgcaataagagaattgagcttagttctgtatctattctgaggtctcgctcctgttgcactagttcctgaataaaatgtttttaccacttcaactactgtttggctctggttttcttcaacagcctccaaagtacrcatcagtttcctactcatctttcaaaatccaggtcaaatgccgcctactcttgtcttcccagcatcctcttccctgattttttagcaattgaagttcatccagacagtgtcagctgcaacttcttccctgatttccagaatactatatatattctgatacacctcacactgcccagaaatagactgcgcatttcctgtaaaaggtgaattgtctattgctgtcttctcccttagattataaactctttgaaacaggattcttctgggtttagaacagcgcctggcatgtgatagacccttaatactcactgaatgaagtggcttgcccaaagta

SEQ ID NO: 431937 - DNA, 496 bp, Homo sapiens
atacatacaagctcttgatctgttgcccaggctggagtgcagtggtgtgaccatggctcactgcagccttgacccccaggctccagcaatcctcccacctcagcctcctgaggtacgcaccaccatacccagctaattctatttattgtagagacagggtttcactatattgcccaggctggtcttgaactcccgggctcaagcgatcctcttgcctcagtctcccaaagtgctgagattataagtgtgagctactgcaactggccataaacatatttatttcaygtaatgtatatttctaataatcgaaatctctatagatctctttcagttgtttgctgtttctgctgactcttgctcttggtgttttgatgttttctcccttgttacattttgtaattttaaaaaatgtgtatgagcttatttgttagaattttaactacaattatttgatgaatgcattgatcgtacattcctccatggaggatttttttat

SEQ ID NO: 431938 - DNA, 574 bp, Homo sapiens
gtatgtagtttttttttaagtatgagtctgggaagtctatatatgagtatatgaagttgacaaaactatgtatgagtatatgagtagtcaaaactaatatatggatgataagactcagagcagtggatgcttcttttccccagcagttttcaacagctcataaggagaaggagttggaatctgcatctcatcccttcccaaaggcctcaggcctgagaatwctacttctctccagaaaccaagatggtatttttccttaattggttttgtttttttcttaattgtgtcttaggttttggcttttcacacacattattagtgaagtcttcgctcactagtacccaatcaacttgtcctccacaggttccacatcacctttcttcgagggacagactcctcttcttgacctccgtctccatgttccctcatgacacttcactgtccttctccagcatggacactctttccatcactaccgccctggagaagctaggtcctcttctgggaagtcactccttcccaaaacctcacacgaattttctgaggagcagccccagtgcccccttctcagcca

SEQ ID NO: 431939 - DNA, 354 bp, Homo sapiens
ttttcattccattacagttcatggatcgtataccctttgtaaaattccacctagtatctaaatagaactcaagcaggaatcaaacttatttgatcacccaggaaaatagtttatttatttgggttgctaatatgaagactctctcttttgatactatataatttcccgatctgagatagggctgaatttgctcyaaataaagagaattttaaaaataacaaaacttatctttagctgggggaaagtgcaggctggaaactacctgagagacgtgaaggttctctcacctttcccttgtgggcagccctcagtcattagggctctaccagcaagtcaagtactgttggacaagac

SEQ ID NO: 431940 - DNA, 590 bp, Homo sapiens
ggctgaccctcccccaagtaatgaagaattccccctccctgactgtcttcaaactggcacgtctggtttttttctgccttccgactcaaaccaaaatagcagctcttcctggatctcagaactgccggccttcagactggaactatgtcctcagctctcccaggtttccaggctgccaactcgtgctgcagatcttaggacgtgctgacctccacaattgtaggcgtcaggtccttccctttatgtatatgtctacgtctgtgttaatgtctatatctgtgtatatattctgttggttttgtttccctggagaaccatgatgaatgcactcatggttcagggaggactttagtatgaccagaggaactagrgatgcgtagaaaactagtgcttaagcccagtcataaactgcttgaatgatgagatatgattcctttgtagaggagacagctgcatctcagtggagtcacctgagccctaggactcatagtagacacattggaatggagggcagcaagaccaaagggtgggaagccagacattgtctgaagtgatccagaagctagttggagcttagcctgctatgctga

SEQ ID NO: 431941 - DNA, 309 bp, Homo sapiens
gaagaccatgctcctgatgtgcaaaaggtggagaaatttaactccttttacttaactcctactgctgctgcgcctgatagggacacaggcaagtaaagacagcttagccatmcatcttccccaaagaaaagcaacacagccaaagtgtcaaagttagtgacccaggcgacttgcccagagcgtctgcttggcaaagacgtgggtctttcacagtctgcagtgtttccctgtagttacactccaatttctcaataaccatttactaggaaattaaacagtagtagtagaatcctgatttttttttcagag

SEQ ID NO: 431942 - DNA, 309 bp, Homo sapiens
gaagaccatgctcctgatgtgcaaaaggtggagaaatttaactccttttacttaactcctactgctgctgcgcctgatagggacacaggcaagtaaagacagcttagccatacatcttccccaaagaaaagcaacacagccaaagtgycaaagttagtgacccaggcgacttgcccagagcgtctgcttggcaaagacgtgggtctttcacagtctgcagtgtttccctgtagttacactccaatttctcaataaccatttactaggaaattaaacagtagtagtagaatcctgatttttttttcagag

SEQ ID NO: 431943 - DNA, 309 bp, Homo sapiens
gaagaccatgctcctgatgtgcaaaaggtggagaaatttaactccttttacttaactcctactgctgctgcgcctgatagggacacaggcaagtaaagacagcttagccatacatcttccccaaagaaaagcaacacagccaaagtgtcaaagtyagtgacccaggcgacttgcccagagcgtctgcttggcaaagacgtgggtctttcacagtctgcagtgtttccctgtagttacactccaatttctcaataaccatttactaggaaattaaacagtagtagtagaatcctgatttttttttcagag

SEQ ID NO: 431944 - DNA, 526 bp, Homo sapiens
tccttttgggacaagaaagctcagagaaaaatgtcataagcagttccagagaactggatggtgaatacacctcctaaggtctacaatttgcccagatctatgcaggaatgaatcaaaaactgayatcactaaagtcatacagaaatatatttgatgaagtattgtctaaatggtgagaaacagtaaacccaaactgcatcatctgtagtggcataatagtcctgatacaatagttggttatgggttagcaaagacaaggataactaggttacagagccaggacaagggagaagaatacctggacaaggcccaatcagtgacggctaattcctaaaattaacatcagaccacagacactatgtctttattagatacactatgttctatatctacatagagattactaaatctgtatgtagatttgttattccatctacaatgtaggtacagttgttatagagcagcaaatctcttgttttgtttttataaatgtaaaaattacatttatagaaagtgcagcatactg

SEQ ID NO: 431945 - DNA, 577 bp, Homo sapiens
gactattttaggaaggctccttttgggacaagaaagctcagagaaaaatgtcataagcagttccagagaactggatggtgaatacacctcctaaggtctacaatttgcccagatctatgcaggaatgaatcaaaaactgacatcactaaagtcatacagaaatatatttgatgaagtattgtctaaatggtgagaaacagtaaacccaaactgcatcatctgtagtggcataatagtcctgatacaatagttggttatgggttagcaaagacaaggataactaggttacagagccaggacaagggagaagaatacctggacaaggcccaatcagtgacggctaattcctaaaattaacatcagaccacagacactatgtctytattagatacactatgttctatatctacatagagattactaaatctgtatgtagatttgttattccatctacaatgtaggtacagttgttatagagcagcaaatctcttgttttgtttttataaatgtaaaaattacatttatagaaagtgcagcatactgattatcttagtaagcttgggttggctctaacaaa

SEQ ID NO: 431946 - DNA, 580 bp, Homo sapiens
ggcctttgttggaaacatgttttgcaaacttttttcccgttttattttctgaagagggttttttgaagagcaaaaggttttcattttaatgaaatttaatttattaatttttttgtttcatgcctttatgtcttaataagaaactttctcctaacctaatatcacaaatatatccttctatttttttctgacttaagttttaagattttagttcttaaatttaggtctatgacccattctgagttaattttgttatacaataaaagataagggtccagaccctttttcctcccatayagaaactattctagtgctgtttgttgaaaacactagcctttcattcactgaatgaaaatttggtgctttaataaacatgagttgactatgcgtatgtgggtctacttctggactggactctgtcccactgattgttgtgcctttccttatccccataccacacactcttgataactgaagtattatagtcagtcttcgtatcaggtagtttaagtcctccaaccttctctttctaaaattgttgagctgttgtgagtcctttttattttcatatcaagtttag

SEQ ID NO: 431947 - DNA, 537 bp, Homo sapiens
taatttaccgagtgccagaatgtgccaagagtaataatagtacttgactttttaaaaaataaaactgtctttattcacaaattactttattgaataactaggaaatccaatcgacaacaagaacaatacaaacttctggaacaaataagtgagtttagcaaggtctcaaaatacaagattaatatacaaaagyccatttctttcctatatgtcaataaagagcaattcgaatttgaaattttaaaaaatacagtttacaatagcatcaaaaaataatgaggtatttacaattatacatgtaacaaaatacatacaggatatatatgtgaaaaactacaaaacactgatgaatcagaatatttaaatacatggagagagagttcatgttcgtatattggaagacaattttttaaaataatttcaacttgtgttttagattcagggagcccacgtgcaggtttgttacatggctgtattgcatgatgctgaggtttgcattgtgattgattccatcacccaggtactaagcatagcacc

SEQ ID NO: 431948 - DNA, 537 bp, Homo sapiens
taatttaccgagtgccagaatgtgccaagagtaataatagtacttgactttttaaaaaataaaactgtctttattcacaaattactttattgaataactaggaaatccaatcgacaacaagaacaatacaaacttctggaacaaataagtgagtttagcaaggtctcaaaatacaagattaatatacaaaagcccatttctttcctatatgtcaataaagagcaattcgaatttgaaattttaaaaaatacagtttacaatagcatcaaaaaataatgaggtatttacaattatacatgtaacaaaatacatacaggatatatatgtgaaaaactacaaaacactgatgaatcagaatatttaaatacatggagagagagttcatgttcgtatattggaagacaattttttaaaataatttcaacttgtgttttagattcagggagcccacgtgcaggtttgttacrtggctgtattgcatgatgctgaggtttgcattgtgattgattccatcacccaggtactaagcatagcacc

SEQ ID NO: 431949 - DNA, 591 bp, Homo sapiens
tatattgtgtctttgttataatttattgcatggattttttttttatttctgccttaattttgttgtttacccaaaagtcattcaggagcaggttttttcattttcatataatcatgtagttttgagagattatcttggtactaatttctatttttattccattgtgatcagaaagtatcattggtatgatttgtatttttctaatttattgagacttcctttatgaccaaamatgtggttgatcttggagaatgttctgtgcgcagaaaagaaacatgtatattctggggttgatgaactgagtactctgtagatgtctattaggttcggttgatcaggtgtacaattttggtctagaatttgttagtttcctgccttgatgatctaatgctgtcagtggggtgttgaagtcctccactattgattatgtggctgtacaagtctttttgtaggtctagaacttctcattttatgaatgtgggtgctccagtgttgggtgcatatacatttagaacagttaagtctccttgttgaattaaaccttttatcattatgtaatgcctttttttgtcctttcttactgctgttgtt

SEQ ID NO: 431950 - DNA, 591 bp, Homo sapiens
tatattgtgtctttgttataatttattgcatggattttttttttatttctgccttaattttgttgtttacccaaaagtcattcaggagcaggttttttcattttcatataatcatgtagttttgagagattatcttggtactaatttctatttttattccattgtgatcagaaagtatcattggtatgatttgtatttttctaatttattgagacttcctttatgaccaaacatgtggttgatcttggagaatgttctgtgygcagaaaagaaacatgtatattctggggttgatgaactgagtactctgtagatgtctattaggttcggttgatcaggtgtacaattttggtctagaatttgttagtttcctgccttgatgatctaatgctgtcagtggggtgttgaagtcctccactattgattatgtggctgtacaagtctttttgtaggtctagaacttctcattttatgaatgtgggtgctccagtgttgggtgcatatacatttagaacagttaagtctccttgttgaattaaaccttttatcattatgtaatgcctttttttgtcctttcttactgctgttgtt

SEQ ID NO: 431951 - DNA, 591 bp, Homo sapiens
tatattgtgtctttgttataatttattgcatggattttttttttatttctgccttaattttgttgtttacccaaaagtcattcaggagcaggttttttcattttcatataatcatgtagttttgagagattatcttggtactaatttctatttttattccattgtgatcagaaagtatcattggtatgatttgtatttttctaatttattgagacttcctttatgaccaaacatgtggttgatcttggagaatgttctgtgcgcagaaaagaaacatgtatattctggggttgatgaactgagtactctgtagatgtctattaggttcggttgatcaggtgtacaattttggtctagaatttgttagtttcctgccttgatgatctaatgctgtcagtggggtgttgaagtcctccactattgattatgtggctgtacaastctttttgtaggtctagaacttctcattttatgaatgtgggtgctccagtgttgggtgcatatacatttagaacagttaagtctccttgttgaattaaaccttttatcattatgtaatgcctttttttgtcctttcttactgctgttgtt

SEQ ID NO: 431952 - DNA, 551 bp, Homo sapiens
tagggatctcttgtaagtcttgtctaatggtaacaaattcccttaacacttgcttgtctggaaaagattttatttctctttcagttatgaagcttagtttggtaggatatttaattcttggttggaatttcttttatttatgaatgctgaaaataggcccccatccctcgtggcttgcaacgtttcagctgagaagtccactattagcctgacaggtttamcttctcagcctttaaaatgtttttctttagcattgaccatggacagtccaatgactatatgccttgatgatatttgttttgcatagtatctcacaggtgttctctggatttctttatttggatgaccacctctatcaaaattaggaatgttttcttgaattatttcctcaaatatgtgtcccaagttgtttacttttctccttctccctcaggaacactaataattcataggtgtggttatgttacataatcccaaatttctcaagaaccctatttacttttaatattctttttcctctatttttttatctgactaggttagttcaaaag

SEQ ID NO: 431953 - DNA, 551 bp, Homo sapiens
tagggatctcttgtaagtcttgtctaatggtaacaaattcccttaacacttgcttgtctggaaaagattttatttctctttcagttatgaagcttagtttggtaggatatttaattcttggttggaatttcttttatttatgaatgctgaaaataggcccccatccctcgtggcttgcaacgtttcagctgagaagtccactattagcctgacaggtttaacttctcagcctttaaaatgtttttctttagcattgaccatggacagtccaatgactatatgccttgatgatatttgttttgcatagtatctcacaggtgttctctggatttctttatttggatgaccacctctatcaaaattaggaatgttttcttgaattatttcctcaaatatgtgtcccaagttgtttacttttctccttctccctcaggaacactaataattcataggtgtggttatgttacataatcccaaatttctcaagaaccctatttacttttaatattctttttyctctatttttttatctgactaggttagttcaaaag

SEQ ID NO: 431954 - DNA, 550 bp, Homo sapiens
agtaatgtcagagttttattggttctttactcagtattattataaaatacaaaaatcaacattagcctgaacagatccatcacttggattcttctgcatatcagaatattttctaataacttaaatcttaaaaaattattccaattttataaaataaaaaatttatctaaagtttattttaattttagttcttttgaccacttggtgcctgtggatggttcaacttttttaacgttcagaagctgtttagtatttgtgtgcctaacacagcgcatggcacacagtagtcactgggtaaatcctttttaaaaatgcttgatacaggaagactcatttttacatggaytggttttaaacttttggtgattactgacactttcaaaagatttctaattattaatttaaggaatttttctacttctcaaatgttcatttagtttagcaattctttttctaaatgggattttacagacacatcaaagttaaaacaatgtttctaagattttgtttttacatgatagaacattgtgtctcctcagaatgttgagtt

SEQ ID NO: 431955 - DNA, 621 bp, Homo sapiens
ttcagaagctgtttagtatttgtgtgcctaacacagcgcatggcacacagtagtcactgggtaaatcctttttaaaaatgcttgatacaggaagactcatttttacatggactggttttaaacttttggtgattactgacactttcaaaagatttctaattattaatttaaggaatttttctacttctcaaatgttcatttagtttagcaattctttttctaaatgggattttacagacacatcaaagttaaaacaatgtttctaagattttgtttttacatgatagaacattgtgtctcctcagaatgttgagttgyatgtttttcccaaataaaatagtcctttttgcatcactaaggcaatgcttgtctactctgaattttaactcaatcaatcataatacttatgctaattactcagagagcaaagacagtttgataaacttctttattatttcatttttaggctctatataattcttcctgttttccctttatccacttagccaaatgcccagtagtcattttatacttggaaggtttcaggtaccctctcgaattcttctaattacttttctcttagttttttttttttttaactaggtctttaaatatatgtgt

SEQ ID NO: 431956 - DNA, 548 bp, Homo sapiens
gtggtggctctgcaccccaaggcctggctgctgcacgataacatgagcctgacaaatcccagggtgcagagaatccagggctggtgcaggatggcgctgcccccgcccaggctcatgcccagccttcaatgaatacagttttagttactgaatgacagtggatggtggagcccatggagggtgtgatgaacaccaagtggggcctgacacagactcggcagcctcaggaaggcaggaggtagtgaggagcgcccgaagtgtgggaggaggtgacagggtcagggggcagacatccttcccatggggcccagccctgggccagggcagagagytgaggtaacatcagtagatgagtgagcactcctgagttacgaatagagaacaaatcgccaaaataacagcatgcatttacacatgctcacacgtgccaggcactgctctgagacgataactcagttaatgctcacaattctcttatcctcatccgagaaatagaataatttgcctgggcgtgcagcaagtgagtggtggacccgaaccagaaccta

SEQ ID NO: 431957 - DNA, 571 bp, Homo sapiens
aagagagccgagaagtccctcagtgacagcatttgttctagtttctgggggaggctatgcctgggaacctaggcttccaggaagccagactttcttggctgtgactcattacagtaagtagcccctcctgttgagtctgctagaatgaattataaatcagtagaattctagaaaacgctcaaggaaatctgaaccatagaaaggaggccttagcaacagagcaatggaaatagaataagagagtgaatgcgtgggtaagaatctgaagcaaygacagcaaagaccaaatcatactactacgagacatggaaggtcttacagaagaaggatgagtgcccagcccatgaaggcagagaacagagaactgtggatcaagactgagaaagtagatgaagactgagacatcagcacctcctgttacacagtgataatataacaaacaaacagctgtaatgagctgtttgtgtttagctgataagaacattttgttcatttatccaacaaacatttactgggtttgtgtgtgtgtgtgtgtgtgtatgcctggcacaagaaatgggatgcaaaaatg

SEQ ID NO: 431958 - DNA, 575 bp, Homo sapiens
gagaaggctggtcaggtggggtagttcagataggctgagcaaagattcagactcaaaggtcatcaaacccactgaacttttaggggaagataggctactataaaagacaagttatatttcttgacaaaggagcagataaagtagttccttggctgtgggatcacacgtggtattcactcacatagtgaaagactgattacctgctcagcttccacccagytgcctggtgctggggagaaggggtgattaatcacttgaagctggtgtagactttttttttttttttaacatagagtttggtgcaatcatagcttacagcaacctcaacctcctgggttcaaatgatcttcctgcctcagcttcctgagtagctggaactacaggtccacaccaccatgctcagctaattaatttttcattttttgtagaggtgaggtctcactacgttgttccggctggcctcaaactcctggactcaagtgatccaccccactcagcctccaaagtgtctagattacaggtgtgagccactgtgcctggcttggcatagacttttgagtgatgattccgcttgt

SEQ ID NO: 431959 - DNA, 578 bp, Homo sapiens
ttaatcacttgaagctggtgtagactttttttttttttttaacatagagtttggtgcaatcatagcttacagcaacctcaacctcctgggttcaaatgatcttcctgcctcagcttcctgagtagctggaactacaggtccacaccaccatgctcagctaattaatttttcattttttgtagaggtgaggtctcactacgttgttccggctggcctcaaactcctggactcaagtgatccaccccactcagcctccaaagtgtctagattacaggtgtgagccactgtgcctggcttggcatagacttttgagtgatgattccgcttgttctcacacagaagaccctgcrgacttctatagcttagctctgaaatccaagcttttggaactcattttttgtttctctcaaattaatgcctttgagatgaatattaaagcatgtgttgaacttttccattactggagcctagtagtgtagaaagtaatgatttcccagattacaggataatcagtttaatataaagacatacatgaacatacaaacacacatatataatgtacacatatgcatgcatat

SEQ ID NO: 431960 - DNA, 643 bp, Homo sapiens
acaacaacaaaaaactgaattctgcccataacaggaataggctcagagagcaccttgaaccactagaggagaatgcagtccaagccagagcaaagatcctggccacaycatcttgagctatgagctaagaaacaggtgttgtttaaagtcacaaaatttgattcgttatgctgcagtataaaacacacacaggcccaatgtgtccatagtgccaagtctgagaaacactagctaaagcattctggtctagcacttctcaaattactattaaagggatgttactaggtagttttcaaagaaacaatgaagaaaatcttcccctgaggataaacatttatttaactcagatcaagttaaagatgttttgttactgtgggacattttagaaactttaatatcctggttatgttatgaagctacaggagaggagttgattataaagcaattccaaagcgcatttgaataaagatctgctattctgggaaaatggattaatgtattttgattccaaaatcaattaatatcttttgatttgattaggatcaaatttagtcaaatgtacaaatgaaacaaacaaacaaaaaaagaaatcaatttcatggctcatcttcctaatttcaaactaaatcagatgtaccaaaaa

SEQ ID NO: 431961 - DNA, 602 bp, Homo sapiens
gaattatctggttccatagtaggcaggattctaggtgcctctgaagatttacatccccctcccagagttcataggctgcataatccctgactgtgaatataatgagatttcatgcctatgattgttgtggcacagttgagtttaaggtagggagataaacaggtatgagccctttaaaagaggatagttttctcctgattgtcaccaaagtggaaatgagagagaatcagagcatgggagggattcaacacaaggaaggttgttgtagagatttaaggagccattgatcagggatctgagaggagcctctaggagccaagagaagtcattggctgacatccagcaaggaaacagagacttcaatttcacaacaacaaaaaactgaattctgcccataacaggaataggctcagagagcaccttgaaccactagaggagaatgcagtccaagccagagcaaagatcctggccacaccatcttgagctatgagctaagaaacaggtgttgyttaaagtcacaaaatttgattcgttatgctgcagtataaaacacacacaggcccaatgtgtccatagtgccaagtctgagaaacactagctaa

SEQ ID NO: 431962 - DNA, 596 bp, Homo sapiens
aagtacattcttcaatttgctagtttatcttcctcaaaaatggttcattaattgctcagtttcctctctattttgaattaattataaacaaaacaaaatatttcctcttaatttaagatatcaaagtctaggtgaaattaccataaagaagtctagcagactctgattttggaaaagtaaaaattagccctacaatgattcatacatttatttacttaacaaacattgatattctgttcacaattagtgtttttacctgtcctgttttctgcgtctctaatgttttgatgccattagagatatgaagcatagcacccatagtataataagatgaactgggtatcaaagggctagtgrcaggaatcaggtaatatctttaagcctcagtgtctttgtataataaggaatttagagtacaatttctaagattctttgcatatttaaaattctatgaggaccttcacaaaactttttaatattataagccttacaaaatgagactggcaagtaagatttcaactgatcaattttaatgtcaagaagggcataaatatttgatgtgcctttggtagactaattttgtattatttttaata

SEQ ID NO: 431963 - DNA, 514 bp, Homo sapiens
  misc_feature (1)...(514): n = A,T,C or G
ggggaagaagtcgaagagagtggtaaaaaactggaatttcagaaatacagctttcatcgggataatttcctcttcttattggtaggttcagattattgcagagagcaaaaatcacrtaatgaataagatactgctgtatctcatttcaacctcggaagcagtttaaacacttccaaaggggagcagcatatcaacacagaaacggcttattcattaaatttatagaagtataacatcacacttgtagagcgaaccttccattacctgttttgtgagtactctgcagttcctatttgttctcccagcatttaacttaggctagaactctatccaattaagaatgcatactgacactgtcaaatgtacaatcactaaagatgtaaaatgatgaagcattatgattatatgttttaaaatttacaagtaaattttaaaaagagaaaaaattcagataatattacnacaattggaagtatccattatttacggaatagcgtatgagagggtgaaagaa

SEQ ID NO: 431964 - DNA, 514 bp, Homo sapiens
  misc_feature (1)...(514): n = A,T,C or G
ggggaagaagtcgaagagagtggtaaaaaactggaatttcagaaatacagctttcatcgggataatttcctcttcttattggtaggttcagattattgcagagagcaaaaatcacataatgaataaratactgctgtatctcatttcaacctcggaagcagtttaaacacttccaaaggggagcagcatatcaacacagaaacggcttattcattaaatttatagaagtataacatcacacttgtagagcgaaccttccattacctgttttgtgagtactctgcagttcctatttgttctcccagcatttaacttaggctagaactctatccaattaagaatgcatactgacactgtcaaatgtacaatcactaaagatgtaaaatgatgaagcattatgattatatgttttaaaatttacaagtaaattttaaaaagagaaaaaattcagataatattacnacaattggaagtatccattatttacggaatagcgtatgagagggtgaaagaa

SEQ ID NO: 431965 - DNA, 391 bp, Homo sapiens
tttgaaaatttgttataaaacgttatcaaaggttctcttgtccctcatgcacagccaggcaatgctggtgagtattctatagattcctctctgaagttgaattagaggactgcagaaatacacgtgaagatggtactgatggaataaaaacaggagtaagtgagatttttacatgcttaacaggtgattcctcacctccttcttgaacttgcttgtagattggggcagacattttcagattggaactattctttctgaggaagaaaaacctggaaacttaagagaaaagagctacatattctcaactaggctgatggatctcaataataatcaatggctaatcaactcagwgcaggggattacttgtgcctctttcctcaataggagttga

SEQ ID NO: 431966 - DNA, 562 bp, Homo sapiens
taattttctgtgtcagcttaataaataaaagctgtgagatatggmtagctatcattaaagctatctatcatgaaatattgatcaaaataggctacttttttaatgcctagatatgggatggcaattaggattatttgaaaaaagggtgagcattaatctgtagtgtgcgaggctatattgattttggagaatgacttggtaaagcaacagatattttctacacatttctaatgaatcaatctgttgaatgctttcatagtatagattttattaactgaaaacataataattaattgattaactgaactttcacttgcatataaataactttatattaaggtccttaaatggtataaaatataagttgcaatttgggtagaaattataaacctaatagagaaaatattatctaaaggagaggaaggcaggcatccttctcattctcagttcattgttggcttttttttttttcatcaacttttactttagttccaggatacatgtgcaggatgtacaagtttgttacataggtaaatgtcttccatagtggttcgctacacag

SEQ ID NO: 431967 - DNA, 562 bp, Homo sapiens
taattttctgtgtcagcttaataaataaaagctgtgagatatggctagctatcattaaagctatctatcatgaaatattgatcaaaataggctacttttttaatgcctagatatgggatggcaattaggattatttgaaaaaagggtgagcattaatctgtagtgtgcgaggctatattgattttggagaatgacttggtaaagcaacagatattttctacacatttctaatgaatcaatctgttgaaygctttcatagtatagattttattaactgaaaacataataattaattgattaactgaactttcacttgcatataaataactttatattaaggtccttaaatggtataaaatataagttgcaatttgggtagaaattataaacctaatagagaaaatattatctaaaggagaggaaggcaggcatccttctcattctcagttcattgttggcttttttttttttcatcaacttttactttagttccaggatacatgtgcaggatgtacaagtttgttacataggtaaatgtcttccatagtggttcgctacacag

SEQ ID NO: 431968 - DNA, 562 bp, Homo sapiens
taattttctgtgtcagcttaataaataaaagctgtgagatatggctagctatcattaaagctatctatcatgaaatattgatcaaaataggctacttttttaatgcctagatatgggatggcaattaggattatttgaaaaaagggtgagcattaatctgtagtgtgcgaggctatattgattttggagaatgacttggtaaagcaacagatattttctacacatttctaatgaatcaatctgttgaatgctttcatagtatagattttattaactgaaaacataataattaattgattaactgaactttcacttgcatataaataactttatattaaggtccttaaatggtataaaatataagttrcaatttgggtagaaattataaacctaatagagaaaatattatctaaaggagaggaaggcaggcatccttctcattctcagttcattgttggcttttttttttttcatcaacttttactttagttccaggatacatgtgcaggatgtacaagtttgttacataggtaaatgtcttccatagtggttcgctacacag

SEQ ID NO: 431969 - DNA, 577 bp, Homo sapiens
tacaatgatttactgatatgaaacttaaaattgttaagaactattaaaattataaaaatatttttaaatgcctgttcaaaagacgttaacctcttatagtgttataataattttgttttgcttcatggcattaaaattagtagttacttttagaaagtacacaagattattttatcaaatagagttactgtaacttgtcataggatatatgtccacatatatggtccatatgcataaatatttcccataggagtcagtcacatcttctttcagatggagcaatttaccctttctagtgtagaattctgtgaagccagttatcaactaacattatagccagatgtatttatataagaaatggaaaattgcctcaatgagacttctgtttttttwataatttcttgggtattaattccatatttgtaagagctgaataactttattctgtcttgataattttctgttttaaaaacacaagagtcaacattgtacttactttaatcacttaagaaatgaaaatactgtggtagtcgttttctaaggtagtccccagtgaccattccttctggcatttgtg

SEQ ID NO: 431970 - DNA, 565 bp, Homo sapiens
cagaaactctgagagaggaatctgcattctttaacaaaattttctggtgctttttgtacaatccaaatgttgtcaaccattgtcttacaatttctcttactgatttaaaaaaaatttcttagttaggatggcgtgttaagtgttttgtcctagaaattttttccacatcaataactgactagagacctacgtgtaatattaataaaaacagtacctgtagcatttgtactgattatagtatttttaaatatttttaggaaagaggtaatgtgattaatatttgtagaggaaaatwcaaatggctataatatgtgtcagtaggagctaaaaattcaccagcattaataactcctctagtgagctctcagtatgcactaaagcagtatgcatgcattcttcctattgccatgttagtaaatatttacaatagcaccacatgatagctattagtatctccgtgttaacagagagactgagggtcagagaagcaaggtgagtgatctgaaattacatcaatcaggtccttcttttgtagagtttgcatttcaaattttgagaaactaat

SEQ ID NO: 431971 - DNA, 583 bp, Homo sapiens
atccctaaagggaaggttctgtttcagcacacctgggacagaggctggggtgasatagttagcagaccctccccaggtgtggtgaaacaggcttgctgacacctcaaactaatccctcgcagccagctcacaagctacttggcctacgtaagtttctttagtatccagtatccttctgtatttggtatataccattttgcctcaagattgtgccctgtctacaccctctagtgctcagcttctctcaggtaaaattttgatttttatcatttgtacattattgagtattttggattttttttcatctcttcgtgatagtagcatttcaagccttaaattttggaatggtcttttgctaacaactttcaaaatgtaggacagcatgaggagaaaatgcctgactcactggcccatagcagacatttcatacatcattgttgaatgaatgaaataacaaatatataatgttttacatacaaagcccatattttcatatggttggttggtttgttctctgatctttcccctttctccctcttggtgtcttatttttgtgttaaagatgcagctttctgtccatcaa

SEQ ID NO: 431972 - DNA, 629 bp, Homo sapiens
tctttaaatgaaacccccctgccacctgtcatttctccaagcttccatatcttctcctccctttcagaatcaattttcttgaaaaaactctttgttccttctccatttctttcactccaattttctgttcaattggctgtatgccaggtggattttgccactttgttgaaatttatctcccaagaggctctttaccaaatcgagttaatttatcagcctttactttacttktatcttgacagcttttgacactttgaccctctttcctttgttgatctctttgataacactgtctttccatttcactcctcaccccattcctctgcccatctctgaagatacaaccttacaatcttacttctgtgcataatgcttgaatattggtgttgattcccctatgttgttgtctctctccattgtcctctcataacctcttgcaggcaagcgttcaaatactatttgttaccagttaccactgatggtcctgaaatctctgttttcagacagtaaaacatactactttgctaacactggacctttcaacttggatatatgccagttgcttcaatctcagcatgtccaaaattgagcccagtgcatataataattgctcaataaacatttgaagg

SEQ ID NO: 431973 - DNA, 531 bp, Homo sapiens
agtttaaaatgagttatgacagatcacttatgaattacccaagagagagaatatttacaatggattcattcttttctttttaaatcagttatattaggcagcaagcattctttttttttttttttttgaaagagtatttggccactgcggacactaaaaatctttctattaagtaycgaatttaatatattacaataaaataatttgaaatcaaagagaagacttcctatatggcttagttgcaatctatcaacgatcatgtgcttcacagctgatgtacatttaatattctactatcctgtttagagactaaaaaaaaaattaacccctttagcaaccatagctgcaacataattgcagtcacaccttcaaaagtcattgaaaacttgagatttgaaggtgactttttagatcaaaaggtaaggtgaaagtcttgaagcagtcaatttggaaacccccaggagcagaatttggcatatcaggacaggttttttcttcttcagcaaacattatcttgggacattttggaat

SEQ ID NO: 431974 - DNA, 554 bp, Homo sapiens
ccttgcagtgcccctggaggtgtgcagtggggaacagagcggccagtgcagggctggaggggggctgcctcgccgggtcaagggacagccccatgtgggagccctgtgccctcaagttgtaacttatggggtcccctacttggcaaaactgggatttcattcctgcttcttgccataaccaaactggtcccgtgctttttttagatctagtggagataaattatcctttggggagaaagtgtaggggacaagacaaaaagtcaaggacaaagcttgtgacccctgcagctgggcacgtagcaggcccagcatattccacagaggctctcttattccacagatatttcattgaccatctagtgtgtgccaagtccygtcacaagattttaatgagtattcactgaatgagaattcaggccttggaaatatgcctgagcctattctcttccgggacagactacaccttcccttgggggcattcattcatctgctcccctgagagcactgcttgcgagccctttgcagtctctcctggttgagaccttctctccaaa

SEQ ID NO: 431975 - DNA, 621 bp, Homo sapiens
aaattgcttcattaactatccaactcaacatgattacttatggtaaaacatcagtattgccaagaaaaatggggttcatataaagtaactatttgttgtctcttcccaagcatataggaaacccctgtccttgattagacctagtctgtaaaatatcttttgcatataaatgtatattatatataaatatatatatayacacacacacacacacacacacagtcctgccacataacatttcacttgacagaccgtgtatacaacagtagtcccataagattataataccatattttcactcttccttttctatgtttagatatgtttagatgcacaaattcttaccattgttacaattgcctacagcattcagtacagtaacatgctgtccagcttgtagcatagaagcaataggctacaccatatagcaatagactgcaccatgtaggtttgtgtgagcacacgctgtgatgttcacattgtaaccacctgacaggttcttcctgactgctgcacaaacaaaatcaattcacagagaccatggcactgcagtaagaaagagtctaattgacgtgaggctggccacaccatgcaggagatggagttattactcaaatcaat

SEQ ID NO: 431976 - DNA, 584 bp, Homo sapiens
ccgcaaggattttgaacaagggatagttagtctcagaaacacagggtagaaaggaacctacggatcttctaggtcaatctattaattgcctggagatatgtggcagaagcagcaaacatgttcagaatcatatactttttaggcgaggtgcagtggctcacgcctgtaataccagcacttttggaggctgaggtggacggatcacctgaggtcaggagctcgagaccaggctggccaatatggtgaaaccccgtctctactaaaaatacaaaaattagacacgcatggtgatgggcacctgtagtcccagctacttgggaggctgaagcaggagaatcgcttgaacctgggagtcagaggttgcagtgagccgagattacaccactgcactctggcctgggtgacaaagtgagactctgtctccaaaaaaaaaaaaaaaaaaaaawatatatatatatatatatatatatatatatatatatatatatacacatacacttttgggatctcagccaagaagacagtgcaatttctcttgccaccagctgcccaccaccccgcgaggcagcctaaacatggctcat

SEQ ID NO: 431977 - DNA, 414 bp, Homo sapiens
tcgaactgggtgccaaacccaccgcagcatggcaaagctgctgtagccagactacctctgaagattcctcttctctgggcagggcatctctgaaagaaaggcagcagccccagtcaggggcttatacataaaamctccatctccctgggataaagcacctaggggaagggatggctgtgggtacagcttccacagacttaaacattcccacatgccggttctaaagagtgtagcagatctcccagaactgtgctcgagctctgctaagggacagactgcctcctcaagtgggtccctgacccccatgcctcctgacagggagacacctccaagcaggggtcgacagacacctcatacaggagagctccagctgccatctggcaggtgcccttctgggacaaagcttccagagga

SEQ ID NO: 431978 - DNA, 604 bp, Homo sapiens
ttctaacatgcatgctagtgcacacacacacacacacacacaccctctcttagtcttttctctggagctggtgcactcctcaccacccccaccccttcatcctccatatccccaccccatcccctttgcttcaagtccataccttgctcagccttcttcctcccctctctctgagtccctggtcctcccacccaccataaatctgtaactcgggagtgtgtgtgtagcggggagggggtggaaaagcagcaaaccaaaccaaccccagctaatgaaaacggcgataaatctctgtctatcaggtttgttgtgagcacaaacattgccaaacaagggcccagatggcctgcaggccctcctccctacggtctgcagagctttaaatggaaatggttgctttatacatctatttactacttggaaatggggaatgactgagaccaggggtgcctggccaggaaatggggtgcagaccaggtgtgagttctctgccctccctgcctgagcaggactgctgtctagtccccagccttcaccattyctgttcctggtgagctctctctgacataggtcattgggctggagtggggaagaggctaccttg

SEQ ID NO: 431979 - DNA, 614 bp, Homo sapiens
caggaggcatcgaggtagagttagattcttagatacagggacacacacacacacacacacacacacacacaygcacattcttcaggatgttggaataagcagggagagacagggagagacacacacggagagacagacagacacacagacatccacaaagaacaaagggacagagaaacacacatacatggactcttgccaccaaatagtctgacccagagagaaagaggcaaaggcagagagagagttgaggggatagaagacataaagaaggagacaccaaagagacaaataggatgagaagaaaggaaatgcaagaagaaggaagtgagaaagtgaaattgtcaagaggcaggggaaaaaaaggagacccagaaggaaagttgtaagaaggctgctgagcccttgaccttcctgagtctgcccctactgaccctggccttggaccctgaggagttaggccaccctagagtgggcatttgcatagctttggaggactaggggtggatatggagcttggggtgagagaaggaaagagactgggagtctcccagtctccagactgagagactgacacggagataaaggtagtgtgttaagacaagaggtgagta

SEQ ID NO: 431980 - DNA, 567 bp, Homo sapiens
ggacctataggtcacatagacagtcattcctaatgcattctcccagtgggcttgagtgtttgctctggggcaggtagtgggccagggtaacagagatcacagtgcagatagggaggagatgaagatagtcatrgtagggtgtggccagggctgtccataagtaagcaaagggtgatccagggaccaggacggagcagcctcactcagacaagggatcattcttgagcttttttttagatgaatttattttttcttgaaacagatctcactctgtcacccaggctggagtgcaatggcgtgatctcagctcactgcaacctccccttcccgggttcaagccattgtcttgcctcagcctcctgagtagctgggattacaggtgccctccaccatgcctggctaatttctgtatctttagtaaagatggggtttcaccatgttgggccaggctggtctcgaactcttgacctcaggtgatccgcctgcctcagcctcccaaagtgctgggattacaggtgtgagtcaccatgcccagcccattcttgagctttgaaggacaagcagggt

SEQ ID NO: 431981 - DNA, 567 bp, Homo sapiens
ggacctataggtcacatagacagtcattcctaatgcattctcccagtgggcttgagtgtttgctctggggcaggtagtgggccagggtaacagagatcacagtgcagatagggaggagatgaagatagtcatggtagggtgtggccagggctgtccataagtaagcaaagggtgatccagggaccaggacggagcagcctcactcagacaagggatcattcttgagcttttttttagatgaatttattttttyttgaaacagatctcactctgtcacccaggctggagtgcaatggcgtgatctcagctcactgcaacctccccttcccgggttcaagccattgtcttgcctcagcctcctgagtagctgggattacaggtgccctccaccatgcctggctaatttctgtatctttagtaaagatggggtttcaccatgttgggccaggctggtctcgaactcttgacctcaggtgatccgcctgcctcagcctcccaaagtgctgggattacaggtgtgagtcaccatgcccagcccattcttgagctttgaaggacaagcagggt

SEQ ID NO: 431982 - DNA, 630 bp, Homo sapiens
ttggcttttctgaagcccatttttctcatctataaggtgtgtggtgggtagggggaggtcatcagggaaagcatccttgcaggatcgatgtgaagtttagagtcagcgtgtgcagagcacctggggttgaggatgatttttaccattcatgtcactgtccacagggacattagtctggagctttgtctgggttttcacaagtggaactctgtgtggaggggagtcgcatgagggcacgcgtgtgtgcaagtaagcaagtgagtgtccatgtgggagtctgggcaggactcccatgaagctgccacacatctgaaatcaggctcagcccacagcctgaacaaacatctgggaccataggtctggccagctctgcmgtccccatacacccccaccctccagttgtgatacacccattctgccaaggggatagggatgtaagaggctcctggaagcccaggaaaggtgctccttaagctcccccacctctttcagcccccctccggggactccctcagagccataagtgctccagggactgaattggaagggagtgcctgagaccccaggtgctcagcttcttgggagagagctcagggtgcaagctgggtgggctgtatgagagtccatagg

SEQ ID NO: 431983 - DNA, 560 bp, Homo sapiens
cccgctgctctttctttctgcgggcactcgggccagtcctaacaattgcccctcaagctgtgtgtgctgccctaaccctcaatcccgaacccgaaacagtgcgtgctgggacgaatctaggcaggtctccgaaaccggggtgaagatgctgaagttcaggtaaaaacccgcattggccaaaatgctcccgggctttctcgggagtcacccgaatggcaacttcaggctcgggtttggttctccggactccccacccctattcccggctccaggcgccgcggtcaacctgcggggagactagamgttggggtgccagacacgcggtgatctccagacgcccgaaacgccaggcgccgagtgagcgaggaaaccagccgggagggggctggccagggaagccggggagcaaaggaaagagcggggcgcgctctgggctcagggttcccataccctttccccccaacctaggatcggggtgggacgcaggtgtgttcacgagatcgccccagttgggggacacagggaatccgccgccgtctgggcctgtctcaaaatccgca

SEQ ID NO: 431984 - DNA, 537 bp, Homo sapiens
taaaaataaaaataaaataatgtatagaagaacaatctcaatttcaaaaatgcacctacaatgtgtraaacaccatatgagtactgaggacataatgagaattaggattatacactgattagggcagtgtcccaggtgtgaaagctggttaatttctgctctaaaatgtgctttgaaaaaggtttgtttatagattaagaccacccattgcagcatggagtttttatgcattaaaaattttttccaagcaattctgtttattcagtgcttgctctatgccctgcacactgttacatgctgacaaaacaacaaaaataaaatagatcagacactgctccccctgtgggtgggtgcattccggtggggaaaagctgagaggaggacaccaaccctcacccagaatcatcctatcagaccacactctctccagcaaaagaacacagggaggcttcttcatttagaaggagcgaagcctttcattgaaaaatctttcttgatcctagtaagtgccaacgtctctgtcttttaaaattgttt

SEQ ID NO: 431985 - DNA, 537 bp, Homo sapiens
taaaaataaaaataaaataatgtatagaagaacaatctcaatttcaaaaatgcacctacaatgtgtgaaacaccatatgagtactgaggacataatgagaattaggattatacactgattagggcagtgtcccaggtgtgaaagctggttaatttctgctctaaaatgtgctttgaaaaagstttgtttatagattaagaccacccattgcagcatggagtttttatgcattaaaaattttttccaagcaattctgtttattcagtgcttgctctatgccctgcacactgttacatgctgacaaaacaacaaaaataaaatagatcagacactgctccccctgtgggtgggtgcattccggtggggaaaagctgagaggaggacaccaaccctcacccagaatcatcctatcagaccacactctctccagcaaaagaacacagggaggcttcttcatttagaaggagcgaagcctttcattgaaaaatctttcttgatcctagtaagtgccaacgtctctgtcttttaaaattgttt

SEQ ID NO: 431986 - DNA, 537 bp, Homo sapiens
taaaaataaaaataaaataatgtatagaagaacaatctcaatttcaaaaatgcacctacaatgtgtgaaacaccatatgagtactgaggacataatgagaattaggattatacactgattagggcagtgtcccaggtgtgaaagctggttaatttctgctctaaaatgtgctttgaaaaaggtttgtttatagattaagaccacccattgcagcatggagtttttatgcattaaaaattttttccaagcaattctgtttattcagtgcttgctctatgccctgcayactgttacatgctgacaaaacaacaaaaataaaatagatcagacactgctccccctgtgggtgggtgcattccggtggggaaaagctgagaggaggacaccaaccctcacccagaatcatcctatcagaccacactctctccagcaaaagaacacagggaggcttcttcatttagaaggagcgaagcctttcattgaaaaatctttcttgatcctagtaagtgccaacgtctctgtcttttaaaattgttt

SEQ ID NO: 431987 - DNA, 544 bp, Homo sapiens
tgtatttttagtagagacggggtttcactatgttggccaggctgatctcaaactcctgacctcaggtgatccacccacctcggcctgccaaagtgctggaattataggcgtcagccaccgcactcggcccaaaagcctccactttcatcctcacgtctcatgcacagaagtgaacattgaaaatttcaaagcctagagccccatgagttgtgagaattaaatgtaacttcttgctactcaaagtgtggtccatgagccagctgcatcagcattccccaggagtttgtaaaaaatgtagaatctcatgtcccaccccacaccctctgaatcaaaatccatgttttgacaagatcccaagcagactggagtgtacaggagagtttgtggagcatggatctaaatgatccatctcagaaacaggccctctgctggtgcctctcgcccaagttaggaaagtcttttgggggctgtccagaatgaatrgtgtgctttgctttcccattcaaaaagatacacgcgctgacataggccgcttcttaaaacg

SEQ ID NO: 431988 - DNA, 630 bp, Homo sapiens
tgttatttgctaacttgatttttccccattttggcaacataggaaagataggttgccctgagagagttttgtgaaactcagttaaacaaaatcagcctgttatatgtctctcatgcagacagttcatttttcaagtgaagtattttgaactttctaaaaaatattttccccagagattagaagataatcatggaaaatggggaaccacctgctcaattgcagttagtagaaaatagatgacatttgaatgactgcttgatgataaatatttctcattaaartttctattctcacatttggctatttattgcataatctattttaggccaaattttcctagtacctgctttaagtgcatctagcattttcatacaaccctggaaaccacattaaattctccaaaatgctcagcttcttcaacagtgtttcacaacagttcattacccctttttcaggtaactagtaatcttagaacttctatttctgttccatgaaagggttttttttttttttttttttactagaatgcttattttatatcttaaggacacaatatccattttcatatgtgagagaattcttatgtgtactattacatttgtatgctcttatcttagtcatatcaggctg

SEQ ID NO: 431989 - DNA, 522 bp, Homo sapiens
aggtgtcactgcttctgtctagcatggtctccgattcaccaatctgtgaggggcgtagaatgctcccaccagggtgaaatgaaaagtgaaaggggccagaaagagggtcacattcaacagcaaataatacctggcagtaagcaggatggtcaggatggcttgtgttggcacacagactttgmacactcagtggatatccacaaatcacctgtgaaacagcaccagagcatttaagagcctgcttctcaggcaatgattcaaactttttatagcagcctggagttcctctctggaaaataataatttcacatctatagacatatatggcactgtagtgtcacaaactaaaatgtaatggtgatttgttagaatgtacaacttttttacctactgcaagatgaaaggactaaagttatgttctcttcaaaataggcagcatcttaaaatgaccgcaagtttcaggagggaagaattgcagtgctacagaagcatccctttgagcttatcagatacccttctcta

SEQ ID NO: 431990 - DNA, 630 bp, Homo sapiens
tgttatttgctaacttgatttttccccattttggcaacataggaaagataggttgccctgagagagttttgtgaaactcagttaaacaaaatcagcctgttatatgtctctcatgcagacagttcatttttcaagtgaagtattttgaactttctaaaaaatattttccccagagattagaagataatcatggaaaatggggaaccacctgctcaattgcagttagtagaaaatagatgacatttgaatgactgcttgatgataaatatttctcattaaaatttctattctcacatttggctatttattgcataatctattttaggccaaattttcctagtacctgctttaagtgcatctagcattttcatacaaccctggaaaccacattaaattctccaaaatgctcagcttcttcaacagtgtttcacaacagttcattacccctttttcaggtaactagtaatcttagaacttctatttctgttccatgaaagggttttttttttttttttttttactagaatgcttattttatatcttaaggacacaatatccattttcatatgtgagagaattcytatgtgtactattacatttgtatgctcttatcttagtcatatcaggctg

SEQ ID NO: 431991 - DNA, 609 bp, Homo sapiens
actatcatattcatggtctgatgtgggccccagcccctggtgcatagactgctcttttctctctctgtcctcacatgatagaaggggcaagggagccttctggggctctttaataaaaacactaatctcattygtgaggactccacccagattacctagtcacttcccaaaggccccaccttcaaatagcatcacattggggattaggatctcaatatactaattttggggagagataaacagtccatagcagctcagttaaaccaagttgcattgattatggggctctcatgagaatttacaatgctgaatgatctcaaaaatcattatgttttgatatgtgctgcctaactggttgactctataagacataaacaatcaaacacattttttcattggtccagctatgtagttttgcatttaggtccactgagagtaaatgcagagaaaagtaaaaggtagtaatagaagtctatgtgcaaccattgtggttatcaaagcaatgcaagtttctaagtgataattagagggggattttcttggggtatataaatagataaaaattgaatttcctaactggaagctggccaggagtggtttgtaacagct

SEQ ID NO: 431992 - DNA, 609 bp, Homo sapiens
actatcatattcatggtctgatgtgggccccagcccctggtgcatagactgctcttttctctctctgtcctcacatgatagaaggggcaagggagccttctggggctctttaataaaaacactaatctcatttgtgaggactccacccagattacctagtcacttcccaaaggccccaccttcaaatagcatcacattggggattaggatctcaatatactaattttggggagagataaacagtccatagcagctcagttmaaccaagttgcattgattatggggctctcatgagaatttacaatgctgaatgatctcaaaaatcattatgttttgatatgtgctgcctaactggttgactctataagacataaacaatcaaacacattttttcattggtccagctatgtagttttgcatttaggtccactgagagtaaatgcagagaaaagtaaaaggtagtaatagaagtctatgtgcaaccattgtggttatcaaagcaatgcaagtttctaagtgataattagagggggattttcttggggtatataaatagataaaaattgaatttcctaactggaagctggccaggagtggtttgtaacagct

SEQ ID NO: 431993 - DNA, 619 bp, Homo sapiens
tgtgggtgaacttataaaataatgcatttgctaattttagaatagctttaaatgaaagraaattggcagatagtgtagaacatttccttataacctatgctcagtttctcctattattaatatcttacattagtttggtaaatttttgaaattaaagaatcaatattaatacattattattatgagttcatactttatttagttttccttactttttacctcatgttatttttctgttccaggatcctatcctggataccacattgcttttcattgtcttgtctctttaagaccctttaggctatgacagtttctcaggctttccctgcttttgatgagcttgacagtttgtagaagtattggtcagatatttggtggaatattcctcaattgggaattgtctgatgtttttctcatgattagtctggggctaggagatttttgggaggaagaacagaaaggtaaagtgccattttcatcacataatatcgagggtgcattctttcaaagtgacttatcactgttgatgtgaaccttgatcactcaactgaagtggcatttttcaggtttctccactgtaaagttaatctttttactatcctctgtactgtgttttttt

SEQ ID NO: 431994 - DNA, 619 bp, Homo sapiens
tgtgggtgaacttataaaataatgcatttgctaattttagaatagctttaaatgaaagaaaattggcagatagtgtagaacatttccttataacctatgctcagtttctcctattattaatatcttacattagtttggtaaatttttgaaattaaagaatcaatattaatacattattattatgagttcatactttatttasttttccttactttttacctcatgttatttttctgttccaggatcctatcctggataccacattgcttttcattgtcttgtctctttaagaccctttaggctatgacagtttctcaggctttccctgcttttgatgagcttgacagtttgtagaagtattggtcagatatttggtggaatattcctcaattgggaattgtctgatgtttttctcatgattagtctggggctaggagatttttgggaggaagaacagaaaggtaaagtgccattttcatcacataatatcgagggtgcattctttcaaagtgacttatcactgttgatgtgaaccttgatcactcaactgaagtggcatttttcaggtttctccactgtaaagttaatctttttactatcctctgtactgtgttttttt

SEQ ID NO: 431995 - DNA, 533 bp, Homo sapiens
tctgggttctctattctgttccattgtctaygtgtctgtttccatgaaagtaccatgctgttttggtaactatagccttgtagtatagtttgaagttgggcaatgtgatgcctccagatttctttttgcttagtcttgctttggctatgcagattggtcgtgctttcactatgtaggctcttttttggttccaaatgaatttttggattgttttttctagttctgagaagaatgatgatggcattttgatgggaattgcattgaatttgtagatcgcttttggcagtatggtcattttgacaatattgattctacccatccatgagcatgggatgtgttctcatttgtttgagtcatactatgatttcttccaagcagtgttttatagttttccttttagagctctttcacctccttggttaggtaaattcctaagttttttttctttgcagctattaagaaagagattgagttcttgattttttttcagtttggttgctactggtgtataacagtgctacttatttgtgtgc

SEQ ID NO: 431996 - DNA, 388 bp, Homo sapiens
tcatcttatgttcatactataacctatagggatatctcaaagcatttaggctaatggaattccctctgagatgtacagttcaggagtgatattagctatattctaagtaggatactgatgtgtacaaagatgacatcttgattaaaatctcatctaaactcagagataaatctagcactttcatgtaggtagatttctcaaaatcattttccccacaaagcaaggtggttaactttttaaaaaattcagaccattgtaaaatgctgatgaaagataaggacctcactttcagattgaaagtaaacaagcataattatatagtcacacttttttgcayacaagtgtcaaaattgtcataaactctcaggagaacatccattattcagaa

SEQ ID NO: 431997 - DNA, 345 bp, Homo sapiens
gagtctttatcatttgattttaaagaataattgtgtgtatatatgtatatgtgcatgtatgtatatgaaatatactgcatatatatgtratatattttctactctatgtgtatgtgtatagtatatatactatatacagtcatatgtagtcatgagtcatctaatgacagagaaatgttctgagaaatgcatcattagatgattttgtcactgtgcaaacaccgtacagtgcacttacacaaactgaaatgatatagcctaatacacactttggctatatgctatagcctattgctcctaaactacaaatccgtacaaaatgttcctgtactgaatactgtaggc

SEQ ID NO: 431998 - DNA, 623 bp, Homo sapiens
cagtaatttatcaagatggttctttagagcatgcccaatttcctaatcccattcattttgggaaaaatctcagattaagcactgagaaaatttattttttgtatttgaaattcttataaatgtaaatttgagagtcatatatttgaacatgtacaatgtcgtgcatggtttatgtaaaatttgtaaagaaagaaaggggctttaggtttttaaaatgctttgatgattgtgcacaaaacttaagattattttatatttatgattttcttgtgttttsctaagaatacccttattttttatcattcagtaattcaacagacattagatgaatacctactagggattggcactctgctactggagatagagaaaatttaaatccagagaggaaaaatttacacgtgctgtggggaggcagtgaagggtggaaagttattgtattaattatcaagcaagagtcaattacagtgctttaagtttaaatacatttctcaagctcatgtgcctggaaaattacagtttatcagtggtcagccaaatcccccctgctgcttgtttttgtaaacaacgttttattggaacatagccaaactcatttatttatatattgcctatggtaactt

SEQ ID NO: 431999 - DNA, 411 bp, Homo sapiens
tgatcaatcttcaggaatagattctacttttgcacacaccatttcakagagggaatggcagactggtagcaataaataaaatcagagggcagaagtagatgattttgaaagaatctttctattccaatatctcactgttctatgtttctataataaaaatggcatggtctaaaattaaatatagtgctgcagctggagcaaacacactgcacaatggtttttggaaatcaatgaaagattgagactaacctgcctacaattgcacgattaaaaatccaagtgttgcaaatcttatttttcataagtaaggataacccctaaacaataacaaattattcaaaaaaatttcagaaaacattaatgacaatagcttggcagcatttgcaacccatttttgaaacatttattaga

SEQ ID NO: 432000 - DNA, 516 bp, Homo sapiens
cacctcgctttgagcctcaggtgggtgtggaattttttttatttgagtgrcttaatgattttaggttcagtggattcctatttgcctatctcgtctgaggacaaaactgtgaaacattctttctccctgattccagaaaccatctagatactttgaggacattccttggacaccttcctcaagctcccttttctagttcagtatcaaaaactatcaattaaacctttagtatgtaaaacactattcatggcacttgggtttctaagataaatatgactcagtactaaccctaaaagaattcacagtctaataatggaggagactgaaggtaaactgagaattataatgttgaatgctatatgtgcagtggtagaaaggataggttctaatacagccccttccaggaggaactgagttctgaaccgagttaataagcaaagacgtgatgaggcgaaaactcaacctggttttttgaagcattaaagtatgagagatgaggctggaggggtcagtaag

SEQ ID NO: 432001 - DNA, 516 bp, Homo sapiens
cacctcgctttgagcctcaggtgggtgtggaattttttttatttgagtgacttaatgattttaggttcagtggattcctatttgcctatctcgtctgaggacaaaactgtgaaacattctttctccctgattccagaaaccatctagatactttgaggacattccttggacaccttcctcaagctcccttttctagttcagtatcaaaaactatcaattaaacctttagtatgtaaaacactattcatggcacttgggtttctaagataaatatgactcagtactaaccctaaaagaattcacagtctaataatggaggagactgaaggtaaactgagaattataatgttgaatgytatatgtgcagtggtagaaaggataggttctaatacagccccttccaggaggaactgagttctgaaccgagttaataagcaaagacgtgatgaggcgaaaactcaacctggttttttgaagcattaaagtatgagagatgaggctggaggggtcagtaag

SEQ ID NO: 432002 - DNA, 516 bp, Homo sapiens
cacctcgctttgagcctcaggtgggtgtggaattttttttatttgagtgacttaatgattttaggttcagtggattcctatttgcctatctcgtctgaggacaaaactgtgaaacattctttctccctgattccagaaaccatctagatactttgaggacattccttggacaccttcctcaagctcccttttctagttcagtatcaaaaactatcaattaaacctttagtatgtaaaacactattcatggcacttgggtttctaagataaatatgactcagtactaaccctaaaagaattcacagtctaataatggaggagactgaaggtaaactgagaattataatgttgaatgctrtatgtgcagtggtagaaaggataggttctaatacagccccttccaggaggaactgagttctgaaccgagttaataagcaaagacgtgatgaggcgaaaactcaacctggttttttgaagcattaaagtatgagagatgaggctggaggggtcagtaag

SEQ ID NO: 432003 - DNA, 527 bp, Homo sapiens
ttgtttggtgggctgtacattgccaacccccactttatattaaaaaacacagtgtcactcaatcattatttttttcaaaatgataaataatgtttttcttctactggaaaacagataccctcagctccaagtttgcgctgtaaatctgttttctttctgtcttcaaaatgttgcatctacaactgcacttcgactggaagactcagatctacaaagaaaaaaatagacaaatgtattacaagtttctattacatacttgcaytcaatttggaagtaatttgtggacactaaaagactggatgaaaagaatgtagttccagataacagcagaataccctcatggtgtgtcaaaactttctgacaggagggagtagaaaatgtcagattcttcctctttcatgcaaaaaaattgctcagttcatgaaactgccttaggatgcaagtacaaaaattaaaatattaatgaaaatacacaaaacagcagctttcaacaacccccaccagtctcaggaaagaattcataaaat

SEQ ID NO: 432004 - DNA, 534 bp, Homo sapiens
gtgtattataaagaatgtttaatatctatagcaagaatgaaatattgcattgaaacagatatattaaaattaaagtttgctgcaaattattttgatgagrttatgtttctctagcaatccagtagagtgttcaaataatggggcagcaaaaacaaaatgaaaccgtgtgatgtagaatcatgtcatctggcttttgcatactaccattttatgtatgaaatttaaagataggtgataaaataaagcagctttgagaagctccttcatgcctgcaccagatgcttttaattatagaaggatccttcagtggagaaacttctgtactgtggaatcaggaggtttggttcttacttccatcttgcaatcttgcctgcagagaacgccacaaagcttcaggcactctttccactatggagcttgtcccatccagaagccccatctgttttgtgcctgaaacaaaagcagatggcagtgctgacacgaggcctgactctaagtcccaagggatcatagaatgcctacagtgaaggaggg

SEQ ID NO: 432005 - DNA, 534 bp, Homo sapiens
gtgtattataaagaatgtttaatatctatagcaagaatgaaatattgcattgaaacagatatattaaaattaaagtttgctgcaaattattttgatgaggttatrtttctctagcaatccagtagagtgttcaaataatggggcagcaaaaacaaaatgaaaccgtgtgatgtagaatcatgtcatctggcttttgcatactaccattttatgtatgaaatttaaagataggtgataaaataaagcagctttgagaagctccttcatgcctgcaccagatgcttttaattatagaaggatccttcagtggagaaacttctgtactgtggaatcaggaggtttggttcttacttccatcttgcaatcttgcctgcagagaacgccacaaagcttcaggcactctttccactatggagcttgtcccatccagaagccccatctgttttgtgcctgaaacaaaagcagatggcagtgctgacacgaggcctgactctaagtcccaagggatcatagaatgcctacagtgaaggaggg

SEQ ID NO: 432006 - DNA, 613 bp, Homo sapiens
tttatatgtgatagcaagaagctgcattcatgcttatgtagtggtggcagttaagctctccagggctagaatgagcattgtcttgatttaaattggcctaattttgactaccagactcacaagtgatgactgctttcattataaggagactatctagcttaatatttttctctattgcataaaaatctaagtaaatcaattgtcaaaaccttttgrggttatccggtcatattttctttgctcattgtaacttactaccactggacttattaaggttaccatattttcaaaacaaaaatggggatatatgataaataaatgtttttaacttgcaaacattattaatttaaaaatctcacaaaagtataaaactaaaaacacacgtaaagaagtcatccatgaattgatctcattcaacaaatgaaatggcacgaaattttaccttccttattaaagctagtccaaacatatttaacatagtttaatgtgctgctgacttatttccttgcttacaacatatttagcttgattgggtcactactctcctacatcaggcaagtatttgtaagtggaatgcaagctaactttaatattagccttaaacaagacaacc

SEQ ID NO: 432007 - DNA, 613 bp, Homo sapiens
tttatatgtgatagcaagaagctgcattcatgcttatgtagtggtggcagttaagctctccagggctagaatgagcattgtcttgatttaaattggcctaattttgactaccagactcacaagtgatgactgctttcattataaggagactatctagcttaatatttttctctattgcataaaaatctaagtaaatcaattgtcaaaaccttttggggttatccggtcatattttctttgctcattgtaacttactaccactggacttattaaggttaccatattttcaaaacaaaaatggggatatatgataaataaatgtttttaacttgcaaacattattaatttaaaaatctcacaaaagtataaaactaaaaacacacgtaaagaagtcatccatgaattgatctcattcaamaaatgaaatggcacgaaattttaccttccttattaaagctagtccaaacatatttaacatagtttaatgtgctgctgacttatttccttgcttacaacatatttagcttgattgggtcactactctcctacatcaggcaagtatttgtaagtggaatgcaagctaactttaatattagccttaaacaagacaacc

SEQ ID NO: 432008 - DNA, 518 bp, Homo sapiens
ttgttgacagctcttcgagatttctttcttcatgttggggcacactggatgagaaataccgttctcaacctgttttagtaactcttcggccacatacatgtgccttaaagagcagtgattgcttctcttaccaatttcctactctcatgatcttgcctactctacctcatgtcaaactctgaaaatgaattgacttttggcaattcaatctgaaattcttatcagtctaatttaggggatttgtctactgtcatcaataagaaaaggtcaacctatgtctgaggcaggtgtttggagagagcattgtaatgtatgaataggtgttcacatcatatttaggaaatatttcaatgccattaaattagttgtaagaaacaatattttttgtactgctcttcggtatgcaattatattcccaaaatatagagaatatataagaatattcatgtttgtgtgtacttgtatsagtgttggcataggtatatgaatgaaccctagaaagattagtgtacatttat

SEQ ID NO: 432009 - DNA, 645 bp, Homo sapiens
taatggtgatgtgaaatagcgtgggagcagggatggtgataaaaaggaattagactcaggataaatatttgaaaatagaattgacaggactcagtgagggactagatatggcrtgtaagagaaaaagaattgtcaatgatgaccccaggcttagaggaccaaataagtgatagaatgcatttgccatttactgcagtagtgaagtcatgagaggaattcactgtgggagaaaaacaaaaccaagtggcaaatgtggagtcagtaatataacacagtacatagatcaggttcagaggaaatatgtaaattagagctgaagatacaaatttgagattcatcacagcatagctaatattgaaaaccatagaatccaatgagatcaagtataaagataaatataaatgaaaaaataagacatccaagatttgagccccggagcatttcaatggttagaaattgggaagatgagggattcagaaaatgacactaagaaggatcaggcagaaaaatagcatgagaagcaagagagaataacgaaccagcagcagagtaaagaaagtgttttatgaaggaacaagagagtgattgttccaaaagcggctaagaaactgtgtccgttaagaactgagaagtagccatctgatt

SEQ ID NO: 432010 - DNA, 570 bp, Homo sapiens
aatatttgcatgctgatgggaacactcaggtgagaaagaaaactttataggaaagcagagagaggaagaaactgcagaagcaatgccactgagtaggaaagggactagattcagagcataagtggagtcatttcatagacagttcacctactataggtaaaggaaaggcctaatacatggacagatccagataactcagtgcatatggggatgagagcatgtggaaatcctcctctgtgccttcagctttgtcagcaaatatgaagccagtcatcagctgagaacaaacttggggaaggaggtgttggtttgtggaaagtgaaaggaatttgagtcaccttggaaaactggagactgaattaaagaaaattcggaaagataactagaaatctctaaacgcccacttgaagcttgtgttcatgaattttttaaaaaaagaaatgagtaaacatggttgctgttttcttaacccctaggcacatatagctgggtagaagaattaagtaggtgttgagttgaatttaatcagaaaacaaaaaatgagktttacagtatatacaaagatgtgac

SEQ ID NO: 432011 - DNA, 563 bp, Homo sapiens
tatgatttttacttaacaccttaactttctctcctgtagacaagttaacccaatctcaaaggctggaggcaatgatggtttatggttgccaggaaaaactaagtaagatgccaagatattcaatgacagaattatctgtaattttgttgtattccaggggaagaacttctgtcttatgggtcaagaaattgttttataaaggtacagtggcaaaccaaactctcaacgaaggaatcccattaagcatgttgacaagagataaataagtgagtgrgaatctctgtctggtaacctctccaaaaaaggggcttacatgtatcttctaactaggcttcattttctcaagatatgtaaaaagaccagttattattcagaagactttgtgatgagcataaattaaagcagtgctacctgatgaatttctttgttcctttcaaagaatgctgccccaatgcctcccagatgctgtcccattgctccctggaaacttctgtgtatgtaaaacagatgctcaccttgctagccccgatcattccatgttggccacctccttttgttggtaa

SEQ ID NO: 432012 - DNA, 482 bp, Homo sapiens
tattcagaagactttgtgatgagcataaattaaagcagtgctacctgatgaatttctttgttcctttcaaagaatgctgccccaatgcctcccagatgctgtcccattgctccctggaaacttctgtgtatgtaaaacagatgctcaccttgctagccccgatcattccatgttggccacctccttttgttggtaaacttttgccaagatgaatcaatatcactgactatgtaagtaaatgaactaagtaaayagtgtttctgatgggactaccacacattctttctcctttctttatttattataaatattttacttatatatgtcaataaacaggtcaaatgaaacaaacgctatctatctagaccaaatgagtttaatcctcagagagtgaccatctttttatgatttctaactgtttgaggttcttccctactgttccctcctgtaaacttcctagaacatttttctttttggttgtg

SEQ ID NO: 432013 - DNA, 482 bp, Homo sapiens
tattcagaagactttgtgatgagcataaattaaagcagtgctacctgatgaatttctttgttcctttcaaagaatgctgccccaatgcctcccagatgctgtcccattgctccctggaaacttctgtgtatgtaaaacagatgctcaccttgctagccccgatcattccatgttggccacctccttttgttggtaaacttttgccaagatgaatcaatatcactgactatgtaagtaaatgaactaagtaaatagtgtttctgatgggactaccacacattctttctcctttctttatttattataaatattttacttatatatgtcaataaacaggtcaaatgaaacaaacgctatctatctagaccaaatgagtttaatcctcagaragtgaccatctttttatgatttctaactgtttgaggttcttccctactgttccctcctgtaaacttcctagaacatttttctttttggttgtg

SEQ ID NO: 432014 - DNA, 554 bp, Homo sapiens
tggtgttctatctctagaaatagttttctgttttaaagtctattttctaatattactatagcttcatcagaatattttgttcatatttgtcgtttctccattgtttttgtactaacctgttttcttacattttccatatgtgtctggtaaattgtgtatagttgaatgtggagattcttccaggctaatgattttttatctcttagtggagaaatttagtccctttagttccttcaaaataattttggatatgattgaatttagatctattgtcttatttttgctttctagttgtctcatatgtctatatgttattattgttctttttttattaaccatcttttggattgaattaatataattcatcactcatttttcccttttacaaatttgaaagttaaaagttttgattttgattttgtgattgttatacaaattacagtattcatatttaggaaatctaaaattaatcaaaaccttccttttccttttatatataataaatagcttagatcatttaasctccatttagacttcctcccgacttacatgat

SEQ ID NO: 432015 - DNA, 592 bp, Homo sapiens
tttcttgctgtctatgtatatgctttgctactgcaaataattttattaccatctgaaaatattagattatcctagctagctacttcataaaattgcatctgtgtcctaaaatttgtccttgtaccacttatcagttttagcatattcttcattttgtgctgtgtggccttttttttcaatatttatttaaggcatagagaatcaattctatcagcatgatgatttttattcaactatgtcagcttaaaagagtagtaagaatggaagctatacatagagaaagcaggagtcagtaagaagttagcttcttagaataattccaaggaatcatatgaaaagatatattaagtttgatgcataaaaatcagttctcataagtaaatgaaaatttgttggaatggtcataattatatttgaaattcccatatttggaattcccartgcatttcactgcagagaactgagctaactttatactcattataaagtcacacagaaaaatcttaataaatagaagaaataaaagtttgtcttcaagatttacataaaatcttgacttataaactacctaattgctttttgtacctttgga

SEQ ID NO: 432016 - DNA, 559 bp, Homo sapiens
tacaaagtacagaaagcaagcagagaaagagtcacaaccccaaactataaattgtgaatacctactrtactggactaagatgagagatgaaagaaatcaacatatatccatctccttagatttatgtcaggctggagatattttgacagttaaatgtcacaattctgagaagtgtgcacaccatctttttaacagagggatgagatgcagaagtcgtggcaagtcttgggagagtcagaggaatgtcccaagagagccttatctactaccataaaacgttaggaaaagttgagcaaaacaggagtaatctttcctcacaaaaatgagcctggatgacaactggaaatgcagcggtatggagtatctcctaatctagggaactgccacttaagaagggtctccacaaaccatttgtgtcctcctgaatgtcaaaagccaagagaagatgcacagaatagagtaacaagcagatttagtgagggagattttaagactgcttgagggcaagcccacctcacttctgcaaccagctcctgagggttcagcaaacagctacccc

SEQ ID NO: 432017 - DNA, 559 bp, Homo sapiens
tacaaagtacagaaagcaagcagagaaagagtcacaaccccaaactataaattgtgaatacctactgtactggactaagatgagagatgaaagaaatcaacatatatccatctccttagatttatgtcaggctggagatattttgacagttaaatgtcacaattctgagaagtgtgcacaccatctttttaacagagggatgagatgcagaagtcgtggcaagtcttgggagagtcagaggaatgtcccaagagagccttatctactaccataaaacgttaggaaaagttgagcaaaacaggagtaatctttcctcacaaaaatgagcctggatgacaactggaaatgcagcggtatggagtatctcctaatctagggaactgccacttaagaagggtctccacaaaccatttgtgtcctcctgaatgtcaaaagccaagagaagatgcacagartagagtaacaagcagatttagtgagggagattttaagactgcttgagggcaagcccacctcacttctgcaaccagctcctgagggttcagcaaacagctacccc

SEQ ID NO: 432018 - DNA, 558 bp, Homo sapiens
attaacaacacagagaaagaagaaaggtatgaagaagcaatgagtgaaactatccaagtacaacgtggagtagatttttccatgactaaataaaaattgtagcatataaacaaatgaatataaaaatgtgggttttgtggcctaaagtgcatgaatttacccttgttatataagaactctgggaaatcttcttccttcaggttttagttttcttayacataaaaatagaatcatttctcttccatgcttaaaaaagtgtgtttgattttaaagttattgcagggaaatactttttactctatgcatgaaataaattgaatataaacaaatattcttgtttgtcaagtcctagaggtgtcaaggtatattggtgtgtccattttgatgaatgctaaaaatatggtttattttaaaattcattagaaataagattgttgcttttaaaagcagtattgctttccaagtagagcagatttagtaagtaaaaatgcacttgttctatggccatcaaaaatacagcaaaaagaactatatgaatgagcagtggtcaattttatg

SEQ ID NO: 432019 - DNA, 564 bp, Homo sapiens
taggtatgaaccaaattttggcatttcacaataattcttcttaaaggtttaagaattaaataatgaaacacatacacatgtatctttgttcaagaaaattaattatagtaaaatatccattgcaaaatatgtggccattctgtttgtgtctctttcaaatgtgaaatatatacataatggtataagttaagcacacatttctgactcataggaataagaaatataatgtagtgatgtgtacatgaagaaaaaataataaatgaggaaacgaggaacatgaaacaaatagtttaattctaagagtactaaaaacataatgagagattataatatagaagcatgataaagggtgaatgacatcattcaacttgcaagccataaaattcattcaaaaataagtcttcaatttcaagactctaaagatactttaatatgaatataattattattaaacaattctaatcaatacaaaaagtaaaaagacaagtgtaaaaaataattccaagtctcatcacttagaarcatcatcattaacattaggtgaagctcattctagatgttgct

SEQ ID NO: 432020 - DNA, 600 bp, Homo sapiens
cttctgccaattaaagaggcagcacttcatttcttgccctaaacaagcaaagaaaatgcagaggtctcatccttaagactcagaagctaatgcttctttcatttctggggggaaaagatgggcaactgagtgaagaaaacaggcaatgaatggtatgactagatattaagaaattcaaggccaaacaaaacaaataccaaaaakaaaaaaaaaaagaaaaatgaaaacaaaagttatttctgagaccctgcaattacatctttgttcagggttaataaatcagtgaatggaagggggagggggaatcctcaacaatttgtgggatttcttttcattatggggctcaatgtatttcttattactgattacacatccacctggtgtcatatccacctatttacatcttcagcctggcttgattgttaacatgtggggagtttgtgttttggtgccgtgtgagtgtgtgtctgaaagcagtgagttatgaatgtagtagggattccaggaatgatgtgtatgtgtgtttgcatagcaaacgaagcaggaattttctgtgtataaaaataggaatgtgcacctaactgatgtactagataactg

SEQ ID NO: 432021 - DNA, 577 bp, Homo sapiens
ctaataaacctgactaatatcgtgacacttctctattataaaactatttctctttattatgatgttccattattcctttttctattaacaatgtagaatgaccttacataattcttcttttcttaataagccatgttgatacctagttttcattaacaggctagaaatcgaaaaacacaacttggctttgtagaatagaagccaacgtaaacagaaacatatttgatgtagttttacattgaggtctttctgccacaaattttgactgggggaaactggtagccaaagtttttcttatcttatttaataatgactactctgagagtacccaaaatattgaagatatggtgaataaacatttatggagtccttactgatagtaatagattgtgtgttaccaaagcagtatgaaatagtagctcaaccagcaaagaatttacgatgtagttcacatgtcacatatatacagagagtctacaaggcagtaaaggcctaatgakggatgcaagcactacttgctatggataggagtttagaggaaaaatggatcacctttatctttccccaaggcttttag

SEQ ID NO: 432022 - DNA, 620 bp, Homo sapiens
agcaatgtttatttttcttcctctacttttcacattatttgaagttttgcaaatatgtattacttttttattgtctttcttctccactagaatgcactctcctaagggcagggagtttgaatctcttacttttagtatcttgaagaatgacacaaattaaatgacttagtaaatatttattgagtgcatgaattgtcagagaggtagaggttggtcaagggactagtttctcagataccaggggaaaataagttgtttcaaggagcgagtggttgaatgctgctgagaacttaagaaagatgtgttgcatgcgtccattagaaagaaattagaaagcatcattagaagtagttcatgaatagaaatcaggagcataattgaaagttgtgaaaaatttgtacaacatattattatcttgaagcatgctttttttgagcatgtttttccatagagagaaacatttaattcctcctagagaggctacatagcatggtggttaaaagtgtggactacagagccmaactgactgggttcaaattcatctctgttctgggtagacaaccttgagcaaattacttcaactatctgtgcctcagtttcaactatagaaaataaggata

SEQ ID NO: 432023 - DNA, 553 bp, Homo sapiens
taaaaaatgaaaatgagactgctaccaaagtaagtttctgagtggctcatgtggtactcaaagcaaggaaagccatttactgatagtaaataaactatgtttgattgcagctcttcagtaaaaagggtttctttaaaagttttggacattggttgctatcaataatcaatgaaaaaagaaagtaaaaaatttaaagtggttttcccctgggctttgatgcaccaacaaatgttactaacgcttctcagttgttatttattttagaaagaaataccragtttaaagtggctgaaagatcaacctgtataaacagtctgcatggaacaagcaagaagttgagaaagtactcattcagtatgacctgaagtggaatccactaagatatgatacaatcgagggtggtaaaaatatgtgttgagcagaaaaagaattagttgaacaaatttttaaagctcatgaaattacaaagtgtttaaagcctcaatgtattattcaacagcaggtccattgtgaaaaatattggaatctgtcatgtgttattgaatcagtgtca

SEQ ID NO: 432024 - DNA, 595 bp, Homo sapiens
tgggtctgtcatgcatggctcttattatgttgaggtatgttccttttacacccagttttttcagggtttttaacatgaagcgacattgaattttatcaaatgctttttcagcaacaattgaaatgatcatatggttataatcttccattctgttaatacaatgtgtcacattgattgatttgtatatgttgaaccatcctggcatcaaagcgataaatcccagttggtcatgatgaatgttctttctaatgtattgttgaatttagtttgctagtattttgttgagaatttttgcatcaatattcactagagatattggcctgtagytttcttttgttaatgtatctttgtctggtttttggtatgagggtgatactggcctcactcatagaagtagttttgaagtatttctttctcctttattttttagaataacttgaggatgattggtattagttctgctgtaaatgtttggtagaattcagcaatgaagccatcatgtaccaggcttttatttactgagatactcttcattacaaccttgatctcattatttgttattggtctgctcatgttttgaagtttttttctggtt

SEQ ID NO: 432025 - DNA, 591 bp, Homo sapiens
gttttcttctcttttagtcccagcctttccctatatcatttcactccgattttaaccttctctattttgttcctctttgtttgttcttacctctttaaaattcatgaagactaatgtataagctatgaaagcaagctttgcatcaatgaaaatctagacgaatatttgttatttctctcaggccacatagcttcatttaacacatttaagtagctgctaattgcgctccccataatgaaattaagtataaatttttttctgaacttacttaccatacagtagtatctaaaatagagattggcaatatctttagttccaaatgtacaggatgggtagagaaactacaaattcctgagggctttactagatactacattggaagtcttgtggcatagaaagacaaggggaaatgaagaaaaatataaraatttaggagaaaaaggaaaataaagaaggagcaaaaagtagaaatcattaaagcactcattatggggagtttcaaaatacaggtgggtggaaataacaatatttacttgagagaagtcccagtgcctttatgtttaatttgaaaacaattcagtaaatgttgtg

SEQ ID NO: 432026 - DNA, 635 bp, Homo sapiens
tctaattttgatgacacatcattatacaagaagtaaaaatgagctgctttgtttcagattacatttgtacctctgaaatctgtaagcactagctccagtttccacactgaaatcattttaaaagttctaaaaatcagtgagactatttgatttgtgtaacaacctactctgtagtggaagaaaggaaataatattcagtaatctcaaaattctttaaatccattgatgtaaaagcaaactatatcttagccacctgtggttgggtcttcaggaatttttatcagatggaaaaacttgcatttgcacttccattgyttccaatttttgctttaatactgggtcatctcaaagctttctaatcttccataaaaatccattatggacttatcctccacaactttttaaaatgcttcttgaacctatttatgttttggggttggtcatttatcactctaattactttcatagattgactacctgcttcatgaaaagatcttaatttgctcttaaattaaccatcttcaactgcaatattgtcccttggctctagtttttctgtgatttgtttaaataagcccaaattaaccaacctgtatgtttcataatgttaaaaattgcaatcatgttcctatatc

SEQ ID NO: 432027 - DNA, 635 bp, Homo sapiens
tctaattttgatgacacatcattatacaagaagtaaaaatgagctgctttgtttcagattacatttgtacctctgaaatctgtaagcactagctccagtttccacactgaaatcattttaaaagttctaaaaatcagtgagactatttgatttgtgtaacaacctactctgtagtggaagaaaggaaataatattcagtaatctcaaaattctttaaatccattgatgtaaaagcaaactatatcttagccacctgtggttgggtcttcaggaatttttatcagatggaaaaacttgcatttgcacttccattgtttccaatttttgctttaatactgggtcatctcaaagctttctaatcttccataaaaatccattatggacttatcctccacaacttwttaaaatgcttcttgaacctatttatgttttggggttggtcatttatcactctaattactttcatagattgactacctgcttcatgaaaagatcttaatttgctcttaaattaaccatcttcaactgcaatattgtcccttggctctagtttttctgtgatttgtttaaataagcccaaattaaccaacctgtatgtttcataatgttaaaaattgcaatcatgttcctatatc

SEQ ID NO: 432028 - DNA, 545 bp, Homo sapiens
ggtcataagatccaagtgtcagagcaacttgtttgcagctttcatttgctccaggccccgttataaaattttttgttcctagccttacaacatgggctccactagtatagagatctttaacccaatgaaggaataattctacatggaactcaaccatggatcctacctcttaatactatttagatttttcactaccttcagtagcaactcaaccagaaaccaattccagatctcccataggtcctagaagatatgctgctgcagccaatccttattggagtaatactaatgtctatatcacttagtattcttagatgccagcaacagaaaacaactttggctagttaagcatamaagaagtttattcaaggatatcaaggatattaaaaagcactcagaatctctaaaagtataagataatctggcataaaaaatattaattaaaaaaataaagaaataccaaaattgcaccacagaattgatccagtgataaattcattaccattttcaatgccattgtttcttccacttgaagcaaacaacaa

SEQ ID NO: 432029 - DNA, 597 bp, Homo sapiens
aacttacagttcagtgaaggaagagagacaaaaagcagatttattagatgcttataattactaggaagagaaagaaggcagcagaacagggacagggaaaattacattggaattgcaattttaagtaagatgaccagaaagagacctcctgagaaactgacatatragtaaaaacccaaaggtaaaccagcaacaattcatccaactatctggataagagcatttcaaggaaagatagcagcaagtccagaggctctaaatttggagcatacctgagatattccaggaacagcaaggaggccagtatggttaaagagactaagcaagggatatgagatcagatcatgtaaggttctgtagaccaaagttatggctttagcttttactctgattaagatagaaaatcactggaaaattttgagcagaagagtgacctgatctcgcatattctgatagggtaactctgtctgctgtgtaggcagcctgaaagaatgacgaatgcatgcattcattcattcaacaaatatttattgaatacctactattccagacatatttttaggggctagaatgaatagcaaataagacaaaaattct

SEQ ID NO: 432030 - DNA, 597 bp, Homo sapiens
aacttacagttcagtgaaggaagagagacaaaaagcagatttattagatgcttataattactaggaagagaaagaaggcagcagaacagggacagggaaaattacattggaattgcaattttaagtaagatgaccagaaagagacctcctgagaaactgacatatgagtaaaaacccaaaggtaaaccagcaacaattcatccaactatctggataagagcatttcaaggaaagatagcagcaagtccagaggctctaaatttggagcatacctgagatattccaggaacagcaaggaggccagtatggttaaagagactaagcaagggatatgagatcagatcatgtaaggttctgtagaccaaagttatggctttagcttttactctgattaagatagaaaatcactggaaaattttgagcagaagagtgacctgatctygcatattctgatagggtaactctgtctgctgtgtaggcagcctgaaagaatgacgaatgcatgcattcattcattcaacaaatatttattgaatacctactattccagacatatttttaggggctagaatgaatagcaaataagacaaaaattct

SEQ ID NO: 432031 - DNA, 587 bp, Homo sapiens
tgccctcacaaatggataataaaagggttggagggaactagcttaggcccattttggttcttctgctattctaatatgtgaggacacagcattcgtccccttttttgcccttccacctcccaccatgggaggatcagcaagaaggccctcagcagacactgtatgccaccaccttgatctttggacttcctggcctccaaaactgtaaaaaaattaatttctgtttattataaattacccagtctcttgtattttgttatactagcacaaatggactaagacagtgacatgggactcagaacccttggggatgagagtgttttrgtcttcttgagctgtattaacaaaatatcacagtctagatggcttaaacaacaaaaatttatttcctcataattctcgaggctagaactcccagatcaaggtctggaaaagtttagtttctgataaggccttcctttctggcttgcagacagcctctttgttctcacatatctttccgttggtgtaagtgcatgaaaagtgaaagaaatctcctctcttcctcttcttatagggccagcaatcttatcagattagggccctgt

SEQ ID NO: 432032 - DNA, 441 bp, Homo sapiens
tttgcctgcatatcctgaccctagccttctagatgttaccacctcggctacaagcagcacaaaatagcaaagccaaagaaaactttcccctttctacagcctaatgagaaccacgtactttcttcctccctrtccctgagcctcacacaaacaggaatcagccaattttaccttgaaatataagggggcaagtttagagagatcagatcccaggaaagatagagcttttaaactcttcatttctcctaagaaaagcaccattccctactaatcctaataaagggagtttggagtaatggtgaaaagtagggaacattgatgccagactgactggattcaaatcgtgtttttgacacttaccgtatgtgtgtctttggacaaaatacttaaatttcctctgccttagtttctctatcttgaaatggtgactaaaatagtaca

SEQ ID NO: 432033 - DNA, 531 bp, Homo sapiens
tcatctctctgaagcagtaaagaagtcgggatatttatccactaatttctgtcaattattgattaagggctgatctaacagtactaaatttcagtggcagcccacccgagttacaggtagagcacactcctgtggccagagaaagtcctcaagcagaaagtcacatgccttgcaataagaaaatataaggaaaaaattctagaactaagccaccgggggttccaacactcaagatatctggatgataaggatgatcaagcaaagtatgccaagaaaaagcagccaaaagggaaggagacagaagccaaggagtaaatgatcaaattatgtcaaatgcagcttataggaaaataatatgaggactgagaattgagtgtgggatttaggaacatggaaatcattggtaaccttgtcaagagttacttcaatggagtgaccgcgataaaaacctgactagtgtgagatcaagagataacagaaggtgatgaastaaagacagtgagtattgaggggtttaaggcagttttgcta

SEQ ID NO: 432034 - DNA, 569 bp, Homo sapiens
tgtttgagttccttgtggattctggatattagtcctttgtcagatgcattgtttgtgaatattttctcccactctgtgggttgtctggttactccactgattatttctttygccatgcagaagctttttagtttaattaggtcccatctatttatctttgtttttgtcacatttgcttttgggttcttggtcacgaactctgtctaagctaatgtctagaagagttttttgccaatgatatcttctagaatttttatggtttcaggtctcatgtttaagtctttgatccatcttgagttgatttttgtatcaggtaagagatgaggacctagttttattcttctacatgtgggttgccaattattctatcaccattagttaaatagagtgtctttttcctactttatattttttattgctttgtcaaaaatcagtttgctgtaagtatttgactttatttcttggttctatattcagttccatttgtctacatgcctatttatataccagtaccatgctgttttggtgactatggccttacagtatagtttgaagtaaggaatgtgatg

SEQ ID NO: 432035 - DNA, 636 bp, Homo sapiens
ttcttttgcaacagaatgcaattggagaaactggttgttttatcaaggctttgaatggaagggtatgcttttctttaaggagtcaagctcaacttgcagaactgataaaaccccgtggggagactgtcctcatacccttcccaatgctgtccctatacagggttttggacctgtggtcagtaaagaatgtcactttctaacagacccaggagctccaagtttctcttgrgaccttaagaggaaaggatcacccaacttacaggtatttgaggatacaaaccaatggctgggctcagctttaaacgatcttatctgagattccttgtggaacagagttctatcaaagccaatctaaaaggcctatgtagaaatagttattcttgctgcactttatgcaaataatcaggccaactataaggtctattttgcaaacaactcagtcccatcatgactgtttattttaaccaaaaatgaggactggagagaaattatgcttcaaaacttatacatttctcattaaattctaagctccttaattgtttttaagcttttgcctacattttagacttaccctgcttgctcctgtgaaccaaccagcaatctccggctgcagctcagaaagaacaaaagggatgg

SEQ ID NO: 432036 - DNA, 586 bp, Homo sapiens
aagctcccactcaaattgtttcaaatgtggccagtgggacctcatgcttcttgagtgtcattacttacttctaggactatcaatagccagaactaggaaaaatgctttttaaaattatgagttcatcttgatactgtcatcttttatttttatttgtggtaaaaatacacataaataaatgtaacatcccaatcatttttaaacatacattttsttaatgttgtgaaacagatctctagtactttcatcttgcaaaactgaaagtctatacccataaaactccccctttctcctcccccccagcccctggaaaccaccattttaccttcagtttccaagattttgactttataagtatctcaaatcagtagaattatacagtgtttgcgcttttgtgactggcttatttcactcagcataatgtcctcaaggtttatccatgttgcagcatgtgacaagatttttttcttttttaaggatgaataatattccattgtttgtatataccatgtttttgtttattcattcattaatggacttttgggttgcttctatctcttggctatttgtgaataatgctgcaatg

SEQ ID NO: 432037 - DNA, 586 bp, Homo sapiens
aagctcccactcaaattgtttcaaatgtggccagtgggacctcatgcttcttgagtgtcattacttacttctaggactatcaatagccagaactaggaaaaatgctttttaaaattatgagttcatcttgatactgtcatcttttatttttatttgtggtaaaaatacacataaataaatgtaacatcccaatcatttttaaacatacattttgttaatgttgtgaaacagatctctagtactttcatcttgcaaaactgaaagtctatacccataaaactccccctttctcctcccccccagcccctggaaaccaccattttaccttcagtttccaagattttgactttataagtatctcaaatcagtagaattatacagtgtttgygcttttgtgactggcttatttcactcagcataatgtcctcaaggtttatccatgttgcagcatgtgacaagatttttttcttttttaaggatgaataatattccattgtttgtatataccatgtttttgtttattcattcattaatggacttttgggttgcttctatctcttggctatttgtgaataatgctgcaatg

SEQ ID NO: 432038 - DNA, 547 bp, Homo sapiens
tgcaataaaatcacagaatgttagaaatattttcaaacactccttttaaagatgatctttccataatgtgagtttcttttgaaaatgagatgtcctctttattattgttacaatatcacttttcctttgaaggtagatgggttgtttattctttttaaaactacattctaagtaacacattactgagagccttttgtcatcagagtaaaggtcatcacacttgaaacacttatcttttagtaaaagaaaaatgcctaatgcatctttaagctctaaaacttctttaagtacttcgtcttaaggtaatcaaagaacctccgtgtgatacaaaatagtttctgtgtcactcaccatatatgtattgaagatatgtcaccatgtattggtcttttttgtgtgtgtgtgcgtaaatgacatcctgtaaattataagtaaaatctttttcttcttacaccyccaaggatcatgttatatactccactttggcgatcactattaagtagaatagccagtgcctattctgtctaaggcaaagaaccatagtaat

SEQ ID NO: 432039 - DNA, 586 bp, Homo sapiens
agttcagccttctttgttaaaaacaaaggaagctgttaacttttgtttatgaaagatatttctctcttttctagtagatagaatactttatcttgtagggttagagttgatggatgctaaagatcattttgccatattgcattgtaaccctacaagtataaataaacttcatttagtgaagacacctctctatattcatgctagttaaytgaaaaattctataatcaggaggaatattctgaaagattaatgaaggttgtcaaaagagcaagcagacagggattcagatgctgagatagtttcttattttcccttttaaacttgcattatattataatagatacatatcagtgaaacaagaaattcattacaaaaatgcatgaaaagctataatgcatgaagttataatccgtgattagaccattggtgttcaaattttggcttttccatttattagttttgtgggttaaaaaaaaacattttttggttccagtttttgcatctgtaaaatggggatagtgtcataccttaaatgattgttatgatgatttaatcagatattaaatgtatagcatttagaatcatg

SEQ ID NO: 432040 - DNA, 556 bp, Homo sapiens
acatttagccctgcttagaattgttattacatcatttaaactgttgaattctcaacgatttaaatggacaggtgttttcttctcctgataatattcaagcatgttgcttgaatagccccagtctgaagttcttctgggcaattttcctttaattaaacctgacagctttttttggtatggagcttttaraaacatcctaggatggcttatgtcctttccacttattaaaaaaataagctcctgggttccacaggatgatatatgtgtaattgttttgaggaagttaattggggggtggtgaatataaagtactggtatttctcatttgggtaagttaacatgggtgaagtaggttccgaacagcaaagtggttcaacttttgctctaggtcttccttccttgcttcctttctcctctgaagtactttaagactttctcttttggatccccgcatccctaaagttgctttttaaaactagaaccgtaataaacaaagcaacagtctttcagagctagcattttggagaaaacgacctctgacatctatctgcttttg

SEQ ID NO: 432041 - DNA, 570 bp, Homo sapiens
ctggtaggtccttggtaaggatttgttgaagggaggagagaaggaaggagggaaagagggaggcgaggattgttaaaaaggagaggaaggccgggcgcagcggctcaccccagcaatcccagcactttgggagccgaggctggcagatcacgaggtgagragatggagaccatcttggccaacatggtgaaaccccgtctctattaaaaatattaaaaaattagctgggtgtggtggcatgtgcctatgatcccaactactcaggaggctgaggcaggagaatctcttgaacctgggatgtggagattgtagtgagccgaggtcgtgccactgcactccagcctggcgacagcgagactccgtctgaaaaaaaaaaaaaaaaaaaggagaggaagtgagtgacggaaggaggaaggaggggaggagagaatctatgatcagaacaaggtgggaaaaagtgaaggcactgcagaggtgccatgcagaaaaggtgggtgatatctggggacagtggtgaagagctcagggctccgaacaggagggtgaggttgcggggcaggggagatggta

SEQ ID NO: 432042 - DNA, 443 bp, Homo sapiens
tacagcaaatgatgtgctttgtgttgtctctttggaaaagktgatgtgttttctgttgtagatgggatactggcattttggtaggtgggcattttgtaattcagtatcaggagagaagggtgccttgagtgtgctgggaagtcaaggagtggaatgtagtaaactatggtagatattgtgttgtccacagggtttatccatcctcttccatagcaacatgctccttcctgtcatttccccatctcctcccaccaccaccatcccagccatagggatgaccttgtaactcatgcctgaccaaaattgtttccttggattgagaaaactttggaaaaaaagacactctgttttctactgggtttgccttaatgggaggatgtgaatctgagaatgttgagactaaaggggatgagaagtagaaaggaaggttgtgttttcttggt

SEQ ID NO: 432043 - DNA, 470 bp, Homo sapiens
tctctgtaatttcagtgactgagggaatacatcaaaccagatgttatgttccagtcagttattaccttttataggtaactgtttctagtacataaagaatgaataaatcaaccaaatcaatatatatttatttaccagggctatgttttcactactgttcaaaaatgtattatctagcacttttgcctaagactctgagaatattgtttccctctgtgttttctgatatcatctggaaaaataaaaaccagaagcaaacataattctgtcattctatttttgktggaagcaaggcagttattatttggtttggggaaaataaaggcagcatttcagatttggaaaatatcccagacttaaaaataatgtttgatagtgtgaagagcagtgccagtgtggcatcttctcctgtctaggcagaatgagccagatcatttgcagttagactttctctcctcatgtagtcaaat

SEQ ID NO: 432044 - DNA, 515 bp, Homo sapiens
gaccatgtgcccatctctgttacctgaaccaggtgtgctatgtgcttgctcagaggtgggatggaggaggagttaagggtggaatctctatagcacagatgtgaccagttgaggaaaggaaggtacagataatttttccaaaatctttatagacaaaaaactggaatgcagagacaaccagacactattcaatgttagctgggcatggcccttcatgatgagatgttctcagctgattcacaaatgcttagcttcaagtagtcattggtggaatgtaatcagacaaaaggattcaaaatactttaagggtccagcagcactccaggagagagtttttttcattggattctctatgtttgaagagggagatgaagcacaatagggtgggtaaggataaagacattgtgattttcaccccttggaacttgtattttcttctaattctaatcaaacactmgaattggatttgtttgtgagaacaagccttgtaagcataggagatttttttgtgaata

SEQ ID NO: 432045 - DNA, 613 bp, Homo sapiens
gcctcagttaaaatactacttaaagaatgctgatgataatatgattcttgtttgcatttctttgacatacagaatggactttttgttatgttcaaagaatattttccttatattttatagcccaattattgtattaaaatatttgtcagtattgaacattttaagtcaacttttcaaattagagaatgccctctcaaaatattaaaatgcacatatatatggcttttttttcaartcttttatgacagcaacatttccttgaaatatagttttaaatattgtttcattgcttcagttttctttcctggggactccaataaaatgtgtatcagctctcccttgccttggtcctttatcaccttctccagaagacttttgtttcttttagtttcttttttcccatagaaaataacaattttatttatttatttaatagtttccaattttattttagattctggagaacatgtgcaggtttgttatatgagtatgatgctgaggttggggatacaaatgatcccatcaccctgatagtgagcatagtttccaacagttaggttttcaacccttgccaccttcactactttcgacctctattagtcctcagtgtcta

SEQ ID NO: 432046 - DNA, 613 bp, Homo sapiens
gcctcagttaaaatactacttaaagaatgctgatgataatatgattcttgtttgcatttctttgacatacagaatggactttttgttatgttcaaagaatattttccttatattttatagcccaattattgtattaaaatatttgtcagtattgaacattttaagtcaacttttcaaattagagaatgccctctcaaaatattaaaatgcacatatatatggcttttttttcaagtcttttatgacagcaacatttccttgaaatatarttttaaatattgtttcattgcttcagttttctttcctggggactccaataaaatgtgtatcagctctcccttgccttggtcctttatcaccttctccagaagacttttgtttcttttagtttcttttttcccatagaaaataacaattttatttatttatttaatagtttccaattttattttagattctggagaacatgtgcaggtttgttatatgagtatgatgctgaggttggggatacaaatgatcccatcaccctgatagtgagcatagtttccaacagttaggttttcaacccttgccaccttcactactttcgacctctattagtcctcagtgtcta

SEQ ID NO: 432047 - DNA, 609 bp, Homo sapiens
tctttgtatggatttttggatctgaatttcattcagttctgctctgattttagttattttgtgtgtgtgtgtgtgctagctttggggtcaattygttcttgtgttttctagttactctaggcgtgatgttaaatcattaatttgaaatttttctaattttttgaggttggtgtgttagccctataaactttcctcttaacactgcttttgctgcatcccagagattttgatatgttttgcctctgttttcatttgtttcaaagaataatttgatgtctgacttaatttcattgtttatccaaaagtgatttatgagcaatttgttaaattcctatgtaattttgtggttttgagggatcttcttgatattgattttaatatttattccactgtattctgagaatatggttggtatgatttcactttttttaaatttattgagacttgctttatggttgagcatgtggtcagttttagagtatgttctgtgtactattgagacaaatgtgtttaatgggtgaaacattctgtagatgtttattagatccaatggtcaagtgtcaaatttaggtccagaagttctttgttagttgtctgcctcaattgatc

SEQ ID NO: 432048 - DNA, 609 bp, Homo sapiens
tctttgtatggatttttggatctgaatttcattcagttctgctctgattttagttattttgtgtgtgtgtgtgtgctagctttggggtcaatttgttcttgtgttttctagttactctaggcgtgatgttaaatcattaatttgaaatttttctaattttttgaggttggtgtgttagccctataaactttcctcttaacactgcttttgctgcatcccagagattttgatatgttttgcctctgttttcattkgtttcaaagaataatttgatgtctgacttaatttcattgtttatccaaaagtgatttatgagcaatttgttaaattcctatgtaattttgtggttttgagggatcttcttgatattgattttaatatttattccactgtattctgagaatatggttggtatgatttcactttttttaaatttattgagacttgctttatggttgagcatgtggtcagttttagagtatgttctgtgtactattgagacaaatgtgtttaatgggtgaaacattctgtagatgtttattagatccaatggtcaagtgtcaaatttaggtccagaagttctttgttagttgtctgcctcaattgatc

SEQ ID NO: 432049 - DNA, 568 bp, Homo sapiens
ttttctttttctttctttccctataacatgatttttttttcccttttattcccctagtcctccctccttggggtgtgtgattgtacagaatgttgggtagggttgtttggctttacttctataactctatgcatttctttcagcagattttatattgggatgtgtggttcaatctacaaggcaatacatagcacttatgggtaagaaccagctgtggccratgtgtctgtgtacatacttgactcttgtttactaggagaagctctcattacctcaggcaatgggctgatctgtggagtgcacagtagtctgagatccctgctcagccttgggaaaacatgggaacatcatcagcaggtccagactgggcagacctatttataggtcccccaatggcagacatgtgcaccagtgctgaggaagaatcaagtgggtgaccaccaagtactcagaggtgtgcccagatgtggagctgagaaacctcctcagctccaagttatctgcatgggtatgggggtggcctaaacccctaatccaggagagtgggtgcttcaggtgcctggagacc

SEQ ID NO: 432050 - DNA, 645 bp, Homo sapiens
gaaaatgaaagaaaaattaattaataactttaaaaatacattcattaagggatgaaaagttttttctaacaccgggttctaaaaggaagaatttagtwtatgtatatattttacttacaaagtgtcattggctgttaatcaaattcattaactctcctgcctcaccacctatgctctttctgaatctactctcaactgcaaatttctctgtggctttgtggaaatgtatgggagccatagggaggatgaatggtgaatagtagcaaggtgcattaatacttttccccaaatccatttgcttctgaatactgtgaacttaataatcagtgagttttaaaatttttataatcaagaatgagaagtcctttgaaaagttcagaaattgatgtgctcacttcaccattggtagaaatcactagcctgtagtacactgctatagcacttggcccatagttggcatgtatccatattgaatgagtaaataactgaatgaaatttagggcatgatatggtttggatctctgtcctcacatgttcaactgtggtccccagtgttggaggtggggcctggagggaggtgattagggggtgcatccttcatgaatggtcaggcaccatccctttggtgctgttctgtgagagtta

SEQ ID NO: 432051 - DNA, 645 bp, Homo sapiens
gaaaatgaaagaaaaattaattaataactttaaaaatacattcattaagggatgaaaagttttttctaacaccgggttctaaaaggaagaatttagtttatgtatatattttacttacaaagtgtcattggctgttaatcaaattcattaactctcctgcctcaccacctatgctctttctgaatctactckcaactgcaaatttctctgtggctttgtggaaatgtatgggagccatagggaggatgaatggtgaatagtagcaaggtgcattaatacttttccccaaatccatttgcttctgaatactgtgaacttaataatcagtgagttttaaaatttttataatcaagaatgagaagtcctttgaaaagttcagaaattgatgtgctcacttcaccattggtagaaatcactagcctgtagtacactgctatagcacttggcccatagttggcatgtatccatattgaatgagtaaataactgaatgaaatttagggcatgatatggtttggatctctgtcctcacatgttcaactgtggtccccagtgttggaggtggggcctggagggaggtgattagggggtgcatccttcatgaatggtcaggcaccatccctttggtgctgttctgtgagagtta

SEQ ID NO: 432052 - DNA, 502 bp, Homo sapiens
atactagttaataagtgtgtgttaaaaattgtttcatgctcaaataagtttgggaaattatgttaatcaatgtaaaatgcagtttgtttattgcaggacttctcagaacctttagtatgttgaggttctttattaatctctaagatgtggcaattaaccaataaactcatcttttcttcattcattaactgtgccatggtatgtcactgtgtaaaatactgttctatgtgtttccatatttkattataacttgagagaaagtaagagaattttgaaggaacatggcttgctgtttctccttcccagagaggtaatgtgacatagtaggaagtatacagattccgggaattagcagacaaagaagcgaatcttgctctttccttttaactgtttaattgacattggattctttccattttctgagccacgaagttttcatttaaaaagggaatgctttcatttggactatagatttttaaatatagattttatagagctccta

SEQ ID NO: 432053 - DNA, 657 bp, Homo sapiens
tgctctttccttttaactgtttaattgacattggattctttccattttctgagccacgaagttttcatttaaaaagggaatgctttcatttggactatagatttttaaatatagattttatagagctcctagttccatgaatcccttgaaattacacaaacrtagatttcctggggaagggatccatagctcctattagattctcaaaggggtccctgatccaaagaagacaactactagactagattatttctaagcctattccagatgaatgttaatccagtacaatttcaaaaaagaaaagtggtactttggtctttatcttactagttgatttttaaactacatgcttgtactagcttaaatgaatggttcaattgaaaggaaatattttattactttcttaataaaatttaagaaagccaaaatttgttttctttttcatgctggaaaactctcaacaggtttgatatgaattgcagagtaacaggaatcccaaagctcaaacaattatctaaatgggtgcagaatttatattgaattctcaaattggaattgagattgcattaaaaatactttgaaagtaattctactcttgagtttttaagtgatttcattttaggtttgtttaagaagaatactgagttgagtgaatga

SEQ ID NO: 432054 - DNA, 657 bp, Homo sapiens
tgctctttccttttaactgtttaattgacattggattctttccattttctgagccacgaagttttcatttaaaaagggaatgctttcatttggactatagatttttaaatatagattttatagagctcctagttccatgaatcccttgaaattacacaaacatagatttcctggggaagggatccatagctcctattagattctcaaaggggtccctgatccaaagaagacaactactagactagattatttctaagcctattccagatgaatgttaatccagtacaatttcaaaaaagaaaagtggtactttggtctttatcttactagttgatttttaaactacatgcttgtactagcttaaatgaatggttcaattgaaaggaaatattttattactttcttaataaaatttaagaaagccaaaatttgttttctttttcatgctggaaaactctcaacaggtttgatatgaattgcagagtaacaggaatcccaaagctcaaacaattatctaaatgggtgcagaayttatattgaattctcaaattggaattgagattgcattaaaaatactttgaaagtaattctactcttgagtttttaagtgatttcattttaggtttgtttaagaagaatactgagttgagtgaatga

SEQ ID NO: 432055 - DNA, 484 bp, Homo sapiens
taccttttcatatacctgtttgccatttacatgtcttgtttaaaaatgtctattgagatctttagtccatttttaaataagattatttttcctatagagtttttcctatagggttgtttgaactccttatatattctgattattaatcctttttcagatggatgctttgcaaatatattctcccattctgcagattgtcacttcactttgttgattgtttcctttactgtgaagaagcttcttaacttgatgtgatcccatttgtccattttgctttgtggggtattactcaagaaatctttgccaagaccaatgtcctagagactctcytcaattttttttagtagttttgtagtttgaggtcctatatttaagtctttaatccattttgatttgatttttgcatatagtgagagatgggggtcaagtttcattcttttgtatatggatacccagttttcccagcatcattaactgcagagac

SEQ ID NO: 432056 - DNA, 619 bp, Homo sapiens
ctgaaccattgttatatatgttgattgatgtctcmtgtctccctaaaatgtataaaaccaagctgtgctctgactactttgagcacatgttgtcaggacctcctgaggctgtgtcacaggcatgcatcctcaactttggcaaaataaactttctaaattaactgagacctgtctcaaattttgggggttcacatttggtaaccatggagggattctgagtggagatgcccctgacttctgacaaatctcctatcggttcttcgtaccagcatgagctaactttatagctcaaaccaataggacaatttgctgaggtcagggagcaacccttccagagaatccctgatctccaaaaatttggtcaagatctaaagtttattttgctgtatactccttttgtttttcttgcttccaacaaggaaggcaagatttcctgtttccaagacaatggaaagcaggtaactcctttatggagtttgagctcgctcccagctgggaagacgagttggagtatttttcctgcttctacaatggtagaaagcagtcttcagcctaagatccatctctgggtaagtagctgaattgtggttttgtcttggctaaagttcaacaaccagct

SEQ ID NO: 432057 - DNA, 619 bp, Homo sapiens
ctgaaccattgttatatatgttgattgatgtctcctgtctccctaaaatgtataaaaccaagctgtgctctgactactttgagcacatgttgtcaggacctcctgaggctgtgtcacaggcatgcatcctcaactttggcaaaataaactttctaaattaactgagacctgtctcaaattttgggggttcacatttggtaaccatggagggattctgagtggagatgcccctgacttctgacaaatctcctatcrgttcttcgtaccagcatgagctaactttatagctcaaaccaataggacaatttgctgaggtcagggagcaacccttccagagaatccctgatctccaaaaatttggtcaagatctaaagtttattttgctgtatactccttttgtttttcttgcttccaacaaggaaggcaagatttcctgtttccaagacaatggaaagcaggtaactcctttatggagtttgagctcgctcccagctgggaagacgagttggagtatttttcctgcttctacaatggtagaaagcagtcttcagcctaagatccatctctgggtaagtagctgaattgtggttttgtcttggctaaagttcaacaaccagct

SEQ ID NO: 432058 - DNA, 561 bp, Homo sapiens
gaaatcaacaaagaaatagcaatttaatttgtactatagaccaattgaacctaaaaatatttgcaaaagatttcactcagtggctatagaatacacattttttctcagcacatggcccattgttatggatatatcatatgttaggtcacaaaccaagtcttaaaacattaaaaaatattgaagtaatatcaagcatcttctctgaccacagtggaatgaaactagaaatcaataacaggaggaattatggaaaatgtaaaaacaygtggaaatttaacaatatgttcctgaatgaccagtggtcagtgaagaaattaagaaagaaatgtaaatatttcttgaaataaatggaaatggaaacacaacatatcaaaagctgtgggatacagcaaagcagtatgaagatgaatgtttatagaaataagcacctacatcaaaaaaagtagaaaattttcaagtaaacaacttaataatacgtgttaaagaactcaaaaggcaagagcaaaccaaacccaaaattagtagaagaacagaaataaaaatcagagcaaaaataaataa

SEQ ID NO: 432059 - DNA, 601 bp, Homo sapiens
acatggttgtgtttcttgcttctattttaccatccaatttgtccttcttgatcagaattagctccaaagtagtagaagttactctgttactttctctgtcttcttaaatgaaaagttgtcagcgtagcaagccgggaaccaatatgtcttctccaacaccagatttcttgctgacatatatgcattttattttcagagaacatttattcaaacatttttgccattccctgattcttataaaatgttaatactttccatattattatctaagcttatttcacatgaaatcattgaatgacagcaaaaaatgtagttgagtcactattctgaagatttgcaaagattcttattcactagcaaaaaatgttaacactattattaaccaagaagttctggatagactggaattccaaaggccaaacagtacccagttataagctacataattaggctctgtcattttaataaaagatatttagattcaagtattatttgttgagcagccattacgtgctatatcttttcctggacttaaaatcctttcctccyaacactattaccagttttaaaggtcaagacaacgagtcaagctttggacttt

SEQ ID NO: 432060 - DNA, 578 bp, Homo sapiens
ggccatgctctaccctaattccatgctagctaatctcctgaggatcacatggtatcaaaacaaaacagtttcaccaatgatttggctttaaaatgggttgaggtttgggaaagacatgcaaagtaaaatacagtgtgagtgrctttttaaattgaatataccttacaaaatagctccaataacatcttttggcgagctcgttcataagggtcatatggaaacagcttccttcctggataagcatcatccaggtactcacaagcaataacagattcatagatcagttgacattggctggtctccaggacaggaatgtggccaaaagggtgctttgtatagtaccattcaggcttgtttctcaggttaatgttgaccacttcatgtcttaaaaagcaaaaggaaaacaagacagaacaaaaatgagaggcatctgcaggcaggcactcttcttgaaagcagaagcaatcagtttaaaagttaaaatttgcaattagtgttttaaggtttaagttttgtataaaatacataacatcatcatcttccttctgcagtaagatgtgtcggatgttttccatgcc

SEQ ID NO: 432061 - DNA, 476 bp, Homo sapiens
tatttgtcatctttgctcctgtaacagtcaatattccttgcaaccaaatatcctcatctgcatgttttactgtaccctaaagacccagacaaccagaaatgtcaccaatgaataacaaaagttcttaaaagaatgactgaagaagcaagataaagagagggaagggatcgaggaaatgaaggagcgaggaagaaggatgtgtggtaggagggtcccatgtctcaggaagggacatgcagagaccgttctttctcactgccctcctgagaggtgacagtgtgctggcagccctcgctcactcttggygcctcctcggccttggcgtctgctctggccatgcttggggagcccttcagcccgccactgcgctgtgggggcccctctctggggtggttgaagccagagccggctccctcagcttgccaggaggtgtggagggagaggcgtgggcgggaacctgggctgtgcgtggcgct

SEQ ID NO: 432062 - DNA, 476 bp, Homo sapiens
tatttgtcatctttgctcctgtaacagtcaatattccttgcaaccaaatatcctcatctgcatgttttactgtaccctaaagacccagacaaccagaaatgtcaccaatgaataacaaaagttcttaaaagaatgactgaagaagcaagataaagagagggaagggatcgaggaaatgaaggagcgaggaagaaggatgtgtggtaggagggtcccatgtctcaggaagggacatgcagagaccgttctttctcactgccctcctgagaggtgacagtgtgctggcagccctcgctcactcttggcgcctcctcggccttggcgtctgctctggccatgcttggggagcccttcagcccgccactgcgctgtgggggcccctctctggggtggttgargccagagccggctccctcagcttgccaggaggtgtggagggagaggcgtgggcgggaacctgggctgtgcgtggcgct

SEQ ID NO: 432063 - DNA, 496 bp, Homo sapiens
catttcttacccattctgttaagttgtatccccactgttcagaacctttaaatacctggtgttattacgttacttttcatttgtttttgtcctatgccaggrtcaaggatccagagttagggcccaacctctctccatagctcatcatattctagatgttttgggcatacatagcttgctttctctctagctcttctcccctactaatctgtaagcttgtgaaggtcagaattattgcaagtcttattcccatgtcacccccaactcctcatgtctaactcacggcagacactcagtccatggttcttagatgaacaaaataaaaggaacaaaattgtctgtcttcaaagggaacccatggaaagaaactaacaagagctaagcacttacactgggaatcagctactgggtatactttctcatttcatcctcatacaagcaatcctaggaaacaggaacatgtccaagttacaaacgaggaaactaaggcacaaag

SEQ ID NO: 432064 - DNA, 608 bp, Homo sapiens
ctgttgattgttgtcctgagtatttgctgcattactttgattagttttctcttctcctttaatcctttgttactaccaaattctctcccactgcaaagtaggagcgagtggactcagtgggccacaaagtcttttgctcccctgaactgggctacagtccagagggcttggaaaccacaayttggagtaaatgtttcctaggaattcagctccacttcctccctcctgggtcacttcagcgaaagcctctcaagggtaggcacaaatactccacaggggggcacccctgcacccaccctctttgggcagctcccatccgagcagcatcatccctggtccagaattcagcagatgcctctgcaggcatcagctgggtgccacagctcgagttgcaggtgcagacagtttagagcttgcgtgggctgttgcatctgccttctgggttgggaggaaggtttttgttggctcaaatatgcacaggctgcacattcaggaaaatcagtttaaaccaaactgaggctaagtgatccccagaacctgggtggagaaagcgatgtttccagatttttcaggcgggaaagctgttattatttcacaatgccccacct

SEQ ID NO: 432065 - DNA, 608 bp, Homo sapiens
ctgttgattgttgtcctgagtatttgctgcattactttgattagttttctcttctcctttaatcctttgttactaccaaattctctcccactgcaaagtaggagcgagtggactcagtgggccacaaagtcttttgctcccctgaactgggctacagtccagagggcttggaaaccacaatttggagtaaatgtttcctaggaattcagctccacttcctccctcctgggtcacttcagcgaaagcctctcaagggtaggcacaaatactccacaggggggcacccctgcacccaccctctttgggcagctcccatccgagcagcatcatcmctggtccagaattcagcagatgcctctgcaggcatcagctgggtgccacagctcgagttgcaggtgcagacagtttagagcttgcgtgggctgttgcatctgccttctgggttgggaggaaggtttttgttggctcaaatatgcacaggctgcacattcaggaaaatcagtttaaaccaaactgaggctaagtgatccccagaacctgggtggagaaagcgatgtttccagatttttcaggcgggaaagctgttattatttcacaatgccccacct

SEQ ID NO: 432066 - DNA, 592 bp, Homo sapiens
gatgagtaaaagttaagcaggcagatgggagaagcagctctctagctagagatgaaaacatgtatggtgggcttgaagaatgaccagcaatcctggcctagagtacagggtcggggaagyggatggcggaagacagaggttggaagtcagctcattttattttctagaataggaaaccatcaaaagttcttaagcagggaggaacaagacgaaagctgggttttaaatacaactctgactgcaatgaggggcgtatgtccccagattctggactattagtagacattcaataaatatttacagaatgaacaactgacttcaagagggaaatagcaagtctggcaagcagtctggccagacttaatacctttccctaaatgctccttttatttattttttttcttgtaagagaacagaagcttttcttctcctgtactgaaccattacaaatgtatataatctgaaattgcaggcataattacataacgtcttacatggttggcagtttcatgagtgttggctttgtcttcctgactgagtttcggctccgtgacagctcaatgccttttgtgttctctcagcattgcccaaa

SEQ ID NO: 432067 - DNA, 592 bp, Homo sapiens
gatgagtaaaagttaagcaggcagatgggagaagcagctctctagctagagatgaaaacatgtatggtgggcttgaagaatgaccagcaatcctggcctagagtacagggtcggggaagcggatggcggaagacagaggttggaagtcagctcattttattttctagaataggaaaccatcaaaagttcttaagcagggaggaacaagacgaaagctgggttttaaatacaactctgactgcaatgaggggcgtatgtccccagattctggactattagtagacattcaataaatatttacagaatgaacamctgacttcaagagggaaatagcaagtctggcaagcagtctggccagacttaatacctttccctaaatgctccttttatttattttttttcttgtaagagaacagaagcttttcttctcctgtactgaaccattacaaatgtatataatctgaaattgcaggcataattacataacgtcttacatggttggcagtttcatgagtgttggctttgtcttcctgactgagtttcggctccgtgacagctcaatgccttttgtgttctctcagcattgcccaaa

SEQ ID NO: 432068 - DNA, 592 bp, Homo sapiens
gatgagtaaaagttaagcaggcagatgggagaagcagctctctagctagagatgaaaacatgtatggtgggcttgaagaatgaccagcaatcctggcctagagtacagggtcggggaagcggatggcggaagacagaggttggaagtcagctcattttattttctagaataggaaaccatcaaaagttcttaagcagggaggaacaagacgaaagctgggttttaaatacaactctgactgcaatgaggggcgtatgtccccagattctggactattagtagacattcaataaatatttacagaatgaacaactgacttcaagagggaaayagcaagtctggcaagcagtctggccagacttaatacctttccctaaatgctccttttatttattttttttcttgtaagagaacagaagcttttcttctcctgtactgaaccattacaaatgtatataatctgaaattgcaggcataattacataacgtcttacatggttggcagtttcatgagtgttggctttgtcttcctgactgagtttcggctccgtgacagctcaatgccttttgtgttctctcagcattgcccaaa

SEQ ID NO: 432069 - DNA, 564 bp, Homo sapiens
caagaaagaggagctggcataggagtcgacatttactccaggcactgtgctaaataaaagatrcaacacatgttgaatttactcattaccactaccttaggagctagatgcttttattattttatttcatattttacaatgagaagactaggcaaagagagggtgcttacagactgaatgagccccctctaaaattcgtatgttgaaatcctaacccccaatgtgatggtattaggagatagggatttgggcagatagagcagatgaatggggttaatgtcctcataaaaaagtccccagagtgctccctggcctcttccaccaactgaggactcagaagaagacaactgtctatgaaccaggaagagggttgtcccccagacgtggaatctgccagcgctttgacccaggacttccagcctccagaactgtgggaaataaaatttattaaaatttataagccaccccgtctatggtagtttgtaatagcaacccaaatggactaagacagaggtgaaatagtttacccaggttagcagtaggagaatctgagatttgaagcca

SEQ ID NO: 432070 - DNA, 564 bp, Homo sapiens
caagaaagaggagctggcataggagtcgacatttactccaggcactgtgctaaataaaagatgcaacacatgttgaatttactcattaccactaccttaggagctagatgcttttattattttatttcatattttacaatgagaagactaggcaaagagagggtgcttacagactgaatgagccccctctaaaattcgtatgttgaaatcctaacccccaatgtgatggtattaggagatagggatttgggcagatagagcagatgaatggggttaatgtcctcataaaaaagtccccagagtgctccctggcctcttccaccaactgaggactcagaagaagacaactgtctatgaaccaggaagagggttgtcccccagacgtggaatctgccagcgctttgacccaggacttccagcctccagaactgtgggaaataaaatttattaaaatttataagccamcccgtctatggtagtttgtaatagcaacccaaatggactaagacagaggtgaaatagtttacccaggttagcagtaggagaatctgagatttgaagcca

SEQ ID NO: 432071 - DNA, 463 bp, Homo sapiens
ctattgcatatatcagtaactcattcctttttattgctgggtagtattccattataccatagcacaatttgtttattcattcaccaattgttacatattgggttgatttcactttggggctgttatgaattaccctgctatgaatattcaagcagaagtatttgcatggacatatgttatttcttttgggtaaatatctgaaagtagaaatgctgggttatgtggtaagtatatgttaaactttataaggaattgccaagctgttttccaaagtgattgtaccatttttgcattttcaccactgatgtatgaaagtttcaaccgttccccatcctcaccaacctttggtattatctgtctttttaattttagccattctagagggtatgtaatagtatcttgttttagtttaatttttattttgtctgrtgactaatgatgttgagtatgtgttcatgtgctt

SEQ ID NO: 432072 - DNA, 549 bp, Homo sapiens
ctttttaattttagccattctagagggtatgtaatagtatcttgttttagtttaatttttattttgtctggtgactaatgatgttgagtatgtgttcatgtgcttgcttgacatattagtccattttcacactgctaataaagacatacccaagacagggaagaaaaggaggttttaayggactcacagttccatgtggctggggaggcctcacaatcatggcagaaggctaggaggagcaagccacatcttacgtggatggcggcaggcagagaggagcttgtgtagggaaactcccctttttaaaaccatcagatctcgtgagacttattcactatcatgagaacagcacgggaaagacctgcccccatgattcaattatctcccaccaggttcctcccacaacacatgggaattcaagatgagatttgggtgaagacacagccaaaccatataatttgccatacatacagtgcattttttagtgaagtgtctgtccgtatctcttgcccatttttaaaaaactttgttgtcttggacttaattggg

SEQ ID NO: 432073 - DNA, 584 bp, Homo sapiens
ttgtgctctcctttactcgttagtctcttctgtactctagctttctaccctcrgtttccttagtaaacttctttactcttgatattttgactttttctttgtgctgctttcctcatttgctcctaaattacttcctgataaaacttgagtaagcatcatcagtgttacacactccatttggaaggtcacatctcgtgtttcattttcagtctctgcagaaaccttagggattagcgtaactgtggtgtgcttctatttctattagataagcaccttcggtgctcagttgacttgtgttttatgtgtgttgtcatactatctgagtagatgactttttcaagtccaagtaaaaggttgagcccaatggcagtaagtgactatttcaataggccaaaaggatggatccacagtctcctttcttctttttgttatgcccaggttgagggtaagagtgacttgatcaaacaaaattgtaattccttcttctttctctctcagatttcaccacagcacacaacacatcgggacgttcagctccaccctccacaaatgtccggagtgcagaccaagagaatggagaaata

SEQ ID NO: 432074 - DNA, 584 bp, Homo sapiens
ttgtgctctcctttactcgttagtctcttctgtactctagctttctaccctcagtttccttagtaaacttctttactcttgatattttgactttttctttgtgctgctttcctcatttgctcctaaattacttcctgataaaacttgagtaagcatcatcagtgytacacactccatttggaaggtcacatctcgtgtttcattttcagtctctgcagaaaccttagggattagcgtaactgtggtgtgcttctatttctattagataagcaccttcggtgctcagttgacttgtgttttatgtgtgttgtcatactatctgagtagatgactttttcaagtccaagtaaaaggttgagcccaatggcagtaagtgactatttcaataggccaaaaggatggatccacagtctcctttcttctttttgttatgcccaggttgagggtaagagtgacttgatcaaacaaaattgtaattccttcttctttctctctcagatttcaccacagcacacaacacatcgggacgttcagctccaccctccacaaatgtccggagtgcagaccaagagaatggagaaata

SEQ ID NO: 432075 - DNA, 584 bp, Homo sapiens
ttgtgctctcctttactcgttagtctcttctgtactctagctttctaccctcagtttccttagtaaacttctttactcttgatattttgactttttctttgtgctgctttcctcatttgctcctaaattacttcctgataaaacttgagtaagcatcatcagtgttacacactccatttggaaggtcacatctcgtgtttcattttcagtctctgcagaaaccttagggattagcgtaactgtggtgtgcttctatttctattagataagcaccttcrgtgctcagttgacttgtgttttatgtgtgttgtcatactatctgagtagatgactttttcaagtccaagtaaaaggttgagcccaatggcagtaagtgactatttcaataggccaaaaggatggatccacagtctcctttcttctttttgttatgcccaggttgagggtaagagtgacttgatcaaacaaaattgtaattccttcttctttctctctcagatttcaccacagcacacaacacatcgggacgttcagctccaccctccacaaatgtccggagtgcagaccaagagaatggagaaata

SEQ ID NO: 432076 - DNA, 584 bp, Homo sapiens
ttgtgctctcctttactcgttagtctcttctgtactctagctttctaccctcagtttccttagtaaacttctttactcttgatattttgactttttctttgtgctgctttcctcatttgctcctaaattacttcctgataaaacttgagtaagcatcatcagtgttacacactccatttggaaggtcacatctcgtgtttcattttcagtctctgcagaaaccttagggattagcgtaactgtggtgtgcttctatttctattagataagcaccttcggtgctcagttgacttgtgttttatgtgtgttgtcatactatctgagtagatgactttttcaagtccaagtaaaaggttgagcccaatggcagtaagtgactatttcaataggccaaaaggatggatccacrgtctcctttcttctttttgttatgcccaggttgagggtaagagtgacttgatcaaacaaaattgtaattccttcttctttctctctcagatttcaccacagcacacaacacatcgggacgttcagctccaccctccacaaatgtccggagtgcagaccaagagaatggagaaata

SEQ ID NO: 432077 - DNA, 481 bp, Homo sapiens
cgggaaacttattatggcttcaatcttgttactcattatctgttcatttgagttttctatgtcctcatgattcaacctggtagtttttatgygtccaagaatttattcatttcttctaggatttccaatttgttggtgtatagttgtacatcataatctctgatgactatgtctcttttttgtttctgattttatttatttgggtcttctctctgcctttatcagtctagctaaaggcttaatgattttgtttatatttttagaaaactaactttttgtttcattaatcttctgtatttttagtcttaatttcatttatttctgctctggtattattaatattttattctttctactaatttgggtttggtttgttcttgttttttagttccttgagggcaacattaggttgtttatttgaagtctttctacttttttgatgtaagtatttattttctaaactttcctcttagtactgctt

SEQ ID NO: 432078 - DNA, 416 bp, Homo sapiens
gatgaaaggtttcctgggacacacacaaacacacaaattgcagcatagaaacmaggtctcctgaatatccctggaacaggcctgctttaccttcactttccaacccctacattggaggtgtccgtggaagcccacccagcatggtcctccagggtggaggcctttcagtgactgcgtctatgtcatgagtcctgatgcaatttttctctgtatttctctttagcttcatcaagcaaacttactcagccaagactcgtggtatctgccatgcagctgcatcccgtccaggggtaggcatgagctggaaatcctcttcttcagtccagagctgctatgtccaagcatgcaataggagatggtataaactttccagagactagcctcataccctgcctctccttggcatgcagaaccta

SEQ ID NO: 432079 - DNA, 433 bp, Homo sapiens
tcaacatggggaaaccccatttctrctaaaaatacaaaaattagttgggtgtagtggtgggaacctgtaatgccagctacttgggaggctgagacaggagaatcactgcaacctgggaggcagaggttacaatgagccgagattgtgccaccacactccagcctgggcaacagaacgagactctgtctcaaaaaaataaaaagaaaaaacagatcaaaacaagcaggcataaagtgacttcagattaaagttgcttttgcttctagaattaaagaaaatgttcagcaattgttgatataatacatttcctaaatcaaaattagtctataaatcctctgtaatcaacatggccctttcccaacattatctttgttgagtctttccttccaccttgatacacggttgacaacttcttaatttatattaacagtct

SEQ ID NO: 432080 - DNA, 567 bp, Homo sapiens
ccttgctttctgggcactaggtaattctcttgaatttatttccaagtctgggcagggatacggaccccagcaacactgcagaatttcctgccaggctgacgggatgaaggctcagagttaagtgagagcttcatttttaaaaagagagacaggrcagccctttgggtgtgagggcagctagaagacatatgagggagctgcgtttgcatagcagggacactatttttacttagtttgtaaatctatttggaatggctgagtagggattctaatggtattactaaagccaccaggccatgtctcagcaccaccattattggcttcagatttaatttgattaaagcaaatgaaataaagtgacatggtgtgggtgcaaattcagaaccctctaacctgttactggcatctgcttctggtgtctagccaagttcctagaagataatcagtaaatgttgttgaaggagtggatgaattcttagggatctaagctatttgcttgtattcctctatcttttgagcttgtgctttaaaaaattataagctctacaaaattctatatgataaaag

SEQ ID NO: 432081 - DNA, 567 bp, Homo sapiens
ccttgctttctgggcactaggtaattctcttgaatttatttccaagtctgggcagggatacggaccccagcaacactgcagaatttcctgccaggctgacgggatgaaggctcagagttaagtgagagcttcatttttaaaaagagagacagggcagccctttgggtgtgagggcagctagaagacatatgagggagctgcrtttgcatagcagggacactatttttacttagtttgtaaatctatttggaatggctgagtagggattctaatggtattactaaagccaccaggccatgtctcagcaccaccattattggcttcagatttaatttgattaaagcaaatgaaataaagtgacatggtgtgggtgcaaattcagaaccctctaacctgttactggcatctgcttctggtgtctagccaagttcctagaagataatcagtaaatgttgttgaaggagtggatgaattcttagggatctaagctatttgcttgtattcctctatcttttgagcttgtgctttaaaaaattataagctctacaaaattctatatgataaaag

SEQ ID NO: 432082 - DNA, 499 bp, Homo sapiens
aatgaacactgactgggaggtgactttctgctgggatagagaagggagagaacaagagaagatcctgaaggaaatatgtcatatcctttttcgctttcctttgtgatctgaaaagacttaagcgtaacaaagatggctctaatatatttttaaagtactgcagtgggagataaaataaacagatgggagggaacacaaacagcttgaattttcccctatgattctcactgttcactgggctccctccatytaagtactacgggatagcaaacctgtcgcagcttcaggatattcctataaggcaggtagaggggagattcgagtaaagaaaggaacacagcatttaagggtggtgtccctgaagtctctaaaatgctttctcaatatgaaagtggcaattagtatgcagcgagtatattctttggccacatatgttttgcttttcaaaaagcaaagcacttatttgcatgctatttgtttttaactgtcagggagacac

SEQ ID NO: 432083 - DNA, 499 bp, Homo sapiens
aatgaacactgactgggaggtgactttctgctgggatagagaagggagagaacaagagaagatcctgaaggaaatatgtcatatcctttttcgctttcctttgtgatctgaaaagacttaagcgtaacaaagatggctctaatatatttttaaagtactgcagtgggagataaaataaacagatgggagggaacacaaacagcttgaattttcccctatgattctcactgttcactgggctccctccatctaagtactacgggatagcaaacctgtcgcagcttcaggatattcctataaggcaggtagaggggagattcgagtaaagaaaggaacacagcatttaagggtggtgtccctgaagtctctaaaatgctttctcratatgaaagtggcaattagtatgcagcgagtatattctttggccacatatgttttgcttttcaaaaagcaaagcacttatttgcatgctatttgtttttaactgtcagggagacac

SEQ ID NO: 432084 - DNA, 499 bp, Homo sapiens
aatgaacactgactgggaggtgactttctgctgggatagagaagggagagaacaagagaagatcctgaaggaaatatgtcatatcctttttcgctttcctttgtgatctgaaaagacttaagcgtaacaaagatggctctaatatatttttaaagtactgcagtgggagataaaataaacagatgggagggaacacaaacagcttgaattttcccctatgattctcactgttcactgggctccctccatctaagtactacgggatagcaaacctgtcgcagcttcaggatattcctataaggcaggtagaggggagattcgagtaaagaaaggaacacagcatttaagggtggtgtccctgaagtctctaaaatgctttctcaatatgaaagtggcaattagtatgcagcragtatattctttggccacatatgttttgcttttcaaaaagcaaagcacttatttgcatgctatttgtttttaactgtcagggagacac

SEQ ID NO: 432085 - DNA, 334 bp, Homo sapiens
tctactgcctttggggcagtgggtctagggatgcagtggatgtgggggacaaacaaataccattcatcttctggctaccctatttaactcctgaaaactggaacagggatgtcgacagtcagaggaggagaagggcagaagtgtgcactagaacaccagatgtttgaggctgaaaatgatatggatgcagaataaatagccccaaaataaccttctatctgtggtgtcccgtcccccwccttggccaggcatcaaagctacatgttgttcatttaaaacatgaacatcctgatcccaggactttgaagataggaatcacccatcccaaaccaga

SEQ ID NO: 432086 - DNA, 383 bp, Homo sapiens
cccgtctagttttctgcaaatacttctgggacactttgaagacattttgttgcccatgatgagactgcttaagtttacatacctgtaaacatagaagtcctttcccatccatttcaaaggkggttgcctaggtgacagtctcttttccatgacaaaaggggatggtatcctagaattacattatcaattttggacactctcaatgcctccctgtgtaatttgtatccccagtctccacatctttagtcctctctatcttctccagtttaggtaaacccaaagctatttttcactgggaaaacattttagacatttgctaagtccagggagaaaagtgaatactgagtacacaaagtaaatatgttctaatatcatgggccttg

SEQ ID NO: 432087 - DNA, 575 bp, Homo sapiens
tgcatgccagcagcctagtgccactctatcaactgctgctgctgcggtgccaagtttacgtgggggaaatggattctgaagttttcagcagtttctgcagctcccaccaactccggggtcgtcctccctgccccctcactcaccccagccacagaaagtcaagcgtatcgttagggttgccctctttaamccttctctttttggagtggcgttcgcgcctctcctctttctcagactctagctggtccaagcaccggagctttctgggagagggcgatggagaaggggacagacagcggccggcccggggggtgtccgaacaggcaggttggtgggttaaggtcttaatcttgactcgagatctctccccggagttcacagagtaggcgacgaagccgaagcagctggagcgcgacccggaggagtctgacttctcgttgtcttcataattttcattcgttgctttcttcgtggacttgcggctgggggaggatccccgcttcccgcccccgagggagttataattatccactttgagagcagccccttcccactgaaatgtccctaaagtgggc

SEQ ID NO: 432088 - DNA, 530 bp, Homo sapiens
tatctcaataaatgtttattggtttatcattattagtagtacttctgtgatttaaggggtgccatgattttcccactagcctgatatatagttcttaaaatgctatcattatgtgttaattcctttgtgttaaggctttttggccccaataaaccacattataaattaagaggaatttattcagttagcaaagcctgcttaggtacggtatgccagaatttctccataatagtgcttgcttttgaaggagcttattaggtgcttttctccttgattgccagctaacwgcaaaatgctagataaatctggatttggttagagatgaggggattattttaacgttaactttgaaagatgacagatgacttaggaaaggcaagcctgagggggtgacttcccctggggctatgggcaaccaggaaacaccagggcagcgtgtgtatccagggtggaaagtttagtcaaagatgagagataggcaccagtgggcaggaagaggaaacacctaattcagcaaaactcggcttcct

SEQ ID NO: 432089 - DNA, 554 bp, Homo sapiens
aagttattttttagatttggagttatacaacagaattcctaactttgttttgatatgtagataagccctgatccagcttattttttctttgctaagtaactgaaactcttcacagcatgagttcaaactgacaaatttcaatttacagcaaattgaagtagaaacttaaagctcaaaaccctctaagccaagcatttttctgggcattgatactcctcttgggcatccccttcagtggtcttgcagcatgaatcacaccccttcctggagagacccgggccatatttagacagtaataaaggactagaacattttttctcatattcatactaaatctatttcccaatgtwttctacccatgagccacaattgtgtgtttgacatcccagattataagccccttccattcaaaggtccttgcaaataattcaagacaactattgcatgagtacccattcctccatgtttaaattcccaatttcttgaacctatcttcacagtatgaggtttggagtatcctccccatcctattcacttcattctgaatatgtttc

SEQ ID NO: 432090 - DNA, 581 bp, Homo sapiens
tactggtttctacaaacctgtttcacagggtcttctgcttctcaggagatgcttcacccttgaatgatcctgatagaagaagggttttccactcactgggaccttcagtccagcatgcacatttgggaagattgttcaaagagcaatgagcgaggaagrcagaacagctcagcccactatgcagggtcaaaaccaacaagaaatttgatgcagatgatagagccacatcaccatcgtatccaggaatggctttgtaacaactcactattccacccctgaaagtaatcagagaatttatttacaatctgttagctaattgttcccatactgagcacagatcttaactaaatgaccttaactaagtgacatttaaatttctgctctctgatatgaaagttaccatgctcatatttgggtagtagggtttaatttaatttgcctaagattgcagctgatttctgagatcccaaaaacaaatttgatgcacatatcacaagatattatgtaaatgctgagaagacagggactttccaggcagaagagggatgatgcacatcagctgtacagcatccagcaagttg

SEQ ID NO: 432091 - DNA, 439 bp, Homo sapiens
ggcgtgttggttataattcgaccacaaaatgaacatgtagatccatagtcttcttttccaaagtgtgactgaggccaggcatggtggcttatgctgtaatcctgccacctcaggaggctacagtggaagaattgyttgagtccaggagttcaagaccagcctgagcaatgtggcaagacctcgtctctacaaaaaacaaaaataaaaattagaccaatgtcgtggtgcactcctgtagttccagctgcttgggaggctgaggtaggcggatacattgagccagggaggtcaagcctgcagtgagccatgtccatgccatagcacttcagtctgggtgacagagcaagaccctgtctccaaacaaaataaaagaaaacaaaaacaaaaaagtgaagctgcttagtatgtttttctgacatgctaaacaatgacatgatga

SEQ ID NO: 432092 - DNA, 439 bp, Homo sapiens
ggcgtgttggttataattcgaccacaaaatgaacatgtagatccatagtcttcttttccaaagtgtgactgaggccaggcatggtggcttatgctgtaatcctgccacctcaggaggctacagtggaagaattgcttgagtccaggagttcaagaccagcctgagcaatgtggcaagacctcgtctctacaaaaaacaaaaataaaaattagaccaatgtcgtggtgcactcctgtagttccagctgcttgggaggctgaggtaggcrgatacattgagccagggaggtcaagcctgcagtgagccatgtccatgccatagcacttcagtctgggtgacagagcaagaccctgtctccaaacaaaataaaagaaaacaaaaacaaaaaagtgaagctgcttagtatgtttttctgacatgctaaacaatgacatgatga

SEQ ID NO: 432093 - DNA, 550 bp, Homo sapiens
atcattttcaaactacagaaaatcaaaagaaagaacaaattctgaaagaagccagaggaagaaacaccttacctacagaggaacaaagataagaactacatcagcctwctcagaaactatgcaagcaagaagaggatggattgaaacgtttaaagttttgggagaaaataccaccaacttagaattctgtaaactgcaaaattattcctaaaagtgaaggagaaataaagactttcccaaactaaaattgaggaaatttgttgccagtgggcttgccttgcaaaaaatgttaaaatacattttttagagagaaagaaaataatatgtcagaaactcagatctacataaagaaagaaagagcatcaatgaagggatatgtgaaggtaaaatcaaaactctaaacaaattcttaattgatataacagttaacaatttgttcaaaacaataatagcaataaggtatttatgtttgcttatgtatacatatatgcttacatatgcttatatatgagcaaaatgaacaacaataatgatacaagggatggaaggg

SEQ ID NO: 432094 - DNA, 579 bp, Homo sapiens
cccattatttatgcaagcttcatggtaacctcaaatctaaacatacaacagatacacaaaaaattaaaagsaataaattaaaacatatcaccagagaaaaaccaccttcactgaaagtaatccccatgtgtcaagagagggacctagtgggaagtaaatagataatggggacagttttctccatgctgttctcatgatagtgaggaagttctcacaagatgtgatattctaaaagtggcagtttcccctgcatgctctctttctctggccaccatgtaagatgtgccttgcttcccctttgccttctgccatgattgtaagtttcctggggcctccccagccatgcagaactacaagtcaattaaacttctttcctttacaaatgcctcagtctgaagcatttctttatagctgtgtgaaaatggatgaatgtagaagaaggaagagaagaccacaaaagaaacgaaactaataagaatatggcaaggtttagctcttacttatcaacaacaacactaaatgtaaatggactaaaatatctaatcaaaagacagagtggctgaatggataaataagatc

SEQ ID NO: 432095 - DNA, 579 bp, Homo sapiens
cccattatttatgcaagcttcatggtaacctcaaatctaaacatacaacagatacacaaaaaattaaaaggaataaattaaaacatatcaccagagaaaaaccaccttcactraaagtaatccccatgtgtcaagagagggacctagtgggaagtaaatagataatggggacagttttctccatgctgttctcatgatagtgaggaagttctcacaagatgtgatattctaaaagtggcagtttcccctgcatgctctctttctctggccaccatgtaagatgtgccttgcttcccctttgccttctgccatgattgtaagtttcctggggcctccccagccatgcagaactacaagtcaattaaacttctttcctttacaaatgcctcagtctgaagcatttctttatagctgtgtgaaaatggatgaatgtagaagaaggaagagaagaccacaaaagaaacgaaactaataagaatatggcaaggtttagctcttacttatcaacaacaacactaaatgtaaatggactaaaatatctaatcaaaagacagagtggctgaatggataaataagatc

SEQ ID NO: 432096 - DNA, 579 bp, Homo sapiens
cccattatttatgcaagcttcatggtaacctcaaatctaaacatacaacagatacacaaaaaattaaaaggaataaattaaaacatatcaccagagaaaaaccaccttcactgaaagtaatccccatgtgtcaagagagggacctagtgggaagtaawtagataatggggacagttttctccatgctgttctcatgatagtgaggaagttctcacaagatgtgatattctaaaagtggcagtttcccctgcatgctctctttctctggccaccatgtaagatgtgccttgcttcccctttgccttctgccatgattgtaagtttcctggggcctccccagccatgcagaactacaagtcaattaaacttctttcctttacaaatgcctcagtctgaagcatttctttatagctgtgtgaaaatggatgaatgtagaagaaggaagagaagaccacaaaagaaacgaaactaataagaatatggcaaggtttagctcttacttatcaacaacaacactaaatgtaaatggactaaaatatctaatcaaaagacagagtggctgaatggataaataagatc

SEQ ID NO: 432097 - DNA, 579 bp, Homo sapiens
cccattatttatgcaagcttcatggtaacctcaaatctaaacatacaacagatacacaaaaaattaaaaggaataaattaaaacatatcaccagagaaaaaccaccttcactgaaagtaatccccatgtgtcaagagagggacctagtgggaagtaaatagataatggggacagttttctccatgctgttctcatgatagtgaggaagttctcacaagatgtgatattctaaaagtggcagtttcccctgcatgctctctttctctggccaccatgtaagatgtgccttgcttcccctttgccttctgccatgattgtaagtttcctggggcctccccagccatgcagaactacamgtcaattaaacttctttcctttacaaatgcctcagtctgaagcatttctttatagctgtgtgaaaatggatgaatgtagaagaaggaagagaagaccacaaaagaaacgaaactaataagaatatggcaaggtttagctcttacttatcaacaacaacactaaatgtaaatggactaaaatatctaatcaaaagacagagtggctgaatggataaataagatc

SEQ ID NO: 432098 - DNA, 495 bp, Homo sapiens
caattttgaaaacaatacaaacacctggaaattaaacagtatgcttctgaatgaccagtgggtcaacgaagattaagagggaaatttaaaattttcttcwaacaagtgataatgggcacacaacataccaaagcccataagatacagcaaaatcagtactaagcaggaagtttatagctataaaagcttacatcaaaagaagaaaaacttcaaataaacaacctaatgagacatcttaaataactagaaaagaaagaacaaaccaaacacaaaatttgtagaagtaataaacatcagaccagagataaatgaaattgaaatgaagcaaacaatacaaaagatcaacaaaacaaaaaatttgtttccttaaaaggtaaacaaaattgacaaaactttagtcagactaagaagaaaaagagggaagacccaaataaataaaattagagatagaaaaggggacattacaactgaaattcaaaggcttgttagaggcta

SEQ ID NO: 432099 - DNA, 575 bp, Homo sapiens
gcatttctatatgccaacagtgtgagcaatgtgaaaaagaaataaaaaagcaatcccatttacaatagccactaaaattaatacctagaaattgatttaaccaaagaagtgtgtattagtcaaggttctctagagggacagaactaataggatagacrtatatataaaggggagtttattacggggtactaacttacacaatcacaaggtcccacaataggccatctgcaagctgaagagtgaggaagccagtctgagtcccaaagctgaagaacttggagttcgatgttcgagggcaggaagcatccagcacaggagaaagatgtaggctgggaggctaggccagtctaatctctccatgttcttctgcctgtttttattccggccatgctggcagctgattagattgtgcctacccagattgagcgtgggtctgcctttcccagtccgtctttcccagtccactgactcaaatgttaatctcctttggtaacactttcacagacacacccaggagcaatactttgcatccttcaatccaatcaagttgacactcagtattaaccaccacaaag

SEQ ID NO: 432100 - DNA, 440 bp, Homo sapiens
caaaaaaaaaaaaaaaaaaagtgatagaatcaggatttaaatccagatatgacttaatccaaaatacaaactctttccattagaaaaaatatctctccttccaagactccaaaacttatgtgcacctaaagtaaacataaagcaagatagagtgttacaaaacctgcatacaaaaaaggaaargaataaatattggagccaataacatcgcttactaaagggctgtgtatatcattatagaaggacccaaggaaccttcctagattattcctcacaaagggctataatttatcaaagggctaaccctgttctaaatgaaagaaatttttcacttattggtagtcaggattctcaggattactcaaccttgaatgtgagagaataaagacttggataactagtgttagttagaaagtcccaaatgtctgttgacaggataa

SEQ ID NO: 432101 - DNA, 617 bp, Homo sapiens
actaaaccacgccatacaatttggagttgcggttcaatcaaagagttaaacctgacttaagagttaaatatatttggtcactagtacaaatattttctccaaagactagtattctggataattagtgttttgcttaaacttgcagacttttgcctacagtggaatctgactcaagccttttgcatgaaaaatccatttcacaatcaattcaaatagcaaaatcacttcgctgttttgtttctggaacatctgccaaaaggaagggccaaatatagyaatgtattttctctgttggaatctccattatttaagctgaatagaacttttgagatgataatgtttcaggaacaagacagtgcacaaaactgtgctcctttacatgctctggaaggtcacaaacaagcgtttcctggtctaagcgcaatagtttcttccttttatgcctcaagcaggtctttgggatgccacacatcaaaacacagcacttcttcattcattttaatgggtggcgaggagtttggaatttttaggttcacaaactgatacagtcttactttgacctttatcagcatgctaaatgccctccagtccttcgcactggagtgtggcgagcagag

SEQ ID NO: 432102 - DNA, 617 bp, Homo sapiens
actaaaccacgccatacaatttggagttgcggttcaatcaaagagttaaacctgacttaagagttaaatatatttggtcactagtacaaatattttctccaaagactagtattctggataattagtgttttgcttaaacttgcagacttttgcctacagtggaatctgactcaagccttttgcatgaaaaatccatttcacaatcaattcaaatagcaaaatcacttcgctgttttgtttctggaacatctgccaaaaggaagggccaaatatagtaatgtattttctctgttggaatctccattatttaagctgaatakaacttttgagatgataatgtttcaggaacaagacagtgcacaaaactgtgctcctttacatgctctggaaggtcacaaacaagcgtttcctggtctaagcgcaatagtttcttccttttatgcctcaagcaggtctttgggatgccacacatcaaaacacagcacttcttcattcattttaatgggtggcgaggagtttggaatttttaggttcacaaactgatacagtcttactttgacctttatcagcatgctaaatgccctccagtccttcgcactggagtgtggcgagcagag

SEQ ID NO: 432103 - DNA, 617 bp, Homo sapiens
actaaaccacgccatacaatttggagttgcggttcaatcaaagagttaaacctgacttaagagttaaatatatttggtcactagtacaaatattttctccaaagactagtattctggataattagtgttttgcttaaacttgcagacttttgcctacagtggaatctgactcaagccttttgcatgaaaaatccatttcacaatcaattcaaatagcaaaatcacttcgctgttttgtttctggaacatctgccaaaaggaagggccaaatatagtaatgtattttctctgttggaatctccattatttaagctgaatagaacttttgagatgataatgtttcaggaacaagacagtgcacaamactgtgctcctttacatgctctggaaggtcacaaacaagcgtttcctggtctaagcgcaatagtttcttccttttatgcctcaagcaggtctttgggatgccacacatcaaaacacagcacttcttcattcattttaatgggtggcgaggagtttggaatttttaggttcacaaactgatacagtcttactttgacctttatcagcatgctaaatgccctccagtccttcgcactggagtgtggcgagcagag

SEQ ID NO: 432104 - DNA, 571 bp, Homo sapiens
accaatagcagaggtgtatttaatgtattatctgtattacaatgaagagtgtgggggaaggcagacaaggagaggcgagggaggggaagaagagagtcaataattactgaatgcttacaataagctgggcactttttaccatgtgcctcatgcaaccctcacaagtgctcttcaaatgagtcatttttatcaacaatttttacatagggaatatgaagcctagaggcagggctagtatgatgactgtggaactctgcagtcgcacagagccccacacttagaggggcccccactctyggtttaatgctttgctgttgccatattgaaattttcaataatttttttaacaaggggccccatgtttttgtcttgcactgggtcctacaaattttgtagctggtcttgcctggagaggttaaacccctttactcaaattaaggtctatgtcacgccaaagcacaaggccagaataaaacacctgctttgctcctctccacctacaccaccaaacagacgttcttggactatttatttagcagagaggctgacagttggcaggggaggagggagg

SEQ ID NO: 432105 - DNA, 565 bp, Homo sapiens
tgccctctgacccctatatgctccttacaggggggtggaaagctgttggcctgtaaatgggcaataataaggatcaaaactccgacccccaaagggctggaattggggtaaagcttgaaagactatatgaggattatgaggcgtctttatactcacattctactaagatgctgtaacaaaaacacatatattcagccttaaaaaggagtaaaattcagatacatgataaaacacggatgaatggtaaaacattgtgccaaatgaaataattcagacataaaaggacaaatattctatgattctacttatatgaggtacttagaataggcaaagtcatagagacagaaagyagaatagtggttatcaaagtagaacagtggtgaccaaagggaacggggagctgttttttaatgggtacagagtttcagtttgggatggtgaaaaagtccagagagggatcacactaatggttgcacaacaatgtgaatgtactaaatgccattgaattgtacactgggaagtgaataaagtggtttttttctttttttttttttttgtttgagac

SEQ ID NO: 432106 - DNA, 565 bp, Homo sapiens
tgccctctgacccctatatgctccttacaggggggtggaaagctgttggcctgtaaatgggcaataataaggatcaaaactccgacccccaaagggctggaattggggtaaagcttgaaagactatatgaggattatgaggcgtctttatactcacattctactaagatgctgtaacaaaaacacatatattcagccttaaaaaggagtaaaattcagatacatgataaaacacggatgaatggtaaaacattgtgccaaatgaaataattcagacataaaaggacaaatattctatgattctacttatatgaggtacttagaataggcaaagtcatagagacagaaagcagaatagtggttatcaaagtagaacagtggtgaccaaagggaacggggagctgttttttaatgggtacagagtttcagtttgggatggtgaaaaagtccagagagggatcacactaatggttgcacaacaatgtgaatgtactaaatgccattgaattgtacactggraagtgaataaagtggtttttttctttttttttttttttgtttgagac

SEQ ID NO: 432107 - DNA, 610 bp, Homo sapiens
ttttgactataaacttgatgactgtatttatcttatatacagaaacttgctgcactgagcaacacaygattttctactaccatgatagcgttcattttaatgttcatatgcagaaaaaatgaaacagtagccactgataatgaattgtatactctagagccatctggtgatttgtgccttgggttaagagttattgggttgtcatccagttatcgaatatcttcttatttttcttcatctttttgctgttcagctcaaggacattcatcaccccgtgggtggtcccttgctaagacttcacctgctctgcagtatgctctgtctcttctccccagccctaccaggctgcttccttcctcttggctctagtactgtcccatcctctgctcactgatggtgtcatctttggtgatcatatgagaggcaggagtccctactgtgggccttgagaatgatgtctggaccagggtctgaggactgatcccccaaagaggtgggggccccttagagcctacatagctattctcccagcttcaaaccggcctctagtcatcttccttgttgaagaccatggccatccccttctctgaggtcctgtcatgcccccacc

SEQ ID NO: 432108 - DNA, 532 bp, Homo sapiens
aaacaatcatctgtttattcattcagtctgccatccatccatccatccatccatccatccatccatccatccatccatacacctatcatctgtacatataagcaggcagccatccaggctttccgtaccctgtacacaatactaggactttggcagacccaagactagatgttttcagggagcttctagtctaatataagactacctcccatacacaaccagacttctgggtgaaaagtgatttttgtctttgagaaaatgaaattctagaagctaagaaacggggaaagctcctctcctttggggagtccttgagggcatttttcccrggaaaagggatttggacataaaactgtggaagctggagaccagggatcccagcaggggaccagtgagagcagagggccagaggttcgacaagggcatgctgggggagccatcctgccccacttctttgtctctgcttggctgagtagagactacagtaccaataaaaggctgctgttcagctgccacattactggcaagaaca

SEQ ID NO: 432109 - DNA, 532 bp, Homo sapiens
aaacaatcatctgtttattcattcagtctgccatccatccatccatccatccatccatccatccatccatccatccatacacctatcatctgtacatataagcaggcagccatccaggctttccgtaccctgtacacaatactaggactttggcagacccaagactagatgttttcagggagcttctagtctaatataagactacctcccatacacaaccagacttctgggtgaaaagtgatttttgtctttgagaaaatgaaattctagaagctaagaaacggggaaagctcctctcctttggggagtccttgagggcatttttcccaggaaaagsgatttggacataaaactgtggaagctggagaccagggatcccagcaggggaccagtgagagcagagggccagaggttcgacaagggcatgctgggggagccatcctgccccacttctttgtctctgcttggctgagtagagactacagtaccaataaaaggctgctgttcagctgccacattactggcaagaaca

SEQ ID NO: 432110 - DNA, 532 bp, Homo sapiens
aaacaatcatctgtttattcattcagtctgccatccatccatccatccatccatccatccatccatccatccatccatacacctatcatctgtacatataagcaggcagccatccaggctttccgtaccctgtacacaatactaggactttggcagacccaagactagatgttttcagggagcttctagtctaatataagactacctcccatacacaaccagacttctgggtgaaaagtgatttttgtctttgagaaaatgaaattctagaagctaagaaacggggaaagctcctctcctttggggagtccttgagggcatttttcccaggaaaagggatttggacataaaactgtggaagctggagaccagggatcccagcaggggaccagtgagagcagagggccagaggttcgacaagggcatgctgggggagccatcctgccccmcttctttgtctctgcttggctgagtagagactacagtaccaataaaaggctgctgttcagctgccacattactggcaagaaca

SEQ ID NO: 432111 - DNA, 635 bp, Homo sapiens
caccctttttaggtgcatagttccaggaattgtgataaacacatgcaatcttgtgamcactgccacagtcaagatatagaacagtggcatcactccggaaagcgtcctctgcctctttggagtcaagctgcccctaaaatccctcagtccttggcccccagaaaccactggtctgttttctgtcctcctatttttgccttttccagcctggcatgtggtggatcatatggagctggaatcacacagtacttagccttttgagtctggcttctctcactcagcagaatgcacccgatatccatctgcatggtgcctgtatccgtaattttaataatgagcggtgttcattgcaaggatatatcacaatttgttgagggacattttgttgtttccagactggacaactacaaataaggccattataaacattcacatgcaagtttttgtaaacgcgaattttcatttttcttgcgtgagtacctgtaagtgggatggccaggtcataaaatcaatatatggttaactttataggaagctgccaaactgctttccaaagcagctgcaccattttacatttgtaccggtaataaatgggaggcctggttgttctatatcctcatcagcactagctattg

SEQ ID NO: 432112 - DNA, 540 bp, Homo sapiens
tatgtaaaattcatttatttccttccaggacttacatgttttctacacttaatttaccaacayatccggagtgtattttgatgtacaaatgagatacggatcagatttaatatttttatctagatcattaagcaccttcaaaatgatctgaataccatttattgaataatccatcttcctccaaataatggaaatgcaacctttatcacattgcaaagttttatatctgcaggtctttttctgaattttctattgagttttcttgctttgtttccaatcagcctgacacttcagttattacaattccgtgtgtgagaatacctggtatagctaaatccataatttcttttcttttctaaaaaggatttttttatgacttaagttttcaaattcactatagaccatttccctcatgataatttactggaatttcacattttatagattgagaggaaggaaataggtatcaagtcaatattaactcccatgctatgcatgttattatttgattttttgtttttatggttttattcatatgga

SEQ ID NO: 432113 - DNA, 519 bp, Homo sapiens
ctactattagctctcatccagtttttgcaacaaccccctcactggtctctcacctcctgtcctccacctgycacccccatcctgacctcttcgccttgtcagaacattctgtgtgatacattgatacacagagcagactcatgattcatctgcttataatgttccgctgatttcacatctcattctgaaggaaaggtgatgggggagaggaagagagcaatgggcaagagttcagagaactggctcccatgccaccctcatccctgactctggaaaagtgggcatctatctccatgacccagtttcctcttcatatggtttgactctgtgtccccatccaaatcttatcttgcgttgtaatcaccacatgtcaagggagggccctggtgggaggtgattggatcatgggggccatttccccatgctgttttcgtgatagtgagtgagtgcttacgagatctgatggtttaaaagtgtggcacctcccctcttgctctgtctctcctgtggccatgtaga

SEQ ID NO: 432114 - DNA, 519 bp, Homo sapiens
ctactattagctctcatccagtttttgcaacaaccccctcactggtctctcacctcctgtcctccacctgccacccccatcctgacctcttcgccttgtcagaacattctgtgtgatacattgatacacagagcagactcatgattcrtctgcttataatgttccgctgatttcacatctcattctgaaggaaaggtgatgggggagaggaagagagcaatgggcaagagttcagagaactggctcccatgccaccctcatccctgactctggaaaagtgggcatctatctccatgacccagtttcctcttcatatggtttgactctgtgtccccatccaaatcttatcttgcgttgtaatcaccacatgtcaagggagggccctggtgggaggtgattggatcatgggggccatttccccatgctgttttcgtgatagtgagtgagtgcttacgagatctgatggtttaaaagtgtggcacctcccctcttgctctgtctctcctgtggccatgtaga

SEQ ID NO: 432115 - DNA, 494 bp, Homo sapiens
cagggaatgtctagctgccagcctggggtggagacagccaccaccactcccatctctgagatgcatgaagtgagtgcatgtgccccactgcaactgcccctgcatttgccgccaagttgccatctgatggcagtgactggggtcagggagagggaggtcgcatggggcygggggccctggaggactcatctggtgggggggaagggcaggaccaagcatgtgccagtgtctcaccggagttcaccaacacatcacaagctcaaagataaaacttaagaatttcaagacagtgacggcacggtatgaaatgccttctgattctgtgccagccctgactgttctttacaggcaatgacaggttgtcaagggtaatcttaagcaggcaccctgtttactttcgtgcaccacctttagaacataatcctctttgcgccctcagagatccagaagaaggtttggtccgtgtctgggtgccagcagagccggcattcaca

SEQ ID NO: 432116 - DNA, 494 bp, Homo sapiens
cagggaatgtctagctgccagcctggggtggagacagccaccaccactcccatctctgagatgcatgaagtgagtgcatgtgccccactgcaactgcccctgcatttgccgccaagttgccatctgatggcagtgactggggtcagggagagggaggtcgcatggggccgggggccctggaggactcatctggtgggggggaagggcaggaccaarcatgtgccagtgtctcaccggagttcaccaacacatcacaagctcaaagataaaacttaagaatttcaagacagtgacggcacggtatgaaatgccttctgattctgtgccagccctgactgttctttacaggcaatgacaggttgtcaagggtaatcttaagcaggcaccctgtttactttcgtgcaccacctttagaacataatcctctttgcgccctcagagatccagaagaaggtttggtccgtgtctgggtgccagcagagccggcattcaca

SEQ ID NO: 432117 - DNA, 622 bp, Homo sapiens
ttgcctataaagaacagtcagggctggcacagaatcagaaggcatttcataccgtgccgtcactgtcttgaaattcttaagttttatctttgagcttgtgatgtgttggtgaactccggtgagacactggcacatgcttggtcctgcccttcccccccaccagatgagtcctccagggcccccggccccatgcgacctccctctccctgaccccagtcactgccatcagatggcaacttggcggcaaatgcaggggcagttgcagtggggcacatgcactcacttcatgcatctcagagatgggagtggtggtggctgtctccaccccaggctggcagctagacattccctgtatcttttcagtgaccgagccatcaattctttatktctttttcccttaagccatttcgaactgggcttctacagtttcaaactaaaagactcctatggactctttaggcagcaccctacccccgccacatcaaaatcagattttaggaaatgatactgtaagcttcttccagccaggtggcaacagctgataagctttcctgtgttacccctcagcacagcattgccaggaaggcagaaagtccaagagagggagcttagagatgtttcc

SEQ ID NO: 432118 - DNA, 564 bp, Homo sapiens
tttcccttggcgctgaagggccaaagaccctgtgtctttctagctgtcagctcatcaccacactcagcctctggctgttgctcccaggccctcgmcacatggtcccctccatcgttccttcccaaagaactcagcttctttcaataatttgcttgattaggtcaggtccatccagactctttcacctttgatcaactcaaagtcagtcggttagcaacctaatccatggcacgatatcccatcagattttgtttctgcccagactctaaaggagggaaggagcaatcatggggccatcttggaatcttgcctgtgacttgtagttagaaagatttttctgaccattgtgctcagaataggataggggagcagctggggcaagtgcagactctgggaaatcagagaggagacggtttccttttcaatagtgatggaccatggcagtagcagttgtgacgacagaagtgtttgaagcgtggttgaagtggttgtaaaatggatgggatgtttttgtaaaatggtttgaaggagaacaataaaacccatacaggttgactccaagct

SEQ ID NO: 432119 - DNA, 564 bp, Homo sapiens
tttcccttggcgctgaagggccaaagaccctgtgtctttctagctgtcagctcatcaccacactcagcctctggctgttgctcccaggccctcgacacatggtcccctccatcgttccttcccaaagaactcagcttctttcaataatttgcytgattaggtcaggtccatccagactctttcacctttgatcaactcaaagtcagtcggttagcaacctaatccatggcacgatatcccatcagattttgtttctgcccagactctaaaggagggaaggagcaatcatggggccatcttggaatcttgcctgtgacttgtagttagaaagatttttctgaccattgtgctcagaataggataggggagcagctggggcaagtgcagactctgggaaatcagagaggagacggtttccttttcaatagtgatggaccatggcagtagcagttgtgacgacagaagtgtttgaagcgtggttgaagtggttgtaaaatggatgggatgtttttgtaaaatggtttgaaggagaacaataaaacccatacaggttgactccaagct

SEQ ID NO: 432120 - DNA, 564 bp, Homo sapiens
tttcccttggcgctgaagggccaaagaccctgtgtctttctagctgtcagctcatcaccacactcagcctctggctgttgctcccaggccctcgacacatggtcccctccatcgttccttcccaaagaactcagcttctttcaataatttgcttgattaggtcaggyccatccagactctttcacctttgatcaactcaaagtcagtcggttagcaacctaatccatggcacgatatcccatcagattttgtttctgcccagactctaaaggagggaaggagcaatcatggggccatcttggaatcttgcctgtgacttgtagttagaaagatttttctgaccattgtgctcagaataggataggggagcagctggggcaagtgcagactctgggaaatcagagaggagacggtttccttttcaatagtgatggaccatggcagtagcagttgtgacgacagaagtgtttgaagcgtggttgaagtggttgtaaaatggatgggatgtttttgtaaaatggtttgaaggagaacaataaaacccatacaggttgactccaagct

SEQ ID NO: 432121 - DNA, 529 bp, Homo sapiens
tgctccctacctaagcagaggaacttcattgcaagaatattgagtggcttaatgacgaggtaatttcttgcctcgtatgatgaaaaaaartcaaccaggaactggctgagcacacctggtttgcacaaggtggtcctcgtcagtgctggttgttttgctgtaattgtgaatggtgctgcctttcgcacttaacacatgtcctgagttggcgagtaagttatctggtcatctttggcatcatcatcaggcatagcaaatccagcggtcatcagggcatcttagagttggcttagctcttggggaccaaagggatgtaaaaattgccccaggatgtattttactaaggttgtcaaacgatgagttagggtcggctggttttctagtagctttcaaaaagcccgagattaactcagatggaatcagcttaggtcacgtgcccacctgtgataagttcttgttgccggggcaacgctggtgctgataggtttaacctggatcataggtcccagcccctgactctgggatgttt

SEQ ID NO: 432122 - DNA, 529 bp, Homo sapiens
tgctccctacctaagcagaggaacttcattgcaagaatattgagtggcttaatgacgaggtaatttcttgcctcgtatgatgaaaaaaagtcaaccaggaactggctgagcacacctggtttgcacaaggtggtcctcgtcagtgctggttgttttgctgtaattgtgaatggtgctgcctttcgcacttaacacatgtcctgagttggcgagtaagttatctggtcatctttggcatcatcatcaggcatagcaaatccagcggtcatcagggcatcttagagttggcttagctcttggggaccaaagggatgtaaaaattgccccaggatgtattttactaaggttgtcaaacgatgagttagggtcggctggttttctagtagctttcaaaaagcscgagattaactcagatggaatcagcttaggtcacgtgcccacctgtgataagttcttgttgccggggcaacgctggtgctgataggtttaacctggatcataggtcccagcccctgactctgggatgttt

SEQ ID NO: 432123 - DNA, 544 bp, Homo sapiens
tttaccatgagatttggagggaacaaacatccaaatcctatcaggtgtgaaatgcacatgataggagcattttctcattgagttcatgtggataaactcgggtccatcctgcaagtgttttgaaatcatttacagaagttcctcaagggcaggaattacatcctctgttcctggcatgatgcctggtagccaaaaggggctgwaaactgtgactttggggctgagaaggtgaattcccctacctgggatttgtcagtctctcaaaagagtcatgctgtggtcccatcccatggtaaagactgaacatattggatgggagagaggggtagacagggtgggagttgctggtattggatcttctgccatgccaaccacctcccttccttggcacatttctccagctgctgcattcaccagccaggatcctttggctgcaagcaatggaagctggctttggtcagccttaccaaaacatggatctgtggacagatgtggggtagctcggagaacacagaagggctaagggaccaggtgacagaaggac

SEQ ID NO: 432124 - DNA, 544 bp, Homo sapiens
tttaccatgagatttggagggaacaaacatccaaatcctatcaggtgtgaaatgcacatgataggagcattttctcattgagttcatgtggataaactcgggtccatcctgcaagtgttttgaaatcatttacagaagttcctcaagggcaggaattacatcctctgttcctggcatgatgcctggtagccaaaaggggctgtaaactgtgactttggggctgagaaggtgaattcccctacctgggatttgtcagtctctcaaaagagtcatgctgtggtcccatcccatggtaaagactgaacatattggatgggagagaggggtagacagggtgggagttgctggtattggatcttctgccatgccaaccacctcccttccttggcacatttctccagctgctgcattcaccagccaggatcctttggctrcaagcaatggaagctggctttggtcagccttaccaaaacatggatctgtggacagatgtggggtagctcggagaacacagaagggctaagggaccaggtgacagaaggac

SEQ ID NO: 432125 - DNA, 543 bp, Homo sapiens
ccagtcttgtgtagtatctttatagcagtgtgaaaacagactaatacatggcacaatctatttctttcttactgcacttcttcttcctcctattccttaaatgattagatcaartaggatctgtggctgggcacactagctcatgcctgtagtcccagtgctttaggaggctgaagtgggaggatcactggagcccaggagtttgagaccagactggacaacatagcaagaccccatcttgaaaaaagtaaaatgaaataagaattactaaaaaaaattagccaggcctcgtggtgcatgcctatagtcccagctattcaggaggctaatgtaggaggatcccttgaacctgggaggtcaaggttgcagtgagccataatcatccactacactccagtctgggtgacagggcaagacctgtatctaataataataataataattaatattattattatatttaaataaaaaataagtaaataggatctgggttatggagaccccatagtctcctctctaagagagagccgaacaataataaat

SEQ ID NO: 432126 - DNA, 611 bp, Homo sapiens
tgaatttcctatgtgccagctagcttgcataccttcattgtctcatttaatcttttaaaaatcctgcagatttagtatccttatccacatctaagggtaaggaaatggtagctaagagaggctgggtgacttgctaagggcacaaagctgggtcagtatttagacccaagtctstctgatccaaagtttacctacattccaatatactcagcctcctgcactgatggtgcagttaattaagagggtaattaactgatagctaagacttggcctccctttgtagaaacaagactccattttcattttttatttttaccagtcattaggacattcccaaacatgagcatgctaggacttctgaattatgagttagaaaggcaaggaaaccaggattgagctgatggagagtgaacaaccaccaccctggtacaaggaagacaattcttttccagtgttcagtatctaatacagaggataaagggggaagataaacagataggcttcagtcaaggaaatccaaaaggaccactgtgatggctaattttatgtccacctggctgggcctggctgcccaaagatgtggtcaaacattattctggatgtttctgtga

SEQ ID NO: 432127 - DNA, 611 bp, Homo sapiens
tgaatttcctatgtgccagctagcttgcataccttcattgtctcatttaatcttttaaaaatcctgcagatttagtatccttatccacatctaagggtaaggaaatggtagctaagagaggctgggtgacttgctaagggcacaaagctgggtcagtatttagacccaagtctctctgatccaaagtttacctacattccaatatactcagcctcctgcactgatggtgcagttaattaagagggtaattaactgatagctaagacttggcctccctwtgtagaaacaagactccattttcattttttatttttaccagtcattaggacattcccaaacatgagcatgctaggacttctgaattatgagttagaaaggcaaggaaaccaggattgagctgatggagagtgaacaaccaccaccctggtacaaggaagacaattcttttccagtgttcagtatctaatacagaggataaagggggaagataaacagataggcttcagtcaaggaaatccaaaaggaccactgtgatggctaattttatgtccacctggctgggcctggctgcccaaagatgtggtcaaacattattctggatgtttctgtga

SEQ ID NO: 432128 - DNA, 258 bp, Homo sapiens
aaatgaacaattaagttattattgactataatcaccttattgccaatgtttgtcattctgtgcctggcttatttcacttgatagaatgttcrccagttccatccatgttgctgcaaatgtcaggatctcattctcttttaagactgaatagtgctccattgtgtatatgtagcacattttctttatccattcatgtgttgatggacacaggttgcttccaaatcttagctattgtgaacagggctgcaacaaacatga

SEQ ID NO: 432129 - DNA, 604 bp, Homo sapiens
taccagctgtctaaacatttacagaacaaaataatagcatgcaagatatgtaggtttcagatatttgtcatcttaaaacagcacttagtcattaacttaatcacagctgctatatgccagccagtgtactttgtttgtaaacaacacatctgctacaggcaggaattgggagctcggctgtggtcgtgcgtagcagcctggttaatgctgggatgtgcatcttgagtgtctgaaacacatgggcgccatgcctcagaccaaacctgctgactctagtggggaacaatttagggtttatttcctcccaggtgctgcttttgtggtttttctctcaacagacttagatgcttaatttggagagrtgtcctgatgtccacagtcatgggttcatttgaaatgagacatagcctcccaaatagttgctttcgcgttgttatggactatttaccaccctttcaaattcatatgttgaagccctcacctgcactgtgactatatttggaggcagggcctgtgagaaggtgatgaaggttacctgaatcacaggagtggggccctaatgtgatggcccattgtccatatgagaagaggaagagaccccaga

SEQ ID NO: 432130 - DNA, 542 bp, Homo sapiens
attccttataactggtagcggtgtgctattaagtataacagcaactaccctgaactttgattcagatgtgacaggtggctggtcccataaatcactttgtgatacttcaaatctaatttcttcatcttccagttttagktcaacataatttctataatgaattcttctgagtcaaagaaaacattttaaagaactttactcttatcctatgcaaaactggtcttatgaaaatgactttactttgatcatataacttgcatgctggattttatcacatggtgttttgacatctatttgaaatttaaaggaaattatttcactcaccatgaagtatctctgcatacatctcatataagaggctccctagaattaaaatacatgtgtgaaaagaataattgctccttccaacaccctaattgttcataatatcaggtcactgaatgtttagaaaccaagttgtaactagcttgcaatcatatcatctttggcatggctgacaacaagccttttaactacacgtcctacaataaacaagaaagcag

SEQ ID NO: 432131 - DNA, 567 bp, Homo sapiens
gaatgacctatcaacaaagacagaggataaagagtctcatcattacccatatactaacaacagtcattcggggttattacaaccccatttttcactcagggcaatgccattttatttgtcaaattgctttaataaatattactttctatcactaccagagaacagaagtgtcctgggatactttaagttacaaagtcctatagggactttacttccagtatcttcctgtatctcttttcttaaattttctcttttcaggttgatcagcaggaattgctctaaatgtccaagtccagattcacaaaggaagaatggagaattttttttctcctcaaatatctcttcaaaacatttgcagagattctaaaaagaggggaaatcttcttgtctattctagtctgaagaacaatctacaggtaaaaaaatctcccctggaccakgcagattgggaaggatgtaattagcataatgaataggttcaaaagactcttgctgaatcattcaaattagccaaatcaactctgaccactaaaccagatgatagttgaagcttctaatgtggtcagc

SEQ ID NO: 432132 - DNA, 548 bp, Homo sapiens
attcatcacacacagaaaaagtcaccaacaatcttggtccttgagasgacatgccgtcaggatcaactcagcgactgcgtactgcactccagctggaaggctggataagaaatgcatgagtgggacatgagaacttactggattttcttcatgctttccttgaagcctcttgccatagatgctccatttagctgaatctcagcctacacatgcatcatagaaccagggatgacagccagcaatacttttaggggccagaacaagttttcatttcttttaaaatgagaagaaaaaaatgaagtttgagttttttcaagagtcttcatttggacacttagttctgattctgtggtcctcttcctttctaatggaggtatttaggatacagccatctttccagttttaactgcatcccatgagttgtgttccgtaacactggtgctatcattcacttccagatatttttggattttcataatggactcttctttgacccatgggatacttaaaattgtgttttaaaattttaaattatggataaggattaa

SEQ ID NO: 432133 - DNA, 576 bp, Homo sapiens
agcccctgcttgttatttcaggttgatgctaattcacaggccacggagctccactaagcatagtgttcatggcagctgatggcagcccatggagcatcgggaagtggccctgtcactgacaggaccccgcggggcagggggtggggatgggaaccacaagcagctgagtgttgatgacttacaggaccagttctttttctcaacccagaccctgacctccaacagcttcttgaaaaggtccagctgcacgtcctaaaagtgtcttttccttaacagagccatcaagcctggctcttcagttgttctgtgttcaaattgttcctgaccctctacaatgagagaaaccactcagggtctaccaaacccctccgcgtggtgccccagcctcttctctccctcgggaccacctcatccatgcctactmtccaaaacttcttccctttcctcatgctttggcgttgcattttgcttttgaatctgtttttgccaacattgtttaaatttatatttttgctcatgcctcatgttgcgggctgaattgtgcgcctcctgccaccaaaatgcatatattgaagt

SEQ ID NO: 432134 - DNA, 576 bp, Homo sapiens
agcccctgcttgttatttcaggttgatgctaattcacaggccacggagctccactaagcatagtgttcatggcagctgatggcagcccatggagcatcgggaagtggccctgtcactgacaggaccccgcggggcagggggtggggatgggaaccacaagcagctgagtgttgatgacttacaggaccagttctttttctcaacccagaccctgacctccaacagcttcttgaaaaggtccagctgcacgtcctaaaagtgtcttttccttaacagagccatcaagcctggctcttcagttgttctgtgttcaaattgttcctgaccctctacaatgagagaaaccactcagggtctaccaaacccctccgcgtggtgccccagcctcttctctccctcgggaccacctcatccatgcctactatccmaaacttcttccctttcctcatgctttggcgttgcattttgcttttgaatctgtttttgccaacattgtttaaatttatatttttgctcatgcctcatgttgcgggctgaattgtgcgcctcctgccaccaaaatgcatatattgaagt

SEQ ID NO: 432135 - DNA, 545 bp, Homo sapiens
agttcttctcttaagatctggggtgctgtctgattgggccctttccctgggccaaagaggcagtcatggggaccatgcaatccctgtggctcctctgcacggtgggaagcagagcttcttctttgtatttagtggcagggtggcactgaaggatttggggtaagaaagtgctttgtaatatcctagaagaatcagtgagatctaaatggagsctgcctgcttgcattcaagacagcactccgaaacagttcctcctggtgttttgtgtgttgttccagactttcacaagggataagcctccttgggcaagatgacatctcccttctcaccaagccaaccccaaccccaccctgctggggtggcagtgagttcacccattgaatcataggcacttgccttagagggtgaagcgctaccaccatctcagcctgcaaaagccatttcccagccatcgcctaggatccctgtggcactaatgactgatgactaacatcatatattattgctgtgttccacctgccaccttctggactattttgtatatt

SEQ ID NO: 432136 - DNA, 585 bp, Homo sapiens
aggagatgctcagcatcattagtcatctgggaaatgcaaatcaaaacatccaggagacaccacctcacaccaactaggatggctaaataataaacaaaaccaaaacccagaaaacaagtatygatgagcgtccagagaaattggaaccctcatttgttgatggtgggaacattaaatggtgcagcctctatggaaaacagtttggtagttcttcagaaagttaaacatagaattaccatatgactcagcatttccactactaagtgtatgccccccacaactgaaaacatcttccaacaaaaatctgtacacaaatgttcatagcagcattattaataatgtccaaaaagtggaaacaactcaaatgttcatcaaccaatgaagagagaaacaaaaggtatatatccctacaatagagcatcattcaaccataaagaggaatgaaatatggatacaaattacaacttgaaaacattatgttcagtgaaagaagctagtaagaaaaaaatcacatattgattcaatgtagataaaatgttcaaacgggcaaatccactgagacaaaaagactagtggctgtcagta

SEQ ID NO: 432137 - DNA, 585 bp, Homo sapiens
aggagatgctcagcatcattagtcatctgggaaatgcaaatcaaaacatccaggagacaccacctcacaccaactaggatggctaaataataaacaaaaccaaaacccagaaaacaagtattgatgagcrtccagagaaattggaaccctcatttgttgatggtgggaacattaaatggtgcagcctctatggaaaacagtttggtagttcttcagaaagttaaacatagaattaccatatgactcagcatttccactactaagtgtatgccccccacaactgaaaacatcttccaacaaaaatctgtacacaaatgttcatagcagcattattaataatgtccaaaaagtggaaacaactcaaatgttcatcaaccaatgaagagagaaacaaaaggtatatatccctacaatagagcatcattcaaccataaagaggaatgaaatatggatacaaattacaacttgaaaacattatgttcagtgaaagaagctagtaagaaaaaaatcacatattgattcaatgtagataaaatgttcaaacgggcaaatccactgagacaaaaagactagtggctgtcagta

SEQ ID NO: 432138 - DNA, 492 bp, Homo sapiens
aataattcaaattaattaaaggcatcatcgaattcatagaggtatgtttttattaatacaaagaaaataaatataaatgctacctatattataggggtctaagaaatgttttgtttaactttaagttcagaggtgcatgtgcaggtttgttacacaggtcaacttgtgtgatgggggtttgttgtacagagtatttcatcgaccaggtattaaggctagtacccattgattatttttcctgatcctctccctcttcccaccctccaccctctaayaggccccagtgtgtgttgttcccctctatgtgtccatgtgttctcatcatttaattcccacttaaaagtgagaacatgcagtgtttggttttctgttactgcattagttttttaagaatagttgcctctagctctgtccatgtccctgcaaatgacatgacctcattcttttttgtggctgcatagtattccatgatgtgtatgtaccatgttttct

SEQ ID NO: 432139 - DNA, 544 bp, Homo sapiens
aagacattgttccttatacacctgtttatgaatgaaaagaaacataaggagtgggtacaaagacttctatctatgaatgattaaaaaggctagagtacgaatacttcttgaacctttggtactaaatgcttttcatgttctatataaatgtagaaaacattttacaaatcctgtaaataaactgtttattttttatagaaagccacaacagaaaatgattagtatataactaactatgtaagaacacttacatccatacaatcaacagatgcttcaaatgcatattttaaaaatagttttgagtgttaattatgggagggccttgatgggatcattttgtgaacagttcgcttttataacaaactcaagaggcagcttgccmgcgagctcttttagacataagcatttttatcaaactgttttgaagggtttgttgttttaaaatcttctccaccatgatactttgtccgagaagacatgacagatgtggccccgttgtatgtgtatctgaaaggtaaaacatagtttggtagattctattcta

SEQ ID NO: 432140 - DNA, 446 bp, Homo sapiens
agcaagacccaactatatgctgcctataagacagacatgttaaatataaagacacagataggataaaagtaaaagaatgaaaaaatgtacaccatgctaacaataattaaaagaaagcaggaatggctatgttaatgccagacaagatgatctcacagaagagaatattatcagggataaagaagatcatgtcaaaataataaaggggtcgattcatcaataaaacataaaaatccaaaatgtttgcrtacctaataaacagagctttaatgtgcatgaagcaacatgtgataaaacctcaaggagaaatacacaaattcacaattataatttcagatttcaataaccttcttccaataattgatagaacaagtaaacagcacattattaccagtacagaatgtttatacagtactatcaaacaatatgatctaattgatatttat

SEQ ID NO: 432141 - DNA, 598 bp, Homo sapiens
tttcttcatccacttcaaccaaagcaacacattgcaataaattgaagaagcacatgtgggaattcagcagccttgaaatgaagcccaacatcacaaagttgtgcagaaatgtaaaaaatgccattcttcttacaaatgttttgttttaggaagtagttttttaattaagattatatcattatacccttaaaaatatcatattacttgaatcgtggagaaagtataaacagtgacaacgtatgtggggctaatgttgaaggaggaatcacatatgtaatgccaaactgtcaaaataaaacacatttttcaccaattatgaattgttgttattggcattaataaaatgtyatcaatcccttagtttcatttattactgaattttttttatgctttctgatctctaaacacaaaagaggtccctcaaaaatgaactgaagtgccctgacttgctggtttcagaatcggtgtcagaaggcatgagagggcgggggacatgtcctgacaatcctaaagtcatgggctcctctttggagctgtgggctttcatttctgagggctgtttttcactgaaggtgaaaggcttcaagcctattccccc

SEQ ID NO: 432142 - DNA, 618 bp, Homo sapiens
atttaaaatttcagttcgtgagttattaccactaaatggataaccttcaattcaatatgtttctgtgttttcttaggataaataaatccaacaagcgcaaatatttcataactgaccacagaggccttagcgtcactctgaggttttacacagagaataccacagatcaagatacatcaaaagaaagctcactatatcccaaacacagacatgtttgcttgtccaaacagggccagattttccttaattttagttcttttgagattgtttccaaatcacttcttacatggatattaaaaacaaaattaatgtgacatcgattttgacctccagtcctgcttccccgaamattccctctcaatttacagtaactccatctcctcagcttccttggaatcaccactgactacacaatttctttcctactttacagccaaaaccaaatgaaattctgttgaattcaccttgaaagtatatccaaatgcaaccacttctcttttctctcattgccgcaatccttgggtgccatagtctgaccgggattagtgcaatggccttcaacaaatgtctccctacctccagccatttttctcctcaccctctgttccccatgaggca

SEQ ID NO: 432143 - DNA, 618 bp, Homo sapiens
atttaaaatttcagttcgtgagttattaccactaaatggataaccttcaattcaatatgtttctgtgttttcttaggataaataaatccaacaagcgcaaatatttcataactgaccacagaggccttagcgtcactctgaggttttacacagagaataccacagatcaagatacatcaaaagaaagctcactatatcccaaacacagacatgtttgcttgtccaaacagggccagattttccttaattttagttcttttgagattgtttccaaatcacttcttacatggatattaaaaacaaaattaatgtgacatcgattttgacctccagtcctgcttccccgaacattccctctcaatttacagtaactccatctcctcagcttccttggaatcaccactgactacacaatttctttcctactttacagccaaaaccawatgaaattctgttgaattcaccttgaaagtatatccaaatgcaaccacttctcttttctctcattgccgcaatccttgggtgccatagtctgaccgggattagtgcaatggccttcaacaaatgtctccctacctccagccatttttctcctcaccctctgttccccatgaggca

SEQ ID NO: 432144 - DNA, 619 bp, Homo sapiens
ttaatgcacccatcacctgagtagtgtacattgtacccaatatatagtttgtatatttcaacgctttccctcccttccccctctgagtctccaatgtccattttatcactgtctatgccattgcatatccatagcttagtgctcatttataactgagaacatacggtatttggttttccattcctgagttacttcacttatattaagggcctccagctccttccaaattgccgcaaaaaaattattattccattctttttaatagctgagtactattccatggtgtatacatatagattacattttctttatccactcattggtcgctgggcgcttaggttggttccatatctttgcaattgtgaattgtgttgtgataaacatttgcatgcaggtgtctttttgatagaaaaacttattttcctttgggtagatagctagtagtgggattgttggatcaaatggtagatctayttttagttctttgagaattctccattcagttttccatagaagttgtgctaatatacattcccaccagaaatgtctaagagttctatttcaccacatccatgctgacatctattgtttttttgaccttttaataatggttattctg

SEQ ID NO: 432145 - DNA, 574 bp, Homo sapiens
aagtgtctccggagttgggcaaaaggagattttctcgtatagggaggaggagacaaggctagaaaaaaacaagcacgggagagtgggatgaaggggtcacgtgacaggcagtggctcacggatggtcgcctctaaggccagcctcgtccctggaggggctgaagactggctcacacagagggtgggccgatgttcagggacctgggggaagggaaaagcttaaccaaagcttgattaacaaacgttttattcycattgatcagtgaagacaagcagttcggctaatcatttatgaggccaacaaagaatttggggggtctgtgtctggctttgtcataggcaaacaaggtggtggctgggggaggagggactcccttgattcttatctaggtcatgtggggaagggtagttccttgcagtaagcagcttcccagaatgcgaagggtagaagatttcttaaggttttctgttttccagaatcctagggcttgggtaaagttcaggattgtcagcctccagccatgtgggcctttctctgcaactacagtgggcttagagctgtcctcaggcttcc

SEQ ID NO: 432146 - DNA, 584 bp, Homo sapiens
gcaggaaatgagaggaaacaaaaacagatgaggcaaatagaaagcaaaattaatacaaaagatttaaatccaatcataacaataactacattaaatataaatggtctggttgggttcagacctgtaatcccagcactttgggaggctgaggtaggcagatcacttgaggtcaggagttcaagaccagcctggccaatatggtgaaaccctgtctctactaaaaataaaaaaattagccaggtgtgatggtgcacatctgtagtcccagctaatcaggaggctgaggcatgagaattgcttgaacttgggaggcagaggttgcagtgagccaagatcacgccactgcactccagcctgctgacagagcaaggctctctctcaaaaaaaaaaaaaaaaaagtatatacatatatatatatttatagacagyacatataaatatatatatataatacacacacacatagtgtcaacaggtcaattaaaagagtaattgtttaattggatttaaaaagtcaagatccaactataagctgccttcaaaaaaacccactttaaatataaaatccaagtaggttaaaataa

SEQ ID NO: 432147 - DNA, 589 bp, Homo sapiens
cctcaaaagggacgctcaagttctctttatcccagtttggctcttacttcaaaccaaagatttttttaaaaagttatcacagtttgaaggctcttcccaaatgcttggaacttcggggatatttacacatactaaactatactttttaaaaaagaaattgatggtccttatctgccagagactaagtcagaagcattttagtttaaatactgtagcatagatcatgggacataacccaggcayggaatatatatacttcaaaactatccctgctgtttctctgcattcgctaatatctctacggcaaacatgccatgctttctaaaataataaggaaaattgcctttatttttttttaaaagaatatgtcatatattgtgcttgaagattaaaatctgagaatcagcaccatttcaggtccaaagatgagagatcctgcttcctacggtgtaactacaagaagaagaagaaaaaaaaatacctcagaaaccattgtgttaattgataagtgcacggctcaataaaagaatgggaaagggttgagaagcaggggcagccagggcagttaacactcaaaagctggtgagcc

SEQ ID NO: 432148 - DNA, 589 bp, Homo sapiens
cctcaaaagggacgctcaagttctctttatcccagtttggctcttacttcaaaccaaagatttttttaaaaagttatcacagtttgaaggctcttcccaaatgcttggaacttcggggatatttacacatactaaactatactttttaaaaaagaaattgatggtccttatctgccagagactaagtcagaagcattttagtttaaatactgtagcatagatcatgggacataacccaggcatggaatatrtatacttcaaaactatccctgctgtttctctgcattcgctaatatctctacggcaaacatgccatgctttctaaaataataaggaaaattgcctttatttttttttaaaagaatatgtcatatattgtgcttgaagattaaaatctgagaatcagcaccatttcaggtccaaagatgagagatcctgcttcctacggtgtaactacaagaagaagaagaaaaaaaaatacctcagaaaccattgtgttaattgataagtgcacggctcaataaaagaatgggaaagggttgagaagcaggggcagccagggcagttaacactcaaaagctggtgagcc

SEQ ID NO: 432149 - DNA, 596 bp, Homo sapiens
ttatcattttcattataatttacccaagagataagtgtttgaatggtcccaaatgaagaagacagactgatcataagttctgaccggatttcactttcttaagtagatgtacccccagtgtcaaagaaaaggggccccttagatttcatccaggacattttcctacttccagggaagtcagtgaggtgacagtcctgctgactgttgaggtcatcaggcaaggaaattccactcctctgcccagcaatatattcagtgtctaacaactcctaccactatgataagagaggttaggaaagagctgagactaccgtatctgaaagtattacaatatagattgctgctgacagctaaaaataacttgctctgtcctttaaggaaagactgagccataaaacgttttcaaattgcaagacaagtaccacagacacatgagatatatttcttagacttaagacatcatacacattaggcaagataaaatgagcactctctatttaacttagagaaygaaattatcacaaaatttcccttgttgaaaataagtacccagttggcaatttgtcaacgcttttgttcctactgaaattgattgt

SEQ ID NO: 432150 - DNA, 570 bp, Homo sapiens
tggtaagcagtatagatttttgagaagtaaatactcgaatgaagggtaagtttagcggaataacagttggatgttaggtatgaacattttcacaaatagagagtggcactcaaatttcctggaattcagctttccwgcaaaggtaaatgaaattaaatcaggcatttgacagaaagttacataggctttgagcatcataaaaaaaaagggcaggcacaaagcatatgtggtgcatgcctcatgcaaggtttgctgtacttgttagttatagcatactctctcttgttatatgagataagacttatgagttcagatagctaactatctcttgagttttcattgagtgataaagaatagaagtttagaaggaagtaaaggaatcagtgtgaagagcaatcaactgaaaatgacagctgataggggaaagaaaacaggacactggtggctgcttctggcatggtgaccacagacaccttcagcctgagaaaaatatttgcaggtggtttggcagatgcagaggaaaaggctatttcatacgtatatacttcccaaatctaaatcaatgcaaca

SEQ ID NO: 432151 - DNA, 542 bp, Homo sapiens
aaccaacttaagtactgcgtcaaacaagcagatatccactttataaatatctagcctaacattttggaaactctttgctggtatgaacattcaggcaacattttcagcctttaactacgattatgatacaatgrttataccactggattttatcaattattagaattatatgttcaaatgcttggtaattcctgaatgcgtaatgatgactatcaagctttactgaatttcctcgaattttacagatttattttatattcacactttaatacatatttatttaaagattactatctgcaagacttcaagagagctattgctgactttcttcataagcctgggagtcagaggtgtgttactataatgctctttcacacctcaaactgtgattcaaataccaagggtaccttgaggtttttcaagaaaacaaagtccccagtaacatttcttaccattcacgccaatcaccaaagaaccagagattgctagaactgaaaagaatcgtagtgattctctccatctaaagggatcattggaaactt

SEQ ID NO: 432152 - DNA, 542 bp, Homo sapiens
aaccaacttaagtactgcgtcaaacaagcagatatccactttataaatatctagcctaacattttggaaactctttgctggtatgaacattcaggcaacattttcagcctttaactacgattatgatacaatgattataccactggattttatcaattattagaattatatgttcaaatgcttggtaattcctgaatgygtaatgatgactatcaagctttactgaatttcctcgaattttacagatttattttatattcacactttaatacatatttatttaaagattactatctgcaagacttcaagagagctattgctgactttcttcataagcctgggagtcagaggtgtgttactataatgctctttcacacctcaaactgtgattcaaataccaagggtaccttgaggtttttcaagaaaacaaagtccccagtaacatttcttaccattcacgccaatcaccaaagaaccagagattgctagaactgaaaagaatcgtagtgattctctccatctaaagggatcattggaaactt

SEQ ID NO: 432153 - DNA, 542 bp, Homo sapiens
aaccaacttaagtactgcgtcaaacaagcagatatccactttataaatatctagcctaacattttggaaactctttgctggtatgaacattcaggcaacattttcagcctttaactacgattatgatacaatgattataccactggattttatcaattattagaattatatgttcaaatgcttggtaattcctgaatgcgtaatgatgacyatcaagctttactgaatttcctcgaattttacagatttattttatattcacactttaatacatatttatttaaagattactatctgcaagacttcaagagagctattgctgactttcttcataagcctgggagtcagaggtgtgttactataatgctctttcacacctcaaactgtgattcaaataccaagggtaccttgaggtttttcaagaaaacaaagtccccagtaacatttcttaccattcacgccaatcaccaaagaaccagagattgctagaactgaaaagaatcgtagtgattctctccatctaaagggatcattggaaactt

SEQ ID NO: 432154 - DNA, 542 bp, Homo sapiens
aaccaacttaagtactgcgtcaaacaagcagatatccactttataaatatctagcctaacattttggaaactctttgctggtatgaacattcaggcaacattttcagcctttaactacgattatgatacaatgattataccactggattttatcaattattagaattatatgttcaaatgcttggtaattcctgaatgcgtaatgatgactatcaagctttactgaatttcctcgaattttacagatttattttatattcacactttaatacatatttatttaaagattactatctgcaagacttcaagagagctattgctgactttcttcataagcctgggagtcagaggtgtgttactataatgctctttcacacctcaaactgtgattcaaataccaagggtaccttgaggtttttcaagaaaacaaagtccccagtaacatttcttaccattcacgccaatcaccaaagaaccagagattgctagaactgaaaagaatygtagtgattctctccatctaaagggatcattggaaactt

SEQ ID NO: 432155 - DNA, 557 bp, Homo sapiens
tatttatttaaagattactatctgcaagacttcaagagagctattgctgactttcttcataagcctgggagtcagaggtgtgttactataatgctctttcacacctcaaactgtgattcaaataccaagggtaccttgaggtttttcaagaaaacaaagtccccagtaacatttcttaccattcacgccaatcaccaaagaaccagagattgctagaactgaaaagaatcgtagtgattctctccatctaaagggatcattggaaacttgttactcttagtttctggcctctctttgaatacttgattattaccatgacatgtttatactcccaacccttctgacatccaatgtgtgaggttcttccacacaaataaccaattctctaactctctggacaccatctgggtattcaaaaatttaattaagttctaagacaaactayctggaattaggacagatcccacaggttaaggggccagtcccacccattttccccaatttcagacgccaagtggaagtctgggctacctgtacttctgacggacaggtggtga

SEQ ID NO: 432156 - DNA, 589 bp, Homo sapiens
tccagattttgaacattctgaatacagtcactttttttatctttcaatcactactcttaaaagaacaaaagtcttgtgaaggtctgtattataaaaacaaagtgattttgcttaattgaagatgcacaaaacttatgagtacataataaaagtataaagtgtgtgtgtcatcattttacactcttcaaacatcactggtctctcagtggaacggaagttcagtcacattttgccagcattcagttgtataaaaaccacaactttggacacacttttcaattttgacattctaaggatatattttcaagaaaagagaataaaacatcttttatttagcattttaagtctgtctcctaacttttaaaaatttaagcatatggcatccagacttacattttttttgtctctctctgagaccccaaaatattcagagctctgcagatctctttctctgcaacacaggatgtttctgaccccagtactgccccttcaatgccgtcaccaccacrgttgttgccttcctatcctaactcaccggtgctgcccatgtttatttatattcctcctaaaagtgtcttgaaaaataatg

SEQ ID NO: 432157 - DNA, 589 bp, Homo sapiens
tccagattttgaacattctgaatacagtcactttttttatctttcaatcactactcttaaaagaacaaaagtcttgtgaaggtctgtattataaaaacaaagtgattttgcttaattgaagatgcacaaaacttatgagtacataataaaagtataaagtgtgtgtgtcatcattttacactcttcaaacatcactggtctctcagtggaacggaagttcagtcacattttgccagcattcagttgtataaaaaccacaactttggacacacttttcaattttgacattctaaggatatattttcaagaaaagagaataaaacatcttttatttagcattttaagtctgtctcctaacttttaaaaatttaagcatatggcatccagacttacattttttttgtctctctctgagaccccaaaatattcagagctctgcagatctctttctctgcaacacaggatgtttctgaccccagtactgccccttcaatgccgtcaccaccacggttgttgccttcctatcctaactcaccrgtgctgcccatgtttatttatattcctcctaaaagtgtcttgaaaaataatg

SEQ ID NO: 432158 - DNA, 595 bp, Homo sapiens
gatatagagttatttctttttgtgaataatgatgcataaaaggcacctatcagattttcatgtcagtgttggactgctcttctaagcagctggtgataaacctgaattgtgtgtaagcgctgagtttctgcacggttcattttggtgctccttgagtgactcacactgccttggtcactgccatttgtgctggtatgcgtcttcttcctgcagggtggtgtcctcagccattgcttgggtacttgcagaaaatacaatccstacaagctgagtctttgcatttcatttctgtgaaagtttttgctcccttgaaataaaatgtaccagctgctggctgtggcaatgcaacgctactctgtttgtctgagcttggttctctgtggcatctatgtctagtgatcaataaggtctcccctggccccacttttagagaaacatgtttgttagaacatctctctccactactgatgagacgggattgttcccttgaccttgatccccttcatggggcaggaactggagtgcctcgtttcactcagctggccactcctggtgagaggaagcatgcaagcaagtgagtgcgggaaccagaggg

SEQ ID NO: 432159 - DNA, 546 bp, Homo sapiens
actattcaccagtctagcccattaaaaatcataaggactcttagaaactgcatgctgctccaacttgtcctaaagcactgaagttaccaactgagagccagtcaaaagtctaccattcaacaaagtaatacatgattataagaaaaattataaagtaaggccaagaattgatctgaacacaaatatatatttgtctcagaactcaaggagcttcttaaaaggaggagaaataccactcacagggttccatcagctcactttgctgacgcatttgcttttgccagtgttggcagcatgtgcagttaatgcatatctaggaattagcatggcagggggagagtggggaaaacataatttcctagctgtatgcttcaaytgatgcagtcttacagaaattacatttgatgggaaggaaaagtatttaatcactccctctatgatggacagttcgttattccgacgtgacacatccacaggaaaaagaaaggcacatgccttgagactcactacctgtctgcaatctatgagcctgacattctatagcaa

SEQ ID NO: 432160 - DNA, 526 bp, Homo sapiens
ttgtttgatttgacctgtatgatgtgatattgaaaaattggttactaacacttaaaagtcttggaatttcatagaaaaatacagattttttagttcttttgcaccttcctgcatggcagtagtctgtggcactaggctatgataatacaggcttttctcagcgaggaatgggcttgctggcttaatgacattacaatcactccattttctttcatattgtccttgcttcactcgttttcattgcttgtcttagacctgtaaatattcaaggttttgtaatgccttgagttatacaaaccaaatttyttagaatttaaaaaattcaacatttatcttaaatattttagttactgttttctcatagtatactcgctggacggtggtcaagttttctcattcacatttatcttttcctgtcactttagactttcttagcatgcaaaaaaattcaactttttaatatatttaatttttttgttttttttttcaaagaactaaattcagtttgaaccttaaaaggagaaat

SEQ ID NO: 432161 - DNA, 572 bp, Homo sapiens
atgactgtccataaaaaacacagtttgtcctgttttttgggttttcatttctgaaagctcctgtgtcacataaaacttaaataaatgtgtatgctttcctcttgctaatctgtcttttatgacaggtgcctcagctatgaaatgtgcactgggtgagaaatcttttctcccctacactaccaactatcaaaattgagaacttcagaagggccaygtcttgctttaggaacaagtgagttagggaaaattgcaagtccgcactctttagtgatgctctgggaagggagagaaggaaagggagcaggtttagggcgggatgaggaagaaaagaagggatgtggagccggttcaggaagcagaggcattacctgtggctggaaacccagtttgctcactcctttaaccttcctccgtgtacatcctgccctcaactctcacctggattagctcacagcctcccctctgctacccccacacacccctgccctcctccagccttctgtaaacactctttcattcctgtgctcgcccagaaacaaacctgttctgataaccttctttgtgctaagcac

SEQ ID NO: 432162 - DNA, 572 bp, Homo sapiens
atgactgtccataaaaaacacagtttgtcctgttttttgggttttcatttctgaaagctcctgtgtcacataaaacttaaataaatgtgtatgctttcctcttgctaatctgtcttttatgacaggtgcctcagctatgaaatgtgcactgggtgagaaatcttttctcccctacactaccaactatcaaaattgagaacttcagaagggccacgtcttgctttaggaacaagtgagttagggaaaattgcaagtccgcactctttagtgatgctctgggaagggagagaaggaaagggagcaggtttagggcgggatgaggaagaaaagaagggatstggagccggttcaggaagcagaggcattacctgtggctggaaacccagtttgctcactcctttaaccttcctccgtgtacatcctgccctcaactctcacctggattagctcacagcctcccctctgctacccccacacacccctgccctcctccagccttctgtaaacactctttcattcctgtgctcgcccagaaacaaacctgttctgataaccttctttgtgctaagcac

SEQ ID NO: 432163 - DNA, 648 bp, Homo sapiens
gtccattacgacttcatcatggcaaatccctattttttcagttttctttgacctgagattctttagtaagtkgttgctgactaactatttgacatgggacaagttgctaatcccctctctgtctcagtttctcctttggtgaggagaaatctagcttcattaaattgacatgcagttaaatctacttcattaaattgacatgagagttaaattagtttattcatgtacaatatttaaacagtacctagcacatggtaaatgtccagtaaatgttagctatcatcatcatcaaaattacctccatcttgtttttatatcccacactcctttaaaatcattctttgaaacatttttcctcctacaaagtcttcaagctataactgtcccaatcattttaggggccacaggacagcttcatgcagagtctctagcataatgctagatagttattaaatgcttgactagaatgacaatttggaattcctcttttaaaatactggcatcttgatgtgtaggtcatcttttcagattgccccatactgaactgatctgcactattcaatagaaaatgagtttttgggaaacagcgttttcttgtctattctctcacttcagttaggaataacagttataagcagaataacaata

SEQ ID NO: 432164 - DNA, 558 bp, Homo sapiens
tcatcctccacacaaatcaaactgctactttattataggccctttcaaactcttcatctctttcctcacgaaatgaatatgcccaagctgttaaatgcaataactgcaatgtcagcawaccttttatttatcaaatacttttttttctatcttaaaggggattataaaacctacctttgaaatcattacagatacacgacagaagacggataattgtgacatatttaactttttaatcttgggaagctagatttttcaaatataagtacttcttgatcatttaaacgtgactacacatgtaacacacaactggtagttgcagtaattattaaaaagcattgttctttgaaattactaacacagcaaaaggtgaaatctccaaataactttatgagggcaaataggaaattagctccaataacattctacaatctcaaaatgtactagggaatacttctgtgtgggagtgagacatgctgagagatggcttgttagaagcactctgatgttgcagtggacatatacatttttgcctgtacagcatgtcttttggaaatc

SEQ ID NO: 432165 - DNA, 579 bp, Homo sapiens
agtagccactatctcctaacaataagcaaaaaaacagaacaaactgaaaactcaacaaatcttcttagatctcgatacaattttagtacttgtccctgcccaaatctcatgttgaaatgtaacccccagctgggcatggaatccccagcactttgggaggccgaagcaggtggatcacctgargtcaggagttcgagaccagagtgaccaatgtggcaaaaccctgtctccactaaaaatacaaaattagctgggcgtggtgacacatgccgtaatcccagctacttgggaggctggggcaggagaatcacttgaacccgggaggcggagtttgcagtgagccaagattgcaccattgcactccagcctgggtgaaagagtgagactccatatcaaataaaaaaaaaaaagaaaagtaatcaccaatcttggaagtgggacctggtgggaggtgtttggatcatgggcaaatcccttatgaatgtcttggtgataagtgagctcttgctcttatcccttggtgataagtgagcttttgctctgagttcacatgagatctggtcatttaaaagtgtgtgg

SEQ ID NO: 432166 - DNA, 579 bp, Homo sapiens
agtagccactatctcctaacaataagcaaaaaaacagaacaaactgaaaactcaacaaatcttcttagatctcgatacaattttagtacttgtccctgcccaaatctcatgttgaaatgtaacccccagctgggcatggaatccccagcactttgggaggccgaagcaggtggatcacctgaagtcaggagttcgagaccagmgtgaccaatgtggcaaaaccctgtctccactaaaaatacaaaattagctgggcgtggtgacacatgccgtaatcccagctacttgggaggctggggcaggagaatcacttgaacccgggaggcggagtttgcagtgagccaagattgcaccattgcactccagcctgggtgaaagagtgagactccatatcaaataaaaaaaaaaaagaaaagtaatcaccaatcttggaagtgggacctggtgggaggtgtttggatcatgggcaaatcccttatgaatgtcttggtgataagtgagctcttgctcttatcccttggtgataagtgagcttttgctctgagttcacatgagatctggtcatttaaaagtgtgtgg

SEQ ID NO: 432167 - DNA, 579 bp, Homo sapiens
agtagccactatctcctaacaataagcaaaaaaacagaacaaactgaaaactcaacaaatcttcttagatctcgatacaattttagtacttgtccctgcccaaatctcatgttgaaatgtaacccccagctgggcatggaatccccagcactttgggaggccgaagcaggtggatcacctgaagtcaggagttcgagaccagagtgaccaatgtggcaaaaccctgtctccactaaaartacaaaattagctgggcgtggtgacacatgccgtaatcccagctacttgggaggctggggcaggagaatcacttgaacccgggaggcggagtttgcagtgagccaagattgcaccattgcactccagcctgggtgaaagagtgagactccatatcaaataaaaaaaaaaaagaaaagtaatcaccaatcttggaagtgggacctggtgggaggtgtttggatcatgggcaaatcccttatgaatgtcttggtgataagtgagctcttgctcttatcccttggtgataagtgagcttttgctctgagttcacatgagatctggtcatttaaaagtgtgtgg

SEQ ID NO: 432168 - DNA, 307 bp, Homo sapiens
atccacgttggctgccataatcagtcagtctgcatataatgatttgctgcctgtgatatcccacatattagcctaggcattacagagaccacatcaaacaagacaaacccaattcttaccttcaggagcttacattctaraatgcaagaaattcttacttgttaaagaatgatgaattatgattggtttcataagaaaataaatataatcctatgttattatacctaaacttttccaaagagaatatttaagccatcaagataatgttaaatcttttttcttttactctacagaacctcaaatcata

SEQ ID NO: 432169 - DNA, 564 bp, Homo sapiens
attcagcatggagccctctgactttttggactcacttctgtatgtgggcgctacaaagatttctgggtttttttgtttttttgtttttctttgagacagagccttgctctgtcacccggcttggagtgcagtggtgcgatcttggctcactgcaacctccacctcccrggttcaagcaattcttctgcctcagcctcccaagtagctgggattacaggtgctcaccaccatgcccaggtaatctttttttttttttaagtagagacgggggtttcaccatgttggtcaggctggtcttgaactcctgaccttgtgatccacctcccttggcctcccaaagtgctgggattacaggcgtgagccaccacacctggccctcagatttctgttttttagataaattttattgtgtatatttaaggtatacaacatgatattgtaagatacatacatagcaaaattgttactatagtggaacaaattaatatatttatcatgtcacctagttacccatttttcttccctgtgtcaagagcaactataatctacccatttagcaaaatt

SEQ ID NO: 432170 - DNA, 564 bp, Homo sapiens
attcagcatggagccctctgactttttggactcacttctgtatgtgggcgctacaaagatttctgggtttttttgtttttttgtttttctttgagacagagccttgctctgtcacccggcttggagtgcagtggtgcgatcttggctcactgcaacctccacctcccaggttcaagcaattcttctgcctcagcctcccaagtagctgggatkacaggtgctcaccaccatgcccaggtaatctttttttttttttaagtagagacgggggtttcaccatgttggtcaggctggtcttgaactcctgaccttgtgatccacctcccttggcctcccaaagtgctgggattacaggcgtgagccaccacacctggccctcagatttctgttttttagataaattttattgtgtatatttaaggtatacaacatgatattgtaagatacatacatagcaaaattgttactatagtggaacaaattaatatatttatcatgtcacctagttacccatttttcttccctgtgtcaagagcaactataatctacccatttagcaaaatt

SEQ ID NO: 432171 - DNA, 339 bp, Homo sapiens
ggtgctggagagggagcaggttcttccaaagcctggaattcccagtggattcttcctatctacacctacttaatcttggaatgtgagttcttgaaagcttggtgggttttatttaagcctcgagtgttgctgtcagagaaatcacttttattactttgttttcttggataacagaacgttttttttaagaacatgaaatttctcactggccattgctatttgagtgttttaagcaataatataatgtatataatgctacacatattttagaatttgtatccttcctacttacaatagagtttgaggwaacctgaaaaataagtgttcataaactgagac

SEQ ID NO: 432172 - DNA, 572 bp, Homo sapiens
ttgcatcccaatgacacctgtgggatgcaaagagaaaattcaaggccccaggcatagatggaagaggtattcttctccactggaaattcccttttacttggatttctagtgttagctcccggggccacattcttgtttgctttgcaaactcaaggagaaatactcactgagaaattcacagaggagctagatgggggatttagctgttgtcctggtaactggcttaaagtccatgatkgcagagactgcatctgttttgttcaacaccatattcctagagcccagcaaatatctgttcccagaaaatatctgtttatcttctgtatgtgtggaaagtaaacacaacatggagatggatgggaaaccgcccatgtagacgggaagtaagagaaaatgtggaaaatgagggagagtggcaacaggtgagcttacattattttcattcataatattccttattcaattctattatctttcccaggctgtctttaagacaccttcttaaagggattgcttcttaagggattgctattatttccattgttcatagctggagaagaaagaacgtaaag

SEQ ID NO: 432173 - DNA, 547 bp, Homo sapiens
ttaaagtgatctcttcactcaaaaaaggaaatggcagagaattctattggctttgttgtgaactctacctctaattcctttccctctgcttcctttctttttcttttcagaacatgttggaaattataagcaaacttgtaagtgatgtatgtatatttagtttcatagacaacctcagtgttactttctggcattcttccaaagtatcttacaagttatcaatcttgccaggacagagtgtgttttctgaccacttcccctttgcaattaaggactgtgaccactcgcttacgcacagactgagaccagcagccttaaccccaaaggaggtcagaaactcccagctctccccgccaagggggctagctgagaacccgatactgtgtgtttcaaggctgtggctaaggctgtgaccataggaactgggaacacccaccaacaccctgtttcccccagccccacttccttcgcttcaatgccattragcatggttgcagcgcctttgtgaatgttttgagtagagttaggtttctggtgtttattgttg

SEQ ID NO: 432174 - DNA, 639 bp, Homo sapiens
ggatgtcactctgttgggcaaatgccaatttcttccctttcctatggattctgcagacacttcgttttctcagaagtgtgatctcagcaacctcaggttggtggaacaaaacgccttatgagatgtgaacatcttttgaaagaaagattgcagatttaggtgtcagccagacccaggcctggagtctgatctccactgcctggtaccctgggcaggtggccatcatttagattcagtttcctgccttgtgaagcaggagtcaccctgcctgagctgagtcataaggattggcgcaaaacgggctcaacaaataggagccaccgtcacyatcctcctagcccatttgctatatccttgcacaaagtttacgctttttttctctagatgctggacagggcccacattaagcaaattactgtgctctgcattgtggtaccagaatagatactgtattaattccctacagctgcctagataacaaatgaccacaaactggctggcctaaaacaacagaaatatattttctcacagttctggaggctagaagtccaaaatcaagctgtgagtgggaccatacccccctgaagactcttgggaggaatgcttccttgcttcttccagctcatggtggttgctggc

SEQ ID NO: 432175 - DNA, 639 bp, Homo sapiens
ggatgtcactctgttgggcaaatgccaatttcttccctttcctatggattctgcagacacttcgttttctcagaagtgtgatctcagcaacctcaggttggtggaacaaaacgccttatgagatgtgaacatcttttgaaagaaagattgcagatttaggtgtcagccagacccaggcctggagtctgatctccactgcctggtaccctgggcaggtggccatcatttagattcagtttcctgccttgtgaagcaggagtcaccctgcctgagctgagtcataaggattggcgcaaaacgggctcaacaaataggagccaccgtcactatcctcctagcccatttgctatatccttgcacaaagtttacgctttttttctctagatgctggrcagggcccacattaagcaaattactgtgctctgcattgtggtaccagaatagatactgtattaattccctacagctgcctagataacaaatgaccacaaactggctggcctaaaacaacagaaatatattttctcacagttctggaggctagaagtccaaaatcaagctgtgagtgggaccatacccccctgaagactcttgggaggaatgcttccttgcttcttccagctcatggtggttgctggc

SEQ ID NO: 432176 - DNA, 544 bp, Homo sapiens
ctgataatacttgttgcagatattctggtatctcgccatcagtcaagtactcttttcaatcttctttctcaaccaagcactcattttgcacctaaaattctcagtacagattagattatgcaagataagtgcactcatgcaggtttttaaaagtcctggaaacatggcatatttctgcagtcataatccagtgttagctcttcagctagaaactgaggctgyggagatggcacattcctgattcctggatcccagctatggtagcacattcttagaccctatagtttctgtggtggtggtggtggtgggcttctgatctcctcccttgctgataaggcctaagattgtagggctcctggcaggcaggcctgcagttattctggaagtcattccaaagcccctgccctgaaatacctcctttagctttttcaataactttgtaagcacatatctgaattaaatccttttgtatttaaaataccttaagtgtctttcattttctgtgcaacatcttgacgacatgctgaattcttacttacgtgag

SEQ ID NO: 432177 - DNA, 532 bp, Homo sapiens
tttatatttcactcagactaaagccaaaatctcaggccaggcttggtggctatgactgtaatcccagtactttgggaggccaaagtggratgactgcttgagcccaaggagttcaacaccagcatgggcaacataaaaaccctgtctctacaaaaaatttaaaaaattagccaggcattgtggtccatgcctgtagtcccagctactaaggggctgaggcaggaggattgcttgagcccaggagtttgaggctgcagtgagctaggatcataccactgtactccatcctgggtgacagagtgagaccccatcacacacacacacacaagtgaaaatttctagaatgaactgcaaggctctacatgatctgtaggttgccatcccttggccccatgccttttgatgctgtaacctcatcttctactactctttctctcacccccctctatacatatgtcttcttgaacacactaggcatgctcctgccttagagcctttgcacttgctattctctctccctgcaacattttgc

SEQ ID NO: 432178 - DNA, 532 bp, Homo sapiens
tttatatttcactcagactaaagccaaaatctcaggccaggcttggtggctatgactgtaatcccagtactttgggaggccaaagtggaatgactgcttgagcccaaggagttcaasaccagcatgggcaacataaaaaccctgtctctacaaaaaatttaaaaaattagccaggcattgtggtccatgcctgtagtcccagctactaaggggctgaggcaggaggattgcttgagcccaggagtttgaggctgcagtgagctaggatcataccactgtactccatcctgggtgacagagtgagaccccatcacacacacacacacaagtgaaaatttctagaatgaactgcaaggctctacatgatctgtaggttgccatcccttggccccatgccttttgatgctgtaacctcatcttctactactctttctctcacccccctctatacatatgtcttcttgaacacactaggcatgctcctgccttagagcctttgcacttgctattctctctccctgcaacattttgc

SEQ ID NO: 432179 - DNA, 524 bp, Homo sapiens
tccttggacttctgacacaatgagaatgaaataagaaactgctactatatttaaaagcagcctataagattgagtgamttaaatgtttgactttgaatccaaagattcaaggaattaaaaaaattgtataatattcactgagagctactctgtgccaggcacttatttgaaatataatgttttaaatgcaaaatgctaataagcaaatgtaaataagagattctagaaagtggatatagatttgcgctctccattgtggcagccacatttcaggtgtccatagccacacatggctaatggctgccatactggacagtacagatagagaacattctcatcactgcagaatgttctagtggatacagataatgaacaataaatatggacttatatagaatattttttgtttcaaaacattttgcaaactgcagtttatcacacctggaagggccagttaagactgctaatttgtatgtcaggactggaaataaccttaaagattactgagattaacgacccaccca

SEQ ID NO: 432180 - DNA, 619 bp, Homo sapiens
gactgcaatcccacctacttggtaggctgaggcaggagaattgcttgaatccagaaggtgaaggttgcggtgagccgagatcgcaccattgcacttcagcctgggcaacaagaatgaaactccatttcaaaaaaaaaaaaaaattcttgtctactatttccaatatttgggtcatctgttggtctgtttttaattggatattttttccctcttcattatgaaccatgcatttcagcttcttgtcatgtcatgtgattttgaaaattgtataccaagcattgtatataaaagaactaatgtagatattattttgcagctaaggtgaggacttcaatcagaaactgagctggattgcagctttaagtagtttcagtgcaactcttgtttcaaatatcttgaaggaaatattttttgtgttcttattttgttctctttctctgacaagtttctctcatacactagaagatctctctytaccttcccagcccagttcaccagccactttgccagtactcaacaaaatctgtgggggaagaagaccagtaattggagaaaatagttgggcatttgtagattttaatctgttacatcagctccagtaaaatatctctgcctacag

SEQ ID NO: 432181 - DNA, 619 bp, Homo sapiens
gactgcaatcccacctacttggtaggctgaggcaggagaattgcttgaatccagaaggtgaaggttgcggtgagccgagatcgcaccattgcacttcagcctgggcaacaagaatgaaactccatttcaaaaaaaaaaaaaaattcttgtctactatttccaatatttgggtcatctgttggtctgtttttaattggatattttttccctcttcattatgaaccatgcatttcagcttcttgtcatgtcatgtgattttgaaaattgtataccaagcattgtatataaaagaactaatgtagatattattttgcagctaaggtgaggacttcaatcagaaactgagctggattgcagctttaagtagtttcagtgcaactcttgtttcaaatatcttgaaggaaatattttttgtgttcttattttgttctctttctctgacaagtttctctcatacactagaagatctctctctaccttcccagcccarttcaccagccactttgccagtactcaacaaaatctgtgggggaagaagaccagtaattggagaaaatagttgggcatttgtagattttaatctgttacatcagctccagtaaaatatctctgcctacag

SEQ ID NO: 432182 - DNA, 600 bp, Homo sapiens
aggtaaggagttcaagaccagtctgggcaacataggaaaactccatctctagtaaaaatacaaaaattagccaggcatggtggtacatgcctgtaatcccagctactcaggtggctgaggcaggggaattgcttgaaccggggggcagaggttgcagtgagctgagattgcaccactrcactctagccttggtgacagagaaggactctgtctcaaaaaataaataaataaataaataaataaataaaatgaaactgcaagttaaacaatgtattatagaagacctaatatggcaaaaataagagtttcaaagaagaaacaataaaaaattattttctgaggaaaactgaagtggagacagattcaggaaacatttaggaaatgaatacaataagaccctttgatattatttaattatgttttcagaaacagctacaatctccctaatgaattttgtatttcccaaaagtttatttaaaagctctaatactttagattaattttattttaggaataagtctgagataatattaatgaattaaaaacctgtcaaacagagttgctttctagaaagtaagagataaaattactctaaatatt

SEQ ID NO: 432183 - DNA, 525 bp, Homo sapiens
caccaaccatggactacttctggctggttttacagcagatgcacatttgagtgacttcctgtcccttcttcacctaattgtgtacatttaaatgttaaatctccatcccaatggaactgtgggacgcaygtaacatgcatgtttgcttatcatgcatgcttacaccctttcatgaatattcatagctcttcctatgtcctgttgaatatgtatgctttgccaaccccttcagcttaaattcctgtgttactcttccctctgttgaagggcttgctttagtttttttccagtggcaggctgcccttcctgcctgcaggttgtaattccattcttaagaaataaaactcacctttctaaatttattaattgtgtgatttaagttaagggggtaaggcagtatatttccagaagactgccaacataaaattttaattcaattgtccattgacacagtgaatgttaatttgtcatcacatactagttaatttgttagctgaagggaatgtaataagaccaagttgcttg

SEQ ID NO: 432184 - DNA, 525 bp, Homo sapiens
caccaaccatggactacttctggctggttttacagcagatgcacatttgagtgacttcctgtcccttcttcacctaattgtgtacatttaaatgttaaatctccatcccaatggaactgtgggacgcacgtaacatgcatgtttgcttatcatgcatgcttacaccctttcatgaatattcatagctcttcctatgtcctgttgaatatgtatgctttgccaaccccttcagcttaaattcctgtgttactcttccctctgttgaagggcttgctttagkttttttccagtggcaggctgcccttcctgcctgcaggttgtaattccattcttaagaaataaaactcacctttctaaatttattaattgtgtgatttaagttaagggggtaaggcagtatatttccagaagactgccaacataaaattttaattcaattgtccattgacacagtgaatgttaatttgtcatcacatactagttaatttgttagctgaagggaatgtaataagaccaagttgcttg

SEQ ID NO: 432185 - DNA, 560 bp, Homo sapiens
attgcacagtaaaagtcatgatcctatagcaccttggcaccattgaccttttgggttcttcattgtaatactgtcctgtgtattgtagggtgtttggcagcaaccctgtgtccctttacacactggatgtcagtagcactccaacagttggaacaaccaaaaatatctccaaacattgtcaaatgtgccctggagagtggacaggagaatcrgttcttggctctacaaaagggtgaagaattaggtacaataataaaatctgccactgtgggctataatattatcgaccttatattgtgtttggaataattgaattcaattgctcttattttaatgaatgtttaataaatgttagttttattatagccatataatgtagttattaaaattagattcttgaaggatttttaatatcatgggaaaatgtgtaggtatgcttttaagtaaaaaagaaaggatttgaaacaatatatacaccaaaaaacaaagtttataaaaataaggtacagatacaataagctattaaaaggtgattttctagtttggtctaattagtataa

SEQ ID NO: 432186 - DNA, 540 bp, Homo sapiens
ctgctgctccttgctgcttttagtagacagagatgaatagagagatgaagtttggyaagaatgtgtcagtttgcaagtagaggtggaaggaaatacaactctgataaggatgtctcctgtgcttgggactacagtgtgaattgactgtccagtaatttaagcttcatggagctggaaaattggactgcttcagcaccataagcagaaagagataatactgtgtctatgagccttcctccagggccccttcatggaaccatgggagccaatccaatagcaaatataaaattaaacatatcgttgtctcacccaagcctgttatttcagatggcctcaaagttgctactgagttagaaagaaaatagtccaaggacagagctgaggaaataaatgagagaaacttaagatttatgcagacaagacctttggctatccttccatgttcatggaaatgactgaaagcaaacagtccagaaaactgctaagaattttgaaagaattatgggatcaaagaaaccacaaacctggcctgcaaaagct

SEQ ID NO: 432187 - DNA, 518 bp, Homo sapiens
ggatgtctcctgtgcttgggactacagtgtgaattgactgtccagtaatttaagcttcatggagctggaaaattggactgcttcagcaccataagcagaaagagataatactgtgtctatgagccttcctccagggccccttcatggaaccatgggagccaatccaatagcaaatataaaattaaacatatcgttgwctcacccaagcctgttatttcagatggcctcaaagttgctactgagttagaaagaaaatagtccaaggacagagctgaggaaataaatgagagaaacttaagatttatgcagacaagacctttggctatccttccatgttcatggaaatgactgaaagcaaacagtccagaaaactgctaagaattttgaaagaattatgggatcaaagaaaccacaaacctggcctgcaaaagctgtaattttctgatccctaaggcaacccccaggaaggaaagttgtccatccccaaggaaggcatgttttcccacactcactttagt

SEQ ID NO: 432188 - DNA, 601 bp, Homo sapiens
aaatacaaataaccacagatccctcatttctgtctctcatgagagacagaactattaatattttttccaactgccacagttttttcaaagctaggagcattcgaccacataaatacctgaggaagctctaagtgctttgtctatcttttcgtgccagaagacctgttccaacacttggttgatatcwatcaaagtgcttcatgtttcgtgaaaaaactagaaaaataattatcagctgatgaccatagcctgtagaagggcccttctacagctgctacagacagcctgggctgacagagtgggcggtgaattacaaggaggacaaatgtcctggtgaggaacccgcctgcatttgctgtctctccagaagcttctggcaagcatgcttctcatagtttgcacatggttgttatgattgtttttaaaaaacatttttatgatctgctcaaaaccttctttctctctccctacatccaaccatctaataggtaaattgcttccagattaaatcatctccttactgcactccttctctctgtccttgttgccatgattctactgttagccactttcatctctcattgatgactgcagcagcagc

SEQ ID NO: 432189 - DNA, 485 bp, Homo sapiens
ctgctactcagtgatttaactacaatgaatgctttcttctttatcaatagactttaatttttagagtaagtttatagaaaaattgaccagagaacagagagagttcccatatatctcctacccctcactccaactttctttattattaacaccttgcattagtgyggtacatttgttacaattgatgggccaatattgatacattattattaattaaagcccttagtttacattaagcttcactgtttgtgttgtacgttttatgggttttgacaaatgtatcatgacatgtatccaccatcacagtagtgtacagaatagattcactgccctaaaaatcccctattccctatctgtgcatggcttcctctgtcctccctccccacctgcctgataactattgatcttctacttactctatggttttgacttttccagaaatgtcatatggttgaaataatatagtatgcaggcttttcagacca

SEQ ID NO: 432190 - DNA, 564 bp, Homo sapiens
tttataaaatataataatgattgttgaaaatgaacacaaatccttacattgagatcaagctgcttttcattacaaagtatgcagaggcaaaatctatcattgccaataccacccttgacaagtctgctaaatgatgattgaaayccttgaactaggcttacaggataaaacttggaaaactcaaaactggcaggcacttagatatcctgcataatcactggaagttttttgttttgaacatatgtcctgtcattctttttcctgaaggttcaaacagccaagaggtcacggtattgttgatttccatacaagaatccaaaggagcaaaggctttcctttgatttcaatcatctcacgcattggattggaaagcgggatatcaactcattaaaatgtcatgcaatgtttatgggtctaaactcggctccatgacacttggcagagagtgatgaggagttatttttatttacttatttatctatatttttatatatatgtaataggtgtacatattttcaggatacatgtgataaattgacacattcatataatcaaatcagggta

SEQ ID NO: 432191 - DNA, 534 bp, Homo sapiens
aatctgacatttcctcaaaggtttaaaaataagttgtattttcaaagaaggacttccataatgcttttctagtgactcttcattcaccttactggcttcggtgcagacagactaacccagttcactccccgaatggcacctttaaacttcagtcwgttacacaaaagcacacatagtaaaggaaacatttttgcttcagtataactgttatattattctaccccattttaagtatataattaattttagttctgtgtctacacaacttaaagccaatgatttttaacgactgccccaaaaatttctgaaaaacaaacaaaaggggatatctgattctaccatgttggggtagaattggtaattgtataattgatactggactcataatctcactgtaaacaataaaaaagcagacaaaatttatgagatatctgtttggttttcagacagtataggaggtagcacagaaacaggatccctgagggaatggaaatagataaggttagccctataatcacccccagctttcttcct

SEQ ID NO: 432192 - DNA, 486 bp, Homo sapiens
taaatgccattcgcattgtgatctacttttctgtgaatcattatgttcatttctatagcccatttttctatagagctgttggattttttccctacttataaaatctctttatatattaggatattaattttttgaatgggatatatttaacaaatattctttcccaatttgtaatttgamcttttactttattgttattattatttgagacagggtcttcctctgtcacccaggctggagtatagtggcatggttacatctcactgcagccttgacttccagagcttaatcaatcctcccacctcagcctcatgaatagctgggactacaggtgcatgccaccatacctggataatttttctattttttgtagagatgaggttttgccatgctgcccaagctggtctcaaacacctgggctcaagtgatcctcctgccttgacctcccaaagtgcttggattacaggcatgagccaccatgcccag

SEQ ID NO: 432193 - DNA, 587 bp, Homo sapiens
agaggacagagcaacatgatctctgctctgagaatcgttgaagtctgtagtttccacttcagggaacttatctaaatatggtcctccttgtaatgtatttgcagatagactgactcaggtctaactcaatggatttagaaaattaacataagtgttaataagtaatatagcagccttccattccatggttctgtgtgctaacaaatatctgttgaacgaatgatatatacaaagatatgggcatagcccacccagcaaggwtggtaaacagaaaaggattcaaaatttgtcattctgtgtcatcatattgtgcttcctccatttcctcaaatatcccaaccgtaaactccacatagaacagttcagagacaagtttccctccaaatcttacattgaattggactcagaaaacagtaataataatagctaacatgtagagagcactgctatgtgccaataagtatgtttagtaatttttgtgtgtcgtcttgtttaagacttacagaagtcctacaagatgggaactattgttattcccttttatctatatgagaaaaatcgagcttcaggcaacttaaacaacttgt

SEQ ID NO: 432194 - DNA, 602 bp, Homo sapiens
tccaaccatgaggccaatgtttataggttctcagccatcaggctttatctcctcattttgggtaacaaagaagtacttgtcatttctctcaccatccacaggacccacccagagtgcctgacctcttgccccttccctgttggagaagggtcttctcctacaaaaggaaaccacttgtgagggatggttaaaacaaactgtctgcactagaactagaccctttcaacacaataatttcatctttctcttttaagcgctcctcacacagtatggcataatgaaatcacaaactgccctgcgttcatctttttctggaaccatacagaacatttctgtcctctggcagacaatctctgcagtctctgctcaatgtcaggctgtgcaggaggtggcctctcccagcctcaacccaagcatcagcacaacaactagtcatcagccaaaggaagaatgtggttcacttcattataaygtctagaaatttgacatttcttcctaatcatggctttccaatttcaactcatcaaaatttccatgcaaacttttaggctttaaagcagtttttaaaagaagctgtttaatttgttaatcctaccattaca

SEQ ID NO: 432195 - DNA, 285 bp, Homo sapiens
taaaccgtatctcaataagcctgtttaaaaaaatctgttatagatctttgtccaagatggccgaataggaacagctccagtgtggagctcccagtgtaatcaatggagaagacrggtgatttctgcatttccaactgaggtatctggttcatctcattggtactggttggacagtgggtgcagcccatgaagggtgagccaaagcagggcagggcatcacctcacccaggaagtgcaaggggtcaggggatttccctttcctagccaagagaagccgtgacagac

SEQ ID NO: 432196 - DNA, 285 bp, Homo sapiens
taaaccgtatctcaataagcctgtttaaaaaaatctgttatagatctttgtccaagatggccgaataggaacagctccagtgtggagctcccagtgtaatcaatggagaagacgggtgatttctgcatttccaactgaggtayctggttcatctcattggtactggttggacagtgggtgcagcccatgaagggtgagccaaagcagggcagggcatcacctcacccaggaagtgcaaggggtcaggggatttccctttcctagccaagagaagccgtgacagac

SEQ ID NO: 432197 - DNA, 556 bp, Homo sapiens
tagaaaaaaattgcataaaatacataaaactatcttagaataaatcggacaccttaagagtctcagtaagtttttcttatgtgctgaataccatgtagcatcttattgaccaacccccaagtacatgttcattccttcccaaagccaaccctccttttccccacrgtggccccaggcctgtcttctagaactctcagcagcatttgatattgttacttggaaggcccttgacctccctgcttccttggctgtcatagagcagtgtcctggtgcttctttcacctccctaacttctccttctcaggcttactggctcctcattctgtcccctaagcctaggcactgcccaaggtctcttctttctttggtctctgtcagggagatatctcacccaatcccaaagcttcatccttccataaaaatccgtatctatatctaaattgtcagcttcctccctttgaaattctaatccttttttttttttaaagatggggtctggctatgttggtcaggatagagtgtggtgggtattcacaggttcaatcacagctcacta

SEQ ID NO: 432198 - DNA, 550 bp, Homo sapiens
cacaatatcttcatgtagcacaagaaaattttcagggctggaaattactttataatctatgttgttcttctttaaaacattaactcttatttgttttctaatgagtttatgccaacaaagcatttttttttaagtttgagggctaaatattgtggatatgttttgcatatttacataatttcctaatttcttggagagttttttgaaagtcagaaacattttaaaaacaaatgttttatactttaaactggtctcacttcaaagatttttgtaacatcatggaacatttcacttcggtaattaaaaatgcctttgagtttcagaagaactagacagtaataaaactattagctgtctacttatttttgacattcacttcattcaagtaaatctgaatgcatttccactaattgcatttgcaatttaccaagtaggagtttgagagaaaatattcctaggcttaatttacaaatctgtcaaaataaytgattttgaataatagagatcagtttctcagtatgtgaatctgctattttcttcttcctgtatt

SEQ ID NO: 432199 - DNA, 532 bp, Homo sapiens
gatttaatttaattgcaaaataaatggagaagaatagtatccagatctcaccgcctaaatagcaaaccagtgaaagctgtacccatcagatttaggatacaccaacagggactgctcctcacaaaataatttgtatatagtttccttaagtagaatttttccgttttatcctaggcaaaatttcaaaccgatagaaaagttgaaagaaacatcactatggctccacccagattcartagttgtgatgattttgctgtatttgctgtgtaggatctttttcgcctacccagcttagattctcccaccggggagcctcaattaaattggtaaattagactctggccaaagacagattagcaagagaaaaacaaagagaaatgtgttagagcgtgcacggcacacgtggaggtggagcacagggttgcatgacacagaggaaggttggagcccggggccacggggttgcatgacgcagagggggtccaaacccagccacggggttgcatggtatgcagtggggtcggagcctggc

SEQ ID NO: 432200 - DNA, 532 bp, Homo sapiens
gatttaatttaattgcaaaataaatggagaagaatagtatccagatctcaccgcctaaatagcaaaccagtgaaagctgtacccatcagatttaggatacaccaacagggactgctcctcacaaaataatttgtatatagtttccttaagtagaatttttccgttttatcctaggcaaaatttcaaaccgatagaaaagttgaaagaaacatcactatggctccacccagattcagtagttgtgatgattttgctgtatttgctgtgtaggatctttttcgcctacccagcttagattctcccaccggggagcctcaattaaattrgtaaattagactctggccaaagacagattagcaagagaaaaacaaagagaaatgtgttagagcgtgcacggcacacgtggaggtggagcacagggttgcatgacacagaggaaggttggagcccggggccacggggttgcatgacgcagagggggtccaaacccagccacggggttgcatggtatgcagtggggtcggagcctggc

SEQ ID NO: 432201 - DNA, 526 bp, Homo sapiens
cagcccacgactctgggtctgggtgaccacgtgttttacgtgaccttacctggtaagcccggagctcccggccagccatcatctcctttgccaccaggcagtccaatccgccccagctctccctgcgaccctggaggcccagtcagccctggaaagcctgggggtgaacacagcattaagtctgagcacacaggacaccttgggcgctgtgtggtgaggtcctggcaggaggggcagccgctctgggaggggycgagggccggaagggccgcagtgccagttggaggagagattagaactgtccctcaagctggggatgcaggtggtcttagaccccacatacaaattcaataggatttgctcagccttgccagagagaaaatagcgtgtagttttaattgtcgccctattatccaaatagacgtctggagaggaccctgaggcagtgcctggagagatgagcctcttggcattccccggtgctgagtaaacacagaaagcagcagcagcaacagcgtgggaagcc

SEQ ID NO: 432202 - DNA, 526 bp, Homo sapiens
cagcccacgactctgggtctgggtgaccacgtgttttacgtgaccttacctggtaagcccggagctcccggccagccatcatctcctttgccaccaggcagtccaatccgccccagctctccctgcgaccctggaggcccagtcagccctggaaagcctgggggtgaacacagcattaagtctgagcacacaggacaccttgggcgctgtgtggtgaggtcctggcaggaggggcagccgctctgggaggggccgagggccggaagggccgcagtgccagttggaggagagattagaactgtccctcaagctggggatgcaggtggtcttagaccccacatacaaattcaataggatttgctcagccttgccagagagaaaatagcgtgtagttttaattgtcgccctattatccaaatagacgtctggagaggaccctgaggcagtgcctggagagatgagcctcttggcrttccccggtgctgagtaaacacagaaagcagcagcagcaacagcgtgggaagcc

SEQ ID NO: 432203 - DNA, 526 bp, Homo sapiens
cagcccacgactctgggtctgggtgaccacgtgttttacgtgaccttacctggtaagcccggagctcccggccagccatcatctcctttgccaccaggcagtccaatccgccccagctctccctgcgaccctggaggcccagtcagccctggaaagcctgggggtgaacacagcattaagtctgagcacacaggacaccttgggcgctgtgtggtgaggtcctggcaggaggggcagccgctctgggaggggccgagggccggaagggccgcagtgccagttggaggagagattagaactgtccctcaagctggggatgcaggtggtcttagaccccacatacaaattcaataggatttgctcagccttgccagagagaaaatagcgtgtagttttaattgtcgccctattatccaaatagacgtctggagaggaccctgaggcagtgcctggagagatgagcctcttggcattcccsggtgctgagtaaacacagaaagcagcagcagcaacagcgtgggaagcc

SEQ ID NO: 432204 - DNA, 418 bp, Homo sapiens
gcaaggtcctctcaagtgtgaatctgcaggtggggtggggaagagggctcctgggtgtattttaaactcgggaagacagcagtcccctcctgccccatcccatgtggctttgcagctgcagcctctcatctctaagtgttcctggcctctgagaagaacctagttaattaaaatgggcttgtacaatgaaattgtgaaatacccctcaggtgcagggactctcgagtatgtggaaatgaccccaccctttgaggcttctggacatggcaggtaatgttatawgaagtgcctcgggtgcctggcacatggttgatgctcagtggtcactgtttttaggaagtcagctcggttcctgaagggagtgtagaggtttggcttgaatgccccctgagcacgtgggttgtgttatcttgggcaa

SEQ ID NO: 432205 - DNA, 475 bp, Homo sapiens
gggaccccgagtgcttgcacccgctcggtgacagtggctggcaggtctaagtgctgctgctggatgcaaattcctttggtagacttttttttttttaagaaaaaaataaarccaatttttgggttggcacctgaggtaataagttaagaataagcaccaaaatggcccttcctggcacgcgccggctcacaggttcttcatgcacacctggcagcggctgatgtgtgtgcggatgaggccggccttgagcgtgtcggcggagggcgagccctggaagctctgctcgggaatggtggtcagccagaagctgtacttgttggcgtagtagtggcaggtgccgcggcctccattgcattcgatgaatggtgtggcgcggaagtcctctagacagctgcccggtgacaccagtgattggccaccgccttcgtctcccgccgccgtgtgctgcacagagaggggggcaggacagggttag

SEQ ID NO: 432206 - DNA, 456 bp, Homo sapiens
ccagagaaaaacacttaactgcaattaaagacagtgaaaaaaatgaagagttacagaattaccagaaaacaaataacagaatggcagtaggtaagtcataacttatcaataataacactgaatgtaaatggacttagttcgccaatagaaagacatagagtggctgaaaggataaagaaataagacccaactacatgttgcctacatgaaacctacttcacctataaagacacatgtagactgaaagtgaaagtgtggtaaaagatattccatgcaattagaaatcaaaatagagcagaagtaactatacttatatcagaggaaatagactataagtcaaatactgtaagaaaggtaaaaagatcwctatataataataaagaggtcaattcagcaagctattacattataaatatttatgtacccaacaccaatgcttccaagtatatcaaacaa

SEQ ID NO: 432207 - DNA, 607 bp, Homo sapiens
cacacacacacatataataaaactacaggccaatatcactgatgaacatagatgcaaamattctcaacaaaaaactagcaaaccaaattttacaacatattaaaaggaacattcactacgatcaagagggattcattccagacatgcaaggatggttcaacatacacaaacaaatgaacatgtataccatattaacagaaccaagaacaaaaacaatatgattatttcagttgatgccaaaaaagcatttgataaaattcaccaacaatttatgataaaaatcttcatcaaattgagtatggaagaaacatatctcaaaataataaaggcaatatatgacaaaaccacagctaatattacactgaatggggaacaattggaaagtctttcctctaaagactggaacgagacaaagatgcccactttcaccaattttattcaacataatactggaagtcttgaccagagtaatcaggcaagagaaagaaacaaagggcatccatattgcaaagaaatatgtcaacttagccttttttgcagaccacaggatcttatgcttaaaaaaacctaaagattccacacaaaaaaaactattaaaactgttaaa

SEQ ID NO: 432208 - DNA, 607 bp, Homo sapiens
cacacacacacatataataaaactacaggccaatatcactgatgaacatagatgcaaacattctcaacaaaaaactagcaaaccaaattttacaacatattaaaaggaacattcactacgatcaagagggattcattccagacatgcaaggatggttcaacatacacaaacaaatgaacatgtataccatattaacagaaccaagaacaaaaacaatatgattatttcagttgatgccaaaaaagcatttgataaaattcaccaacaatttatgataaaaatcttcatcaaattgagtatggaagaaacatatctcaaaataataaaggcaatatatgacaaaaccacagctaatattacactgaatggggaacaattggaaagtctttcctctaaagactggaacgagacaaagatgyccactttcaccaattttattcaacataatactggaagtcttgaccagagtaatcaggcaagagaaagaaacaaagggcatccatattgcaaagaaatatgtcaacttagccttttttgcagaccacaggatcttatgcttaaaaaaacctaaagattccacacaaaaaaaactattaaaactgttaaa

SEQ ID NO: 432209 - DNA, 480 bp, Homo sapiens
tgggggccgggcatggtgactcgtacatgtagtgccagcattttggraggccgaggcgggcagatcacaaggtcaagagtttgagaccagcctggctaacatagtgaaaccccatctctactaaaaatacaaaaaaaaaaaaaaaaaacagtagctgggcatggtagtgggcacctgtaatgccagctacttgtgaggctgaggcaggagaatcacttgaacccaggaggtggaggttgcagttgagccgagatcgcaccactgcattccagcctgggtgacagagcaagactgtctcaaaataaataaataaataaataacgatctgaagtcttgatgcagcctttttgtgaataaacagtcataactgctttactaaagaggcaaagagatgctgtcaatttgctcttcaaatgcactttttgtttattttataataaatgtgctgcatcctattgtgccttcataacattaaaaatt

SEQ ID NO: 432210 - DNA, 474 bp, Homo sapiens
tgggcatggtagtgggcacctgtaatgccagctacttgtgaggctgaggcaggagaatcacttgaacccaggaggtggaggttgcagttgagccgagatcgcaccactgcattccagcctgggtgacagagcaagactgtctcaaaataaataaataaataaataacgatctgaagtcttgatgcagcctttttgtgaataaacagtcataactgctttactaaagaggcaaagagatgytgtcaatttgctcttcaaatgcactttttgtttattttataataaatgtgctgcatcctattgtgccttcataacattaaaaattactgcaaatcatttattccaagaaaattgaaggccctgaaaccacctgtgactataggtatttattttatggtgatttttcactagctctttttcagtcattttcatgccaaagacaattaacaggatgtaggcattaatagaggccat

SEQ ID NO: 432211 - DNA, 474 bp, Homo sapiens
tgggcatggtagtgggcacctgtaatgccagctacttgtgaggctgaggcaggagaatcacttgaacccaggaggtggaggttgcagttgagccgagatcgcaccactgcattccagcctgggtgacagagcaagactgtctcaaaataaataaataaataaataacgatctgaagtcttgatgcagcctttttgtgaataaacagtcataactgctttactaaagaggcaaagagatgctgtcaatttgctcttcaaatgcactttttgtttattttataataaatgtgctgcatcctattrtgccttcataacattaaaaattactgcaaatcatttattccaagaaaattgaaggccctgaaaccacctgtgactataggtatttattttatggtgatttttcactagctctttttcagtcattttcatgccaaagacaattaacaggatgtaggcattaatagaggccat

SEQ ID NO: 432212 - DNA, 584 bp, Homo sapiens
tgacatgagggcagaaattgatgaggtccattgtggatgaggtgccttcaagggtcactgaagtggagatttctggaaggctcaggtcacacttgaaattccgtgaataatacttggagggaaaggtggcttcagaagactttctggagcatcaccagaggttgaaatgcttttttaaggttgtctacttccactgggtaagccctgttctaatcccrtatttccatcctccccatagcctgtcctctggaactttctaggtcatcagagaaatagattttttaaaaaaagcttttccctgaaggagctccttcttcaaagaaattacttaaaagttcaagaagtgagaaagtatacatgaagccacagtggtagaaacaaggaagagatgcatgagcccagagatgtttgactttgaccttttggaccacctcagttgtgtgacacatatgtcatctagggttcttcataacaccatgtgaaaaccattatcctgtctactaaatttgccacaaatcaaactggtcaagtaatgactattgttaatacttaggatctatagagaggtattctccaagacttta

SEQ ID NO: 432213 - DNA, 584 bp, Homo sapiens
tgacatgagggcagaaattgatgaggtccattgtggatgaggtgccttcaagggtcactgaagtggagatttctggaaggctcaggtcacacttgaaattccgtgaataatacttggagggaaaggtggcttcagaagactttctggagcatcaccagaggttgaaatgcttttttaaggttgtctacttccactgggtaagccctgttctaatcccatatttccatcctccccatagcctgtcctctggaactttctaggtcatcagagaaatagattttttwaaaaaagcttttccctgaaggagctccttcttcaaagaaattacttaaaagttcaagaagtgagaaagtatacatgaagccacagtggtagaaacaaggaagagatgcatgagcccagagatgtttgactttgaccttttggaccacctcagttgtgtgacacatatgtcatctagggttcttcataacaccatgtgaaaaccattatcctgtctactaaatttgccacaaatcaaactggtcaagtaatgactattgttaatacttaggatctatagagaggtattctccaagacttta

SEQ ID NO: 432214 - DNA, 588 bp, Homo sapiens
gtgaaaaccattatcctgtctactaaatttgccacaaatcaaactggtcaagtaatgactattgttaatacttaggatctatagagaggtattctccaagactttagaaacagaggaaatgagaaatgtaaaattcttttcggagaagtaggtaatttcaaaatcaccagcctaacaactcctggtaaatgggtaggtgaaactgtttccttttaggtagatctggcctttgatattagccctatcgattcattaaaactatgacaagaataatactaatagggmgggcacggtggcttacacctgtaattccagcaccttgggaggctgaggtgggctgatcacttgaggccaggagttcgagaccagcctggccaacataggaaaaccccatctctactaaaaatataaaagttagccaggtgtggtggcatgtgcctgtagtcccagctactcaatttgggaggctgaggcacaagaatcgcttaaaccaggaggcagatgttgcagtgagccaagattgcaccactgtactccagcctgggtgacagagcaagacgctgtctcaaaaacaaataaacaaaaaag

SEQ ID NO: 432215 - DNA, 606 bp, Homo sapiens
atcatgtactgtgcaacaatatcatatatagactatttaattctcctgacaatcttattagaatattattcattcyattatagagttgagaaaaatttaactaagaaattacgtaaattgtcctaggtcacacagctagaaagtgactaggtcaggattcaaatctacaacaggtggacatcaaatgtgggttgttataaaagtgagtttggcttcccagactcttttgcttcctctctcactatgtgatggctttgcacacacctgtacctccttatacttttcactatgagttacagcagcatgacaacctcaccggatggactgcccagtcttagacttcccagcctccaaaaaagagccaaataaatttctggtctttataaattacccagtctcaggtactctgttgtagcaacacaaaacggactaagacatctagcatcctccaaaactcacatctcactatttttttgtctatttgttgcatgtgtatgggtgtgttcttgtgcatctgtgtgattataaattcatatatttaacatatgatttgtctctacttactgctgttatcattcctattggtagttaatttgtccaaatttt

SEQ ID NO: 432216 - DNA, 606 bp, Homo sapiens
atcatgtactgtgcaacaatatcatatatagactatttaattctcctgacaatcttattagaatattattcattctattatagagttgagaaaaatttaactaagaaattacgtaaattgtcctaggtcacacagctagaaagtgactaggtcaggatkcaaatctacaacaggtggacatcaaatgtgggttgttataaaagtgagtttggcttcccagactcttttgcttcctctctcactatgtgatggctttgcacacacctgtacctccttatacttttcactatgagttacagcagcatgacaacctcaccggatggactgcccagtcttagacttcccagcctccaaaaaagagccaaataaatttctggtctttataaattacccagtctcaggtactctgttgtagcaacacaaaacggactaagacatctagcatcctccaaaactcacatctcactatttttttgtctatttgttgcatgtgtatgggtgtgttcttgtgcatctgtgtgattataaattcatatatttaacatatgatttgtctctacttactgctgttatcattcctattggtagttaatttgtccaaatttt

SEQ ID NO: 432217 - DNA, 608 bp, Homo sapiens
aagaaaattgatgacactggcagatgtccttgtgctcttgtctgacctgtgtccagtttatttctaccaagatagccactcagtaggagagccctgagcaggaggagagttaggcacaagtgtgtcagtcagacgagaaacaggagagggagcatggcaaaacacacgaagtaatagaagcaattmtactacttacaggtcacagagccaagaggtgtcacacctcgtagggccaacaacaggaaggggaagctgccatgtgagacatgcacactcagccagtgggaggaaagggaaagagaaagagagagcgagggatctgtgggccaaaggctgtattaggatctaaggcattccccaagcaggtttcccatggggagttctaattggtgggttcatcgcaagcatgcatgtggagttgcacagtgactcagaggtggtctgtgtggtacatctgcatagtccatgtagggggtggaggtcagcaggcaggtgaagtgggttgtatctagctctcccatagacaggtggtcaccaggaggtggttgtataaggcagttatctggattaaccacattgaagaactgggaggaggcagagaactggaa

SEQ ID NO: 432218 - DNA, 539 bp, Homo sapiens
gtcatatcagaaaaatagcatattcaccatctcagacatttatcatccttggtgttgggaacatttaataacctcctcgtatctatttgaaactatatattaatgttaactggagtcatcctacagtgctatacaacactagaamctattctttccatctagttatggttttgtatcctttaagaaaatttttccctatgctcctttccccctactcttcccagcctctagtatcctctgttctactttttacttctatgagatcacctttttttagcttccacgaatgagtgagaacatgtggtgtttcactttctgtgtctgatttatttcacttaacataatatcctctggttctcactatgttgccacaaatgagaggattttttttctttttaatgcctgaatagtattctattgtgtataatatataccaccttttctgtatccatccatctgctgttggacacctaggttgatcccatatcttggctattgtgaatagtgctgctataaacatgggggtgcagatgtctcct

SEQ ID NO: 432219 - DNA, 666 bp, Homo sapiens
tataatactcccatcacacagatggaaaaaataagattcagcaggatagagactacgtattttacagtctattttctttctgctttttcagactgctgtctccataacacttaatatgttgggttaatgactattgagactggttggcctacatygcaaggttctttttatttgcatatcttcacttttagagaaattagtcacaagaaagtcatctagtttgtcccactcctacaggtttttttctgctaattttttcctggtatttttttagtcttgttcaaaaacttttattagataaaatgttcttctcagacatataacaaacttctggattgaatgtttcctagtagtaatttttctttttatcatttattgccctgcttctgaatgtggaaaaatattagatcacaaattaaagttctgtattagctcttttcattttagtatagccacgcagggcagtatagttgggaggcggggtaagaaacatagctcaggtaatcaataagactaccactatttaggattaatcagttctgaaacccaaaatgtcggcagtataagcgcacatcagttaacatactagcaaatgatttaagtttaatttggttatatgttgtgtaatacacatttttacataatatggactcactttaaattata

SEQ ID NO: 432220 - DNA, 586 bp, Homo sapiens
atgatccacttatctattgcttatataatacaatatccccaaacttaggggtcaaaataccaaccattattctattccaatgttttatagtttgagtagttgattaggctcaactaggtgtttctgattctctcatgcatttgcactctgacaatggctggagctagagctagcttaaaagattcttcactcatatctggaacctcagctgggctgttggccagaacaccgatatatggcatctacatatgacctgggttcaggttgtcacagagaataagcattttaattttttcttctcaaggaggttcctacttcactgaaagaggaggccagcactagtcactcttgctataatkgggtcagtaggcacagattctgaaagttgcttatgggatccatttgactatcacatgtaacaatgtttccactcttagcttttataagtaataaagtttattctttaagtgcatgtgccctgtatttgttttacattgcaatgtattaaaaactcaagagtcccccttcagagactctaccatctcagtaccttcacgatattagatgctaaataaatatttaccaa

SEQ ID NO: 432221 - DNA, 631 bp, Homo sapiens
attctgcataaatagttccaattcatctagatcacactttatgagaaaatattacttccccaatttagggatggggaaaccaaatttcagagaattaatttgttttaatgatgccacatgactatctcatagctcttttattcaaacccgggtcctgattccaaagccctggctttttcccttctacattgaacttaatcccaattaaaatgttcatatttataagggctttttctccatgtagtagttataaaaaacaaactgaattttacactcttacattatatgtaaatgctacagaattgtctaattatgtattatgaatagggcaagtcacatgaaagtactgcttctgtcactcaaaaatgtttagtatctgcaattgtatatgtccaattaaacatgtagatatacttgcctccatgtttgtattaagttttgtagtagaacatttctggtaatgcatacatataagctcagcatatgaacaartctgattatagtaaaaagtggtttattcaaaagatagaagcgaaaaaaatcatggacatttgtctatgtgtaagtatttaactgaaaaaataatcaaacactagtgcaaattatgcaagaaatgcgaggctttggaatt

SEQ ID NO: 432222 - DNA, 580 bp, Homo sapiens
aatgccaaaaatcttcacttggaatcacaacaaagagctgagctgacactgacaatcgtttgttktttttttttttcctccggactgtaataaaaagtcaacgaagcaagggatgtcaatatattctaataacaaagatgtgaaattttagagggcccttttccttcttcttcatagggaagctttaaaatatgcagaaagagagagcaagtatccaagtctaatagatgcatataggaaagatatgtttcttaaaaaaaaacaaaaactaaaacttacatcatagcagtgatacacactgtggttttggggagaaaggaatttaaaaattcaatttgtgtttatttcttctaaatttataattccatcaagaattatagacaaaagaagaaagccagctgatgctttttttctatcagcctttttcaggaggaaaaaattgtgttcaatattttaatccctgatcgtttaaaaaattatattactatgctttattatctgaaagctttttagaactatataagaacccaaaatgtatctttctgttcattttttaggtgtccatgaattatagaataaa

SEQ ID NO: 432223 - DNA, 549 bp, Homo sapiens
gggatgtcaatatattctaataacaaagatgtgaaattttagagggcccttttccttcttcttcatagggaagctttaaaatatgcagaaagagagagcaagtatccaagtctaatagatgcatataggaaagatatgtttcttaaaaaaaaacaaaaactaaaacttacatcatagcagtgatacacactgtggttttggggagaaaggaatttaaaaattcaatttgtgtttatttcttctaaatytataattccatcaagaattatagacaaaagaagaaagccagctgatgctttttttctatcagcctttttcaggaggaaaaaattgtgttcaatattttaatccctgatcgtttaaaaaattatattactatgctttattatctgaaagctttttagaactatataagaacccaaaatgtatctttctgttcattttttaggtgtccatgaattatagaataaacaacagatgatctaggagaaacagaaagcatttttattcttttatttcatgcatttaattgggttgtttttataccaa

SEQ ID NO: 432224 - DNA, 539 bp, Homo sapiens
ggtaattaaggttaaatgaaggcattaggatgggccctaatccattatgagtggttccttctaagaagaaattagaacacaggcactcacagagggaaggccctgtgaagactcactgagaagatggccatctataagtcaaagagagcagccttagaagaaaccaaccctggtgctgcagggtaagcagcagctaccgtgagaagagtttggtgggcgatctcacaccatcttgctggcacagcctaccaaaaagccagaagacagaactgaggctgactwtgaatctttgaacaaatgcatggacggcatttgtaaaataaatgaagaatatctgaagagaatgatcccaacagcccctctgtcacactgatatcatcagttgtttgattttatggacgatctggcagacctcagctgcctggtttagcgagctaatacccagacatgccagccttacaacaaagataggattaaagagttctatatgctcctgagtcagcagtcccaacagactaggatgtaattgagttgggagc

SEQ ID NO: 432225 - DNA, 539 bp, Homo sapiens
ggtaattaaggttaaatgaaggcattaggatgggccctaatccattatgagtggttccttctaagaagaaattagaacacaggcactcacagagggaaggccctgtgaagactcactgagaagatggccatctataagtcaaagagagcagccttagaagaaaccaaccctggtgctgcagggtaagcagcagctaccgtgagaagagtttggtgggcgatctcacaccatcttgctggcacagcctaccaaaaagccagaagacagaactgaggctgactatgaatctttgaacaaatgcatggacggcatttgtaaaataaatgaagaatatctgaagagaatgatcccaacagcccctctgtcacactgatatcatcagttgtttgattttatggacgatctggcagacctcagctgcctggtttagcgagctaatacccagacatgccagccttacaacaaagataggattaaagagttytatatgctcctgagtcagcagtcccaacagactaggatgtaattgagttgggagc

SEQ ID NO: 432226 - DNA, 687 bp, Homo sapiens
tttgtttaggagatgctgtgagaacccaatgtccaacaaaggaaatatttgcattgccaatttgagtatacctaaagtgacatcacttagtttaaacctcccactgtgaggttaaagaaattgactagaaatgtatctgaattaaaaatggagagttctgagaataccccatcagtrgcattgtgagaaaatattattgactgttttgaatcatcaccgagggaaaggatattttcattttgtaagaagtttgtaattttttttactatgagatgaaatctaagaactatattagaagcaagcaaaatagctttcacaacttactgagtaaaacctaaacaatatttttatgacaaaagtatatctatatattattaataggattggttaaacctaaaaatgaagaccaactctgtttcataatgttttcttatttttttaaggtgtctactttcacaaaattttcagaattcatatatttggtttttcatcgttctccaatacggaaaactgactcacgtttcaatcttcttaaatgtaactttctttcttctagaagatggtcctaataagaatgcttcttgaaatatagacaagaataagatgttatcttagctctaacactcaggcaaaatccagcccctgtgagatccaggatatcatccctcagtctcatattaaaaaaca

SEQ ID NO: 432227 - DNA, 687 bp, Homo sapiens
tttgtttaggagatgctgtgagaacccaatgtccaacaaaggaaatatttgcattgccaatttgagtatacctaaagtgacatcacttagtttaaacctcccactgtgaggttaaagaaattgactagaaatgtatctgaattaaaaatggagagttctgagaataccccatcagtagcattgtgagaaaatattattgactgttttgaatcatcaccgagggaaaggatattttcattttgtaagaagtttgtaattttttttactatgagatgaaatctaagaactatattagaagcaagcaaaatagctttcacaacttactgagtaaaacctaaacaatatttttatgacaaaagtatatctatatattattaataggattggttaaacctaaaaatgaagaccaactctgtttcataatgttttcttatttttttaaggtgtctacttycacaaaattttcagaattcatatatttggtttttcatcgttctccaatacggaaaactgactcacgtttcaatcttcttaaatgtaactttctttcttctagaagatggtcctaataagaatgcttcttgaaatatagacaagaataagatgttatcttagctctaacactcaggcaaaatccagcccctgtgagatccaggatatcatccctcagtctcatattaaaaaaca

SEQ ID NO: 432228 - DNA, 658 bp, Homo sapiens
taagaaatttgtttcaaattttcaccatcatttataaagctctttaatctgttagtgataattacgtgtttatagaaatcaaggtgacagacaatataagagaaaatgaaagagagaaaccaaaaataaagaaaataaagggagagagaaaaagatgaagatagagtcagaggtagatatggaaaaagaggcaaaacgtgaagtggcagatccaggcataaagaaacaaatgcctcagaagacagagacagagaaatcttgagtaaggaagcaacatagragattgttgacttcccccaaactaaaactacttgataaagtagaggaaaaatgatccaagagcatttaagttgtttgttggctgacatttcatttagctggctggtctcctaagctgccaattttctccttgtgactctgtggtaagaaagatcgtgcacagttcctatggttcctccacaaagcagcagaacattctctgtaatattctctgcaatgaagagcacatttctgaggcaacactaagaagtcaagagtttcatttaaaagggggcttcttaaagtaagaagtccctttggatgtatgcagcagtatcatagcacctggaattttggagttagcactgaacacttcattttcttctaatcggtttcatag

SEQ ID NO: 432229 - DNA, 579 bp, Homo sapiens
atatattacaccaaatctggtttaaaactgaaaaatataaatatccccaagcaaaaaaagtcttaactttttctagtttcagtgctttaaatggtttgatatgtaactgtgatccatatttgaatacgtacatgtagtaaaaaaagttttgttttatattttttgttgttacctttatctttataaagatgaaaaaaaattaaattatataacaattgtaaaataaaccagtgttctcaaagggcagatgcacacacctcagggatatgcaacccccaaaaaagattcactgtagtgcaggaaagaaatattaraacttcagtctatcatagccttttatatttcaatttttctataggtgtgtcttataattgccacaatatattagtgcaatattaggtatataatttatttttaattggacatatacatattgggtttgcaagcctaaaaatgatcacagtgcccttttgaaaagtttaggaaccactgatagtcaagacagagagccactttttcttgccagcctttttcaatcctagaacacagcaccatctggtggtatcctgagataatgca

SEQ ID NO: 432230 - DNA, 447 bp, Homo sapiens
attaaattctaaagaagcactgtctagtaagaagataattgacccacaaatgcaagtcacacacataactttcaattttctagtagccacacttaaagaaacagataagatttatcttaatatattgtatataatcttaaytttatattgtatattatcttaatatattgtatatagtatacatacatacatatgtaagacttatcttaatatattgtatataatctaatatatctaaaacatcattttaatatataatgtataaaacattaataatgaaatagtttacttttttgtatgaggacttcacaattcaaagtgggttctatatctatagcacatcttaactgggacttgccgtatttccagtgcacaatggctatgtgtgtctagtggtcgctgaattggacagtgcagttctaaaggcaaggctagtatcttcttgca

SEQ ID NO: 432231 - DNA, 566 bp, Homo sapiens
taatctcccatgaaggagagaataagccaggagaattcaaaaaccagaagcaggccatcctagttacaragatttttttcattgaaaaatagaagaagatgaggttgaaggatggatggccagtccattgcagaagagctggtcaccgggacaaagactgtggattttaccctttgggcaataggaagcccccaggggttcctggacaggttaattacagagtaagagtaatatttttacaaggttaattccgcagcacttggaagtgcagtgtggaggggaagagagactcaaggtagggaggccattcatgagacaatcacaatgatccaggtgtgaggggatcaataaaaaacagaaaagaatcagcacagatgctagtatgaaagaacaatcaaggggcctcagtagatcagatcagagatgagagacatagttggaagaccacatgagtgatgagaataaatctcatcagagattttggtctcttttcctaccacaatggcagtgacacaaacacaaatagttaagtcaggagacctgaactcttttggagcatgctggag

SEQ ID NO: 432232 - DNA, 553 bp, Homo sapiens
gtgatattttataaatgtaaaattttaggtagaaattaaagaaaacaaactgattacaaatccattttcaaacactgttaacctaatcgatgacagtaagaagcagtaggtgaacctcctgcccgtcaggggaggtaaattgggccagttgaaacatttccaccaaaatgacagtaagtcttgtgggcatacaacctatycaggtcatcatttcatttttctgtcaaattgctgagtgaaaatgagaacaacctgaaccatagcaaagtagtatctagatatagaaacttgattttgaccggcatgtaaagctattttctcatccacgaaaaaatgctccataatcctcaataatagtttaaataattcaactatatgtctggcaagaaaacacatatcttgagccatgtgttttgaagataagtgctcttgactgagctttatcatctgcttcttaaagaatttgcttgcttgcaaactttataagtggtatgccaagaccaatcaatgctttaagtttatgcagctatcagtcccagtacacactgacaca

SEQ ID NO: 432233 - DNA, 553 bp, Homo sapiens
gtgatattttataaatgtaaaattttaggtagaaattaaagaaaacaaactgattacaaatccattttcaaacactgttaacctaatcgatgacagtaagaagcagtaggtgaacctcctgcccgtcaggggaggtaaattgggccagttgaaacatttccaccaaaatgacagtaagtcttgtgggcatacaacctatccaggtcatcatttcatttttctgtcaaattgctgagtgaaaatgagaacaacctgaaccatagcaaagtagtatctagatatagaaacttgattttgaccggcatgtaaagctattttctcatccacgaaaaaatgctccataatcctcaataatagtttaaataattcaactatatgtctggcaagaaaacacatatcttgagccatgtgttttgaagataagtgctcttgactgagctttatcatctgcttcttaaagaatttkcttgcttgcaaactttataagtggtatgccaagaccaatcaatgctttaagtttatgcagctatcagtcccagtacacactgacaca

SEQ ID NO: 432234 - DNA, 553 bp, Homo sapiens
gtgatattttataaatgtaaaattttaggtagaaattaaagaaaacaaactgattacaaatccattttcaaacactgttaacctaatcgatgacagtaagaagcagtaggtgaacctcctgcccgtcaggggaggtaaattgggccagttgaaacatttccaccaaaatgacagtaagtcttgtgggcatacaacctatccaggtcatcatttcatttttctgtcaaattgctgagtgaaaatgagaacaacctgaaccatagcaaagtagtatctagatatagaaacttgattttgaccggcatgtaaagctattttctcatccacgaaaaaatgctccataatcctcaataatagtttaaataattcaactatatgtctggcaagaaaacacatatcttgagccatgtgttttgaagataagtgctcttgactgagctttatcatctgcttcttaaagaatttgcttgcttgcaaactttataartggtatgccaagaccaatcaatgctttaagtttatgcagctatcagtcccagtacacactgacaca

SEQ ID NO: 432235 - DNA, 587 bp, Homo sapiens
gaaaacctatttctttctaatttattgttatattttcctaaagaaacatccatatcctacataaaatttyctcaccagtgtaaggaaacaatttttttttattttagttgaaccagtacatgatgtgattccagaaaacacagaaacaggaaatctaataaaactaaagacttattcatcttcctgagttactgttggagaataacaagatcagacataaattcctgtccacatacatatcttcagaagaataatcacaaaaagggcaatcatttggtattcgcttttaagctaacagtacaatattagctcttttcaccacctttacctagcatccttaacttaccaaggatctaatactcattcacaaggaatttcagttggaaaagaatttgaaattacaccaactatgcaatgcaacattcagataaagagccacatattagccagtagactatttaatcccttgtttaggagagaacaaaaaaatatttgctgtttactgcatactgtggctaagttccaatgtagcctaagaatgaattgctatggtgatgaaaaaccattttccacacaaagcagcaaca

SEQ ID NO: 432236 - DNA, 587 bp, Homo sapiens
gaaaacctatttctttctaatttattgttatattttcctaaagaaacatccatatcctacataaaattttctcaccagtgtaaggaaacaatttttttttattttagttgaaccartacatgatgtgattccagaaaacacagaaacaggaaatctaataaaactaaagacttattcatcttcctgagttactgttggagaataacaagatcagacataaattcctgtccacatacatatcttcagaagaataatcacaaaaagggcaatcatttggtattcgcttttaagctaacagtacaatattagctcttttcaccacctttacctagcatccttaacttaccaaggatctaatactcattcacaaggaatttcagttggaaaagaatttgaaattacaccaactatgcaatgcaacattcagataaagagccacatattagccagtagactatttaatcccttgtttaggagagaacaaaaaaatatttgctgtttactgcatactgtggctaagttccaatgtagcctaagaatgaattgctatggtgatgaaaaaccattttccacacaaagcagcaaca

SEQ ID NO: 432237 - DNA, 481 bp, Homo sapiens
gaacgatgttacagccacctggagggcagtaattcaagatggtggcatttgggctgcacttagaagaacggggaaagggaaactatgaaggtgggatggaatagcaagtatttcaagcaragagagagggctggattgaaggcacctatcgggacagcaagagcagtaagtcataaagcacaggaccctggagccacatcatccactggctgtgggccctcagacaagttactgaactttttaaaggctcagtcctctcacctgtgaaatgtggatgagaatagctctcatttcacagagttcttgtgaggattacaattaaattcagcatgtaagatttccacagattcttagctctgtgccaggcagattcttaatacacgttactcctgtgggtattgttgttttctagttttataaataacataaatgagaataaaggcaagtaagacaaaaaaaagtaggttaaatgtaggtcatc

SEQ ID NO: 432238 - DNA, 550 bp, Homo sapiens
tacatacttttcaatatggatagtacaacatgagcacaggaaattattgttgaatggctacatatgrttaccataagtagttagcaaacaatattcatcttccaaaatatccaaggtaatatgtgagctccaagatgatgttttatagcatctacttattaattctgctaatggaaacaatggaatttagagtcagaattgggttcaaaaacataaatctacttattattcatggataatcctatataacttactcaaattccatgaaatttagttctatttttataaaaggggcataataaaagcatctgaacctcataagatggatgtaaaaattaaattaagtgacatataagagccctagtgtatggcctggcacatagtaggtacccaataaatattcatttctctctttctttttagggtagagtaaatgtatgagactgaacaaaaatttctaattgataagagtatcagaatattaccatgtttacttacactatttcctcctttttccccccttaatatttttactccaaaataaaataga

SEQ ID NO: 432239 - DNA, 544 bp, Homo sapiens
taagaaaaaagcaaacatctattttggggttttctctcttttgcacagcctgatctaatcttaagtaaattaacaacaattcaatttctaactcttccctaacatgtagccttcttggtagccaggccaacttcctcacagccgcactacttgcttcggctcagttgctccatttccygtccttcctgtcttctcaccctccactatcttaggtcaggagttcagatctaccaggagtcttctctaatgtttgaagtgctcagctctctccgtctcatctaaaaacattgtagcacttacattctgtgccacagcatcaatgacccacatagaatagtcctgtctcttgaattgtttgcaaaatcattaataactggatgttgcaggttggattatctggagatagatgcagagacaaaattcagggtgccagatatttatgagagagcagctggtgggaagtaagaagaagaggcaggattggcagagggagaagttgggtgatgaagcagacccaatggagcctgggctaattgggtaagga

SEQ ID NO: 432240 - DNA, 544 bp, Homo sapiens
taagaaaaaagcaaacatctattttggggttttctctcttttgcacagcctgatctaatcttaagtaaattaacaacaattcaatttctaactcttccctaacatgtagccttcttggtagccaggccaacttcctcacagccgcactacttgcttcggctcagttgctccatttcctgtccttcctgtcttctcaccctccactatcttaggtcaggagttcagatctaccaggagtcttctctaatgtttgaagtgctcagctctctccgtctcatctaaaaacattgtagcacttacattctgtgccacagcatcaatgacccacatagaatagtcctgtctcttgaattgtttgcaaaatcattaataactggatgttgcaggttggattatctggagatagatgcagagacaaaattcagggtgccagatatttatgagagagmagctggtgggaagtaagaagaagaggcaggattggcagagggagaagttgggtgatgaagcagacccaatggagcctgggctaattgggtaagga

SEQ ID NO: 432241 - DNA, 568 bp, Homo sapiens
gtcattgctcaaaatcgaaatgtatattgagcgacattctgtactccttgaaaagaaaaagtacagctttgaatcctgggagtaaaattatcctgtggccttgggatataaaactaatcagktagcataaaataccaggtggcccaatattcaaacttagcttaaggtaattcccggtggaatttatatcctgaaaataggtattttagccttgttgaaatgttattattgtaaaggggcttttctattttaatgattaatgctatgtaacccagcatggctacatatgtagagaatgtctacaaatttgtatatgtcttttaaatcctgaatcaatttatcaattcaactgaaactcacaccaaaaataaaacaggtttctttgaaaagaaagaggctaatgttgtatgtcgttataggaacaaagtattttaaaatccaccagaattgtaagtctaaatattttagtctccacttttttttccaggttccactaaaaacagtaaaaattctttgctatagacctcaaaaaatgttgaacttgagggaaaaaaaggtggcccccaag

SEQ ID NO: 432242 - DNA, 577 bp, Homo sapiens
agattgaatcgtattacctagccaaggagtaaatgtagataaagaaccaatgaacacacatgcagaggtggtaaatgtgaggaggatgaagactgaaaaatatggagtatttatagaaaataacyaatagttcagttattccaggacatacgacacataaatctgagcagtggaaattcaggctgtcatggcaggtctgggagagaatacaaagggcctggaatgcagcctaagaaatttcttcttcagaattcagaagaagtgagagcagcagatgtagactcagcagtcatcaacataaagcaagctggaacttcatagcctgatgagactgctctgggaaaataaataaatgaaggccttgagatgaggctagaactctggtaaccctggaactattcatgtaggaaaatgagcgtgaatagatgcttgtgtgagtcagccactggtaggcagctcttcacacagtgaccttttcaaaggaatggatctgtgcttggcaagttgaaggcttctaacaggacactgcagctgggtttgtaaaactgttcaggctcactctgctgggcttccaccc

SEQ ID NO: 432243 - DNA, 607 bp, Homo sapiens
aactcagtgaagcctacagaaataaagatggtgtggcaccaaaactccaatgctcattctaccattttgcattggtcctgtcctagtaatgcaaaaagaccaacacgccagtaaaaatgtcctttaaactactttgggttgattgcaaatgcctggtctattagatcctaaatgggacatctgggtaacaattcgtggtcattgtcaagaagttagagctctgcatccactacctacctactctcaaagccagcgtctgcattcctaacattctaactacacttcgtcagtcaccttacattttcattatagcaaatagccagtcaatggcaaattattctatttttcaacttcaaaatgcctccttgtccgcatcctttctttcctgccatcacagatgtgggtctyctcctattgtaccagactctctctaccttaaaagaaccattcaatcttgccactaagttttggggtggtatattttccccctctcactgaggtcaaccccagccttgtggcttccaggaccacaaaagatgttttccttaggatacacaggggaaaattatttttcttactcttatttcctagtttatccttttactag

SEQ ID NO: 432244 - DNA, 567 bp, Homo sapiens
tttcagcctacaactcagtacaacacagaaaacatgcaaagaaatcaacatagatgatgcttgctttatatgttacattacctctattcttttcaacttcattttacagattaaaaaaatcaaaagacactaagtgatcttagggaaaacttaaacttcactgctcttagttttcatatcttgcttgtttaggtcagagaataaaccaacattgtgcagttttacacatgaggctagctctcatgtgctcatttgaaaccagattcacagatgagcaccrtatcaaaaatttctgatctgtgtattcattccatctttaaatctgagagacacaattgcccacatttgcactatgccaaagatgcatggtgttttccattttgaaagacaggagagttctggctttgagatcagccttgaccattaatacatttcagtagcattcacccattttaatccaacatacttattcctcttcagttattttatttgtgtttgtttttaaatggcaactcccagagtgattttcagagaagaatgatttaaagttcataaaatgtcatcaca

SEQ ID NO: 432245 - DNA, 631 bp, Homo sapiens
gagaattctgcagttattatttggtattgatctaaaatgtttaacattttagcgtggctgaacatttcagcctacaactcagtacaacacagaaaacatgcaaagaaatcaacatagatgatgcttgctttatatgttacattacctctattcttttcaacttcattttacagattaaaaaaatcaaaagacactaagtgatcttagggaaaacttaaacttcactgctcttagttttcatatcttgcttgtttaggtcagagaataaaccaacattgtgcagttttacacatgaggctagctctcatgtgctcatttgaaaccagattcacagatgagcaccatatcaaaaatttctgatctgtgtattcattccatctttaaatctgagagacacaattgcccacatttgcactatgccaaagatgcatggtgttttccattttgaaagacaggagagttctggctttgagatcagccttgaccattaatacatttcagtagcattcacccrttttaatccaacatacttattcctcttcagttattttatttgtgtttgtttttaaatggcaactcccagagtgattttcagagaagaatgatttaaagttcataaaatgtcatcaca

SEQ ID NO: 432246 - DNA, 512 bp, Homo sapiens
aaaacggtctgtgaaagtgccaaaccaccagctctccagatgtggctgaatatcaaggtaaatttaatttagacttagcttgggatccccgtcataacaaatcggataaagcgcatgcacacacatgtgcacacacacgcacacacactcagacatgtaaaacccatcctagacagttcaaacaaggtttgagtaccactttccacgtatcaggcttacaaggtgccaagaacatagagttcctgaccttgaggagcctgcagtctgctggtagccaaggtggtacaggcagaaggatgtaagcacycaaggcttccataaatctgctctcggataaggagtaaagcaccaaaatcagatggccttgcattcctctctgacacaatctcattgagtcagcaagataataaaaatgtgaggttacagtacaatttttttacaaaaaaaaattactctgagctatttgaaatcttagtaaaactgaaaaatacagtttaacccataatattgtt

SEQ ID NO: 432247 - DNA, 568 bp, Homo sapiens
tgtttgttccttcaaataaacagacatcaacacaaggctgtatggatcatgaagaagcaggcaaacatggcaccatcaaaagaaactaataaagttccagtaaccgaccctaaagaaatggagatacatgaactgtatgacaaataattgagaataaccatttttaaggaaattcagtgagctacaagacaacaagaatacataaatctacaaaaatcagaaaaccaattcataaacaaaataagaatttcaacgaaaggctagaaatcataaaaaaagaactaaacagaaattctagagctgcaggatgcagtgaatgaaatgggaaaaaatgcaacaaagagcttctgcagcaggctctataaaaatgagaagaatttgtgaacttgaagacaggtcaatgaaattatccagttagatgatraaaagaaaaaaaatgaaaaaaagtaagaaagtcaacaggatttacgtgacattataaagggaaactatatatatattatggatgtcctagaaggaatgagagagaaaaacagaaaccttatttaaataaataatgcctgaaaac

SEQ ID NO: 432248 - DNA, 636 bp, Homo sapiens
cctcataatatacacaatcattatttgtcaattaaaaataaaatacagtctgggcgtggtggctcatgcctgtaatcgaagcactttgggaggccaaggcaggcggatcacgaagtcaggagatcaagwctatcctggctaacacggtgaaaccctgtctctactaaaaatacaaaaattagttgggtgtagtggtacatggctgtagtctcagttacttggatggctgaagcaggagaatggcatgaacctgggaggcagaggttgcagtgagctgagatcgtgccactgcactccagtctgggcaacagagtgagactccatctcaaaaaaagaaaaaataaaatacataaaaataaaatacaattttaaaaggttattaatcaaaagcaacaagaaatgggacaacatcaaacatttcagatgagaattttatttatttaggtgtcatattataatattcaaattgcccaattgacaaccaaaaaaattaaggcatgtaaagacttgaattaatacatatgagatttttataattgcacatatcaacaaaatttatgagtaaagatagcaataaataaaaagagaccttaaagaagactcatctttgaactttctagaaatatacttaaaatc

SEQ ID NO: 432249 - DNA, 634 bp, Homo sapiens
actaactcgtgatatctatatcacaaatgtgttggtagaaatggcactatgcaatagtagagtttcttgtaaatgactcaaattaagttgtatacatcgaaattagtttgttttaaacttagaatgttacatgtaatcactacggttaccacaaatgaaatatctgtctaatatttattaaaaaatgagactgcaatcaaataaataattaccaaaaaattaactagatgtaaaaaacagcagtaatagaggtaattaagaaccaaaagaccgtaaaacacaataaacacacatctamatggcagaaataagttatttcccattggtaattacattaattagtagtggattcagctctaaaatgaaaagccagagattaggagaacgaattaaaaatagtatgattcaactatatgcttcctaggaaaagctcaccatagatctaaaagtgcagataggttaaaattaaaagattgacaaagcatatttcagacaatagtaacaaaaaaatctggagtggctatacaaatatcacctaaaataggctttaagtcaaaaactgctacaagacacaagaacacaagaatggcattacacattgataagaacattagaatatcaagaaaatttaacc

SEQ ID NO: 432250 - DNA, 610 bp, Homo sapiens
gtgcccctctctccacaaacaagccctcaaatatctgaacggaaagctcttacaaggacacttgaactaagcaagggaatggtagytaacatttacactgactccaagtatgctttcttagttcttcgtgctcatgctgccatttggaaggaaagacactttcttaatgctaatggatcccctataaaatatcatcaggaaattagcaggttattatcctcagtttttcttccacgagaagtagcagtgattaattgtaagagacatcagaagggaacagatgaaatagccgaaagatcaagttagctgatcagacagccaaatcagcagcaagaaagcctcagggactcaatacatttaaagtctctctaatttgggttggctaaataagagacattaagcctcagtactctgctgtagagatagaatgggccatctctcaagggtacattttctaagcctcaggatagctacagtcagaggatggcaaactccacttgccatcctccagccagtggaaagttcttaaaatcctccaccaagcttttcacttgggaaaagacaaaacttacccgtgtgcccagagattgttttcgggagagaactttac

SEQ ID NO: 432251 - DNA, 614 bp, Homo sapiens
atgtccaggcatggaggctccatattccctttttttgttacagcgtgtacaggaacaaaggaatgggcaacatggcacagctcaggaagagacccagcctgcattataaaagattaggttgggggctaccagaaatttatgccctatgcaaatggcacacctggtctaaccagttttttttttttgtttgagctacctacatcatataccacctccccaccactcatctatacacccccctgcatttctctgaggactggtaagccattttttcaggacccctctctgtaggagagctattttctttccttcaactattcaacttccattctcaaaatcactctttctgtgtctgcatccttgttctccatgctgtgagacaatgaacatcgggtatcaccccagacaatgaggctgtttcaaatctaacaggtgggaagtggcaaagcagtctaaacttatgtgaactgtgtataattkgccatatgtggacattaaagtctctgttccattagcttagtggtcagcaaataacttgataaatatttctttaaatttctgcaactaattattattaatttttttgccacggatctgtttgcatattgggtatg

SEQ ID NO: 432252 - DNA, 587 bp, Homo sapiens
tacaacatggggaaagtgggaatttatatccaagaagcaagattggggtcaatagataaaaaattactaagagaaaacatcagggataattggaattctagctaaacttttataacaggatttttgctgatgaccagccagggtaatcagacatctcctgaagaatgctggagggtgaggaacctgatcatatattgaaggtgtttagttaccaatgagggtgaaggtgttgctaaactgacttaacagggttatttactaaaactgaattttataaggaagtgtacagatgagcctaggactaaartttcccttaaaaaatcgttgtcattagtgctaccaaggacataaatgtgcaaaaatctcttcaaaagattgctttcaattattttagaaatatacccaaaaatggtattgctgatctaatcgtagtttttaaaaattttttgaggcatctccatactgttttccattgtggttgcacaattttatccttcccttattaatgaacaagggttcagatatcaatgctttctattttcttctgtttctattttttgtggtagaaatcttaatgggtatgtagt

SEQ ID NO: 432253 - DNA, 518 bp, Homo sapiens
actcttagtgggaatataaagtagtgtagccattataaaaaagcatatggaggtctctcaaaaatgtaaaaaatagaactacaatgttacccagcaatttcaccactagttatatatccgaaagaaaggaaatcagtaaattacagagatatctttactcctatgttttttacagcattatttacaattgccaacatataaaatgtacccatgtgtccatcaacagattaatgaataaagaaaatgtggtatatakacaccatggaatattattaagtcataaaacatagtaaaagtctgtcatttgcagcaacatggatggaacttgaggtcatgaagtgaaataagtgaagcacagaaagacaaatcccgcatgttctcactcataagtgagagctaaaaaagtgtatttcaggaatgtagacagtagaatggtggttaccagagtctgaaaagggaagctgggaaggtagatgaagttcattaagagctatacaaatgcggttagatagaaggaa

SEQ ID NO: 432254 - DNA, 599 bp, Homo sapiens
gtctaatggagttatcttggtagattacctgcctcttctctgtatctttctgtattagtacacttttacactgctttaaagatactacttgagactgggcaatttataaacaaaagaggtttaattgactcacagctccacatggcttgggaggcctcaggaaacttacagtcatggtaaaaggcaaaggggaagcatgcatcttttttacagggtggcgaaagagagaaggagtgagaaggggaaatcccagacacatagcaaacaaccagatctcatgagaattccctcactatcatgagaacatcatgggggaaactgccctcatgatccaatcwcctcatgccagttccctcccttgacacatggggattaaaatgtgagaagagatttgggtggggacacagagccaaactatataattccacccctggcccctcccaaatttcatgtcctttacacatttcaaaaccaatcacttcatcccagcagtcccctaagtcttaactcatttcagcataaactcaaaactcctagtccaaagtctcatctgagacaaggcaagtcctttctgcctatgagcctgtataatcaaaagc

SEQ ID NO: 432255 - DNA, 599 bp, Homo sapiens
gtctaatggagttatcttggtagattacctgcctcttctctgtatctttctgtattagtacacttttacactgctttaaagatactacttgagactgggcaatttataaacaaaagaggtttaattgactcacagctccacatggcttgggaggcctcaggaaacttacagtcatggtaaaaggcaaaggggaagcatgcatcttttttacagggtggcgaaagagagaaggagtgagaaggggaaatcccagacacatagcaaacaaccagatctcatgagaattccctcactatcatgagaacatcatgggggaaactgccctcatgatccaatctcctcatgccagttccctcccttgacacatggggattaaaatgtgagaagagatttgggtggggacacagagccaaactatataattccacccctggcccctcccaaatttcatgtcctttacacatttcaaaaccaatcacttcatcccagcagtcccctaagtcttaactcatttcagcataaactcaaaastcctagtccaaagtctcatctgagacaaggcaagtcctttctgcctatgagcctgtataatcaaaagc

SEQ ID NO: 432256 - DNA, 559 bp, Homo sapiens
gctcagtaatacaggatgattcaattttgtggcaccaccccctcaataatagaatcctatatttacctccatggagaaaaagggaagtagaattgtgtacctgcttgtaaatacttctgcctgctgttaacaccttttccttctttcattttcattggyttcacctaaattaaagaacacaaaggaatccaatcttccaatgtgtccaaaatgagaggaggactaaaagtattggtaagcactaatactctctaccatgctttatctcctgcaactttcataagcataccatatacaggagtttcaatgtcatttacattattattattgattttgaaagattgttatatgcattgtagagtgctttcatttctaatagaaccaaaactaatctcactcatttctaaacatcacagttgtactgcctttgttgagtaccattaatatagtccacacttaattactcaaatatactacatgattttatttctgtatctctttgcctgtattttaaaatccctgtctctttatgcccacctataaaaattctgtcactcct

SEQ ID NO: 432257 - DNA, 559 bp, Homo sapiens
gctcagtaatacaggatgattcaattttgtggcaccaccccctcaataatagaatcctatatttacctccatggagaaaaagggaagtagaattgtgtacctgcttgtaaatacttctgcctgctgttaacaccttttccttctttcattttcattggtttcacctaaattaaagaacacaaaggaatccaatcttccaatgtgtccaaaatgagaggaggactaaaagtattggtaagcactaatactctctaccatgctttatctcctgcaactttcataagcataccatatacaggartttcaatgtcatttacattattattattgattttgaaagattgttatatgcattgtagagtgctttcatttctaatagaaccaaaactaatctcactcatttctaaacatcacagttgtactgcctttgttgagtaccattaatatagtccacacttaattactcaaatatactacatgattttatttctgtatctctttgcctgtattttaaaatccctgtctctttatgcccacctataaaaattctgtcactcct

SEQ ID NO: 432258 - DNA, 559 bp, Homo sapiens
gctcagtaatacaggatgattcaattttgtggcaccaccccctcaataatagaatcctatatttacctccatggagaaaaagggaagtagaattgtgtacctgcttgtaaatacttctgcctgctgttaacaccttttccttctttcattttcattggtttcacctaaattaaagaacacaaaggaatccaatcttccaatgtgtccaaaatgagaggaggactaaaagtattggtaagcactaatactctctaccatgctttatctcctgcaactttcataagcataccatatacaggagtttcaatgtcatttacattattattattgattttgaaagattgttatatgcattgtagagtgctttcatttctaatagaaccaaaactaatctcactcatttctaaacatcacagttgtactgccwttgttgagtaccattaatatagtccacacttaattactcaaatatactacatgattttatttctgtatctctttgcctgtattttaaaatccctgtctctttatgcccacctataaaaattctgtcactcct

SEQ ID NO: 432259 - DNA, 559 bp, Homo sapiens
gctcagtaatacaggatgattcaattttgtggcaccaccccctcaataatagaatcctatatttacctccatggagaaaaagggaagtagaattgtgtacctgcttgtaaatacttctgcctgctgttaacaccttttccttctttcattttcattggtttcacctaaattaaagaacacaaaggaatccaatcttccaatgtgtccaaaatgagaggaggactaaaagtattggtaagcactaatactctctaccatgctttatctcctgcaactttcataagcataccatatacaggagtttcaatgtcatttacattattattattgattttgaaagattgttatatgcattgtagagtgctttcatttctaatagaaccaaaactaatctcactcatttctaaacatcacagttgtactgccttkgttgagtaccattaatatagtccacacttaattactcaaatatactacatgattttatttctgtatctctttgcctgtattttaaaatccctgtctctttatgcccacctataaaaattctgtcactcct

SEQ ID NO: 432260 - DNA, 567 bp, Homo sapiens
aagagcaaaagctatgcaattttctgccaaggcctatgagtggcaagcattccttcacaattttctctttcttcaactaagtgcagatgaaaataaggctctatgggatggtgtatccacaagacagaagaaatccatgttcataagtcatcaactggaggagtataacttgccaacaagaaacccaacttaaactgttaagttagtgagaaatgaatctgtattgaatatgtgctgttacgcaccttttattttatttgttatagttgtttaacttcttgtgccaaatataaggtacacctattttttgttcctatttcaagaggtaatagttttttaagaatacgctcacgttaactattctcagaatgattgatgtatatgcaagaatgctagttttaaaatttacagcaaaaggtacctcattctagtgrtgcaaagaaaatgtatatggaatcaaagtacttggcaagctaaattaggtagttaggaactgattaacaagaaatccaaatgtggtgagccttgagctttcttgtgatgaaatctgtatcacaagagagactg

SEQ ID NO: 432261 - DNA, 565 bp, Homo sapiens
ggcaaaccccacaatctgaaaaacttgtactgtattcctaaacatctttataattttgcccctctgtagctgacactcagctctcagcattcaagtgcttaaatataatgatttgttccttactaagttatataatgactcattcatttttaatcttctatttattttttttctgttttgttctttgcagtttgttttttaatcatttatttattttcaagataacaatttcctgactctctgtctctgtatttcatcatgaactactttcttctctgtacttattcattagtttctttctctctggaacagtattttcctaaaacattttcttcaactgttargaaaactcttctttcttgatctctatttcttagtgaaggttcttatattttgcttgctccagatatttccaattatgttcttaccagctagcttcaagagcaaaattcaacagcaaggctatttaaaggacccacatcaggcagtcagcaagttaaaatagttaaaataaagttaatcatatttttaaacttttattttaggttcaggggtacatgtgcaa

SEQ ID NO: 432262 - DNA, 481 bp, Homo sapiens
cacttacagggaccaatagtataaatttattttaaccttttacatgccttgattgaaataagacacacttcgttgactgcatagttaagtgtcttatttcccataatgctcctaaacctgctataaattgtcttgcttttgtcatcactctccatttttcctgaacaacattctctccccttctcaggcttgttttcttctgtctattcgtaaaatctcatttaaatgttggcctttttcatctgtgtatcatcattgtcaaactcccctcctttagctcaatacggcttatattttctatgcytgtattcattttttacatgtaaaaatgttttaattctccaatgcaataataagttccttgaagataaaggttattttagatgtcttcatattccctcaaagaactcattaaaagaatagatatcttaagaataaatcttcacacatatgatcagctgacttttaaaaaggtgtcagg

SEQ ID NO: 432263 - DNA, 541 bp, Homo sapiens
ttttaattctccaatgcaataataagttccttgaagataaaggttattttagatgtcttcatattccctcaaagaactcattaaaagaatagatatcttaagaataaatcttcacacatatgatcagctgacttttaaaaaggtgtcaggaccattcaataggaaaagaaaagtcatttcagcaaatgttgttggaaaaatatatccacatgcaaggtaatgaagttggatgtttactgtatatcatatgcaaaaattaattcaaagtgaatctaagacataatcttaatagctaaaactcttagtagaaaacataaagggaaaactttatgacattgtatttagcaatttttttggatataacacaaaaaatacctgaaatacaaaaataaataaactaggctttattaaaattaaaactttggtgtagcaaaggacccaatcaacagagtgtaagggtaagttgcagcattagagaaaatattttcaaattatatatttgrtaagggattactatccagaatgtgtaacaaactccttc

SEQ ID NO: 432264 - DNA, 623 bp, Homo sapiens
ataactacaatatatccaaaataattgaaacagggacaggacttgaacaaacatttgtacaacaatgtttataacagcattattcacaatagccaaaakttggaaacaccccaaagattcattagatggatagacagataaatagataaaccaaatgtggtatatacatacaatgacatgttattcagcattagaaaaataaaattatgatgcatactacaacttttatgaacatttaagacaatgtgctaaacaaaataagttagacagaaaagactacagtaggattccacttctatgagtaacagaataggcaaattcatagaagcagaaagtagtatagaggttaccaaggctgggggaaaggaatgtgggaagtattgtttaatgggtatacagttttattgatgattataaaatattttgagtatggatactagtgagagttatgcaaattgtgaatatatttaatgccaatgaattatacatctatgaattataagattataattattttgctatatgtatctacaacaataagaaaagaagacatgcactaacctaacacaatattatttcaaaacatttgacaaactagctaaattagatggattaacatgcat

SEQ ID NO: 432265 - DNA, 623 bp, Homo sapiens
ataactacaatatatccaaaataattgaaacagggacaggacttgaacaaacatttgtacaacaatgtttataacagcattattcacaatagccaaaagttggaaacaccccaaagattcattagatggatagacrgataaatagataaaccaaatgtggtatatacatacaatgacatgttattcagcattagaaaaataaaattatgatgcatactacaacttttatgaacatttaagacaatgtgctaaacaaaataagttagacagaaaagactacagtaggattccacttctatgagtaacagaataggcaaattcatagaagcagaaagtagtatagaggttaccaaggctgggggaaaggaatgtgggaagtattgtttaatgggtatacagttttattgatgattataaaatattttgagtatggatactagtgagagttatgcaaattgtgaatatatttaatgccaatgaattatacatctatgaattataagattataattattttgctatatgtatctacaacaataagaaaagaagacatgcactaacctaacacaatattatttcaaaacatttgacaaactagctaaattagatggattaacatgcat

SEQ ID NO: 432266 - DNA, 623 bp, Homo sapiens
ataactacaatatatccaaaataattgaaacagggacaggacttgaacaaacatttgtacaacaatgtttataacagcattattcacaatagccaaaagttggaaacaccccaaagattcattagatggatagacagataaatagataaaccaaatgtggtatatacatacaatgacatgttattcagcattagaaaartaaaattatgatgcatactacaacttttatgaacatttaagacaatgtgctaaacaaaataagttagacagaaaagactacagtaggattccacttctatgagtaacagaataggcaaattcatagaagcagaaagtagtatagaggttaccaaggctgggggaaaggaatgtgggaagtattgtttaatgggtatacagttttattgatgattataaaatattttgagtatggatactagtgagagttatgcaaattgtgaatatatttaatgccaatgaattatacatctatgaattataagattataattattttgctatatgtatctacaacaataagaaaagaagacatgcactaacctaacacaatattatttcaaaacatttgacaaactagctaaattagatggattaacatgcat

SEQ ID NO: 432267 - DNA, 585 bp, Homo sapiens
tgacttgcttttagctacccaggtgaataagatagttacagtgcaatagctttgatcttgcctctttatttctcctctcattatgatattatactgattctctggtgctctttccaagtagttaccctcagctcatgagtaaatgttccaattgtaaaatttctgactgattaaatccaaagaaaacatgtaagttaatcttcttcttttaaataataaaattaaaatgaagaaaatttaagagcttgtgaaaatttccagaccaataagagtcaggagtaggactagaaagtaaattacttgaggtgtattaagtgttaatgctgctaagacaagrgtcttaggattaaatttgatgtcaatatttttacatgtagacagtctatgcctgatctgcaaattaggtagtccaatattaaaataataatttcttggatctagatttgtttggaatgatggagtgtaacacatatgtatctacattttcaaagaagaattgatgtggctggctctttcttctctaagtcataactgaagtgtcattccctcagagaaccctttcttggccatcctcttaaagtgtct

SEQ ID NO: 432268 - DNA, 597 bp, Homo sapiens
gcactattttgcaagagtagttagtttgtgtcatgtaattcagtttttggttgcatgctgatttgcattatgatttaatatttccacaaatataatgtgtttttgtttaattggttgctgcgtaagctccttcaggagagggactatacattgccttattatrttagtgtagtatggcaaagaggaaatgtttttgagtaatcaagtttctcattctggcttctccacttattttctgtgtgaccttggattagttaacctctttgagccttatttatttctgaaaaataaaattgtgataatcatggtacttactttgacagtattgtcataagaaacaaaaaagataatgcatgttgtctattttgctgaatacttgacccataaaaaattatccataaaaagagtatagcttagcggttaaggatatagtttctagatatgtactgcccaatttgatagccactagctacatatgactattaaacttaaattaatattaaatacaatttaatccctcaattgtactagccacatcttcaagtatttaatagccacatatgtcaagttgctaccgtattagccattataggtaga

SEQ ID NO: 432269 - DNA, 597 bp, Homo sapiens
gcactattttgcaagagtagttagtttgtgtcatgtaattcagtttttggttgcatgctgatttgcattatgatttaatatttccacaaatataatgtgtttttgtttaattggttgctgcgtaagctccttcaggagagggactatacattgccttattatattagtgtagtawggcaaagaggaaatgtttttgagtaatcaagtttctcattctggcttctccacttattttctgtgtgaccttggattagttaacctctttgagccttatttatttctgaaaaataaaattgtgataatcatggtacttactttgacagtattgtcataagaaacaaaaaagataatgcatgttgtctattttgctgaatacttgacccataaaaaattatccataaaaagagtatagcttagcggttaaggatatagtttctagatatgtactgcccaatttgatagccactagctacatatgactattaaacttaaattaatattaaatacaatttaatccctcaattgtactagccacatcttcaagtatttaatagccacatatgtcaagttgctaccgtattagccattataggtaga

SEQ ID NO: 432270 - DNA, 534 bp, Homo sapiens
tattacaggcactgtgcaagatgttgaagatacaatggcaggcaaaaaggacttttcttaaagcatacaggctagtgagccagatctaaacaaatgagaatagatgtaaacatataattataatctgtgataaatgctattaaaattacatagtattataatagtatgtaatgagagttcaaattaatctttgttcatgtaggaccattgaatgcctctctgaaatactgacttgtgaccttatgtctaagagttgagctatgtgattgtctgaagttaggaggacaatgaaggaaagaaatgagggactagtatgtaccaaagttctgtagtcagttggggcacgatgtaagatgataacgcaataaaccatgctagggtgmttttccctttatagtgaaagcaatgggcacccattgaaaaggtttaggcagggaagcagcacatgtatttgcaatttgaaaatatcactctagattgaacacaaagaataaacttggataggagataccatgaaaaatggaagactagtta

SEQ ID NO: 432271 - DNA, 399 bp, Homo sapiens
  misc_feature (1)...(399): n = A,T,C or G
gtccttatgtgttaggtgagtctcttgaagacaggacatacttaattggcaaaggcttatctattctgccattctttattatttaagtgcagcatttagacatttattttcaatgtcagtattgagaggtgaggtactgttctattcatsatgctagcttttgcctaaataccttgtttttttaatattatgttattgttttataggccctgtgagatttatattttagggaggttctattttggtgtatttctagtttaattttgatggatacaaaattattggctgacagttattttgtttcaggaggctaaagatagactccaatctattctggtttgtaaggtttcttctgagaaatcagctgttaatctgattagtttttncttacaggttatt

SEQ ID NO: 432272 - DNA, 399 bp, Homo sapiens
  misc_feature (1)...(399): n = A,T,C or G
gtccttatgtgttaggtgagtctcttgaagacaggacatacttaattggcaaaggcttatctattctgccattctttattatttaagtgcagcatttagacatttattttcaatgtcagtattgagaggtgaggtactgttctattcatgatgctagcttttgcctaaataccttgtttttttawtattatgttattgttttataggccctgtgagatttatattttagggaggttctattttggtgtatttctagtttaattttgatggatacaaaattattggctgacagttattttgtttcaggaggctaaagatagactccaatctattctggtttgtaaggtttcttctgagaaatcagctgttaatctgattagtttttncttacaggttatt

SEQ ID NO: 432273 - DNA, 399 bp, Homo sapiens
  misc_feature (1)...(399): n = A,T,C or G
gtccttatgtgttaggtgagtctcttgaagacaggacatacttaattggcaaaggcttatctattctgccattctttattatttaagtgcagcatttagacatttattttcaatgtcagtattgagaggtgaggtactgttctattcatgatgctagcttttgcctaaataccttgtttttttaatattatgttattgttttataggccctgtgagatttataytttagggaggttctattttggtgtatttctagtttaattttgatggatacaaaattattggctgacagttattttgtttcaggaggctaaagatagactccaatctattctggtttgtaaggtttcttctgagaaatcagctgttaatctgattagtttttncttacaggttatt

SEQ ID NO: 432274 - DNA, 534 bp, Homo sapiens
tgctaagagagaagggggcggggcgggggggtgttgctaaattggagaaaactgaaaggctcattctggtgtcccggaggagatgcaccttccttccttcaacttccagaatcacatagggctcctggatgataatggcggtctggaccaacagagctgaggagaggacccctggtatgcatcagttctgctggaccatttaggaaactggctctggacctgataacctgtgtctcgggggacagtctgccttccagtggtacccattacacattggtcaggcttgagttgacttcctcatgttgcttgagcagttcttcctaaagtgtcctgactcctgactttgtgatgctattattaagtacatgaactaaccaaccttgtagctatgctacctttagatttccaatgtgaactaataaacctttytgttattgttgtttaagttcctggcatatttcagttgaaataattgtaagggttcttaggaactgtatttaaaaatattggcaatattacactatgaagcaatca

SEQ ID NO: 432275 - DNA, 609 bp, Homo sapiens
tggtcctcgtctgcttttggtatcagggtaatgttctctgcataraatgacctagaaataatccctttctcttaacatttttgggaataatttgagaataattagtgtcattcttcattgtaagtttggtaaaatttagctgtaaagccatctagtcctatacctttctttattgggagatatgttttacagattcagtctgattacttactgttgatctgttatacttttctatttttttctgattcaatcttgttaggtagtatgcattcagaaatttatacatttttctaggttttctaaatggttagcatatagttattcattatagtctctgatgatccttcatatttctgtagtattagttgcaatgtgtcctttttgattatggttttatttatttgggttttctctctttttctcttgagttgtctagcaaacagtttatcaatattgctcagttttttaaaaatgacttttccttttgctgagtatttgtcatttttatttatatcttgtttagtccttttctaatttttattgcttcttttcttctactactttatatgtattgttcttgattttctagttccttaaagtaaaatgata

SEQ ID NO: 432276 - DNA, 481 bp, Homo sapiens
ttattatgttaagatggttttcttccattcctacttggttgagtgtttatactataaaaggtgctttatcgtgaaagggaagctctgctgtacatgacaaataactttttccttgcttctttgaagattctctctttgtctttgactttacagtttgattataatttgtcttgtagttctctttggatttttttccagtttaagttatttgtgagttttgaatttgcatgtctatttaattctgcagattgggaagttttcagttgtaatttattcaaatatgctgtccttctatttatctgtttctcctttgggaattcatattgtgtatattggtgtgcttgatagtttcccrtaattcccctaggctctttgctttcctcctttcttttttttttttttaatttttgctcgtttgactcaatgatttcaaatgacctgtcttcaagttcacttattcttttttttttgtcttgccaat

SEQ ID NO: 432277 - DNA, 531 bp, Homo sapiens
  misc_feature (1)...(531): n = A,T,C or G
ggggtagaggcacctgtgtgtgcgcacacttttgctagtggtggcaatcttcatctcttttgggtcctgtcacttcctagccttgaatatttggctaataccccctttatcttagcttctgttttcttctcactacaaaataaattgtgagtgtttgtgtggaaggttctgcagagggattggaaaaaatgagatcattttgaaaatttcttctctgttattccattctaggtttacctggataacagcccattttagttatacgtaatggcatttacttctcagtaagcctctagtaagtctacacaaacccaaggctgtaaataaatattaaacagtaaaagtgaaaacctaaaaacttgctcttactattgcaatgtaawggcaaaaatttgaatgaagccaatttaaatnttgtgataaaattgatgcagtaagaattctgacccatttttgacgtctaaattagcagttttaaaaagctgtgaaatgcatcatgttgactaaaaggaaactaagaagcagtggtcc

SEQ ID NO: 432278 - DNA, 531 bp, Homo sapiens
  misc_feature (1)...(531): n = A,T,C or G
ggggtagaggcacctgtgtgtgcgcacacttttgctagtggtggcaatcttcatctcttttgggtcctgtcacttcctagccttgaatatttggctaataccccctttatcttagcttctgttttcttctcactacaaaataaattgtgagtgtttgtgtggaaggttctgcagagggattggaaaaaatgagatcattttgaaaatttcttctctgttattccattctaggtttacctggataacagcccattttagttatacgtaatggcatttacttctcagtaagcctctagtaagtctacacaaacccaaggctgtaaataaatattaaacagtaaaagtgaaaacctaaaaacttgctcttactattgcaatgtaaaggcaraaatttgaatgaagccaatttaaatnttgtgataaaattgatgcagtaagaattctgacccatttttgacgtctaaattagcagttttaaaaagctgtgaaatgcatcatgttgactaaaaggaaactaagaagcagtggtcc

SEQ ID NO: 432279 - DNA, 584 bp, Homo sapiens
gctcttcccctgaggcattagagatcagtctcaaaagaagccccttcaaattgaagatgataagaagaacagtttcattttacccacaacagctgtcaaccaaggcaacacagcttgctactgagagaggccccctcaatctataatttctcccacaggagaaagtgagagtgaagtgaacacctggtgtgcccagatttgcaggatgcttatcaggaggcctgattatgtcttatcccacccagagtactgaggggattggtacctctgaattctctgggggaagttaggagcaagatgaaaggcctggagctaatagcaacctatgtgtgaatcacagcagctaactatggatcttgtcaactgacctgtaaactccactaagaagcttttccataaaccctacaaaacaacacacctgcagaatcccacaatcagtttacatatgccaccatcattctctatgccaccatgaccagcaccccacatgccctggtgcacagtgccccatgttatttctacagagggcatgtacaagacttctcyaatagcacacagagctcaaaagcaggtgtagatatcat

SEQ ID NO: 432280 - DNA, 594 bp, Homo sapiens
tctctgtcgggagctctgtgagagctgtgtcttgttcatcccagtgtccccagcactcagcaccgggcacctggtcacacatggtggggggacaatggacagaggtggaggctgcaaggtgggccagtggacactagagggcactgtggccactagaatcccagcctgctgttggccaggccgacccaggaggctcccaggcccacaattgtcacakggaaactgttactgggtcctgcagctcctcagctctggacttaagcaaccagggccacagttccagcctcccgataaaccttctgctccctttccagatgagaccgtttctcatgacagtgccatctcactgcagatactcctttagttcttcacaaacgtgggtgccaaacactcttctcgcagttctggcctgcaacactcttcacttcactttgccccacccaacccctcccctggctaacttctactcatgctccaagcttccacttagatgtcagcttggagaagcctccctggccctcaggctgggttgggtatatttccgtggtgctcccacagcaccctgcacttcccctataattgtctgtaattgtc

SEQ ID NO: 432281 - DNA, 525 bp, Homo sapiens
aaatgcatcaagggacaccatcaacagaatgaaaagacaactyacagaatgagacaaaaattgtaaattatatatccaatgagaaactaacatccagaatatacaaagaattcccacaacttaatgataataaacaagcaccaactaaaaagtgggcaaatgaattgaataggtatttctccaaagagatacaaatggccaataaaagcataaaaagatgctcagtttcactaatcattaaggaaatgcaagtcaaaagtacaatgaggtaccactgcacaatcattatgatgactattacaaaaaaaataaaaactgtgagtgaagatgtggagaaattggaatacttgtgcattactgacaagaatgtaaaatggtacagccacagtggaaacagtttggcagtgcctcaaaaagttaaattatcatatgatccagtaattctacttctcagtatatactctaatgaagggcaagcagggatttgaacaaatatttctatacaaatgttcatagcatcatcat

SEQ ID NO: 432282 - DNA, 537 bp, Homo sapiens
tccacttggagtttggtccccaaatgcttgtcttcttatcagttttgcaaggtttctcagcctatggttaggtactaaaatgcaaagtaattaccttcttaattctaaaacagttgagcaataggtgaaagaaccggaaagagagcaaaattattagccttacttttagtacagttagaaytgagaatgcaacttgaacaagagaccaaaatgggcttcccactctttcccaagttagatttttgaagccacttgggggagatttgagattgcaaagacacttacccagccagtcacatgggatatctcagcaagcttcacacctcaatgagtgtagagtccaagtgccaaaaagagtgaggtgagaggtgttcagctacctttaatctattaacaccacccaagataaaaaaaagtatgagccaatggatgtcagactttacccttctcactaatcagttaaattgcggagaggaaccagtgaaaaggttggacagatgggcaaaaggtttcttccaaaaacgtatgagagggcag

SEQ ID NO: 432283 - DNA, 603 bp, Homo sapiens
tacaagtgctacagagttagagcatgcagcccagaaattgggaactgagcactgggctcctaaaatctttcagaaacaaagtcagttggctgaattcaacttataccacagtcaaacactcaaggacatcaaatagaagaaaaaaaaaacattcaagtgtcagcagtctgaagttaggtaagcccacaaagataagaaagagtcagtgcaagtatcctgaaaactcaaaaagacagagtgccttctttcctccaaaggaccacatagcctctcaagcaagttytgaactgggctgagatggctgaaatgataaaaacagaattcagattttagataggaatgaagaagcccaatccaaggaagttaaaaaatcatgatacaacaatgcaggagctgacagacaaaatagccagtatagaaaaaaaaaaaacataaccaacctgatagagctgaaaaacacactacaagaatttcatgatgcaatcgcaagtattaatagcagagtagacaagtgaaggaaggaatctcagagcttgtagactgggtttctgaaataagacaggcagacaggaatagagaataaagaataaaaataaatgaaca

SEQ ID NO: 432284 - DNA, 636 bp, Homo sapiens
cccgtctctactaaaaatacaaaaattatccaggcatgttggtggctggcgcctgtagtcacagatacttgggaggctgwgacagaattgcttgaacccaggagatggaggttgcagtgagccaagatcacaccactgaactccagtctgggagacagagtgagactccatctcaaaaaaaaaaaaaaaaagaaaaagaaaaattccgcagattcaaatgttataatcatgataaagtttttgtttgtttgtttcattttgtgatttggttttccccctgtgggtacctttattctcatgcatatcttctctatatactttcaaaggtggccagctaaaggtccaggtttatgacattgttgatgtaaactttaaactaccaatggataaaaagttcctcaacttcaaatcccaaaaactacagctttaaactctcttataattcctatcatggcatagatgagcactgcagacattaaactggtttctggattttatacttatttcctatctgcattttcctgcaagagtaatattcactcacggatttatggtaacatttttttaaacttaaatatcccattacacttcacaagcgtatctttgctcattatatgactagagcatcacaaaaag

SEQ ID NO: 432285 - DNA, 636 bp, Homo sapiens
cccgtctctactaaaaatacaaaaattatccaggcatgttggtggctggcgcctgtagtcacagatacttgggaggctgagacagaattgcttgaacccaggagatggaggttgcagtgagccaagatcacaccactgaactccagtmtgggagacagagtgagactccatctcaaaaaaaaaaaaaaaaagaaaaagaaaaattccgcagattcaaatgttataatcatgataaagtttttgtttgtttgtttcattttgtgatttggttttccccctgtgggtacctttattctcatgcatatcttctctatatactttcaaaggtggccagctaaaggtccaggtttatgacattgttgatgtaaactttaaactaccaatggataaaaagttcctcaacttcaaatcccaaaaactacagctttaaactctcttataattcctatcatggcatagatgagcactgcagacattaaactggtttctggattttatacttatttcctatctgcattttcctgcaagagtaatattcactcacggatttatggtaacatttttttaaacttaaatatcccattacacttcacaagcgtatctttgctcattatatgactagagcatcacaaaaag

SEQ ID NO: 432286 - DNA, 576 bp, Homo sapiens
tagaatgcaatttggcttttacgctgaatgttatggaaagccattcatatactgatagcagaggagcaatatgatttgtcatatagtttaacaggatcaccctaggaactttgtagaatagtctgtattgggtccagagatggaaaaggggagattaaatatgctaatgaactgatgagtgacctagacacagatttacacataggaaacgaattataatagaaatgagatttcagatgactaacgaaaaaaaaacttttttttaaataaatagtactgtgttaactggctgtttgtttaaaaagaaaattttacaacactacgtgcaaaataaattccaagtgaacaaaaaatttaatacctaaacttggaaagtaacatgtataaaatctttaaaatacaatggaagatagtatttatattttgaactctgtaaatgaggaagattacaaaggcacagaatgcacaggtacttactaaaggaaattttaatamggttgattaaattataatatgccatctcctacttgcaaaaattaccctatacaaagtagggaaaaataagacgtggctata

SEQ ID NO: 432287 - DNA, 590 bp, Homo sapiens
gtataatgatggttagcaatcagaaccctcaatctcagtagtgttgtctgtggtattatcacacatctcccagaaggagtgactgaaaatctccaacaaaatttagcaggctgcttgccaaatactcaatcctcaggtaaataaagaaaaattgttttcacttcagcatctctaaccaaaaaggaagcctaacmcctaactggagcctttgggtactgaaaacagtttctgatttcttgggcattctgctttgtcctttatattagatacccacaagtcaatatatttttagtttgatccaaaagaacagtccgtgataaaaactgttaagaaagctgtgtaatgtgctctacctttggggcccacaatcataatgacactatttttagtataattattttatttaaattgacaaataataattttatatatttatggagtacaatatggttttttcatatatgtttacattgtggaataattaaatcaagctaattaacaaatccattacatcacacacttattataaaaacattaaaaatctacactttaggaattttgaaatatataatacataacccttttgatct

SEQ ID NO: 432288 - DNA, 606 bp, Homo sapiens
tcaatatatttttagtttgatccaaaagaacagtccgtgataaaaactgttaagaaagctgtgtaatgtgctctacctttggggcccacaatcataatgacactatttttagtayaattattttatttaaattgacaaataataattttatatatttatggagtacaatatggttttttcatatatgtttacattgtggaataattaaatcaagctaattaacaaatccattacatcacacacttattataaaaacattaaaaatctacactttaggaattttgaaatatataatacataacccttttgatctataagtctctatggctgatgactctataataggatgcttagggaaaaaggcagaacactaacattaataaaagttttaaaaacattcaacacgatacaatcttttgtagatataaacttatattaaaagcataataagtgcatagaaatgaaaaattatcacattctggaaaatggttacctctagagaaaggcaaagcagagaggcattggagaaagatacaaagggcacttcacgtgtaatagtttaaattatgtcatcttcctttttaaaactaaaaaataacaaaattt

SEQ ID NO: 432289 - DNA, 615 bp, Homo sapiens
agtttcttatcactctgtccttgtccttactgtctgctcagtgagattcatctttatcctcctcctacctttattccttctttactttctctcatccttctgaactcaacctacccattaccttctccaaaatatcttttctaacacccatgtggctacatattcctttctccatgctcctataataygctttaaatttatatatatttttgtttatgcaaaatgtttcatatttatctatgatgtgtctattatctactaggctaagagctctcccagactgaatcttgtttatattttcagtaactagtgcaatgtccaggtcatagtaagcattctgtaaatatttattttataaattattacacgagtaaatgatctcattatatcctgtcaatagctccatgagttaaagagcaattaatattctcatttcacagttaaagacgctaaggcttggcaattttaaggccacaattctaataagtcctgcaaagccactggaagccagttccacagatttaatgttccctcagtttgcccagtatcattcttctgcagtaacttgctcttgtgaatcaagaatattgcaatttaatatatcccacatttata

SEQ ID NO: 432290 - DNA, 575 bp, Homo sapiens
gcaaactaaatacggcctgagaaggactccgtacttctatatttgagtcccctgtggatgaactacaacctatctcaataggtagacaagattgaaaaaactaacttaggagtatgggcctgtgacaatcactcagtcttggccaatcccagccgccattcttcarccagttatacactgctgattgttcaaactgtgttcaaataaggcaaacagcgagctgtaaccaatccagctgtttctgcatctcacttccgatttctacatgtcactttacttttttttgtctataaatttattctgaccacaaggcacccctggagtctctctgaatctgctgtaattctgagggctgcctgattcgcaaatcgttcattgctcaattaaactcctttaactttaatttggctcaagtttttcttttaacactatattttttttttttgtcttttagcatcatttttaaaaatagcatttaactcctttgattcagtggttgctatggtttcactatttatcccctccaaaatttaacccccagtgtggcagtattgagaggggaggcctttaagagg

SEQ ID NO: 432291 - DNA, 598 bp, Homo sapiens
ttctgttccttcccacaataggagctttgcataagctctttactccaacagaataggcttccttgatattctctttctgaatacagataatgtaaatattactttacgttgtaaatattaacatttctctgactgagtgtacgtcttccccattgacagtaagtttcacaaggataggaaacatgttttcagtttttgtcttgttaytgttttgttttctcatcatactccagcaactagcaccttttatgtactgtttttaattaaaatttgaatgagtgaactaaaacatcaggccttaaatctgcatacatatttggctctagtcaattatatatatacttctttattttcactaatttggttgcacattttattatgtctccaaatcattgtgaaagacagtaagcaaaaactgacaaattagtacaatcttggaattcatgtattataaaaggctggttcagattgttttactcaattgtaacatgttttgattgaaacggtgtaaaacaggaaaaaattatctagaaccaaacttttattgcatgttggctatggaaaagtacaaataataactaagacgtaatcaactagg

SEQ ID NO: 432292 - DNA, 598 bp, Homo sapiens
ttctgttccttcccacaataggagctttgcataagctctttactccaacagaataggcttccttgatattctctttctgaatacagataatgtaaatattactttacgttgtaaatattaacatttctctgactgagtgtacgtcttccccattgacagtaagtttcacaaggataggaaacatgttttcagtttttgtcttgttactgttttgttttctcatcatactccagcaactagcaccttttatgtactgtttttaattaaaatttgaatgagtgaactaaaacatcaggccttaaatctgcatacatatttggctctagtcaattatatatatacttctttattttcactaatttggttgcacattttattatgtctccaaatcattgtgaaagacagtaagcaaaaactgacaaattagtacaatcttggaattcatgtattataaaaggctggttcagattgttttactcaattgtaacatgytttgattgaaacggtgtaaaacaggaaaaaattatctagaaccaaacttttattgcatgttggctatggaaaagtacaaataataactaagacgtaatcaactagg

SEQ ID NO: 432293 - DNA, 545 bp, Homo sapiens
ggggccctatcttcaacctcttcaaacaaaacaattatcagctaagaattttgtatccagtgaaactaagcatcatatatgaaggaaagatacagtcttttttcagacgaacaaatgctgagacaatttgccattaccaagccaccactacaagaacgactaaaaggagctctaaatcttgaaacaaatcctggaaactcatcaaaacagaacctgtttaaagcataaatcacacaggacctataraacaaaaatactagttaaaaagcaaaaacaaacaaattaaaaaaccaaagtacacgggcaacaaagagcatgatgaacgcaacagtacctcacatctcaatactaacattgaatgtaaatggccaaaatgctccacttaaaagatacagaacctcagaatagataagaagtcaccaaccaactatcttctgccttcaggagacttacctaacacataaggactcacataaacttaagtaaaagggtggaaaaggcatttcatgccaatggacacctaaagcaagcaggggtagctattc

SEQ ID NO: 432294 - DNA, 545 bp, Homo sapiens
ggggccctatcttcaacctcttcaaacaaaacaattatcagctaagaattttgtatccagtgaaactaagcatcatatatgaaggaaagatacagtcttttttcagacgaacaaatgctgagacaatttgccattaccaagccaccactacaagaacgactaaaaggagctctaaatcttgaaacaaatcctggaaactcatcaaaacagaacctgtttaaagcataaatcacacaggacctataaaacaaaaatactagttaaaaagcaaaaacaaacaaattaaaaaaccaaagtacacrggcaacaaagagcatgatgaacgcaacagtacctcacatctcaatactaacattgaatgtaaatggccaaaatgctccacttaaaagatacagaacctcagaatagataagaagtcaccaaccaactatcttctgccttcaggagacttacctaacacataaggactcacataaacttaagtaaaagggtggaaaaggcatttcatgccaatggacacctaaagcaagcaggggtagctattc

SEQ ID NO: 432295 - DNA, 545 bp, Homo sapiens
ggggccctatcttcaacctcttcaaacaaaacaattatcagctaagaattttgtatccagtgaaactaagcatcatatatgaaggaaagatacagtcttttttcagacgaacaaatgctgagacaatttgccattaccaagccaccactacaagaacgactaaaaggagctctaaatcttgaaacaaatcctggaaactcatcaaaacagaacctgtttaaagcataaatcacacaggacctataaaacaaaaatactagttaaaaagcaaaaacaaacaaattaaaaaaccaaagtacacgggcaacaaagagcatgatgaacgcaacagtacctcacatctcaatactaacattgaatgtaaatggccaaaatgctccmcttaaaagatacagaacctcagaatagataagaagtcaccaaccaactatcttctgccttcaggagacttacctaacacataaggactcacataaacttaagtaaaagggtggaaaaggcatttcatgccaatggacacctaaagcaagcaggggtagctattc

SEQ ID NO: 432296 - DNA, 614 bp, Homo sapiens
tatatcagacaaagcaaactttaaagcaacagtttttttaacttaaaaaagtcaaagagggacattatataatggtaaaaggccttgtccaacaggaaatatcacaatcaaatatcataaacatatatgcacctaacactggagcttccaaatttataaaacaattactaataaacttaagaaatgagatagacagcaacacaatagtagtggggggcttcaatactccactgacagcactagacaggtcatcaagacagaaagtcaacaaagaaacaatggatttaaactataccttggaacaaatggacttaacagatatatacataacatttcacccaacaactgcagaatatacattctattcaacagtgtgtggaactttctccaagatagaccatgtgataggccattaaatgagccacaatacatttaagaaaattgattatatcaagcactctctcagaccacagtggaatgaaactggaaatcaactccaagaggaaccttcaaaaccatgtaaatacatggaaattaaataacytgtttctgaatgagcattgtgctaaaaatgaaatcaatatgaaaatttaaaaattattcaaaccaaacaa

SEQ ID NO: 432297 - DNA, 457 bp, Homo sapiens
ctgccaaggacctccagtacaatcttaacttttaaaaaatgatgtccagatatggcagattggttgaaattatcagaccagaaatttaaaacaactatgattaatatagtaagggtactaatgaataaagtagacagcatgcaaggatagatggacaacataaacaaaaagatgaaaattytaagaaagagacaaaaataattgctatataaataaaaaacactgtaacaaaaatgaagaaaaaatgtctttgatgggcttattaatagactggacatagctgaggaaagaatctctgaacttgaggatatctcaatagaaacctcccaaactgaaaaggaaggagaaaaaagactgaaaaaagcagaacagaatatcccaaaactgtgggacaaccacaaaaggtgtaacatgtccataataagaataccagaaggaaaataaagacagaaagcag

SEQ ID NO: 432298 - DNA, 593 bp, Homo sapiens
aaaattctaagaaagagacaaaaataattgctatataaataaaaaacactgtaacaaaaatgaagaaaaaatgtctttkatgggcttattaatagactggacatagctgaggaaagaatctctgaacttgaggatatctcaatagaaacctcccaaactgaaaaggaaggagaaaaaagactgaaaaaagcagaacagaatatcccaaaactgtgggacaaccacaaaaggtgtaacatgtccataataagaataccagaaggaaaataaagacagaaagcagtagaagaaatttttaaaacaataatgaaatttctccaaactaatgtcacaccaaaccacagacccaggaagctcagagaatatgaaatgagataaatgccccccaaaagctacacatggacatatcatattcaaactacagaaaataaaagatgaagaaaaaattctgaaagcagctagagaaaaaaaaacaccttacctatagaggagcaaaaatcataattacatctgatttctcctcagaaaccaatgcaaataagacaagagtgaaatgaaacatttaccttattgagaggaaaaaaactctacca

SEQ ID NO: 432299 - DNA, 599 bp, Homo sapiens
caataaaatcaactgataattgacaaaagaacaaaggcaattcaatggagcagagakagtcttttcaacaaatgctgctgaaacaattggacatccacatgcaaaagaagttaatctagactcaaaccttacattcttcacaaaaattaaaatcaattaaagacttaaatgtaaaacacaaaactataaaattcctagaacataacctaggagaaaatttagatgaccttgggtttggtgatgactttttaaatatgacacagaaagcacactccatggaagaaagaattgataatttggacctaattaaaattaaaattttacgttctgcaaaatatactatcaagagagtgaaaagacaagccacagtctgggagaaaatatcttcaaaagacatatttgataaagaactgttatgtaaaatatacaaagaacttttaaaatttaacagtaagaaaatgaacaacctgatttttaaaaatgagtcaagaccttaaaagaaaccttcccaacagagatacatagatcccaaatacacacttgaaaagatgctccatgtaatatgtcttcagagagatgcaaattaaaacaacactgag

SEQ ID NO: 432300 - DNA, 634 bp, Homo sapiens
acaatggaatagtattcagttttaagaagaaatggattatcaacccatttaaagacatggatgaagcttaaatgcatattactaagtgaaagaagccaatctgaaatgggtctataatgtataattacaactctttgacgttctgtgaagacaaaactacgaagacagtaaaaagatcaatggtttccagggtttagaaggaagaaaaggatgaatagccagggcacagagaatttttagggcagtaaaactactctgtatgatactataatggtaaatatatrtcattatatatttgcccaaacccatagaatgtacaacaccaagtgcgaaccctaatgtaaactacaaactttaagtgataatgatgtgatgtgttaatgtaggttcatcaattgtaacaaatgtaactctctggcatggtgggggttgggggggatgttgctagagggggaggctgtgcacatgtgggggaagggattatatgggacatctcagtaccttctgctcaattttgctgtgaacctaaaactgttctaaaaaattaaagcctattttttttaaaaaaaagatggcacctctgtcttgttcttaagttttatgggcatgtttccagtttttcaaatgatgtttc

SEQ ID NO: 432301 - DNA, 521 bp, Homo sapiens
cctcctggcctcctacctggacaggrtgaggggcctggagaccgagaattggaagctggagagcaaaatccaggagcacctggagaagaagggaccccaggtcagagactggagccattacttcaagaccatggaggacctgagggctcagatctttgcaaatactgtggacaatggccgcatcctttgacagatcgacaatgcccgtcttgctgctgatgactttagagttaagtatgagacagagctggccatgcaccagtctgtggagagcgacatccatgggctctgcaagataattgatggcacaaatgtcactcagctgtagctggagacagagatcgaggctctcaagaaggagctgctcttcatgaagaagaacaacgaagaggaagtaaaaggcctacaagcccagattgccagctctgggttgaccgtggaggtagatgcccccaaatctcagaccttgccaagaacatggcagactcccgggcccaatatgacaagcttgctcggaagaa

SEQ ID NO: 432302 - DNA, 521 bp, Homo sapiens
cctcctggcctcctacctggacaggatgaggggcctggagaccgagaattggaagctggagagcaaaatccaggagcacctggagaagaagggaccccaggtcagagactggagccattacttcaagaccatggaggacctgagggctcagatctttgcaaatactgtggacaayggccgcatcctttgacagatcgacaatgcccgtcttgctgctgatgactttagagttaagtatgagacagagctggccatgcaccagtctgtggagagcgacatccatgggctctgcaagataattgatggcacaaatgtcactcagctgtagctggagacagagatcgaggctctcaagaaggagctgctcttcatgaagaagaacaacgaagaggaagtaaaaggcctacaagcccagattgccagctctgggttgaccgtggaggtagatgcccccaaatctcagaccttgccaagaacatggcagactcccgggcccaatatgacaagcttgctcggaagaa

SEQ ID NO: 432303 - DNA, 521 bp, Homo sapiens
cctcctggcctcctacctggacaggatgaggggcctggagaccgagaattggaagctggagagcaaaatccaggagcacctggagaagaagggaccccaggtcagagactggagccattacttcaagaccatggaggacctgagggctcagatctttgcaaatactgtggacaatggccgcatcstttgacagatcgacaatgcccgtcttgctgctgatgactttagagttaagtatgagacagagctggccatgcaccagtctgtggagagcgacatccatgggctctgcaagataattgatggcacaaatgtcactcagctgtagctggagacagagatcgaggctctcaagaaggagctgctcttcatgaagaagaacaacgaagaggaagtaaaaggcctacaagcccagattgccagctctgggttgaccgtggaggtagatgcccccaaatctcagaccttgccaagaacatggcagactcccgggcccaatatgacaagcttgctcggaagaa

SEQ ID NO: 432304 - DNA, 521 bp, Homo sapiens
cctcctggcctcctacctggacaggatgaggggcctggagaccgagaattggaagctggagagcaaaatccaggagcacctggagaagaagggaccccaggtcagagactggagccattacttcaagaccatggaggacctgagggctcagatctttgcaaatactgtggacaatggccgcatcctttgacagatcgacaatgcccgtcttgctgctgatgactttagagttaagtatgagacagagctggccatgcaccagtctgtggagagcgacatccatgggctctgcaagataattgatggcacaaatgtcactcrgctgtagctggagacagagatcgaggctctcaagaaggagctgctcttcatgaagaagaacaacgaagaggaagtaaaaggcctacaagcccagattgccagctctgggttgaccgtggaggtagatgcccccaaatctcagaccttgccaagaacatggcagactcccgggcccaatatgacaagcttgctcggaagaa

SEQ ID NO: 432305 - DNA, 642 bp, Homo sapiens
ttcctcatctcctgattcaagaaaccatgagacatgaagtatgatttactctaatggagtgggttatcagcacaatgaagaaacttatacatcagttggcttttgcaatgtaaaaaaaaacaacacctcaaaacatagtgctttaaaacaaccaattatttcactcttgattctataggttgatggaacagttcttctggtctgggcagcctctactaatctctgctggcaggttggctggaggctggatgatctaggacagactcagtcacatagttggtgtttggtagggcaacaatgatgactcatgattcagcargccggccctgggttgatcccagggttctaagagtgtgagggaagaagctgcaaaccttcttaaggcttaggctaacaattatgcatcacttccataatattacggtcaaaacaagtcacaagattcaaaggatgggtaagtagattctatttcttgaaggtaaaagctacagacgattgtggctatttttgctgtctccaagaggaggtgtacatgcaatacatggcactttactcacaattgcactaaacaaacccactgctggagacagaggtttgatggtggcaagagtgctggaaactggactctaaagaccaaggtcc

SEQ ID NO: 432306 - DNA, 620 bp, Homo sapiens
ctcattgtagttttgatttgcattactctgatgatcaataatgtcgagcaacttttcatatgcctgtttgccatctgtgtgtcttcttttgagaaatatctattcaaatattttccccactttttgatcagattattagattttttcctatagagattttttgagctgttgatatattctggttattaatcctttgtcagatgggtagtttgcaaatattttctttccttctgtaggttgactcatcactttgttgattgtttccttttatgtgcagaagctttctaatttgtgatctcatttgtccatttttgctttggttgcctgtgctcgtggggtattgctcaagaaatctttgcccagaccaatgttctggggagtttccccaatgtttttttatagtagtttcatagtttgaggtctttgatttaagtctttaatccattgatttcatttttgcctatggtgagagatggggactggtttcattcttctgcatatggatgttcaattttcccagcatcatgtatggattaytgattattaatgtcaaaaacgagttcactgtaggtgtatggatttgtttctgcattctccattctgttacattggtttatgtg

SEQ ID NO: 432307 - DNA, 562 bp, Homo sapiens
aaatctccaactatatttatcaatttgtctatttctcctttcagctctatcactttttgcttcatgccttgtgaggttcttttgtttagtgcatgtgcactcaggtttgttatggcttcctggtggacwgatctttctatcattgtataatgtcactctttttctctagtaatttttatttgatctgaagttgctttatcagatattaatatagccacttcttttttacattagcatctgtatggtttatcttttttgcattcttttactttcaacctacctatgtcactaaatttgaagtgagtttcttaaaagtagaatatagttgggctatgtttctttttaatcccctctgcccgtctctgttctttgattgttatattttcataatttatatttaaggtaattcttgatatgttagtgcttaattaagtttcccattttattgtttgttttctatctccattaggtctcttttctctttgttcagtgtgtgtgtgtgtgtgtgtgtgtgtgtgtgtgtaacagtgttaagattcttttttacttatgttagtatttt

SEQ ID NO: 432308 - DNA, 603 bp, Homo sapiens
ggctgcttttgttagattaaacattctttttttatctgacccagctttcagcttcatctacttagttatatcattggttgggtaacaggaattgccaggatgtcacccagtgggaaaatcaattcatgaaagaaggcctggtgctgtgtgtttgactatagagcatctcttttctttctccaagcatatctgtctcagcgcacctgggtattcctcccgagggctaagaagaagtttgaattgccctgctgttaattaacaacatccctttcyccttatattacaggtgaacttgattcattctcttgtatatattcctaagagagagactcactgtgaaaggacacatcactataaaataaagagaaggccaatggtgaagtgtttgaaagataattcattgttctagttggttattaaaataaatgtgtctcatgatagaatccagcatccaagtaggagctaaggatgttcttgttccatgaatttagatgtttcaaagatacatgcccccgccccactcctgacatttaatatctcttagcctttggattgaactcaattgttcttaatctgggccttttacagagggtgcagcagata

SEQ ID NO: 432309 - DNA, 632 bp, Homo sapiens
tttggaacacagcctggtccatatatgtttgaaatatatttgctattattattattattatatctgcagagtaattaatagagaaatgtaaaaatgggatgcttacattaacatctagctgtcaatttttgtttactcttcattgggttggrctttttaatacctcattgggctttggacagggttcactttcagctgaatatagatacaccaaggtcatgtattattatcattttttttgcgttcttgctttgtttcttacatatacttttctttcctgatatccccaggttgattccatacttttctggatccccttcttctgatccaagaaacttatctctcctgtattgaacttcctcaggattttatgccttatagctaagaaatatttaaaaattgtcatcatagctactaaacattttgggctacagtgtaagctatagaaacattaatgtctgacaccatttgcacttaattagggaatccttggtagttgtttattggaaggatggaccctactaatagaaatttggggcaaagggaagaagatattctaaagagcaataaaactttcaacctaaggactttgtagaaatgctattctgctcactcatgggcataatgaccac

SEQ ID NO: 432310 - DNA, 516 bp, Homo sapiens
ggatgcttacattaacatctagctgtcaatttttgtttactcttcattgggttgggctttttaatacctcattgggctttggacagggttcactttcagctgaatatagatacaccaaggtcatgtattattatcattttttttgcgttcttgctttgtttcttacatatacttttctttcctgatatccccaggttgattccatacttttctggatccccttcttctgatccaagaaacttatctctcctgtattgaacttcctcaggattttatgccttatagctaagaaatatttaaaaattgtcatcatagctactaaacattttgggctacagtrtaagctatagaaacattaatgtctgacaccatttgcacttaattagggaatccttggtagttgtttattggaaggatggaccctactaatagaaatttggggcaaagggaagaagatattctaaagagcaataaaactttcaacctaaggactttgtagaaatgctattctgctca

SEQ ID NO: 432311 - DNA, 445 bp, Homo sapiens
taacacatcagtaaactgtgctatctatttcacagagcttttgggaaagagaaaaaagccccaaaatattaaagcacttggcacaaataaaagactatataagacaatagaaaagcagtgactgacgagaagttttacctctgagtaaatataagtgagacttatattccagtgagacttaagatactatcagaggatgccaagccaagagttctttaaagaaaatcaagaaccatccacttctggggttggcaaaatggtgtgtgaactcaaagtgtgaaagtccactttaattgtcactgtaattccttgacattctttaaaaaattgtgtgcattaagaatcaataaatactkcctgatgtcagtaaataaataaaataataattagtagtatgttttcagtcctaaaacctaaacatatttagtaatataaagtactagta

SEQ ID NO: 432312 - DNA, 520 bp, Homo sapiens
ataaacaaaatgtggtctagctatacactggaatattattcaagaataaaagggaatgaagtactgatatattctacaacatagatggaccttggaaatagtgctaagtgaaagaagctgggcataaaagggcacatattgtatgattccatttatatgaaatgtcccacataggcaaattcaaagagacagaaagtacattagwgattgcctaaggctgggttgggtaggagtaagggggcagtgaatactaatgggtttggcttttctgtggtgataaaaatgttctaaaattgactgaggtcattgttgtacaactctataaatgggctaaaacccatcaaattatttactctaaagggtaaattttatggtatgtgaaatatttctcaataaagctgttaaaagcaaaaggccattggcacacaggtaggtgaacatttccattcccacccaattgaacccatcgagtaagaatgcatgattcagatgagaggactttgcttttggcaatgtgatt

SEQ ID NO: 432313 - DNA, 580 bp, Homo sapiens
accaacttagccccgcctcctattggggtgggatacacttatatatctttcaggtatctcatattttagaataaaattaaagtaagcatgatgcatggccttcataaatctgggctgcctggtttattctcccaccataacagtgtttctytaatttttaattttaatctcaatggtctttcactttcagaatggtagattccgcacaagtgtacaccttcatcatgctactacccactatgctttacttcctagtagatctttttcttttaaacaaatagtaacatttacttcccattttagaaacctaaattctgtatttactttgtctttaatatgcatacatagattgttcctgacaaatttccgaagataatcacctctttggaagctgctcttccactttgttgcagtcatattgtccatacaatttatctttagttgttttttttttcttctggatttcttactctctgttccttgaattcagtgtcctttctttttgatggcatctcggagcctctgacaaaaaatttcccacgtgttctttgcaaaataaactcctcttgtcagtcagtat

SEQ ID NO: 432314 - DNA, 634 bp, Homo sapiens
gctcccaactgacagtatctgaaagggtgcttctaggatcccagaataatcgtaaagcaaatgaccaaggtgccaggcaccaaccatgcgtcatcctagttaatccccatagtaaccctttgaggaaggtactatggttatctccacttcttaggtgaggaaacttgggcttagagaggtgataaacctgcccaaggccaagtttacacagcttatgaacagagaagctgggattcaaaacagatcttttgagcagaatccttactcttgggaaccataatgaacatttactgctttcctggactgttagagttagaggggatcccagcagtcatcttttccaaattgcttattttataaaaggggcaattgagaatcagagacctgaagcaatttgccaaaggaaatagagttggtcaacggccatgcctaacattcaaatmtcctggctagcagcacggtgttcctttaattgagcagggctccagttgcaggaagcagaaaggtgtttctgaacgctgggcagtttctttcagaggaacagttttatatcatttcttacatcattttcttgggtcatcctgcatgacacccacacgaacttctcatatttcctttatttttcacatgctag

SEQ ID NO: 432315 - DNA, 627 bp, Homo sapiens
gcaaataaaggcattctattaagaattaactaaaattaatacaagaatatattccattaatttcaatttaaattaataggggcatattataagacattggtattactaggatgytcaacacgaatagttttaaaatgaatgtaaaagcttccctctcttaatgttttatataatgcaattaaaaaaggaattcatttagctataatgtgcacatatatatttttaatataattatgtgtgtatgccacagctatccatttacagatttaactatgtataattttaaaaatttaagcacatacaaatataacatttataaggacttatttattttagatacatacatctatgtatatcattcatataaaaatggctgtggaggaaaacattgagtatatcgttttcagtttatgtcttgctatattttgaggagttaaatctttaacactttaaagatttgtttgctttaaaataccacggtaaagttatctattaatatagtgcattggtttgtttgataaagaattatgtcatttaaagaaatactgggccattatgtcctaatgacaagcctaatgagaaatgtctgtctccaaatttcacaagaatagagaaaaagttgttatg

SEQ ID NO: 432316 - DNA, 372 bp, Homo sapiens
aagggcatgaaattagttcacagcatgcatgaaagaaactgctgctttgtttttaggataaggcatgaccccccaccaaaagtaggcggagaataattaggagccatgtgcatgagtacagtttagtaccacaaatatgtattaaatgtcagttactgttttaggagttacagatacaaacgtaaagaaaacagcctctgttctaaaaaaatatgtatgttcttgtgaagtagattggtggcaaaagagtgatctatctrtctatttatctatatatatatatatattactcctagcataatacacgcaaacacacacatacacacacatatatgtttagtacaaatatatatatgactctaggtcatatat

SEQ ID NO: 432317 - DNA, 515 bp, Homo sapiens
aaataatttgtgattattaagcaattcagcaaaaaacactttatgatttagtatctgttaatatcattcttagcttcagctttttttccctaatatgctttttattatactttttagaaagtgagatttcttctaaggttcatctcttctgggccttgtctaaagttttttagttcttgaatacaaaaatgatgccattaaatgaactcatcactatgtaaggcgtcctgcacaacgcatacttaggatagaataatttaaagcctccagtgttacgtagctttgatcttattctccttgtaataagagatattaactaaatcaagtaacagatttaaaaaataaacagattaagayatatctacatgaaattaccaaatgggtcaagctatgtacattttgtatgttgattaacggaatgatccaattcaatttgactactgaaataagtaggtcatgcatgagccagtaatatagacagaaacccaaagctacttactgtgaaagaaacacaa

SEQ ID NO: 432318 - DNA, 539 bp, Homo sapiens
acatagctatggcttcgtgcctgtgctcggtacagggatttgattgataaagttcccaccacattagacctggaggctgagcccaacatctggagccaagttttgcaatcgagtctttatatcactagtgaagaactgctccctgcaaataggcagcaaaccacatagtgttctttcacagcgtgaayaattggcctgtgcatttgttatggcatttctttctatggtacttcccatttcagatgaagcacaagtaagaactgtgtttctctctttatttttaagaaaaatagcaagagagggtcttgctatgttgcccaggctcaaacttgggattcaagcaatcctcttgcctcatcctcccaaagtgccaggattacagacgagaaccaccacatgagcctggccaaatgagaactttctgaaaaagatattgccatctagaaaacttcttcccctaaagtcttagaatttgatactcaaatggtttcctatttgaaaaaatttatgattagatgttttggtaagacaaagagatt

SEQ ID NO: 432319 - DNA, 539 bp, Homo sapiens
acatagctatggcttcgtgcctgtgctcggtacagggatttgattgataaagttcccaccacattagacctggaggctgagcccaacatctggagccaagttttgcaatcgagtctttatatcactagtgaagaactgctccctgcaaataggcagcaaaccacatagtgttctttcacagcgtgaacrattggcctgtgcatttgttatggcatttctttctatggtacttcccatttcagatgaagcacaagtaagaactgtgtttctctctttatttttaagaaaaatagcaagagagggtcttgctatgttgcccaggctcaaacttgggattcaagcaatcctcttgcctcatcctcccaaagtgccaggattacagacgagaaccaccacatgagcctggccaaatgagaactttctgaaaaagatattgccatctagaaaacttcttcccctaaagtcttagaatttgatactcaaatggtttcctatttgaaaaaatttatgattagatgttttggtaagacaaagagatt

SEQ ID NO: 432320 - DNA, 331 bp, Homo sapiens
aactcagacttgcctcaagtctgtctagttctgtttctacaactttggaaagaagttcaggaacatatgtattactcaagagaagtgtatgatgaaaagcttactgcagttaaatagcttatgacttyacgaacatttaagtgcatttaccacaaacggataatgttatttatgttttggaataaatagagctgaaataaatatgattactacctgcaagtattaacattaagaggtacgtaaattccttgtattgaaaagtatatatatctgaactttttgcttgccacaagtcttgaataacaagtaacaaacatctatttagaactca

SEQ ID NO: 432321 - DNA, 331 bp, Homo sapiens
aactcagacttgcctcaagtctgtctagttctgtttctacaactttggaaagaagttcaggaacatatgtattactcaagagaagtgtatgatgaaaagcttactgcagttaaatagcttatgactttacgaacatttaagtgcatttaccacaaacggataatgttatttatgttttggaataaatagagctgaaataaatatgattactacctgcaagtattaacattaagaggtacgtaaattccttgtattgaaaagtatatatatctgaactttttgcttgccacaagtcttgaatracaagtaacaaacatctatttagaactca

SEQ ID NO: 432322 - DNA, 454 bp, Homo sapiens
tcagttaggtacacctgtccatgtgatgaattagawcatgcttttccacctataaactacaacttaatttgcataacttaatataagtagtattaatgtaagtgttatacatatttcaggttataattttgattacaatttgaagacataaatacaattggtttagttataaaattacactacttacttgctactttataactgctcactacctccttagtggaacccagattttctctacgatttgagaaaaattactccacatgttgcctagttatcaaactatattgggaagcagaaaaagctatgaaaggcttcaaagcttctgagaaccttagcacgaaaaactcttccaaaagcttttttcacttttcaatagttcctctttacatcacatttataatcactcaccagcaatctcttttccatgcttgatttgtgaggcttattgaaa

SEQ ID NO: 432323 - DNA, 574 bp, Homo sapiens
cagggacacatgtgaccttgataactataaagcataaggccatcttttcagtatgtcaacaaatagatcatttaagcagagtggcatagttttttgaggccagtttgcccaccaacattagtttgcctaactcagaataacatacagagaggcaagagtttgaaatgaatgaaaatatattcaatccataatcaaatgaaaaagttttgggaatggtgccagaaagccttcctgaattagactttcttcagcacctaaatttagccacctggcattctattttaagaatcattcagatttttgaaatgaaggatttgccttttaatgaagacaccctcatttcattaaaaatatggaacacattgtccttgactttgaatgtgttaaattccatgtgatgaaagaggtgacatcattagccacatacttcataaccagcggtgaaaaaagaaattttcaacttaaaaaggtattatgttataagtatcagtaattaytgcaacaaaagttattgattagaaaaatgcccaacttcgttttcaagggctaaagaatttaaaaatgtgaacagtat

SEQ ID NO: 432324 - DNA, 593 bp, Homo sapiens
tcaaaattaatgacttaagatgtttcataaggtcttcttatttttcttttaatatacgtagaacctaaagagatgtcatttttcttattcattatatggatattttgtgtcttctctttttatttcctaatcagtacaaatagaggtttatgtaagtgttattaatcttctcaaaggaccagcatttggttttatttatttttctctgctgctttttttcctattttttttttgtttcattgatttatttctgattttgagcttactttaagttttatttccttttccttttctagtttcttaatttagaagctaaggtcactgatctgtgatctttcctcttttctaatgtgttgctcaatgctataaatttccctctaaattaygctttggtggcatcccacaaatttttatatcttgcgttgtcattttaattaaagtaaaggtttcttctatttcttttttgattttctgtttgacccaagagtaatttaggagtgtattctttggtttcttagtacttgagaattttccaaggatctttctgttcatttttagtttcaatgctgtcagaaaatataatttgtatgact

SEQ ID NO: 432325 - DNA, 580 bp, Homo sapiens
aggtgttccatcttactcaccccattacagtcctttcaacactgtatcatagtcatctctttaatttgtatgtctcscacacttaactattagtttcgcaagagacttattaattcattgtttatctgatcattgttttcccagctcctaggtcctcaataaatgttgactaagtgactaaatagaggggtagaggaaatgaatgaaaacaggctaaaataagtcaatttttgaaaattaatcaaataacagattataaaaatttgcaaatgaattttttggaacatagcatcagacctcaaacaattataataaagaaataaaaaagtcatgcacatcagggaaaatccttaaagaagaggaaaaaaagtaaatacaatgtcaatctttaaaagaaaggaaaagaaatattggtcagcctaaaacacagtgccagggaagttacgaagataaatcatcaaaatgatcaatttgcaatcacccagaagaacataacagactgggtagcaaccaacatggcttttagaggaacaaatcatgccagaccaatttaatttccttctatgatagagtgacaggc

SEQ ID NO: 432326 - DNA, 600 bp, Homo sapiens
ttccaatgggggacagctggcactgtttattaaatcatttgcctcctgttgattgggataacacaattgttctctttaggggttacttttttaaaattttttttgtcagaaaatatatttattattggtagtgagtgaagtaaagatgtcagtattcacgatagacgttatataagccaaggttgcctttatattgataaaaataccttatttcacttctaatcatacatattagtcctgtaaaagaggtacatcatctctcctttttgtttccttgcttgcatgatcaccaaaagttaaaatgaaatcactcttatgtaatcaaaggtaaaaagaaaaagcaagaaaaccaacatgccacggcctagacaattccacccagcactgctgccctgagagctatgttttctggygctctcctctccacactccaattactttagccccacacctccacctcaccccatcacactttgttagggtggaggttcaccaaatgatggggcttgcttagaagataaacattttatgttcagtagaatttgaatagaaagtaccaaaaggtggagagggctgcccttctcttaatcatcgtaagag

SEQ ID NO: 432327 - DNA, 384 bp, Homo sapiens
attactgttggtccattgtggttgaaagattgtttatgtagttaaagtcaaaatctttatattgcctgtattataggacccagatctgttagaagaagaagaagaaaaaatagtgttttaaaaagacagttccccaaattggtttctctggaggatttaatttaacttcatgctgaagtagaatgaagtcgatcctgccgaagagttcacgtgttctgaatgtggaaattagctcttctgtggaatcagaaggattygcaatttgtataaatgaatgtttcttttactcagtttacttgcaaaacagtgcctgactcagtttcaccaagtaatagtgaaacctttgtcgagttggaaagtactcgcctttcaaagaagaaccac

SEQ ID NO: 432328 - DNA, 536 bp, Homo sapiens
ctcttttgagaccatgaaatgtgtttcctgatgagcgtctcagaatctatgctaacataggtaatgcatttttcttttcaccccccagaactcatttatcctgattagaagtttttggcacacctcgaatattacataatcagacatcagtacagaagctcttagcctcttgtcactgttcaggctaagccatcgccagtgttgtaacatcattgatatcgccagaagataactcaaagttgtctactggctatataatttgtcagacattaatagtgactagggctatcagtaaacatacagtaytttttgtcttcttttcctgatagtggttttgataagatttaaagtagcctcagctttagcttccttaagtactgggatgtgtgtgtgttttaaacgggtggcttaaaatgtcggatgccatcatcttctctaactgtaagccaaagaattgccacattttctgacttcttttgtcagtttttgacatttgctttcccttgttggaaaaagttgtcttttcaatgtgttag

SEQ ID NO: 432329 - DNA, 498 bp, Homo sapiens
gacagtggcctgaaaaacctgtaaagttgattccattcaattttaattgtatacagatagtcactgcctcagccacaatatcagatggcgtggtctgtgttttagatattcttttgttccagcatgactatctacataacatcagaattgccatctgattgagcaactacaactgccacagagagatttctttttatcttactttagtaacaatactctgtgtgtgtgtgtgtgtgtgtgtgtgtgtgtgtgtgtgtgtgtaatatggggtaatgactcttygagatatattttacaaattttaaaaattaatagaaacttaccaatcctaatttcttattttcatgtatttgcacattatatcagtcatgttattctcatttttaatctacatagtagatttatgctgcaatatgtagttaccttccatatttcctaatttggaagtgtttgaattgcttaaaacgtgagactttacaaatggttctgctatatata

SEQ ID NO: 432330 - DNA, 587 bp, Homo sapiens
aaactctttgttcattctaaataaaaacaatttaattaattcacttaggcaattccacaccaaatatctagtaattgagggaaacctacatatgagaaaagagggagtaaacagttaaggacagtggcctgaaaaacctgtaaagttgattccattcaattttaattgtatacagatagtcactgcctcagccacaatatcagatggcgtggtctgtgttttagatattcttttgttccagcatgactatctacataacatcagaattgccatctgattgagcaactacaactgccacagagagatttctttttatcttactttagtaacaatactctgtgtgtgtgtgtgtgtgtgtgtgtgtgtgtgtgtgtgtgtgtaatatggggtaatgactctttgagatatattttacaaattttaaaaattaatagaaacttaccaatcctaatttcttattttcatgtatttgcacattayatcagtcatgttattctcatttttaatctacatagtagatttatgctgcaatatgtagttaccttccatatttcctaatttggaagtgtttgaattgcttaaaacgt

SEQ ID NO: 432331 - DNA, 511 bp, Homo sapiens
ggtctagaagagtgtctagctccttttacatcattgcaggtttgtgtctagcaaaattaaaccaatttataaatgtataaattccaccaatggcagtcatatatgaatgtatgtcccctggatcctcgccttcagtgattttttttaaaaaattgtctattgttttgctagcttaattrgcatacaaagatacctaaaatttgaataactttcatttattttactattaatgagtgtgtatattgtgtttgccatggtcccttactacttcatttctatgatggaaatctacagaccacaaccgtgagtgaagtgctgtgtcaagatcataaagatgaccagggcatcactggtaccctcaaagggcacatagtataaatgaaggatacaaacgtaaaaggaaaaccacaacaaaaaataagttacaccaaaaaaattaaatactatatagcaataaaaaggaatgagctgctgacacgtgcaacatcagataagaacttcagaagcatga

SEQ ID NO: 432332 - DNA, 511 bp, Homo sapiens
ggtctagaagagtgtctagctccttttacatcattgcaggtttgtgtctagcaaaattaaaccaatttataaatgtataaattccaccaatggcagtcatatatgaatgtatgtcccctggatcctcgccttcagtgattttttttaaaaaattgtctattgttttgctagcttaattagcatacaaagatacctaaaatttgaataactttcatttattttactattaatgagtgtgtatattgtgtttgccatggtcccttactacttcatttctatgatggaaatctacagaccacaaccgtgagtgaagtgctgtgtcaagatcataaagatgaccagggcatcactggtaccctcaaagggcacatagtataaatgaaggatacaaacgtaaaaggaaaaccacaacaaaaaataagttacaccaaaaaaatkaaatactatatagcaataaaaaggaatgagctgctgacacgtgcaacatcagataagaacttcagaagcatga

SEQ ID NO: 432333 - DNA, 603 bp, Homo sapiens
ttctttttttaaggctaaaacagctatttttgaatatagaaatagctccaagatttgtctttccattttccaatttatagagcaagataacaggaaagaacaccactagtgatactgcaaatattaggtctgttcttcttatttagaaagggaatctcagactgagcttaaactaaacctgtcattgaaagatgttcctgagtttctgagtacacttggagaaataataaaatggcaaagaataaaaaatctgtttgcataayggctgaggagactcttgcaggatgattcttccttggggagaatagaatcatcatgaaagcacacttagcccaattacaaagactttgttttagaggagcaagtgattctgacgcaacttggtgtctggtacttggatttccctgccatctttggccctgtaagactcatagtcaaccaatggaatgtaggatctcaagtagagagaggcatcccatagcattgtgtggtttaagcccattgagaacataagtagatctgcaggggtagagaaagggaggacttggttgaactgagtgcctggaagccatatccaggcagccaactgtcacattgaaaccc

SEQ ID NO: 432334 - DNA, 541 bp, Homo sapiens
acaggcctcaatcaaatccactgtgtaggtgttggaaagagggaggcatgcttcatgtaagtaaagacttgaaagaaaattacagaatgtcttttctatttctcagattgaatgctagcaattcccttgcctgtatttagaacctgaggacactcttaaccttattctttctcacctaatttttcctctacccatctatagcatccaatataatggcatttgaatttttttctctcgcaaatggtaaacacaactgtctcccattcaattagtatttgagggattgaggatttgggataaacttagtccctaaattcaaaagtattctaaattgtctrttttgggggaaaaaatcaatgactgcaaaatatagttacagacctatttattatatttacagagtaaagaatcagagaaaacccactgtgcttgcttagaaggaaaattaaatcataaaattaggattgtcatccatacagctgttgtgttgttttagaactgtagcttctgtgtgtgtgtgtgtgtgtgcgtgtgtatgtgt

SEQ ID NO: 432335 - DNA, 549 bp, Homo sapiens
gcttggtgtgaggccagagtaatctaagactgggatgggcaaactgtggcccacaggccaaatccaggctgcctcatggcattataaatgaagtttcattggaaaactcccatgtccaagcatactgactacatctatttcagtgctacattggcagagttgagtagttgtgacagagatcataaggcctgcaaagccctaaaagaagtgaatatctatccctayacagaaaatgtttgtcactctagctatctagatgtcaagtctaggatatctcattcctatttaaatcgtgttacacaaaaaaaattgaattttaaaaaccatgctatgaacctattctatcttctctttcttaagttcaaactctcgcacatatttattttttgccatatttccaatgtgagatcccacacacaagtactatgaaaatactggctcttacaactcacagatttagctaaataaatgacccaattcatatcatcttcttctcccttttcctatgtctacttttgttgagatcttattctccttatttctagttaa

SEQ ID NO: 432336 - DNA, 549 bp, Homo sapiens
gcttggtgtgaggccagagtaatctaagactgggatgggcaaactgtggcccacaggccaaatccaggctgcctcatggcattataaatgaagtttcattggaaaactcccatgtccaagcatactgactacatctatttcagtgctacattggcagagttgagtagttgtgacagagatcataaggcctgcaaagccctaaaagaagtgaatatctatccctatacagaaaatgtttgtcactctagctatctagatgtcaagtctaggatatctcattcctatttaaatcgtgttacacamaaaaaattgaattttaaaaaccatgctatgaacctattctatcttctctttcttaagttcaaactctcgcacatatttattttttgccatatttccaatgtgagatcccacacacaagtactatgaaaatactggctcttacaactcacagatttagctaaataaatgacccaattcatatcatcttcttctcccttttcctatgtctacttttgttgagatcttattctccttatttctagttaa

SEQ ID NO: 432337 - DNA, 523 bp, Homo sapiens
tgccaagcaagtgtctccatttgttatcaaactatcttggtcttagctcaacttccaaaatgatagttttagaaaataaagttaagaagatcactaaactggattatagtaccactataccaagcaccttggtgttttgccaattaagctttagtgttgaattgttaatayactaatcttctttgacctaaaacaaaaccatcaaaaaaaaaaaaaaaaaaagaatctcaaaaagatactctttcctgctcaacccaatgtgccatgagctatatttcctcccatggtcaccagtaggcaccagagctaacattcctgaaattttttgtccatttagaattatttagataaaattggtttaagcgactctttgtgcccctttacttaccattctccaggcttttgttgaacactaattattcagtgcaaagcagagtagaaaatagaggaataagccctatgcctaccttgccctcaaactgttgtatagtcaataaaggagataagatatatacataaataa

SEQ ID NO: 432338 - DNA, 585 bp, Homo sapiens
ccaatcactgcatatttgttactgagtttatacagagagcaaagcataaccttgtcctgcctgcttgtctcccagtgagaagcccgtgtgatattttacaaaaaggaataatcaaaagtggaaattaatcaacagggctaaaactgcaacagaaaaaaagtgataacacaaagtgaaattcaaatagaacataaatgtagttatatttttagtagagacrgggtttcaccatgttagccaggatggtctcaatctcctgacctcgtgatccgcccgcctcagcctcccaaagtgctgggattacaggcgtgagccaccgccaccggcctaaatcaaattataaaaatataaactacttggaaaccagtacattctagatctctatatcagattcgttatctgattctgtacattttatccagtttgaaatttctgtttgtatgtcttttggcaataaaattttaagcagtggttaatgaagattatgtccaaacaaaagttcaaccaaagtttcatataatatgttaatcactgatgcactagatcataggctttattaatttttttaaaaaattttttgagaca

SEQ ID NO: 432339 - DNA, 585 bp, Homo sapiens
ccaatcactgcatatttgttactgagtttatacagagagcaaagcataaccttgtcctgcctgcttgtctcccagtgagaagcccgtgtgatattttacaaaaaggaataatcaaaagtggaaattaatcaacagggctaaaactgcaacagaaaaaaagtgataacacaaagtgaaattcaaatagaacataaatgtagttatatttttagtagagacggggtttcaccatgttagccaggatggtctcratctcctgacctcgtgatccgcccgcctcagcctcccaaagtgctgggattacaggcgtgagccaccgccaccggcctaaatcaaattataaaaatataaactacttggaaaccagtacattctagatctctatatcagattcgttatctgattctgtacattttatccagtttgaaatttctgtttgtatgtcttttggcaataaaattttaagcagtggttaatgaagattatgtccaaacaaaagttcaaccaaagtttcatataatatgttaatcactgatgcactagatcataggctttattaatttttttaaaaaattttttgagaca

SEQ ID NO: 432340 - DNA, 585 bp, Homo sapiens
ccaatcactgcatatttgttactgagtttatacagagagcaaagcataaccttgtcctgcctgcttgtctcccagtgagaagcccgtgtgatattttacaaaaaggaataatcaaaagtggaaattaatcaacagggctaaaactgcaacagaaaaaaagtgataacacaaagtgaaattcaaatagaacataaatgtagttatatttttagtagagacggggtttcaccatgttagccaggatggtctcaatctcctgacctcgtgatccgcccgcctcagcctcccaaagtgctgggattacaggcgtgagccaccgccaccggcctaaatcaaattataaaaatataaacyacttggaaaccagtacattctagatctctatatcagattcgttatctgattctgtacattttatccagtttgaaatttctgtttgtatgtcttttggcaataaaattttaagcagtggttaatgaagattatgtccaaacaaaagttcaaccaaagtttcatataatatgttaatcactgatgcactagatcataggctttattaatttttttaaaaaattttttgagaca

SEQ ID NO: 432341 - DNA, 626 bp, Homo sapiens
tctgtttctagattagaaagaaatataaactatataattctttacttttaaaatattatagacatgactagtattgtaataatracaaaaaagtatcaaatattttacatatattctgtaatctgcccttaacaaaattctttaacttaacctttttgagaggagctacctatgaagtctaaaaaggtttaattcaaatttgttttaatatcagcaactcttcaaacttttcctgaccctgccaagaaatttgtcttcctaatatctcttactctgtaaatttctctctatttcttagagagagagagaaagagactaagacagaaagagagaatttataggaaaataagataggaagggttataataacagcttcctttgatttctccatcctgaagtccccattttcgtctctgagagctgatctggaatagggtaggctatagggacagagaaaatcagagtgctagaaagagctaggaagggaagaggtgacctgaagatcaaatactgaagaaggggctaatagatggcaaggaaagtggtgagcacagcatgcagtagatggggttctagttagtgaagacccacagggtggagggtaatcccatgcaagggtcaagtgt

SEQ ID NO: 432342 - DNA, 626 bp, Homo sapiens
tctgtttctagattagaaagaaatataaactatataattctttacttttaaaatattatagacatgactagtattgtaataataacaaaaaagtatcaaatattttacatatattctgtaatctgcccttaacaaaattctttaacttaacctttttgagaggagctacctatgaagtctaaaaasgtttaattcaaatttgttttaatatcagcaactcttcaaacttttcctgaccctgccaagaaatttgtcttcctaatatctcttactctgtaaatttctctctatttcttagagagagagagaaagagactaagacagaaagagagaatttataggaaaataagataggaagggttataataacagcttcctttgatttctccatcctgaagtccccattttcgtctctgagagctgatctggaatagggtaggctatagggacagagaaaatcagagtgctagaaagagctaggaagggaagaggtgacctgaagatcaaatactgaagaaggggctaatagatggcaaggaaagtggtgagcacagcatgcagtagatggggttctagttagtgaagacccacagggtggagggtaatcccatgcaagggtcaagtgt

SEQ ID NO: 432343 - DNA, 626 bp, Homo sapiens
tctgtttctagattagaaagaaatataaactatataattctttacttttaaaatattatagacatgactagtattgtaataataacaaaaaagtatcaaatattttacatatattctgtaatctgcccttaacaaaattctttaacttaacctttttgagaggagctacctatgaagtctaaaaaggtttaattcaaatttgttttaatatcagcaactcttcaamcttttcctgaccctgccaagaaatttgtcttcctaatatctcttactctgtaaatttctctctatttcttagagagagagagaaagagactaagacagaaagagagaatttataggaaaataagataggaagggttataataacagcttcctttgatttctccatcctgaagtccccattttcgtctctgagagctgatctggaatagggtaggctatagggacagagaaaatcagagtgctagaaagagctaggaagggaagaggtgacctgaagatcaaatactgaagaaggggctaatagatggcaaggaaagtggtgagcacagcatgcagtagatggggttctagttagtgaagacccacagggtggagggtaatcccatgcaagggtcaagtgt

SEQ ID NO: 432344 - DNA, 626 bp, Homo sapiens
tctgtttctagattagaaagaaatataaactatataattctttacttttaaaatattatagacatgactagtattgtaataataacaaaaaagtatcaaatattttacatatattctgtaatctgcccttaacaaaattctttaacttaacctttttgagaggagctacctatgaagtctaaaaaggtttaattcaaatttgttttaatatcagcaactcttcaaacttttcctgaccctgccaagaaatttgtcttcctaatatctcttactctgtaaatttctctctatttcttwgagagagagagaaagagactaagacagaaagagagaatttataggaaaataagataggaagggttataataacagcttcctttgatttctccatcctgaagtccccattttcgtctctgagagctgatctggaatagggtaggctatagggacagagaaaatcagagtgctagaaagagctaggaagggaagaggtgacctgaagatcaaatactgaagaaggggctaatagatggcaaggaaagtggtgagcacagcatgcagtagatggggttctagttagtgaagacccacagggtggagggtaatcccatgcaagggtcaagtgt

SEQ ID NO: 432345 - DNA, 594 bp, Homo sapiens
gctgggtctccacttgtaagatggtgccttaagggctgcatccttcagaagggagaaacaatcttccttacacgacagaggactggaagagaaaagagaatccacttctgaaagccccttttaaaaggcattaccctcacccatgaaggtggagcactcatggcctaatcacctcttaaaggtcccagctcccaataccattacattagcaaagaaattttgacacgagttttggaggagacaaacatttaaactatatcattggtgaagtctagtaaatattaaaataaataatcccaatctcacatcagctacttcaaaaacagagaataagggaacgtttctcaacttattttatgaagctagtgttatccaatcaaatcctaagacgattttggaagaaactaagtttcaatttcttgtgtgaaaacgtacatggaaaaataatatagaacagccaaaacactttcaaaatagacaaacagctggagggtttgttatatctgaattcaaaamctactttaaagttttaataatgaagatggtggggatagatatttagatagagataaagtgcagtagaacaatgtaagc

SEQ ID NO: 432346 - DNA, 567 bp, Homo sapiens
tgcaccaatcagtgctctgtatctagctaatctggtggggacttggagaacctttatgcctagctaagggattgtaaatacaccaatcagtactctgtgtctagctcaaggtttgtaaacacaccaatcaacaccctgtgtctagctcaaggtttgtaaatgcaccaatcagtgctctgtgtctagctaatctagtggggacttgcagaactttcatatctagctagaggattgtaaatgcaccaatcagcactctgtgtctagctcaagatttgtaaatgccaatcagcaccctgtgtctagctccagatttgtaaatgccaatcagcactctgtatctagctaatctggtggggacttggagaacttttatgtctagctaaaggattgtaaatgcaccaatcagyactctgtgtctagctcaaggtttgtaaacgcaccaatcagcaccctgtgtctagttcaaggtttgtaaatgcaccaatcaatcctctgtgtctagctaatctagtggagacttgaagaacttttaggtctagctagaggattgtaaatacaccaatcagc

SEQ ID NO: 432347 - DNA, 643 bp, Homo sapiens
acccatgcgaatactagccacttgcattttcacatagtccaagagttgatctgggctagcaaaattaagcttatttactacaaggagaaatccactttcttaaaatccattttgaataaaagtttgagtacagccaggttggaatgtactcttcaagagcaggtattaagtctttttttttttttttttttttttttgagatggagtcttgctctgtcgcccaggctggagtgcagtggcatgatctcagctcactgcaagttccrcctcccgggttcacaccattctcctgcctcagcctcccgagtagctgggactacaggtgccagccaccatgcccagctaacttttttgtatttttagtagagatggggtttcaccgtgttagccagaatggtctcgatctcctgacctcatgttccacctgccttggcctcccaaagtgctcgtattacaggtgtgagccactgtgcccggcctttttaagcttattaggccataaagaagacagcacaatgttttcacattatagtctactgagttttactagaatgctttttatgacattaaatttgtaaatatgttttaaaggtaaaaatgttgtttgctatttcaaagaataaattatttttagaaattttaa

SEQ ID NO: 432348 - DNA, 626 bp, Homo sapiens
gttgtaagttgtaacacagaatacaaagtaattgaaagtgtgtttgatggatgttaattctgagaagagaaatggatacgttttctgagtattttgatgtaaaataattacatgagttttaatacacctaccttcccatttccccaaatttttcagttactttaatgttctaaaaaaattgaccattaaaaatatataaaaacaagtataacagggcacccatcttccttcgtgtgtcaggcctcagtgtggctcagtacggcactgtcagatcttgtttttatttaaaattttgatatttggctcatcgggaattttttattgcattaatcttatttctaaaattttacattaaagtattatcaattttgatgacccagctttttgtkttgccttgagtttttcagctgcttcatcctgattctggccttcctcccactctgactctactcgccaaagagcagaaagatgggttctctacggattaaataagctcacagcactcctgcacttaaaaccctccaggggtgtcctgtgaacttgggatgcaatccagacttagggtcctgacaagtaagtcctgtgtgagccagctcctggctctctctccaaccccatttcttctc

SEQ ID NO: 432349 - DNA, 592 bp, Homo sapiens
acagttttttttttttgagacaaggtttcgctcttgtcgcccaggctggagcacaatggcccaatctcagctcactgcaacctccacctcccgggttcaagtgattctcctacctcagccttccgagtagctgggattacaggcacatgccaccacgcccagctaatttttatatttttagtagagacagtgtttcaccatgttggccaggatggtctcaatctcttgatctcgtgatccacccgcctcggcctcccaaagtgcttggattacaggcatgagtcaccgtgcccagcccacaaataattttgtaaatgcacaatcaaaaataacccagcacacatgaatatataaggcaacataatgaaaaggagcagaaataacagtcaagagaaacagacctgcaggattccagatactgtattatgaaacacagtctttatggttacaaggctcaaggagatcaacaacattgagaatttcaacagaaaasttgaaaacaagaaaatgaagtaactgtcaactatatctggtgaaagtatgtagcaataattaatgtgagatacatagagacattttcaaacaggcaaaa

SEQ ID NO: 432350 - DNA, 601 bp, Homo sapiens
gtgccagaaaacacgtatcgccaagtgattcatcgctgcctctatccagatcataaatctttattttccaaaagccgtgctttggattcagggcagaatgtagtgttgattctctttggttggcagtcagaagaattgtctcctgatgtcctttcttatggattttatcggctctctgggaaccattctactctctggcttgtgacttgttttccactcaactaaaaaaaaaatacagtttcagtaaaggtggaaggagttttcacaagtcaatgttcaaatacctttggggtgattgtgttggcttaamccccattaaactgtagttcattggttcatctataatacggaattataaactgtgcctaaacctaaaataaactttctaaaatttctaaggctgtgaaattactatttttaaaatcttactttttaaagaaatgatgtgaagattataaacaaaaagcatgaagggactggtttatcactcaccaggtaccaggcctttcatagaaatacaacaagcctcatttagccctcccgcaaaccctgccaaatggtcattgttagagtgccaagacacttttctccatcactggag

SEQ ID NO: 432351 - DNA, 568 bp, Homo sapiens
catttacctaagcacactggaccctacccacactctgggccttttctctctgcctggttgagcttctgtgcctcctttgtcttctccaacttcttccctcctacctctttgtcaagccccattctcctttggattgctctgatgaccctcttctcccctttccccagcagctgtctcttctctgagatccacagcctctgtgcttcccccttatttggctctcaatacatcatcaccagctgctatggtyggaatgagtcccccaaaattcttgtgttgggaatttaatctccaatgcaacagtgttggaaagtggggcctttgtggaagtgtttaggtcatgagggatctgctttcatgaatggattaatgccactaaaaaaaaaaaaaagctcaatatttattgcacagttactaagcaccagagcaccagacactgtgctaattgcttcccaggcactatatcagttgatactctcaaaaggctgtgaagaaagggctactacagggaaaacagaaggaatacatccttcttgtccttctgccttccaccatgtgaggacatagt

SEQ ID NO: 432352 - DNA, 630 bp, Homo sapiens
cagtcctgctaatctgtcaaaacacttaggttccgcctgtggttggatgcttggtccatctgcacacgcacagggtatgtgaccttcaacstgggggcagcccatggcaactgaaaaacaactgacaactttgttacataaaagccgagccagattggtctggtatagttacagcattacttaaagcatgtgtccaagcatgaggggttctgggtccctgttcagtgacaggtgacactgttgctccagtagcctcttcatttccttcctcctgtgtcttcacaataaaagacactgtgtattcattctaggcccatcgattctaacacaagttaatcttttcaatgccttgtgatcttaactctaagaaaagcatccataatctaaatacaaacaggtcccccgcctgctctgcacctgcaaaaactatcccaatggcatcacagctatcagaggaggtgggctttgccctgagcatagcacaaagagcctcttctatcatctcgtcggcctccatctcctcccttcccacaagcccttgaacccaaggctagccaggtccctggccaccactttacccgcagaaggtgagagggacaccagccaccaggtcccaatttagaaagagaa

SEQ ID NO: 432353 - DNA, 617 bp, Homo sapiens
gtgcaggtctcctagtttcatgcatgtcccattgaatcactgtcctccagaaatgcagagacacatgaaacagctttatgaccaattcaagtggccacagaatacagtatcagtgagttggggtcccaggcacatcttataacccaggcaaaatagcatccacactatccastgatatgcaaatacttccaacctatttctgctttgacttccacaaggaagccttcctgacttccctggctccctctcaaatgcgcccatgacatccagttcttctttactgcatttcccctgcctgtcattaggcatgtaatgagtttccattacatgcttaatgtctgtcttctttgctagattgtgagagtggaaaacatgtctatttgtctcaccattttaaccccagagcttagaaagtatatgttaactaactcctgactaatggcctagaatacttcgggcattatttaataaacaaagaactgagtgaataaatgactgaatcggttaatcaatagcattcaataaggtgggggggattttataacattccttcaaataggggagcatacggcatgaagagttataacacaaagtgctagtcatataccataagatca

SEQ ID NO: 432354 - DNA, 614 bp, Homo sapiens
cgtctttggcgtatctaagttaaatagaagaaatagttcaataaaaaccaacaccctactactatttttaaattattaaactaaatggaagaaatgccttgacctgaatttcctggagctcagtaactctgatttggcttcttgatccttctgtttcagggtgtcagtcatttcctagatttctgccctctcatcacccctgtgaatgctggtcagccccccactcaccctgactgtggccttcaatctatctgacrtgcaatgggtgactctcttctttgttagcctctttagttcttgcctcctccaatggcccctacctcctgcacttgttactatgagaattaagcttaaatggatgctaaaagtgaagataaaaacactagttaccacttcacctagaactctttgcttatatcaccagagacttagaggagaggtgcccaggcagaaaacccattcatctgaggacctgtgacaaggaacaagaaagtggctgcttgagatgaagacaaagatcacaccaagttggggaagatgtcattgccaaaatttctggcatccaccaggagggcggagttgtccaaattacaaatcagaacaattgaaaatgg

SEQ ID NO: 432355 - DNA, 614 bp, Homo sapiens
cgtctttggcgtatctaagttaaatagaagaaatagttcaataaaaaccaacaccctactactatttttaaattattaaactaaatggaagaaatgccttgacctgaatttcctggagctcagtaactctgatttggcttcttgatccttctgtttcagggtgtcagtcatttcctagatttctgccctctcatcacccctgtgaatgctggtcagccccccactcaccctgactgtggccttcaatctatctgacgtgcaatgggtgactctcttctttgttagcctctttagttcttgcctcctccaatggcccctacctcctgcacttgttactatgagaattaagcttaaatggatgctaaaagtgaagataaaaacactagttaccacttcacctagaactctttgcttatatcaccagagacttagaggagaggtgcccaggcagaaaacccattcatctgaggacctgtgrcaaggaacaagaaagtggctgcttgagatgaagacaaagatcacaccaagttggggaagatgtcattgccaaaatttctggcatccaccaggagggcggagttgtccaaattacaaatcagaacaattgaaaatgg

SEQ ID NO: 432356 - DNA, 602 bp, Homo sapiens
cttactcatccatcctgaaatctgttagggcaatctggtccaagtttgaaccacagccttattgctttatatagcaagcctagtacatctgtaaaatgagcacagtccctggcctgcargggtgctttaaggctccaagtcaatgtgtgtaaggattatagtgtaaaattcggtacatcacaggtgctccatgcatggtaaataacagcatttttttgttttttgtttgcttgtttgttttgagaaggagtctcactctgtcaccaggctggagtgcagtggcatgatctcagctcactgccacctccccctctcaggttcaagcaattctcctgcctcagcttcccaagtagctgggactacagctgcacgtcaccatacccagttaaacgcccagttaatttttgtatttttagtagagacggggtttcaccatgttgaccaggatggtctcgatctcttcacctcgtgatctgcccacctcagcctcccaaagtgctggaattataggcgtgagccaccatgcccagccaataatagcactgttattacgatttctaaaagctaaaggaggcactgagttaattgggggttcttttgtt

SEQ ID NO: 432357 - DNA, 631 bp, Homo sapiens
atgtttttttccattttgctaaatatttttaaaataattttattatttatgaattcaatactcttgggtcaataatattsactgtttggcatgaattatcatttaaacacataaataacttgtaccttagtttggtttgcctggcattgcatagttgttattcacagaaaaactgagaaaaaattataatgcatgcccactcaaatgtaaaacttctgtaacaaggagaggagggagaagccatcatacagatatgtgagtagcaacatctatgtgcttccatgttacaaaaagaaagattattaaaattgctagaaagtatagttttacatttagctatgcagctcttcgatttattaaaacataaattaaatcatcattctcagtaaactatcgcaagaacaaaaaaccaaacaccacatattctcactcataggtgggaattgaacaatgagaacacatggacacaggaaggagaacatcacactctggggactgttgtggcatggggggatgggggagggatagcattaggagatatacctaatgctaaatgacgagttaatgggtgcagcacaccagcatggcacaactatacatatgtaactaacctgcacattgtgcacatgta

SEQ ID NO: 432358 - DNA, 631 bp, Homo sapiens
atgtttttttccattttgctaaatatttttaaaataattttattatttatgaattcaatactcttgggtcaataatattgactgtttggcatgaattatcatttaaacacataaataacttgtaccttagtttggtttgcctggcattgcatagttgttattcacagaaaaactgagaaaaaattataatgcatgcccactcaaatgtaaaacttctgtaacaaggagaggagggagaagccatcatacagatatgtgagtagcaacatctatgtgcttccaygttacaaaaagaaagattattaaaattgctagaaagtatagttttacatttagctatgcagctcttcgatttattaaaacataaattaaatcatcattctcagtaaactatcgcaagaacaaaaaaccaaacaccacatattctcactcataggtgggaattgaacaatgagaacacatggacacaggaaggagaacatcacactctggggactgttgtggcatggggggatgggggagggatagcattaggagatatacctaatgctaaatgacgagttaatgggtgcagcacaccagcatggcacaactatacatatgtaactaacctgcacattgtgcacatgta

SEQ ID NO: 432359 - DNA, 557 bp, Homo sapiens
aaacagtttattgggagggaaggaccaataactattccagaaaggttatagaacatgaaacattttgttgtttgaattgtatgtcctatttcaatacatttggaaaattccctccaaaaaaatgcagcacattttttaataatgtgcatctgtgagctgccgtcaaatcattattgatttaaaaaatcagactagcttaaagcaagatagctcagtggtagcattaattttttttcagatatgtatatttttttcagatacagagagataaacgcttttcccaacatcaaaaagagcaaagctaaagcttagatttgtccactcctttattcactgagcatgttatgatcatttgctgggggctcagccgacaaggaaaaaaaaaaatcacacctggaaaaaattcttcaagcccttctatgtgccattactcrgccttgaacatccagtaattggctctcaaaaaggcatgtgaaatccacatgcacagatcaaaatcttgattaattcccatgccctccccgcaagcctgctcctccctctgtctttcccatctc

SEQ ID NO: 432360 - DNA, 546 bp, Homo sapiens
ttgtggagggtccatgtttcccttttttccctttttgcccaataaattccatttattctcacccttcaaagcatctgcgagcctaatctattatggccatgtgacaagaacccagctcttagctgaactaaggaaaaactcataacactccctacctgtttcctagtttatgtttttccatggcacttaacactatctgacattacatacatttactcatttacttccttataatcgtcttcccccactcaaatgcaaatttsttctggcagaaaaatcggtcttttttgctgacaactttatccccaacacttagaactctgcttggctcagagtaggcacttggtaaacgtttattgtgagactaaataaatgtgtttattttattggcttgcactcccagctttgggatcaatataaaaataagtagcatatttctgccttcaagtagaagaggttttttttgtcctgagtattagttaccatggttttcttcttttaaagaaatgccaagaaataatggagaaaagcaaaattttatttagt

SEQ ID NO: 432361 - DNA, 583 bp, Homo sapiens
gagacccccttacaatgtgactttgaactggccctatagcccctttatccaggcttcaatctccccaaaacacaagaggctgcaattagatctaaggtcacagtcaatgctatctttctctgtttcaataaaagttgagtattagttatattagcagtacttctgaggtcttcaagttgattgaataactagatattgtaccactatttaaaacagccaaagtatggaatcaatccaagtgcccatcaaaggatgaacagatgaataaaatgtcgaatactgttcagccataaaaaaaatgaaatcctgccatttgcagcagtatggatgaaactggaggtcattaagtgaaataagccaagcacagatagacaaatatcacatgttctcactcatcaatgggagytaaaaaagtggatttcatcaatatacagagtagattgatggttaccagaggccaggaaggggtggggaaaggagatgatgaagagaagttggttaatgggtacaaatatatcattggctagaagaaataagacctagtgttagatagatcagtagagtgactatagtttacaatatg

SEQ ID NO: 432362 - DNA, 540 bp, Homo sapiens
aggctgtcttgaaggaatgctttatctcggtttgcacatactgcaagtcaaccagagttagagggagctgccatgtttgtgctggaagtgatagagctgggctgcaggggggtggaggatgggggaggtaggagagcagacgtctattgatttggtgttttagctaatcgacctatggtttgggactcaggatgtggtcaagtgttgttaaggcatgttcaggaacaatacttgaccacattttgaattccaaaccatattctacaactttttccacatatttggtgtaatcctccattttctatttttgagttcgacaaaaaggggtcaagaaaatataaatgcatttcgagagttttttagacctccaaaggtcttgaagaataatattttgagsagttaggtataaataattcagaaacatatggatagaatttacttctacatatcagaatgtaacacaaagtaaggagaaatatttgactgtactctgcttggtagggtcccagtgtttgaaagaagtgcagccgcatgaaccat

SEQ ID NO: 432363 - DNA, 610 bp, Homo sapiens
aatgtccagtcagtgtataaacaagtctcataaatctgaggcaatataatacaaaactacttatataagatacatttgtgaagaaaaaaaacaaatttgkactaaagcttatccagtgaagaatgccagtattcctcccattcttttttttatccttcccttcctctcttttcactaatatttagaattccctactttaaaattagtagttgattgtggcaatactttcttatttggatttagcacattatatttgaatcttcagagatttctgccagaaagctaaaatcttacttctcaaatttcttctcttttgaaaatgcctttgccagctcagatggggaaaagtttaattcaattcagttgatgactcagttggtgataatgacgcaattccataaattatagctctctgctctttcatctcatccccatctctagtatggacatttccttttaaagcttttctgttatcgaagaactctaaatgaaaaatagggctccaagttctaaaagaagcacacagtcagtaaggcagcattaagggggaaactttccttctgttagggtagcaacctggtggcctagtttaaaacatcacacatctact

SEQ ID NO: 432364 - DNA, 644 bp, Homo sapiens
  misc_feature (1)...(644): n = A,T,C or G
ggatttactagtttcaggttaattttcctgtgcttatttttgataaaagtaaataanaatatcaacatttacccctatttattatacaaaagaggcgtatnattcattatacaattcttggccaccttttttaaaaaaaagaaaccttaatattatatcttgggaatcaccctagtatcaactcataaagatcttccttcttttttctcacaggtacatataacccattgtgcatgcactgtaggcaatttaaccagtctcctagggatggatatttaggttgttcccaaagttttgctgttataagtaatctaagtagcttagctgtcttgattcaggatctctcatgagtttgaaatgaagctatgggccagttttcataaggtttagctgggactggaaaatctacttcctagctcactcacgtggttgctggcaggcttttgtttcttgctgtttagacttctccataggmtacctgagaatcctcaagacatggcagttggcttccctctctccagggctgctttctgacatggtagctatcttcctgtagaatatgatgagagagaaagcatattcatccacctatccccacatctaaggcaaaaaccatagtcattttataacctaatattaacagt

SEQ ID NO: 432365 - DNA, 575 bp, Homo sapiens
ttccagacatctagcttggcactcttttcattgttctacatactcaaggtttgtttgtttaagatgatggtcaatattgtaccttaggaagaaaagttaaagagaaattctcttgctaaatggcaattattttgaggcctcaaagtcatcatagagttaagtttccaaagaatcacacatacacacagacacacacacacacagagataaacacacatacaggtaacttaagaacctaggatgaagagatataaaactgtattttattttttagccaaatactagactgacctgaagttaacattgaaaaaaattatttawtatatgtttgaatgccctgagttactacataaacttagaaatgagtagcaatctctcaattaactcctttaggtattatttttctcagtgaagttgatattccagtactgtgtaaaatctagtttaaaaattccatgatccttcatcatgtttccaagaagaatttacagtttgtatgagtttgccagggatgctgtaacaaagtaccacagactgggtggcttaaacaatagaaatttattgtttcacagctc

SEQ ID NO: 432366 - DNA, 575 bp, Homo sapiens
ttccagacatctagcttggcactcttttcattgttctacatactcaaggtttgtttgtttaagatgatggtcaatattgtaccttaggaagaaaagttaaagagaaattctcttgctaaatggcaattattttgaggcctcaaagtcatcatagagttaagtttccaaagaatcacacatacacacagacacacacacacacagagataaacacacatacaggtaacttaagaacctaggatgaagagatataaaactgtattttattttttagccaaatactagactgacctgaagttaacattgaaaaaaattatttaatatatgtttgaatgccctgagttactacataaacttagaaatgagtagcaatctctcaattaactcctttaggtattatttttctcagtgaagttgatattccagtactgtgtaaaatctagtttaaaawttccatgatccttcatcatgtttccaagaagaatttacagtttgtatgagtttgccagggatgctgtaacaaagtaccacagactgggtggcttaaacaatagaaatttattgtttcacagctc

SEQ ID NO: 432367 - DNA, 602 bp, Homo sapiens
ctctgccacagaccagtcatatagggaaaaactatgcagatgtttatcattccttattccaccaggtacttttaaatgaggcaatcttagaagtatgtagagaaattctctctctctgaatgaaaaggagaaaggagtaacaaaaagaatagctaacagttaaacagtgcttactatccaccagatcctcttcaaggtgttttaaatatattagctaatttaattcttgtactagtcctcacattataatcccatttacctgatgaacttaagtatggaaaaggtaagtagcttgcccaaagtcacagagcttataagtgactgagcctgagcgagggttccttcctaggccatctggctctacagacytaaactgctgtgccttggatttttcagacttaacagaaaatagattttctattttgaatatagtgttttctctgtagtcagattactaagatctcacaattctatccaaaacccttatgctgtctcaaacaaagcaaataatatatattttatttgaggattcaaatctcaagacctattttacaaactggtttttagtgactaacttgtaggaacccactggtcaaagatgc

SEQ ID NO: 432368 - DNA, 614 bp, Homo sapiens
tgaagaggtactgctccaaaggctcccaagactttagtgagaagttctttgtttttctctacagttctttcctgcctatctccctataagagtcacagggtattttaagggggaatgtccagtacatgaatcaagtgatgggcacaatgatattctcagaagtatcactcrcaacaattattaaagttttgttaatagttcaactttgtctaccttcatcctccctgggaaggagttctctccccagaaatgctatctagtctctcttgtgaattgtcttctggcaggtcagtttcaccaatctcatagacatgcccaaacgtgtgggcatttgggtgacagggctggcttaggctcaagctagggacaccatgatagccacataaatgtgaaactgtttcttggcatattagttaagaaaagaaattgatgattgaggtagtaagaggcaggtaatcctatatgttgcctcttatttgccatcttccacatctcacacatatggcacagatgatccatatctctgaataaatattttattcaacatatgcataaaaacctcctcctggaggaaaagttctaaatccagaatagaatcatgtccccagaatact

SEQ ID NO: 432369 - DNA, 561 bp, Homo sapiens
tcttattcctgagtcagtttcttctggttcgaatcttaatcctgggtaatctatttaccttgtcccaactttcaaagatactgccttttaggagtttctaaaaatctcaagtttccatgaaggtagaagcttctaccatgataaaatgyaggtgatttcatcaagtcctgtaatgtctacacctgcatcactctaattctttaacccactacacctgagctatgtttgtttccctgataaagactatgctttgacagaattgattggatgattggagcaatggcaaaagcaaggccctagaataattgtgtttaatatcctgactctgtttcgttcacaggttcatgtggtctgaaatgttgggacttcctcctgcagatgatggggaactactgcaggttttagatcagggttatataatacaattcagtctgtccctaatgggcaatatgaattaatgaaggaggacactaaggcaggtgataattagaatataacagaataagagggcaacagaatttttaaaaataaatgaggtttaaggtgaagaatgtgtgtgtc

SEQ ID NO: 432370 - DNA, 625 bp, Homo sapiens
tttttaagacaggcaaatcaatagagtctatcacttgtcctttgcgaagagagttaaaccaaattcatgctttgtcaaaagaaatcccattccctgaggcaggtaaatggcaaaagcagactcacaggtggtgatgtcaccttgaagctgcagaatctcaggaactggcattgtgagaacaataagatcaaactgctcaggggagcctgtttgtttggatacttcccatttgtcatctcttaggttgatctgtgtcacacgatgtctgaagtagacttctgcacctgttccaaaagcaaaatcatgtccccattatcagaattgcatatatgaataaaggggatgtgagtagtcacaaactgaatccattcaagtgaacaaaatggccaagactgtcttctactgtcctccagctctcttcctttactttctttctaatttagtgggaattcatccctacctggcatccttggacttccctatcagtgcctgctctgaatcaaaaactacwcctacaattagtgataaaaataaaaataataactatagctacttttcattaagcagctactatatgccagctgcttggtacacattatactaatttatctcacagacaaggaaa

SEQ ID NO: 432371 - DNA, 616 bp, Homo sapiens
cataggaaggtcatggaaattaagggggatgatgcatgtgaagcctttagcctagtgtcaagyacacagaagatgatcagtgttatctgtcacataccactgttattgtcttccacagtcttcaaatttctgtcatccctgtcatcactatcatccttgtcatcgttgccatccttgtttcaccatcatccctgtcttcaccatcatcacaattgtcagtgtttacatcagcgttgctgttgtcaccatcatcctcttccccattgtcatccccaccatcgctgtcatccccatcatcattatctctgtcttcaccatctttctctccttccctgtcatcccggtcatcaccatcataactgacatcccattgtcaccttcatccctaacttcaccatcatccttatcatcttgctcataccatcaaggcacctgctttgttgttccttcgtcagttttctgtgagcaagtcctgaatatcagcactttgcactttctccatagggcagatgtacacatggaacagtctttgaatggtattgttagcttagtcacactgtaccattttccagttcttgttctaataatagatagtatctattatttaatgatattg

SEQ ID NO: 432372 - DNA, 616 bp, Homo sapiens
cataggaaggtcatggaaattaagggggatgatgcatgtgaagcctttagcctagtgtcaagcacacagaagatgatcagtgttatctgtyacataccactgttattgtcttccacagtcttcaaatttctgtcatccctgtcatcactatcatccttgtcatcgttgccatccttgtttcaccatcatccctgtcttcaccatcatcacaattgtcagtgtttacatcagcgttgctgttgtcaccatcatcctcttccccattgtcatccccaccatcgctgtcatccccatcatcattatctctgtcttcaccatctttctctccttccctgtcatcccggtcatcaccatcataactgacatcccattgtcaccttcatccctaacttcaccatcatccttatcatcttgctcataccatcaaggcacctgctttgttgttccttcgtcagttttctgtgagcaagtcctgaatatcagcactttgcactttctccatagggcagatgtacacatggaacagtctttgaatggtattgttagcttagtcacactgtaccattttccagttcttgttctaataatagatagtatctattatttaatgatattg

SEQ ID NO: 432373 - DNA, 555 bp, Homo sapiens
gtgaatgattctcagatttatgctgtgtgaatgaagccgtacaataaaatacatattctttcttttcatgtatatgaacttctagaaaagcaaacttaatatataacaggaagcagatcagttgtttcttctctgaggctgtggatgacaggcaatttattttcttggaaaggacacacagtaactttttagggtgacagaaatgttctatatattggttatgatgatggctacatkgtaaatttttcaaaactcaaaaatgtatatataaaaaacatgcattgaattttatgtggtactttaccacagtgaagttaattttgaaaataagttacatctaaaatatagtgtgcagcatcatgtcctagactaccaagaaacataaattggcaggccagaatttgtgaagataggaacaattcaaaaatgaagtgtgaggtattaatagctctaggtgaatggcccaggaaggaggcttcaaaagtgtgtacccattttaggattctcttttaaactgatattcatggattaaatgcattggtagctctgagtagt

SEQ ID NO: 432374 - DNA, 594 bp, Homo sapiens
  misc_feature (1)...(594): n = A,T,C or G
nnnnnnnnnnnnnnnnnnnnnatgtattcactgaggtctacacagtgagtcatgttgtccatttcgttagtgagatcctcttctaccatgggctccctctggcaaacattcatgtaagatatcaatttatctcacgctgtgcattctaagaggtttggccatatatctcttgcgcaaacttccttgtctctaattctctgwtcttgtttctagcatgtctctgaccatctggccaaatcattgtccagcgactatgagtcagtatagatatgcacctctgacttcttcttccatttaagctagacaaccaatgtcctgctagatgttctgcccactgggaagattcctttccccagtgtccttcagggccacccatgagtggggctgtaatgctatagccatccctacaaccagcagaagaaagctgtaaatgagaccagagggatgaaggagatgagcaggacatcaggaagtctgagccacttcttctgaatcctacctgtcaggtggtgcctgatcttcaggatcctgccttcaggacctgcttttgcctgatcccatatgaacacttggtttgaaggtaaagtgctgctt

SEQ ID NO: 432375 - DNA, 594 bp, Homo sapiens
  misc_feature (1)...(594): n = A,T,C or G
nnnnnnnnnnnnnnnnnnnnnatgtattcactgaggtctacacagtgagtcatgttgtccatttcgttagtgagatcctcttctaccatgggctccctctggcaaacattcatgtaagatatcaatttatctcacgctgtgcattctaagaggtttggccatatatctcttgcgcaaacttccttgtctctaattctctgatcttgtttctagcatgtctctsaccatctggccaaatcattgtccagcgactatgagtcagtatagatatgcacctctgacttcttcttccatttaagctagacaaccaatgtcctgctagatgttctgcccactgggaagattcctttccccagtgtccttcagggccacccatgagtggggctgtaatgctatagccatccctacaaccagcagaagaaagctgtaaatgagaccagagggatgaaggagatgagcaggacatcaggaagtctgagccacttcttctgaatcctacctgtcaggtggtgcctgatcttcaggatcctgccttcaggacctgcttttgcctgatcccatatgaacacttggtttgaaggtaaagtgctgctt

SEQ ID NO: 432376 - DNA, 551 bp, Homo sapiens
ccacgggaagattttgtatgggaactttaacttcccattccgtttgacttttggtctttaaaatacaggtcaaatcaatgaatttaatggaggccggttaacacaatggctttgccttgcattttgacccacataaaggggaggcagtccggggcacaaagcttcagcagawctttaagtggttagtacacaaacgtgacagaacgtttagaatctcagggacttgcgagacctattgacaagcagttaaaagtatttgaaatagctgcatgaatgaactttgataaggtagcactattgtcttccattgtctctttctcttcatacgaaaactcccccaaaagaacaagagtcaatgaatgtgaaatgtagtgtcagttttactggactctggacgcctttgagcactgcgactttttgtggcgagttcatgctacttaaaagtattcttccctctgagtttcaactcttgcaaatggtgacttcttagttcactacccacccaagtcttttccaactgctttcacaccgtgaatagctctttaagttaa

SEQ ID NO: 432377 - DNA, 563 bp, Homo sapiens
tgtgtgtgtgattttagtgattatggaagagaggcaatgttgtgtgtttagtctgttaatgtttattgagcacttagtacatgctagctccttttctataagctctatacccatcaaatcattaactgaacttatgagaaaggtgtcattatcacattcttttgtagatgaggtaaccaaggcccaagacaggctaattaactcacccaaggtaatgaagctactacatgatagagataggattcaaacccaggaagactggccaagaagagtacatgattttacccactacacatacctcctttctgatcacaatgcctagtctaggtgcactttgaggaaggctggggtagaggacttgaagcatgttaaatgtttggaataactgttataacaggagaaagagaaagctctttggggataagggaagagattgccatcccactgagaatgcargtgaggctggagagcaggtgttagttgtttaacttagccttccaattcagagacctcaaggctgatcatatttctagaaggcgggtgaggcacagtctccctagctg

SEQ ID NO: 432378 - DNA, 588 bp, Homo sapiens
tgatgtatgcctaggcaaatatatttttgatatctcaccaaaagcacgggcaaaagcaaaaataaacaagtgagactataaactaaaagcctttttggcagcaaaggaaacaatcaacaaattaaaaaccagccaatggattggaagaaaatatttgcaactcatatattagatgagtggttaatatccaaatatataagaaaygcaaacaattcaatagcaaaacaaataaacaaacaacttgattaagaaatgagcaaagaacctgaatagacatttctctaaagaaaacataaaaatgtccaacagatatatgaaaacgtgctcaaagtcacgaatcatcagggaaatgcaaatcaaaaccacagtgagatatcacctcacaactactagagtggctactatcaaaaacaaaacaatacaaacaaacaaataaaaacaaaacaagaggtaacaagtgtttgtgaggatgtggagaaaggggagtccttctacactgttggtaggaatgcagattggtgcagccattgtggaaaacagtatggaggttcctaaagaaattaaaagtagaactgccatatgacccag

SEQ ID NO: 432379 - DNA, 588 bp, Homo sapiens
tgatgtatgcctaggcaaatatatttttgatatctcaccaaaagcacgggcaaaagcaaaaataaacaagtgagactataaactaaaagcctttttggcagcaaaggaaacaatcaacaaattaaaaaccagccaatggattggaagaaaatatttgcaactcatatattagatgagtggttaatatccaaatatataagaaatgcaaacaattcaatagcaaaacaaataaacaaacaacttgattaagaaatgagcaaagaacctgaatagacatttctctaaagaaaacataaaaatgtccaacagatatatgaaaacgtgctcaaagtcacgaatcatcagggaaatgcaaatcaaaaccacagtgagatatcacctcasaactactagagtggctactatcaaaaacaaaacaatacaaacaaacaaataaaaacaaaacaagaggtaacaagtgtttgtgaggatgtggagaaaggggagtccttctacactgttggtaggaatgcagattggtgcagccattgtggaaaacagtatggaggttcctaaagaaattaaaagtagaactgccatatgacccag

SEQ ID NO: 432380 - DNA, 611 bp, Homo sapiens
ctaggaaacagaaagcaggcatttggggctgaaatacaggattttcccagagggtaggcagaaagtaycttagactcctcaagaaccctgaaaggcagccctgctggcctggagaataaaccgtggaggtttacagagggacatcagacaggtctgagatgggccaacctggagacaacaacgctgcatacctgccttttgctaggaatttagctgtgacctgttttccaaggctccctgacccatcatcatttcctgctttgcatatagctgcctcagaggatagcacttggggtccctcaatccagaagaggagcttgagaataaggtggtggtctaggggcctgctctacagaagggaacctctctgcttctgggttcccccagtgaatggaacctctagctagtgcagggacactctggttcaagactattctaggtttctcatgggcttttatgatgttccaggacagtggaattttaggaggtggctgctggtgagtggtagatctctaaggatctgtgactgtcttaagctgcagcatccccaccgttcccccaccatctgaagagtggtcagacatgccaaggcagcgagagtcctgctgggc

SEQ ID NO: 432381 - DNA, 611 bp, Homo sapiens
ctaggaaacagaaagcaggcatttggggctgaaatacaggattttcccagagggtaggcagaaagtaccttrgactcctcaagaaccctgaaaggcagccctgctggcctggagaataaaccgtggaggtttacagagggacatcagacaggtctgagatgggccaacctggagacaacaacgctgcatacctgccttttgctaggaatttagctgtgacctgttttccaaggctccctgacccatcatcatttcctgctttgcatatagctgcctcagaggatagcacttggggtccctcaatccagaagaggagcttgagaataaggtggtggtctaggggcctgctctacagaagggaacctctctgcttctgggttcccccagtgaatggaacctctagctagtgcagggacactctggttcaagactattctaggtttctcatgggcttttatgatgttccaggacagtggaattttaggaggtggctgctggtgagtggtagatctctaaggatctgtgactgtcttaagctgcagcatccccaccgttcccccaccatctgaagagtggtcagacatgccaaggcagcgagagtcctgctgggc

SEQ ID NO: 432382 - DNA, 611 bp, Homo sapiens
ctaggaaacagaaagcaggcatttggggctgaaatacaggattttcccagagggtaggcagaaagtaccttagactcctcaagaaccctgaaaggcagccctgctggcctggagaataaaccgtggaggtttacagagggacatcagacaggtctgagatgggccaacctggagacaacaacgctgcatacctgccttttgctaggaatttagctgtgacctgttttccaaggctccctgacccatcatcatttcctgctttgcatatagctgcctcagaggayagcacttggggtccctcaatccagaagaggagcttgagaataaggtggtggtctaggggcctgctctacagaagggaacctctctgcttctgggttcccccagtgaatggaacctctagctagtgcagggacactctggttcaagactattctaggtttctcatgggcttttatgatgttccaggacagtggaattttaggaggtggctgctggtgagtggtagatctctaaggatctgtgactgtcttaagctgcagcatccccaccgttcccccaccatctgaagagtggtcagacatgccaaggcagcgagagtcctgctgggc

SEQ ID NO: 432383 - DNA, 611 bp, Homo sapiens
ctaggaaacagaaagcaggcatttggggctgaaatacaggattttcccagagggtaggcagaaagtaccttagactcctcaagaaccctgaaaggcagccctgctggcctggagaataaaccgtggaggtttacagagggacatcagacaggtctgagatgggccaacctggagacaacaacgctgcatacctgccttttgctaggaatttagctgtgacctgttttccaaggctccctgacccatcatcatttcctgctttgcatatagctgcctcagaggatagmacttggggtccctcaatccagaagaggagcttgagaataaggtggtggtctaggggcctgctctacagaagggaacctctctgcttctgggttcccccagtgaatggaacctctagctagtgcagggacactctggttcaagactattctaggtttctcatgggcttttatgatgttccaggacagtggaattttaggaggtggctgctggtgagtggtagatctctaaggatctgtgactgtcttaagctgcagcatccccaccgttcccccaccatctgaagagtggtcagacatgccaaggcagcgagagtcctgctgggc

SEQ ID NO: 432384 - DNA, 615 bp, Homo sapiens
ctcaaaaaaaaaaaaaaaaaaaaagagagagagagaaggattagagtcaatggcaatkgctaaagaggggtgtccttccagggcacctgaatccagaaagcccacacctgagacttgtagccccacctcagcagctggagaagacacaccaggactgtgccaagactagataccctactattgtaggccctacagaaaatgcttgcccactcctgggaagtcagccaaggcacttgagcaaacctttgacatgaggagctgggaccttgtcagtcctgcaactgaaaggatccctgtccatccccaaatggcacagttgaagaaagcaagcatcagaaggaagttacctcaagtggtatctatgggatcacccttcaacacttcaagagaaatgaaagttcccccgtctttcatgtgccctgggaggactatagtaaaaaatactttaattgtacattttaaaataactaaaagagtataattgggcctcaccctggtgctaacaccaccaccagcatgacctcacacacagtcaccagtggggggcccttggcctcttgagccacgctacgtctgccactgctgcaaatgcccacacagaggctgacattccag

SEQ ID NO: 432385 - DNA, 615 bp, Homo sapiens
ctcaaaaaaaaaaaaaaaaaaaaagagagagagagaaggattagagtcaatggcaattgctaaagaggggtgtccttccagggcacctgaatccagaaagcccacacctgagacttgtagccccacctcagcagctggagaagacacaccaggactgtgccaagactagataccctactattgtaggccctacagaaaatgcttgcccactcctgggaagtcagccaaggcacttgagcaaacctttgacatgaggagctgggaccttgtcagtcctgcaactgaaaggatccctgtccatccccaaatggcacagttgaagaaagcaagcatcagaaggaagttacctcaagtggtatctatgggatcacccttcaacacttcaagagaaatgaaagttccccmgtctttcatgtgccctgggaggactatagtaaaaaatactttaattgtacattttaaaataactaaaagagtataattgggcctcaccctggtgctaacaccaccaccagcatgacctcacacacagtcaccagtggggggcccttggcctcttgagccacgctacgtctgccactgctgcaaatgcccacacagaggctgacattccag

SEQ ID NO: 432386 - DNA, 516 bp, Homo sapiens
cttttgtgatctggccctgcctacccgccaacttcatctcccccacacaacactctgcagaactgtattacctgttgttccccccaaagccttttgcgatctggccctgcctacccgccaactttatctcccccacacaacactctgcagaactgtattacctgttgttccccgcaaagccttttgcgatctggccctgcctacccaccaacttcatctccctcacacaacactctgcagaactgtattacctgttgttccccccaaagccttttgtgatctggccctgcctacttgctaacttcatctcccccacacaacactctgcagaaytgtattacctgtcgttccccccaaagccttttgtgatctggccctgcctacccgccaacttcatctccctcacacaacactctgcagaactgttttacctgtcattccccccaaagccttttgtgatctggccctgcctacccgccaacttcatctccctcgcacaacactctgcagaactgt

SEQ ID NO: 432387 - DNA, 611 bp, Homo sapiens
gctaatgcatgtggggcttaaaacctaggtgatgggttgataggtacagcaaaccactaggcacaygtatacctatgtaacaaactcgcacattctccacatgtatcccggaacttaaagtaaaaataaataaataaatacatacatacatacatacatacataaatgtcgatgccctacatcccctccaaagggcatctcccccaccccaccaccaagggcagcccagtggtctccctgctctgaatctgtcacccacattttcatctcggtgccctccactcctctctcaggaaacatttcacagttccagcaggtgagtcagacacagaacctaataatcagtcatttattcagttattcatttattcaggtgatagctcttgggcgtctgtcatgctccaggtaccatactgaaacagaagtagagtcagcccttcatatctggggcttctgcatccgtggattcaaccaaacttgaactgaaaatattcggggaaaagatgcatggttgtgtctatactgaacatgtacagactttttcttgtcattattccctaaacaatacagtataacaactatttacatagcatttacactctattaggtat

SEQ ID NO: 432388 - DNA, 587 bp, Homo sapiens
accgaattagcaagttcccaggtcagtctggccatgtcacagaacaacaggcagcagttccaggggctggacattaggtccaccgcctccctatcctctgaaagtgcagagagggggcaccacccctccaagtctctactaacttggctgatatagcaaaccaactccaggagagaatataagatggagaaacacagaggcccacatatgctcttgacttagccaggatactactgatgactgtagagaccaatgaaggcagctgggagccagatgcagctaaggaagtagtcatagccatgcattcattcatttcatcggtcaacactgtaccccccaggcctccttctgggctccgtactgaatgagcagcaaggctcggtccctgcccaggaagctcacagtcaagtggggaaggttacacagcaacaccccatgaccacactgtctggggagtattgccttgcagaaatgaaagtgcaggagggaaggctcccraagtctggaaaagatatcccagataaagcatcatattttgatgtggggatattttgaagtggctataccaaacaagccttgtcaaaatg

SEQ ID NO: 432389 - DNA, 624 bp, Homo sapiens
gtttacctgaacacaagtaaattggcaattttaatgcctgcagatcaaattaatgagaagtagtatgggtgaaagaaagaacactgtatggaaagcagaggggaaaggagctctaggagtgctctgccaccaagtcccctcactcttcaagtctcagcagaatggaggaatgggaccagaatgaccttccaggtctctttcagatctaaaacgacatgattccttaatgggcctctaagtggttattcattcattcagtcaacattgttgagtgcctactacagacttaagccttctgaagtgaatccacattggataggggatgaaacggtttggttaagagagtgttattacaccacataaactgtatgttcttaatattcaargtcttatgcagaaatataatgagacagttacatcaaggcttcagtgagccaagactcagggactactggagtactgcgagagggttattaaaaatagccctctctgatatctatgccagcacttctgctgagctacttgtagaaaagcagtgccctagcgttctagaccctaattctgtccctctcttgctatgtggctatgggaaaatcgcctcacctctctgagctacactttact

SEQ ID NO: 432390 - DNA, 624 bp, Homo sapiens
gtttacctgaacacaagtaaattggcaattttaatgcctgcagatcaaattaatgagaagtagtatgggtgaaagaaagaacactgtatggaaagcagaggggaaaggagctctaggagtgctctgccaccaagtcccctcactcttcaagtctcagcagaatggaggaatgggaccagaatgaccttccaggtctctttcagatctaaaacgacatgattccttaatgggcctctaagtggttattcattcattcagtcaacattgttgagtgcctactacagacttaagccttctgaagtgaatccacattggataggggatgaaacggtttggttaagagagtgttattacaccacataaactgtatgttcttaatattcaaggtcttatgcagaaatataatgagacagttacatcaaggcttcrgtgagccaagactcagggactactggagtactgcgagagggttattaaaaatagccctctctgatatctatgccagcacttctgctgagctacttgtagaaaagcagtgccctagcgttctagaccctaattctgtccctctcttgctatgtggctatgggaaaatcgcctcacctctctgagctacactttact

SEQ ID NO: 432391 - DNA, 556 bp, Homo sapiens
ggagtgagaaatggggaacaaacagatgggagagaaagcttccaagactttcccctgtgcagaaagaaaagaaataacaacatagcagagttaagtgctaacattttartaattatattaaatgtaaataatctaaatacaccaattaaaagacaaagattggcagaatggatatttaaaaatatatcctggtgaaatttctgaactcctagaataaagagtaaatgtcatgagcttccaggcaatgtgaatagcttaccgaaggaggaaacagagccctctggaattatggatcccacaaatcgtccttgccaaattttattgagacctaatatttgttaggcactgttctaagcggtttatctcattttaataaccctatgaattatatattaatatccccactttataaatgagaaaaccaaggccaaatgttcccctggtcactcaactagtaagagcttggattcaaatccaagaaatctagtgaaagaaactaaataataagtccaagtcagctattgaaggggagagggatgatagagcttccaggcag

SEQ ID NO: 432392 - DNA, 577 bp, Homo sapiens
tcaggccgagacagccaaaggaaggttcactttcctttaattctacctcatactttttgagtgccttctaggtgtccggcgcgcccccacgtgcttccccagtgttaattcattctctctctagtccatgtcatgttgcctctcaaattttacatccctctcattcccatctagggaactagatcaaacctacctggattcttgtgaaccattcatgtgaattatttggaactggaatttcacacagacccggggaatttctcaaagttcaagacgggtcatattccgtggaatacggaaggagttggagtgatttcacttttctgatcaagaactgatagccattaaaactcagctccgcaatatatccccccactccaagggagggctgaratgatcacttcgttttctgttacggctacttttatatttttcaacattactgctggtctgtaagagaactaaaacatctgattttcctcatttccttgtaaagaggtgttcaaatatgtacttgaatttaattatttcttctggtcagctgcaaaacctgcttttcttccttaacccctagcat

SEQ ID NO: 432393 - DNA, 602 bp, Homo sapiens
acccagtaatcatgtgtgcacatgtgtgtgtgtgtgtgcatgtgtgtgtgtatgtgtgtatgggcgtgtgttttgctaacaactttattgggatataaatcccataaattcaccaatttaaagtatgccattcagtgatttttttagtatatctatagatctgtgcaactatcaccataaccaatttcagaacactttttttatctcaaaagaagccctgtaccttttagctatcactctttaatatcctcatggccattgtgcctgaatgaaacttatcaaacacacatattttctccgtaaggaacatcacagccttcttgcacttaggaatactagacagcacttcagcactaggcttgggggccattttaaacagcaaaatcactgtacagagaacaattgcttrtagtgtgaattgaaacagaagcataatgttgccttgtttgacctcgactgggaatgtgtgtagggtgactcaaatttcccctttattgattttggaattacacatatattttaggaagtaggcaaatttgcaaatacagaactcaagaataatgtgaattggctgtataatggttttcaagttgtttaacatc

SEQ ID NO: 432394 - DNA, 597 bp, Homo sapiens
tgcaaaggtcagcaattacttgcagttcctctctgttatacacctacacataataaaggaaagagcacagccaattattcaacatgtgagaaaatgataggtcagaagactgtataaggagatgagacttgcttaccttgccaagtgggttatgtggagtatttagtataatagctttggttttggaattaaatttactttccagttcttgaggatctaatgtccagtcagaactagaccatctttttccataaacaggtttctaagcatgaagaatgaagatataatttaattcaattaagtcatgtttactgtcttacaaacgaataacctaataaggaaaaaaacatcaaagaaagtcatggcaaaggaaactgaataaattaccaacaaatgctttcctgcagtaggaacagaaaaaaaactagaaaaagactaacaaagaagataaacagaaataactgggctgtagttctgcttaagagcctaagaaaacctaagtcttatgctcacacctgttaaatgraaaaataagccctgtcaacattaactgctgctaatattacttcacaggaactagctataactatggttaac

SEQ ID NO: 432395 - DNA, 504 bp, Homo sapiens
caaagtgtaagagggactagaaatgagtttctggaacatctacagtaattcctctatctttcttcaagagccaggacagcaaactgggccaaggaaaaagccaatgttgttaagtayagtggactgaatgtttgtgcccactctcatattcatatattaaaatagtaaaccccaaggtgatggtattaggaggtggggcctttaggaagtgattaggacagaagggtagagccctcaggaacaggattagtgcccttacaaaggagggttagcttgctccttccaccatgtaaggacacagcaaaaggcaccatccgtgaagaagcatgtccccaccagacaccaaatctgctggtgccttatcttggactttgctgcctccagaacagtgagaaataaatttctgttgtttataagccacccagtccaactaagacattaaggaccaggcaggtaagagagactgtgtggcaagagatgagactggagacagagaggggcaag

SEQ ID NO: 432396 - DNA, 598 bp, Homo sapiens
ttaacttctctgtgctttagctctgtcatctgtaaaatgaggacactaatcatacccaccttatagtgtggttatgagaatgaaagaaattagtatatgtaaaacatttagaacctggtatatatttagaacctgccaaaatattagctactattatttttctccttttatattaatatgcagcaatctgaacacttttttgcaaagaaaaaggtgtcattagttgatcacttataaaagggaaaatgacctaatttttcttaygtttaaagaaataattaggtctcaaaaaggataaaactcaacatgaaagccaaataagtcaagagataagcaaagatcaccaggtataaaaatctatataaactgaatatgtatgcaatgattcatttatttgtttacttatttatttcattatttttttaaagatggtcttgttctgtctccaagtggctggagcgcagctcacagcagcctcaacttcctgagcgcaagtgatcctcccatttcagcctcccaagttgctgggactgcaggcatgcaccaccctgcctggctaatttttaaaaaatgtatttgtagagacagggtctcacca

SEQ ID NO: 432397 - DNA, 465 bp, Homo sapiens
tctctgccaggttttggcattagggtgatgttggcctcatagaatgatttaggaaggagtacctcctcctcaattttttggaatagtttcagtaggaatgataccagctcttcctttcatatctggtagaatttgcctgtgaatccgtctggtcccgggcttttgctggtttgtaggcttttaattactgattcaattttggaactcatttttgcttggcttgaagattgaatctaaatgtccatcaatggtagattggatttttaaaatgtggtacacatttaccatggaatactgtgcagccataaaatatagtgagataatgtcctttgcaggaacagagatggagctggaggccattaactaagcaaactaacacaggaacagaaaaccaaatacygtatgttgtcacttataagtgaaagctaaacactgaatacatatggatacaaagaagagaacaac

SEQ ID NO: 432398 - DNA, 550 bp, Homo sapiens
tacatatttttaaatgaataaatggatgaaaatattttaaatgagttataatattaatctattttatggaaatactttctaacatgcaattagcaggaaaatagaataaaattagttmtctccatcctctaagttgcaaaggtaaatggccaccaaatagagaatgtaaagaggaattaaatgagggaaaacctgctatactaacggtggcaaggtgaagtattagtgtaattctgcatacactctgcaatgccactaactagaacaatcaatctcaaaaagatttggccaccttcaaaatgctttttggattttagtttcctagatttgatcatttaaattttaaaggtcattaaaatggaggaattcccatttcaatcgaattatccttcaacagagggaaatatattttactgaaacaatagaaaatatcatttatatataaaccagtgaactgtcaagaaattgcttcttctgagctcttaaatgttgagaatgaagtaatgtatcacctctttattaatactacaaacggcttcttatgatattt

SEQ ID NO: 432399 - DNA, 583 bp, Homo sapiens
gatgtacaaaagattttttctttctgttcttgtgctataagcttttatcttttaaatattttacttatttatttactttttaaacctttttgttaaaaacagacacaaacacacatattaacctcagcctacamagggttaggatcatcagtatcactgtcttcttcctccgctcttgtcccactagaagatcttcagggcagtaacaggcatggagctgtcctctcctatgataacaaaggtttcttctggaatagttcctgaaggatctgcctcaggaaacattaaccgttttacagttaatttttttaaccagtagaagaagttaactataaaatactgataacaattatactatatgaaatacattaaccagtaacacttctatattgtcatcatcaagtattatgtactgtacaaaattgtgtgtggcatatttttatgtgactggcaatgctgtaggtttatttacaccggcattgccacaaacatgtgagtaatatattacactgctatgttatgatggctattaggtgataggaatttttcagctacactataatcttatgggtccactgtcaca

SEQ ID NO: 432400 - DNA, 567 bp, Homo sapiens
acttgtccaggggaactctcatttataaaaccattagatctcatgagacgtatttactaccatgagtagggtatgggggaaactgcttgcatgattccattatctccacctggcccyacctttgatgcatggggattatataattcaaggtgagaaattgggtggggacacagccaaaccatatcagcaattatttttgaaattttatttatgatatatgttgatgaagtagaattagtcactggaattaataaaacaattttttactttttattctccagtctctgcaaacctgttatttgaaaactgagttagatttgatagcttatatcattcttcagtcttaaaaagttattcctagctttagtcacaaaaacattctcagtctagcaattaatatttcttattctgtacaggactagattattatacaagttcatgcttttttctctataatcaggaaaagtgttgggaaagggagcattgttttcttcttaccctgcaatttctcactaaccatatgctaactggggctaaaaatctattaaagtgaatagagatttcaat

SEQ ID NO: 432401 - DNA, 567 bp, Homo sapiens
acttgtccaggggaactctcatttataaaaccattagatctcatgagacgtatttactaccatgagtagggtatgggggaaactgcttgcatgattccattatctccacctggccccacctttgatgcatggggattatataattcaaggtgagaaattgggtggggacacagccaaaccatatcagcaattatttttgaaattttatttatgatatatgttgatgaagtagaattagtcactggaattaataaaacaattttttactttttattctccagtctctgcaaacctgttatttgaaaactgagttagatttgatagcttatatcattcttcagtcttaaaaagttattcctagctttagtcacaaaaacattctcagtctagcaattaatatttcttattctgtacaggactagattattatacaagttcatgcttttttctctataatcaggaaaagtgttgggaaagggagcattgttttcttcttaccctgcaayttctcactaaccatatgctaactggggctaaaaatctattaaagtgaatagagatttcaat

SEQ ID NO: 432402 - DNA, 567 bp, Homo sapiens
acttgtccaggggaactctcatttataaaaccattagatctcatgagacgtatttactaccatgagtagggtatgggggaaactgcttgcatgattccattatctccacctggccccacctttgatgcatggggattatataattcaaggtgagaaattgggtggggacacagccaaaccatatcagcaattatttttgaaattttatttatgatatatgttgatgaagtagaattagtcactggaattaataaaacaattttttactttttattctccagtctctgcaaacctgttatttgaaaactgagttagatttgatagcttatatcattcttcagtcttaaaaagttattcctagctttagtcacaaaaacattctcagtctagcaattaatatttcttattctgtacaggactagattattatacaagttcatgcttttttctctataatcaggaaaagtgttgggaaagggagcattgttttcttcttaccctgcaatttctcactaaccatatgctaactggggstaaaaatctattaaagtgaatagagatttcaat

SEQ ID NO: 432403 - DNA, 539 bp, Homo sapiens
gatactaatttcttcttcagtcttgccacttgcatagtttggagctcaaacttggacatgatcatctacagaagtggatacctaagtaggggacaataattaaggtttagcccattgtaagatcagccaaaatatcagcgtcatcagtcaatatgaaaggtaaaaggtagcatagcatcaaaataaaggaaatgagtcacatcacagaaaagaacggcttgtatcatcctttacttaggaacttgagcacttgaaaaactcatgaacttatagtttaagagctgtgataggaataggttatctgacatgcaaggactgatgggtatcccagggctctacctcataggctagtagaaacttgtggcaagttttcttttaggttttcttgttgttgccataattattgtgscttatatttttttgaattgtgttgcttcaagttcatagtacttgggggacaaaattctagaagtatacctatattactggcttgaggggtttttagtgtattcattttgattatggtataagggaagagg

SEQ ID NO: 432404 - DNA, 596 bp, Homo sapiens
ggctatgtgagggtcttggtwtattcactcccaaccaaaaggcagcaataaaactggataaaaatttaaaagtaaccattggttgtctctggaaattggccaaacagcataatgttgggaaatattttttccagaaagtctccataaaattcagtaaaagagagcggatgctttcatccacctctgtctcgcagcccaattccgtggctcagaagttgaaccctggatgggcaggcaggctatgtggactggaagctctgctcccctgctggagaagagtgactttatagcttggaaaggtccatgcccgaggatcctattgaatacaaagagattacagtgggaaacaatcagagaagactagaggatactagctgaagcaagcaacaaagtgcccagcctgagagaaatttaacatttaatggggaaatttacagaaacagcctaatgatctcactaagaggaaacttacttatggtggttcagaagtcaatgggaatgcacatagctatgtccaatcaagaaaccagagaagtccctgtgagctattagtagtctccactattgattctagtctatctaaaccttgtcatttc

SEQ ID NO: 432405 - DNA, 631 bp, Homo sapiens
ttgggaaatgggaccacccatcttcaccacacactatggaacctgtggtgtttccataactgatttcatatccatcgtagcattcgtagtccaatgtgtcatggagcttaawccgcatgccattactcttggctctggaattctcaaaaacaggcatatcacaaaattctgaaacaaaataaaattgaggattgcttttctatgccatacgatgcacaactcaactaagaaagtcccattgtagggataaaatttaccaatcagtgtgtgctaataaattgagtactattaaaaatagtctgacaatcagtgctttttgtgctataatagttaattacaatagttaaatatatttctctctgtatattctttcttatcattcaaatcctgtgaaaatatattagaaacatttggtcagacctatttttatttgtgaaaaatctcattggctgttattaaagtctactactatgatactacaatctattattttaaagatgataaaattttgtgaatttaaaagttaacgaaaccatttatgtagttatgtaacgatttactaacagtaagggtgtatatattagataaaaattatattaattggatataagttctataaaaatttatgaag

SEQ ID NO: 432406 - DNA, 601 bp, Homo sapiens
ttgagcatgttcctaaaatagaaaaagtagagaaaaaagtaaatatttgttgaatacttcttttataggagggaacaagtaaaaacatggcaatatggcaaaacaatgaaacatttgttaatgaattgaaaacagcaaaactggaagtttcctagacatccgtgttcttaaaggaaaccacgaatttctgaaggaaatgttgaagacacagggaagggcagaataaaagcaaagaatccttgagactgtcaacagagctctggcgggccttaaggaatgcasatctagcagactctcaagtccctaatgatattttggaagactttctggctactttgcaacaacctgagtatttttggtactattaaggggtcttaaacctccttaagtcaaatgccatttcccaggcaaagatacggtacacactgctaccataggcaagaaagtaatttgtaaatccgttgtctccaagaatttaaagtggtcgtcatcttaagtgggtgcttaaacccatatagacgtggtgtttgagaggcatgtggaaatgtaagcagaaaaaagaaagcaaataagatagcaaaaataagttctaatatattag

SEQ ID NO: 432407 - DNA, 600 bp, Homo sapiens
gagacctcaatgtacaatgcaaaactataaattgccaaacttgggtttggcaatggctttttagatataataccaaaggcacgacccatgaaagaaataattgataagctggactacattaaaattaaaattttctgctctgcaaaagacacagtaaagagaatgaaaaatgaagccactgactgggacatatctkatgatggactacttttttttttgaaacagggtcttgctctgttgcccaggctggtgtgcagtggtacaaccttggctcactgcaacccctgcctcctgggttcgagtgattctcctgtctcagcctcctgagtagctgggataagaggcgtccaccaccacatccggctaatttttgtatttttagtagagacagggtttccccatcttggccaggctggtcttgaactcctgacctcgagtgatctgtctgcctcggcctcccaaagtgctgggattaccgtgagccaccacgcccggcctgatgatggactattatccaacatatgcaaaccacttttaaaattcaacaataagaaaacaaacaaccttattaaaaagtgggccaaagaccttaacagaata

SEQ ID NO: 432408 - DNA, 588 bp, Homo sapiens
gtaaactatggactttggatgatgatgatgtatcagtataagtccattcattgtaacaaatgtacctctctggtggcagatgttgataatggaggaggctatgcatgtgtgtgggcagggggtatatgggaaatctccgtgccttccactcagtttttgctgtgaacttaaaactgctccaaaaaataaaatctattaaaaagaaaaaagggtaatrttttaacacgtgaacacacaactgtgtcccttccagagtactccagcatgcttacagtttgtaacacttaagtgtgtacgcgtgtgcatccacacaggtgtgcatcgacatgccgagcacgtgcataaaacaagacaagaagaattcgtaccaaaagttaagggtggttttctctgagtggtaggctcatgggtaaatttaatttccttctttgtgtttttctgtatttttaaaaagttctgcagtgaacatgtgttacatttctcatcagaaaagccatcgtgattgtgtgtatgtgtttaaagggaaataaatgatcaaaataccatatgacccagtaattccatttctaggaatataaatttagagaa

SEQ ID NO: 432409 - DNA, 510 bp, Homo sapiens
tgtgtccctcaagggccttggacatgaacctgacaaaccaacaccctgaagggtccacaaatttgaacagaggggaaacaggtgctagcccattcataagtgtcaaccgatgggtcaactactagtacctgtgattcattcaccagcttcctgagctgacagcagmctcactgcctaacagtgaggaaagatgtgtgtacccttcctgggcctgagaggacagcccaatttctgaggcccagcaagctccatccctatgcctctgtcctttgggaaggatgggcaggtcttccctgcttcatagaccccataggggtccccaggttggaggcaccatggactccgtgtcccttcagtcaagttctctccccacacctcataccctgacagttgtattagcccagacagggcagggcctgacctagcacagcccaacggagcggaaggcagtgggcccccctgcccccaaggctaggtcctggttacacactcccatagcccccgcactgc

SEQ ID NO: 432410 - DNA, 559 bp, Homo sapiens
ccggcagagggcaactgccgagtaaaccaaagctgtgattgtcaccattcttctgttacacatgctgtctgggtggtgggggtkggggtaggggggagaagaggcactgggcacagctgatcgggaggctaggggttataggctttctggggcatgcgtgtttcctcgacagcagctttaaagatgcccaacgctgggtgtcaactgcctgctgggtgtcagaagaaactcctgatgttttccttgttgcactgaagcctccataatggtatgagatggggattatgaacctcatctacagaggaggggaatgactcctgggcctcttgctccagggcacacaacgtgaaagggcagaagcagaactcaaaccctcaaatgagccttttaagtgcggtgtaaaggagcttcctttgtgaggagccagggatagaggctgccattcaggcctggcacccccgatggggcccaactggaggatgggacttgagcccctcaaggcctcgagaacactccggctcagcgtgtctcctcctgcaccccttaaatcacctggacc

SEQ ID NO: 432411 - DNA, 559 bp, Homo sapiens
ccggcagagggcaactgccgagtaaaccaaagctgtgattgtcaccattcttctgttacacatgctgtctgggtggtgggggttggggtaggggggagaagaggcactgggcacagctgatcgggaggctaggggttataggctttctggggcatgygtgtttcctcgacagcagctttaaagatgcccaacgctgggtgtcaactgcctgctgggtgtcagaagaaactcctgatgttttccttgttgcactgaagcctccataatggtatgagatggggattatgaacctcatctacagaggaggggaatgactcctgggcctcttgctccagggcacacaacgtgaaagggcagaagcagaactcaaaccctcaaatgagccttttaagtgcggtgtaaaggagcttcctttgtgaggagccagggatagaggctgccattcaggcctggcacccccgatggggcccaactggaggatgggacttgagcccctcaaggcctcgagaacactccggctcagcgtgtctcctcctgcaccccttaaatcacctggacc

SEQ ID NO: 432412 - DNA, 457 bp, Homo sapiens
ggtctggctctgactaaatgtatatgccatttcattcttagctctgatggcctagaattatgtgygacctctgggcaggcacccattcttctatgctaagattaacttttcaaaagaagacaggataacaacatctttgtttcttcacccgtatactctttccttcaatatttaattagggtttaattcaacttgatttccaattcaatccaaactaatccaatccagtccaatccaactcagtgccaacaaacaatgaaaaacatctacactgtaccagaccctgtgttaaatcctggagacactgaaagctcctggcctggaagcagacacagactcacagacagataatgattcacagtggtacattaagaaacaactccacaatgcagcagaaacactggagtggctgggaggtgggcaggagtgcccctcaatggcaaggtcttcatgctgg

SEQ ID NO: 432413 - DNA, 613 bp, Homo sapiens
tgccattattcttactaacaagagacaaccgagataattgaaatctgaagataatctaaaacctaaataaaatattattattactatacacagcaaactaatctaatgtctttggcataggagccaaatactttggacagtgctaacatgatgaagaagaattagcaaattcaaaatctagccaaacttgggacttcagtgaatctataakagtttctttggcataatgaagacatggcagttagcattgccctacttcccccaaattatgtgactctttaaaaaaagggttgaatttccccacctgctgttagaaacacaaaagtctttctgcatagctgctaaaaattattttagctttggcccatacatttttttaaatcttgcagtgtctttactgtcagtttggtaagatacagccactttatctctttttctcccttcttttttcttttaagaattcttcatccatcttctttccaaaattactgtgagtcaggatttctattccaaataatttggaatcaaaagtattcaacagtctggaggcaaattaggtttttattgcatttttattaagagcaaattgaactgtgtgggcaggctagagagg

SEQ ID NO: 432414 - DNA, 613 bp, Homo sapiens
tgccattattcttactaacaagagacaaccgagataattgaaatctgaagataatctaaaacctaaataaaatattattattactatacacagcaaactaatctaatgtctttggcataggagccaaatactttggacagtgctaacatgatgaagaagaattagcaaattcaaaatctagccaaacttgggacttcagtgaatctataatagkttctttggcataatgaagacatggcagttagcattgccctacttcccccaaattatgtgactctttaaaaaaagggttgaatttccccacctgctgttagaaacacaaaagtctttctgcatagctgctaaaaattattttagctttggcccatacatttttttaaatcttgcagtgtctttactgtcagtttggtaagatacagccactttatctctttttctcccttcttttttcttttaagaattcttcatccatcttctttccaaaattactgtgagtcaggatttctattccaaataatttggaatcaaaagtattcaacagtctggaggcaaattaggtttttattgcatttttattaagagcaaattgaactgtgtgggcaggctagagagg

SEQ ID NO: 432415 - DNA, 613 bp, Homo sapiens
tgccattattcttactaacaagagacaaccgagataattgaaatctgaagataatctaaaacctaaataaaatattattattactatacacagcaaactaatctaatgtctttggcataggagccaaatactttggacagtgctaacatgatgaagaagaattagcaaattcaaaatctagccaaacttgggacttcagtgaatctataatagtttctttggcataatgaagacatggcagttagcattgccctacttcccccaaattatgtgactctttaaaaaaagggttgaatttccccacctgctgttagaaacacaaaagtctttctgcatagctgctaaaaattattttagctttggcccatacatttttttaaatcttgcagtgtctttactrtcagtttggtaagatacagccactttatctctttttctcccttcttttttcttttaagaattcttcatccatcttctttccaaaattactgtgagtcaggatttctattccaaataatttggaatcaaaagtattcaacagtctggaggcaaattaggtttttattgcatttttattaagagcaaattgaactgtgtgggcaggctagagagg

SEQ ID NO: 432416 - DNA, 577 bp, Homo sapiens
ttggtgagggtctcattcatgtcatgtcaaaacatggtggagaaatggaagaggaaatgggcttgcggaaaaaaggacaaagcagtagaggtcacctcactttataacaacccactcttctctctcaggagctaatccattcctgcaaaaactaatccattccaaaaaaaagaaaagaaaaaaaaaacactcttgtctttcaagaaagacattaatctgccttaaatacttaatcacgtcttaaaggccccaactcccaacaccattacattggcaattaaatttcaacatgagtttaggaggggagaaaccacatccaaaccatagcagttactttttagaatgagaaaaataattgcatatttggatgggartgatccagtagagagggtgactttgatgattgagaagttagaaaggacaattactggagcaatgtccttgagtaagtatgaaggaatgggatccaacctgttcacatgtagacaggatttggatgggagaccagagaagagagaaggaatatatagacacagaagcagatggatttttacatgtggttaaaaaaaaaaaaaaa

SEQ ID NO: 432417 - DNA, 533 bp, Homo sapiens
gacactgaaacaagagaaattgaaaactaacatgtactagaatgcacatcttctccatcctgatccaatggtcagatctccccaaaarcacactaggttcaacccagccaaaacagctggcaactctgtaacaccccctaactattttaaccatcctcacaactaaggtggcttaaatatgtttgatcttggccaagtcacatgactattctggtccccaatttccttaatccttatggcacagcacatgcacatttaattggaagtgtataaggtcccttttaacttgaatgtctaatgggtggattagtagtacagcttagagaccaccaagtctaacaaaagcgaaccaactacaataggttcatttggttaccatacatagaaaatgcctaaattgcatacacttttagtctaataaaaacttaatatccaaattagacattttaaaagcatattttacagtcttggcatctccacttaacagttaattttgaggaattattcgttactgcagtgaacaaagcacattt

SEQ ID NO: 432418 - DNA, 608 bp, Homo sapiens
tgtttccttcttaggatggtgtccttctgttggaggcctcttctcagagtcaatctccatcaatgctattacacaatgctgtttaaaaatccatactttttagaaagcttgcaatacgtagcaggggaaagagaggagaataggaaagtcaatcagaaaatgggtttagtactctgttcatggactattcttacaaagataaatttccctgaaaacatagcctgggagtgttcagaacctaccagacattgccagtgaattgagagagsctgtctatttcacaactaagtgggacagtgtataagaattcatttcatctttttggcagcatttattccagtctttaaagcagcatactacagtccccccaaaattgtaagttaactctgattagtggttaaaaattaagtccatttatttacatattcacattaatctccacctagacaggcagactgataattgtataacactaatcaggtgggctgtaagttttgagggttactgcacacagagcaggtctaggtcctcaatctgataggtcacaggagaaagaaaggctttttctcaattgaccccaaactctctaccccactgtccctaaccag

SEQ ID NO: 432419 - DNA, 524 bp, Homo sapiens
ttctaattatttaaatgaagaggttattaacctaaagtcaatggacaagctttggaggtttacaagtcacctaaaatgataagttaaatttgcaaaagcttgtgtgcttttctggggcaaggatgcatgggatttatgagattctcaaaggaatctatgactttaaaaggccttaaggactacactggtttgataggttttcttcaagtgtaataaacatccatctttccaagctctattctgctgtaacaaaatgctttttccctcagccagatatttacaatgaaaaagattcaaaagaatatgacacagattactaatggtgsatcttaataaaaatatattttatctttattatgaagaggaagggattgtgtttctctatgtagtaatgagtattaaaatggccacctgagaccatcttgctttctctgtatgattccctattttccattgatctttattttaaccacacatacacatatatataagttggataaattataatccatattcacctactt

SEQ ID NO: 432420 - DNA, 520 bp, Homo sapiens
aggtctggtcaacacagcagtggctcaaagtgcaatttaatcatcctggacttggcccaacccatcctcttggtgtgagggaggagcaatttgttattgctgctgtcatcgacactgggcggccatggacagagatctgcaggcagcagcagtagcaggaaaggctggggagcaaaagaagtgagtggcagttgtgctgggctataggaactgcaggagagtggtggcccccaaggactgggaattcatgcaaggtcctcttcatccaggccctgctataggaaacctgatgggaatcaagagactaaaaatgatttcctggttcccccttcctaactcaggctctgtgccccatactctgttcatattctgtcgagacacccatcsccctgtgtttcacttgtctgattacatatctgtcttcttaagagcagagaatggtgtttattcatctttatacctcccagcacctaataccatatttgttgaataagtgaatcaactattgctatgatgagag

SEQ ID NO: 432421 - DNA, 561 bp, Homo sapiens
gagtgcaatgcctcttgtggatgtttgagtaggaccagcagttgggactgttctgcccccaactcttccccagcagcagctcaagggactctggcaatgtttgactctcagcagacacccacatatgtgtctctggtctgaaagtacaggcaggttataaaacaacatttaaaaattacatatatcaatctatrtctactgatttacttcaaccatttggagggctcatttgtgcagggacaactgtgcacctgatcttggtaatctccttaccctgactaatttcagtgtcacaggatgctatgcataccacccatgagttctggattccttcctatccccttagatttggtttcaggtagaagaggtagcccatgagttatgggccaaagtcacataaaagcctcccatggactagctcacacaccgccagctcccccaacctcacctgaggctgtgggcagaggcaagaacaattccagctgccccagctaccctagctaccctgacctcggcagcctggaggatctaatgccccagcgccaccagggagctgcccag

SEQ ID NO: 432422 - DNA, 578 bp, Homo sapiens
gatagggaggaaggtaaaatgtgctatggtttgcatctccaaaggtcccttcccaccctaggttcccgcgcttcagaagccagtaatgatagacccagggatcacaagggggtgtgcgggtctctccttttgctgccacgaagtgcagggcgacccctcacccgcctctggcgtccacctctgcacctcagagacccgctggggaagcacaaacctcatgggcagsgaaggctttcctaggcaacttcacacacagtctaccgccgctgcaattctaaattcagatctactcccaactcaacgttatttcttgctgagcactatatttgggctctgagcttgccactttgggtatcttgatttgtataggtgaaactcccagaaggaagatttcatgggggcaaccttcatgcagggaggaagggagaattaaatttcttaaacaggagttcagactgaaatgatgctgacacaaatcgtctgccatttttctgacacctcccataccaatgacttcaaatggttaaaaatcttttaattatgaaagaaaatttgtttaaaatcttttaatatagaca

SEQ ID NO: 432423 - DNA, 553 bp, Homo sapiens
ccacccttcaatctaccattctacctgtctacatttataatacaaatattcatagacattctggcaatgacctttttcaaaatccagaaatgtgtggaacaaagcaaaacaaaaacaaataaaaataycttcaagtgcttcatctctgttatagggaaaacaatgatatagcttaaaaatcaaacctgagtttaaatcctgactctgctacttattattgagcaattaggaacttctaaacttgagagaaaacataatgagacaaatacaaaatgtacattagcagaaaaagtgctgtagacccatagtcttgcccagatgttccaaagtcaactgactggctacttagcttcaggcaagttgttaaaccacactggactgaagctgtaaagcaatggaattaaagaagaggctccttaaagctccttcccatcctttgcttcatggtatcattaagaatgtagtcattcttgttaaagtttatgcttttccatagccctaaactcagaggactcttccattacagctcttgaactattaaggaaacctacca

SEQ ID NO: 432424 - DNA, 599 bp, Homo sapiens
gtactcatggacattccctgtttgtagagctaagcagctgctcttttggccgtttccatcataattgcacaagggctctggagtcatgccacgaggtacagatactgtcatcttcatgctattatcagacttccatgcaaagaattgcaattcacagctttaggggaaagggatgcaaaaacactggtgcagtgtcttcttttcccagaagctttcacagtagcatggccctaagcacatgccaattgggaggctttatctctagaaggccaaatgggggtcaagggaggctgatgaggggttwgcacggaagaattgagagggggatgaaatcagaagccctggccagtagtacagcgagtgcagggatcagcatcctcaggtgtatatttttgaggactttaagtggcagcagtagctgactggatggattaggggtccaggaaaagtacaggtaccctacatcatattttaaaaacttgctctcaacctgtaggtctaatacagtggttatttaaatttaattcaaattaaatagaatttaaagttcagttcctctgtggcactagcaacacttcaggtgctcaatagccacacat

SEQ ID NO: 432425 - DNA, 570 bp, Homo sapiens
acaaagttcatgataaaggctagttcacaattatcaccaggtaaagataatgaaagtttaatttggaaacgtgcaaattgaagaagaacccaatttttaaaagttgccatcacattcaatttatagccttttcgtattagcataatggaccttgaaattacaagggagagggaaaatgtggagagcattaatatttattgagtgcctattatgtgctccagatgttttacatatatgttactcattaatcctctaaataaccctgacctcagcaaccctcaccccacccttctgtgccactattccaccttttgctgtcccaatggaaaccaggctagatgcctttatcagatcctcctatagcactggaatcctgtactcagagcacttcttacactttcttattacttgtttaattgtcttttcccaaacagactataagtctcacraagggggttacttcttattgactgctatatctctagcacctattatgacataagactcacagaagatatcactagtatttaattagtattaatgaaggaatcaccacagaagacagtaaca

SEQ ID NO: 432426 - DNA, 510 bp, Homo sapiens
cagtcctaatttcaaatttcaaatattttattttattcttcccacaaaattaatatttatgagaccaacttttgggttagaaaatattcgtgatgaacacacagacagtgcataaatggaataatcaaaaattggccacaagccacatggaaatgttcaacctaagtacctcttgcaccaaaggtccttcaaaagttcattctgataaactgggtggtcttcaagatttaccaatttcaggtgagcagctatcaacacaggccccatcctaaggctcttggcatttttcctgggtgaagcgatacattatctcatccccaagtcaatgtttatttgctctttgcaaccaccacttccaacctcccaccaccacctccgacatcagccactgtcatagcaccattgtgtatctgccattrtggtcttttaatttctatgatgtgaaaagtgggcctttctccaaaggccttacaagcatttgctttataccttgttagaatgttcccactg

SEQ ID NO: 432427 - DNA, 510 bp, Homo sapiens
cagtcctaatttcaaatttcaaatattttattttattcttcccacaaaattaatatttatgagaccaacttttgggttagaaaatattcgtgatgaacacacagacagtgcataaatggaataatcaaaaattggccacaagccacatggaaatgttcaacctaagtacctcttgcaccaaaggtccttcaaaagttcattctgataaactgggtggtcttcaagatttaccaatttcaggtgagcagctatcaacacaggccccatcctaaggctcttggcatttttcctgggtgaagcgatacattatctcatccccaagtcaatgtttatttgctctttgcaaccaccacttccaacctcccaccaccacctccgacatcagccactgtcatagcaccattgtgtatctgccattatggtcttttaatttctrtgatgtgaaaagtgggcctttctccaaaggccttacaagcatttgctttataccttgttagaatgttcccactg

SEQ ID NO: 432428 - DNA, 578 bp, Homo sapiens
aatgactgctgtgctcaccaggtcccctacacatctggtgtctctgttgtctgcagtgaagtggggtttccagagtcgctragaagtaaggcaaaagattacaaacctcctttagaattccacagacccagattatgactgggaaagctgcttaacctttctgagccaatttcttcatctaaaatggagatagtggataccatgtgtctcagtgaagcccctggcgcacaataggaatatacttaatataaattgtttccatcatttggaacagaaaatgaccatatgcgttaagtcttttctcagtcacttccctgtccctatgagagagacagaaagaagactttcaaatgaataaatgcaaacctcactaaagaaaatgtaaaatatagaatgggaaaagatcacatgatgaagaaaatatttcagggcctagggcaaaactatcaaaactgaatggtgttaggagaaatggtggaaaggcagaaagagggaaaagcagaagaaacaacgaaaatgccatgtaaggaagcctgcttttgagtgggtctgcttgagtgatgctctcttggtccata

SEQ ID NO: 432429 - DNA, 578 bp, Homo sapiens
aatgactgctgtgctcaccaggtcccctacacatctggtgtctctgttgtctgcagtgaagtggggtttccagagtcgctaagaagtaagrcaaaagattacaaacctcctttagaattccacagacccagattatgactgggaaagctgcttaacctttctgagccaatttcttcatctaaaatggagatagtggataccatgtgtctcagtgaagcccctggcgcacaataggaatatacttaatataaattgtttccatcatttggaacagaaaatgaccatatgcgttaagtcttttctcagtcacttccctgtccctatgagagagacagaaagaagactttcaaatgaataaatgcaaacctcactaaagaaaatgtaaaatatagaatgggaaaagatcacatgatgaagaaaatatttcagggcctagggcaaaactatcaaaactgaatggtgttaggagaaatggtggaaaggcagaaagagggaaaagcagaagaaacaacgaaaatgccatgtaaggaagcctgcttttgagtgggtctgcttgagtgatgctctcttggtccata

SEQ ID NO: 432430 - DNA, 578 bp, Homo sapiens
aatgactgctgtgctcaccaggtcccctacacatctggtgtctctgttgtctgcagtgaagtggggtttccagagtcgctaagaagtaaggcaaaagattacaaacctcctttagaattccacagacccagattatgactgggaaagctgcttaacctttctgagccaatttcttcatctaaaatggagatagtggataccatgtgtctcagtgaagcccctggcgcacaataggaatatacttmatataaattgtttccatcatttggaacagaaaatgaccatatgcgttaagtcttttctcagtcacttccctgtccctatgagagagacagaaagaagactttcaaatgaataaatgcaaacctcactaaagaaaatgtaaaatatagaatgggaaaagatcacatgatgaagaaaatatttcagggcctagggcaaaactatcaaaactgaatggtgttaggagaaatggtggaaaggcagaaagagggaaaagcagaagaaacaacgaaaatgccatgtaaggaagcctgcttttgagtgggtctgcttgagtgatgctctcttggtccata

SEQ ID NO: 432431 - DNA, 578 bp, Homo sapiens
aatgactgctgtgctcaccaggtcccctacacatctggtgtctctgttgtctgcagtgaagtggggtttccagagtcgctaagaagtaaggcaaaagattacaaacctcctttagaattccacagacccagattatgactgggaaagctgcttaacctttctgagccaatttcttcatctaaaatggagatagtggataccatgtgtctcagtgaagcccctggcgcacaataggaatatacttaatataaattgtttccatcatttggaacagaaaatgaccatatgcgttaagtcttttctcagtcacttccctgtccctatgagagagacagaaagaagactttcaaatgaataaatgcaaacctcactaaagaaaatgtaaaatatagaatrggaaaagatcacatgatgaagaaaatatttcagggcctagggcaaaactatcaaaactgaatggtgttaggagaaatggtggaaaggcagaaagagggaaaagcagaagaaacaacgaaaatgccatgtaaggaagcctgcttttgagtgggtctgcttgagtgatgctctcttggtccata

SEQ ID NO: 432432 - DNA, 585 bp, Homo sapiens
atgtgtctcagtgaagcccctggcgcacaataggaatatacttaatataaattgtttccatcatttggaacagaaaatgaccatatgcgttaagtcttttctcagtcacttccctgtccctatgagagagacagaaagaagactttcaaatgaataaatgcaaacctcactaaagaaaatgtaaaatatagaatgggaaaagatcacatgatgaagaaaatatttcagggcctagggcaaaactatcaaaactgaatggtgttaggagaaatggtrgaaaggcagaaagagggaaaagcagaagaaacaacgaaaatgccatgtaaggaagcctgcttttgagtgggtctgcttgagtgatgctctcttggtccataatggctggcacaatatctgagaaagaaagtgataaggtctaaaagaagagagaaaagggtagatcactaagaaaagaggtatattgggtcttcagtaaggaaaatgggccagggagcaaactctcaccttgaacagagaagcagagatagcaactgaggctgaaaaagctgcccaaaggcattgttccatgagaggtggaaatgacag

SEQ ID NO: 432433 - DNA, 598 bp, Homo sapiens
attatcagcctgagcagtctgaaaccaagagactgtgctcatgaccactacactatgttctttctgcatgatgcagttacagtgcagaggggtaaatattttaacaagttgtagcagcagcactgatggaagactggtggtcaaggaaggcattcgagaggagatgaggaataatgaagtcttagaggagcaggaattaaccaaagggcagggagtatatgagcattttaggaagaaggagtgatgtctgtagagatgagcaggctgtggagaagaatctaccaccttgatctggagttgtagttatggctgaataccaaagaaaaggggaaaggagaaaaacaggaagaccaagatggacatcagtgtgtgttgctcaagttcatactcagtagaattggcctgggttgcccagcagggatgtaggagaagtccttcttgataagaccacagttcccctcacatgaggatgctgggcaacaagsctcaaatggacaattcccagagccagcaaaggactgggatgcataggagacactaaatacacactattaaggtaaaaaatatccatagagaccttctttccaattacccactc

SEQ ID NO: 432434 - DNA, 634 bp, Homo sapiens
tatggtgtggcaagtcccagtagtgacttcaactgaattctctaccactctagcaaaatagactatgagaacaattkttgttaattttataaaaaatgagctatttcatatacattggagtttgtggtctagatgtcatatatgctacacaaaccttggcgtcaaatagaatgaggtctgacttaacttttggtcatcttacttaatttctccaagtcttacttctgtcatctgtaaatggagaccaaaggtagaattttattcatttgttattataagttgcgagcaatagctgtatgctcagtgcttagtccagtacctggaacatagtcagtgttcagtaatggtcattatttttattcagtttgaaaaatgtctcactctagtaagaagtcaagcaaaattttgacacaaagcttatacgtaactattacagagggaaacaccatcagttatgcacaactgtttacaagatttaaaaatgtagactattaatagttcttcaagagaaatgcccctaaccatttcaggaaggacaatatgaacatacaaaccaagaaaaacaccgaccatctcccacaactttctcagcagaggcccgtgcccattcagatcaacgtgtccaataaacctc

SEQ ID NO: 432435 - DNA, 629 bp, Homo sapiens
gctcaggatagaggaaggttgatatttctgcatctaatgtatgcctctagctcattaggtaataaggtttgcattcacattaaaattcttagtgtgacttcaggctctcctcatttttgctttcctctacccttctcaaatgatttgggactaatcattggtttcagttctctcaccaaggggcccatggtgaaaaaatcatgacttaacaattcaacaagcatttcttgagcatttgttatgaactcaataccaggaataccgacrtggacatagtctctgctgtcagccctatctcaaaactctggcagaggcttctccagttatatagtttggatatttgtccctgctcaaatctgatgttgaattgtaatctccagtgttggagatggggcctgatgtgaggtatttggttcatccaggcagatccatcatggcttggtggtgtcctcatgatggtgagcaagttctcatgagatctggttgctgcgaagtgtggcacctacccaccccctactgtctctcttgctcttgcttttgttatgtgaagtgccttctcccacttcatcttccaccatgagtaaaagctccctgaggcctccccaaaagccaaacagatgccagaacca

SEQ ID NO: 432436 - DNA, 629 bp, Homo sapiens
gctcaggatagaggaaggttgatatttctgcatctaatgtatgcctctagctcattaggtaataaggtttgcattcacattaaaattcttagtgtgacttcaggctctcctcatttttgctttcctctacccttctcaaatgatttgggactaatcattggtttcagttctctcaccaaggggcccatggtgaaaaaatcatgacttaacaattcaacaagcatttcttgagcatttgttatgaactcaataccaggaataccgacatggacatagtctctgctgtcagccctatctcaaaactctggcagaggcttctccagttatatagtttggatatttgtccctgctcaaatctgatgttgaattgtaatctccagtgttggagatggggcctgatgtgaggtatttggttcatccaggcagatccatcatggcttggtgstgtcctcatgatggtgagcaagttctcatgagatctggttgctgcgaagtgtggcacctacccaccccctactgtctctcttgctcttgcttttgttatgtgaagtgccttctcccacttcatcttccaccatgagtaaaagctccctgaggcctccccaaaagccaaacagatgccagaacca

SEQ ID NO: 432437 - DNA, 661 bp, Homo sapiens
agcacatatatatgtatatatatatattttcttttttttttttttctctagaggaccgaataacaaatattttaggctttgcaagacaagaggcaaaaatcaaagatataatgtaggcactttcaaaacaaaaaagaaaaaaatcaaaaaatgtttattgatagaatttaaaayatattaataattgagtacaattttgtcataatacatgtaaatttaataaaaaggaagtaattgttttggaaggaataacattttgcttaactgggattcaagttagtgtttccaatcctcagaacaattgcaaatgttaatttgttaatgctgatctgaaatggaattttatgtttcatctttgaaattgttccttgcacaatagttgacactgccagtgactacccatgtacttacatatattgaagctcaaaattatttaaagttttcaagagttgttactatgcattttacagtcattgagccattgaaaatttggggtaacatgtcagaaacaaggtataaaaactgaagtaatcactttgcacacctgctgatataaacagaaaataaacgtgctattttcaaagtatgctcagtaaagtgtctttgatagaaaataggctcaaaagatcctatttgcagaaacaatcaaaacatcaaaaat

SEQ ID NO: 432438 - DNA, 575 bp, Homo sapiens
agtacataataataaaagtttaagtttatcaggaagatataacaattcaaaagaaagtaacttcaaatatgtaaaccaaaagttgggtgaactataagaaaatttggcaaatccatagccatagttagagttttcaacatgcttctctcaattttcaataggataaacaaagaacaagtcaggaaagaatatttaaattgcacaattaccaaayacagtctttaaaaatgtatgtggagctatgcaagtaagaattagaatatatacatttttcttaagtacatataaaaagtttgcaaaaccatttcaaaaacctaatatattatcaaccatattatctgaacacaatgaaattaattagtcaattccaaaaagacaaatgaaaacccacatacttaaaaaatttcaaagatcacttctaaataccttacaagtcagcgaagaaatgttcacagaaatttgaaaatactacaagataaacaataatgtaaatgttgtatataaaaacttatgtgatccaaaaaagtagtattagaaagattttatagattaaaatgcttatattagaaaagaaa

SEQ ID NO: 432439 - DNA, 590 bp, Homo sapiens
tgatcaaataaactcattaaaatttgaatatgcttaagtttatctcttaacaagggtatgccaaagttcagctggaccagaaggtgttcatctctgcatgggaagcaaagtgtgagctaaatattgaaggatgagctcagtttgtacaaattttaagcaggggataacatgttcaggttttcatgtaaaacagatgagtctgttggcagtgtggatgatgactggagcagagtaggactggagggagcaccaycacaggagaaaaatcacccaacgaaatcataaccagcaggaggagaagggaaatataaattttagttgaaaccatcttaccagaataggctgtttagtatgttaatctagttaactgaagaagcaggatctgtatcttaatgtcttggcaaatgctggcattcatccctccttattcaagtaatacattttggggctcatggcagagagcacagaataaaagaggaaaacaggcaaactcatgacaatgcatttatgctgcacgccttttcaactgcaaggccctcccttcaatgaatgagcttacttggcctggcaaatgttcacccaggcaggca

SEQ ID NO: 432440 - DNA, 502 bp, Homo sapiens
atggtcagcaatctgttataaacaatatactatagggagatgaatttttgaaaactcttctsctttaagacctcatttggtttctagcttccagttgaattttatgtacatgaagaaaaattatttgatggtgttacatctttcaatatttcagtctcagactaatggttattccatagataatattggttctggtaatttttagacggttggcccaggacataattaaggaaaaattctttttattatttatttttaaactccagcctgtagaacaatgcaaatagctgagagcagacagtctctcaataaatctgtgatggattcgtcgttgcgtaggtcaataaatctagcagcttaattaatgaatatagggagacagagcctggactgaacctcagctttggctttggccttggccacattattctttggctgaccttaaaggctagtggttctttcagtcctgttcagaaatagaggaagagattgctaagacttc

SEQ ID NO: 432441 - DNA, 535 bp, Homo sapiens
agggcttccaaaaaacattcattgaaaattgaaacattgaagatactatgatgaatactataataatttttgttgttttgttttacaagaaagactttttggactgtgagttctccctatgatgactgttccatggctagggtccttatagtactaagaaatatakttcctctcaaaatctcccctgaagtagtcattataatatctcctcccaaaacctgtccacaacaacaacaaattgcgtccttttcagggttgggtacagcacaaaacagagattgtgaaaagatacttgttgtaaactgttttctgtttacaaatgcaacagcaacaaataattttcttatcagaacctaaattctgacaccatacctcagtacaacactgtgccattcaaaaaaaaaaaaggagaaataagctgggcatttggaaacgcactgggaaacatctccctataccctgaggagacctatctttatgccaaattgaattattttgaaaactcgtgaatgacattagctgaggttaagtgaca

SEQ ID NO: 432442 - DNA, 416 bp, Homo sapiens
ctatcttcttttgcctgcccttttcagagtctcttcactatctttgcctgctctttaaactrtttaaataagatgatctataattcttgagatgaaattattgtaaagtgtactacattttgttaatttgtagagaaacattttgttaaaattagacttttcttatgctttctagagtattaacaaaacacatttagatccaatgccatgagaaaataacttcattttttaaaatttttatgtaaataaaacaatgtgtttaggagcatagaaaaagtttaaagctttaaacccctaggttttatgagctgttacttagaactggtataattcttacaccaaagaacaatgatgttttccaatccatttttacttcaaccatccttctagtgatgtaatgaagtggccccttgcca

SEQ ID NO: 432443 - DNA, 536 bp, Homo sapiens
ttaaaagaaagaaaataatctacttcttgaaagaacaagagagaaacagaaataaaataacatcagccttctccattattaataccagatgtgagaaaacagttgagcaaaattcgtaagtttaaaattgagaaagaaaatcattttcaatctaggatagcacagctcaccaaaccatcatgtaaaggtaatatgtaaatagtaaaaataagaaactagaaatgtgtagtctcagaaaatttattccttacacactctttaatgtcttcatttattaattcattcatttaaaatatgtaatgaataatgtatatctggtttttgctagtatcatgctgttttgattactatagctttgtagtatatttcaaaatcagatcatgtggtgcctccagctttgttcatttttctctagactgctttatctattggrgtctatggtggttccatacaaattctaggattgtttttctatttctgtgaaaaataacattgaaattttaatgagtattgcattgaatatgtaaataactttg

SEQ ID NO: 432444 - DNA, 410 bp, Homo sapiens
tttatttttgtgcaagttggaattaatacttcaaaaaatgctgaaactatacattatatgaaaaacgtaagtaagtttatgtttacatgccatttaaaagttgatccagtctgaacacagtagctcacgcctgtaatcccactactttgggaagtcaaggaaggaggatcacttgaagccaggagttcaagaccarcctggccaacatagcgagaccctgtctttactaaaaatcaaaaaatataaaagcacccacctgtagtctcagctgctcaggaggctgaggtgagaggatcacttgagcccaggaggtagccgttgcagtgagctgagattgtgccactgcatttcagcatgggtgacagagaaagatcctgtctcagaaaaaaaaaggttaatccaattaagga

SEQ ID NO: 432445 - DNA, 565 bp, Homo sapiens
tgtttagctccaatacttcagcatagcaatttaaattataatgaataagttacttaatatttattaaaataataaactgctcaaatattaaatatatgcatttatataaaataaagaaaatagcatgtagaggaggattttaagaaatgtaagacccacacataaagcagcttggtttatttaaactaattttagtcaccagataaaccaacacttagggaagaatgtagcgtagactctattttctgcacctgggaggaggtgctttcccagtcccttgcagctgctgctgcccattagatatggaactagagtgggtcccttcctctctttcctttaaaacaatggggctcagggcacacaaagggctccaacatagttgtttgaagagtattgcaagtgttgttatttctgttgcttttgctgttgaagctgtgctcagtgctgtgacaagatagaaactagatattatcttctttgtgcccgtgcagaactctagtaccagctcagcatgtgcctgcagtagtagggtmcttgagtcctctgagtaatctcacaaaaatct

SEQ ID NO: 432446 - DNA, 612 bp, Homo sapiens
ctttttctcttcatgtccaacttctgataaaactctgcatcttgtcaattatcttctttccccatcacctcatagcactcctttccccaggtgttctaggtccccacactgtaggcttacaatgctcagaaacagacccaccctggcttttttgcatttccttatccacattcccaagccttagtaggggcgggggaggttctcatgtgtttgttagaaagatctgattaaytttttttaagaatatcatgtaaatgactgatggggaggtccatgtgttaacacttcccagggtgatctacatttaaaagagatatttaaattaaaaaattaatctgctgatttgaatcctttggaaatagaggaaatgttttttaacaaataagtgcataaatgagtactcaaaggaagaattaatttatgatgttagaatttcagcagcaactcaaccataaaccccaataatctcctactttccataatttgggccactattccctttacatacagtcctcaactctgcaacaaaattttggaaacttagaagcaatctgctttttctttatcaactcttcccacaatgctgaatttgcagcactgggtacctttaaa

SEQ ID NO: 432447 - DNA, 651 bp, Homo sapiens
gctcgggagcaggtggcagaacccatttgagcttgcttgggcattggggagaatttgttatcaggctacwggggtgtcacagaactcaaggacagggactggagtgttgtggggagccccgaagcccctgttttacttctttctttgcttttcctgaatatctgctttattcttactctatagacatgcttcctcctctttcaccccacattgtggggtgtagtcttttgcttcaagaaagcagcctggtggatggaatctcttggccccaatcccaaattctctggagaaggggctctttggtttaacttggataatgttgtcttcagctgggggtgggcacatcgtgcatatgtggctgctgccggggaaccacgtggatgatgtgagaggagcagcacccagaagagggagtgctgggctgatggtccaggtcgtgtccacttctgattgtttaattcttcttctaagtggatggatctttctccaatactcagcaaatcctgatcgttccagaatacttcattatagccaattggttataatgtgcttctctaagagaaatatttagggacaacaaatcttcatgggtttgaagacttgatggaggaaaaaggagtagattttcgaaggctggatttggatgaacag

SEQ ID NO: 432448 - DNA, 651 bp, Homo sapiens
gctcgggagcaggtggcagaacccatttgagcttgcttgggcattggggagaatttgttatcaggctactggggtgtcacagaactcaaggacagggactggagtgttgtggggagccccgaagcccctgttttacttctttctttgcttttcctgaatatctgctttattcttactctatagacmtgcttcctcctctttcaccccacattgtggggtgtagtcttttgcttcaagaaagcagcctggtggatggaatctcttggccccaatcccaaattctctggagaaggggctctttggtttaacttggataatgttgtcttcagctgggggtgggcacatcgtgcatatgtggctgctgccggggaaccacgtggatgatgtgagaggagcagcacccagaagagggagtgctgggctgatggtccaggtcgtgtccacttctgattgtttaattcttcttctaagtggatggatctttctccaatactcagcaaatcctgatcgttccagaatacttcattatagccaattggttataatgtgcttctctaagagaaatatttagggacaacaaatcttcatgggtttgaagacttgatggaggaaaaaggagtagattttcgaaggctggatttggatgaacag

SEQ ID NO: 432449 - DNA, 533 bp, Homo sapiens
tggggcagtcaaatcttaaagctccaaaatgatctcctcttgactccacatctcacatccaggtcaygcagatggaaggggtgggttcccatggtcttgggcagctctgcccctgtacctttgcagggtacagcctccctctcagctgctttcatgggctggcattgagtgtctgcaactttccaggtacacggtgcaagctgtcggtggatctaccattctggggtctggagacctcttctcacagctccactaggtggtgccccagtagggactgtgtgtggggtctctgaccccacatttcccttctgcactgccctggcagaggatctccatgagggccctgcccctgcagcaaacttctgcctggccatccaggcatttccgcacatcctctttaatctaggcgaaggtttccaaaccccagttcttgacttctgtgcactcgcagtctcaacaccacatggaagctgtcaaggcttggggcttgcactccccgaagctacagcccaagctctaccttgcctcctgtc

SEQ ID NO: 432450 - DNA, 533 bp, Homo sapiens
tggggcagtcaaatcttaaagctccaaaatgatctcctcttgactccacatctcacatccaggtcatgcagatggaaggggtgggttcccatggtcttgggcagctctgcccctgtacctttgcagggtacagcctccctctcagctgctttcatgggctggcattgagtgtctgcaactttccaggtacacggtgcaagctgtcggtggatctaccattctggggtctggagacctcttctcacagctccactaggtggtgccccagtagggactgtgtgtggggtctctgaccccacatttcccttctgcactgccctggcagaggatctccatgagggccctgcccctgcagcaaacttctgcctggscatccaggcatttccgcacatcctctttaatctaggcgaaggtttccaaaccccagttcttgacttctgtgcactcgcagtctcaacaccacatggaagctgtcaaggcttggggcttgcactccccgaagctacagcccaagctctaccttgcctcctgtc

SEQ ID NO: 432451 - DNA, 519 bp, Homo sapiens
ctgacacagccaaggggagactaaggagacataacaattaactgtaatgtggtattctggaggggatcctggaacagaaaaagacattaggcaaaaaactaaagaaatctgaataaaatgtggatgtcagttaataataatgtatcatattagtccagtaattgtaacaaatatacccaataatgaaagccattaattatagggaaaatggaggggttaatatgggtggctggcttttgctatttctagcagctccattttatctrcaaaagacaaacattcattaagtcccaaaaaggtaaagaatgacaaattaagcatgtatcttattagtaagagtaatataaagatgctcactcatatttataaatatttgacaatgatgttaaggccagaaaagagaaaaaagggtaggggcaaaaaacgcaaagagaaaggagttagtatcttttctcccgcactcattagctattaaaagaggatgtttgtttaaagctgctcagagctggtaaactaatg

SEQ ID NO: 432452 - DNA, 519 bp, Homo sapiens
ctgacacagccaaggggagactaaggagacataacaattaactgtaatgtggtattctggaggggatcctggaacagaaaaagacattaggcaaaaaactaaagaaatctgaataaaatgtggatgtcagttaataataatgtatcatattagtccagtaattgtaacaaatatacccaataatgaaagccattaattatagggaaaatggaggggttaatatgggtggctggcttttgctatttctagcagctccattttatctacaaaagacaaacattcattaagtcccaaaaaggtaaagaatgacaaattaagcatgtatcttattagtaagagtaatataaagatgctcactcmtatttataaatatttgacaatgatgttaaggccagaaaagagaaaaaagggtaggggcaaaaaacgcaaagagaaaggagttagtatcttttctcccgcactcattagctattaaaagaggatgtttgtttaaagctgctcagagctggtaaactaatg

SEQ ID NO: 432453 - DNA, 519 bp, Homo sapiens
ctgacacagccaaggggagactaaggagacataacaattaactgtaatgtggtattctggaggggatcctggaacagaaaaagacattaggcaaaaaactaaagaaatctgaataaaatgtggatgtcagttaataataatgtatcatattagtccagtaattgtaacaaatatacccaataatgaaagccattaattatagggaaaatggaggggttaatatgggtggctggcttttgctatttctagcagctccattttatctacaaaagacaaacattcattaagtcccaaaaaggtaaagaatgacaaattaagcatgtatcttattagtaagagtaatataaagatgctcactcatatttataaatatttgacaatsatgttaaggccagaaaagagaaaaaagggtaggggcaaaaaacgcaaagagaaaggagttagtatcttttctcccgcactcattagctattaaaagaggatgtttgtttaaagctgctcagagctggtaaactaatg

SEQ ID NO: 432454 - DNA, 543 bp, Homo sapiens
tatatatttaagactgaagaaaaagaaagatgaagtcagagtgagacttacagaccatcaaactttatcagctaccaggaaaccagtcatttctctagagcacctctccctcaaaaaagtgccagattatggaaaggtttacacaggtaggcagtagctacacctgctctcytagatggcttctttaatattttttaaaaggaacttctattttattttattttattttgtttgtctgatgtaatcaaagttatggcctgtttggtttgcttttgccaaggtataaatactgcctaaaggccattctgcacatggggatatgatgcaagtcgacttgcatgtacaaagcttcaactcatcctcctgtctgggcccccacttttaattctcattctttgttatgcatacagtctcaagcctttctaggatattaccagggcagttgactgcctttaactgtagtttccttggaattgcaaatatcaatagagagctggttccttctctttgttcaggtttcagctccaacatcaccccagaaaa

SEQ ID NO: 432455 - DNA, 543 bp, Homo sapiens
tatatatttaagactgaagaaaaagaaagatgaagtcagagtgagacttacagaccatcaaactttatcagctaccaggaaaccagtcatttctctagagcacctctccctcaaaaaagtgccagattatggaaaggtttacacaggtaggcagtagctacacctgctctcctagatggcttctttaatattttttaaaaggaacttctattttattttattttattttgtttgtctgatgtaatcaaagttatggcctgtttggtttgcttttgccaaggtataaatactgcytaaaggccattctgcacatggggatatgatgcaagtcgacttgcatgtacaaagcttcaactcatcctcctgtctgggcccccacttttaattctcattctttgttatgcatacagtctcaagcctttctaggatattaccagggcagttgactgcctttaactgtagtttccttggaattgcaaatatcaatagagagctggttccttctctttgttcaggtttcagctccaacatcaccccagaaaa

SEQ ID NO: 432456 - DNA, 543 bp, Homo sapiens
tatatatttaagactgaagaaaaagaaagatgaagtcagagtgagacttacagaccatcaaactttatcagctaccaggaaaccagtcatttctctagagcacctctccctcaaaaaagtgccagattatggaaaggtttacacaggtaggcagtagctacacctgctctcctagatggcttctttaatattttttaaaaggaacttctattttattttattttattttgtttgtctgatgtaatcaaagttatggcctgtttggtttgcttttgccaaggtataaatactgcctaaaggccattctgcacatggggatatgatgcaagtcgacttgcatgtacaaagcttcaactcatcctcctgtctgggcccccacttttaattctcattctttgttatgcatacagtctcaagcctttctaggatattaccagggsagttgactgcctttaactgtagtttccttggaattgcaaatatcaatagagagctggttccttctctttgttcaggtttcagctccaacatcaccccagaaaa

SEQ ID NO: 432457 - DNA, 565 bp, Homo sapiens
agaaaccctcccaacaatccctgggaggtcatttgtattaactctgtgttgtagattagcaaagggaagaccaaagagttaaagcagtttgccctactcagtattttaatccatgggtgattaaatttgaatgatttaagaaataaaagagaatagagatggaggccaaaacagcacctttacaggttatagttggagacaaatgggtcttatggcagagagtggttagacgctcagcaaacctgcttcctcttcttgctggccatcattagaccacagttcccagccttgttccttgtatgtggtcatgtgacttagttctggccagtagaatgtgggcaaaagtgttacacatcacttaccagtaagatccataaaattctctgacatatarttctccattcgccctctttttcttcatctgctggttgaatgatccaagaaggccctagaacaagatttttcaacttcagcactactggcatttaggccagataattctttattagagattgtcctgtatactgtaggatatttagcagcatctctggtgtctacctactag

SEQ ID NO: 432458 - DNA, 527 bp, Homo sapiens
agcttgattctgctactacactccagcctggtgacagggtaaaccctgtctcaaaaaaaaaaaaaaaaraaaagaaaagaaaagaaaaaaaagaaattaacttttaccgcagtttgggagatgttggttcaaaaggtatcctgaatgacatagtacagctaaatcatccccctaagtaggcagactttcccaaccaagcacagcagcactatatgaggccatccttggctatcaggacaagacccaagagcaagagcagaaagtgtgcttcttgtagacagacagccctcaagataaagaaagtagcagaactgtgctttacatgccctaaagttcttcccaaattcaccaatcagatgtcacttctcatctacaggggcagagaaatctgaaatgtgcatagtgaaaaagccttcttctcagaaactccctcttcatgaaaccaggaggctctgttccaggggaccctagagcctgctgtctttcccctacaccagaagatctgactcagtacagaaaatgacctg

SEQ ID NO: 432459 - DNA, 548 bp, Homo sapiens
gccccttcctctggttggacattgccccaggccaggggagtgtgtcttatgagcagagctctggctggatctcagccctaacttgcccctcaccagacacctttgtgcaggacacacccatacagcctttcatatcttcccaatgctcaccaggtgcccagcaagctacatttgggagaaatgccttcaactcacagtcacacttgcatcaggggtgaatargtgtcccatctgcaggctgtttgcttcttctgaaaggaaataatatggggaaattatgaaacaataaaatgggatattgtagacgttctgcagacccgttggaggctacataagacaaaggccttgctagcctactgcccatctgaccacttcagcaggtgccctcatgatgaggactgggccagtctccactgggagaacttcagccattgtacttccttccttttctctctagtcttgatagtcttaaattctgagattcagcctcaaaaatccctttccaatcttctactcagaggcacacgtacataggctcacacacatac

SEQ ID NO: 432460 - DNA, 587 bp, Homo sapiens
atctgctttagtcaaagtctacaaatttaaatgttaatcacatccaaaaaatgtcttcacaacaacatgtaaactgctacttgatcaaaaactggacactatagcctagccaaattggaaaataaaattatcacaggaaggaagaaagaagacaattatataaataaggcagaaatattgggtrgagtaaactgaaacaggatgaatgtcctgggtcaacagatagaatgggtagaaaaaataaatgaaagactaaaagcataaaaggatccacggaatgagagactacaggaatttgcattttggagtgccctatggtgagaaagataagaagcatggtaaaatggatgtttcttgaagggagggccaaagctaagctagtaaagtcctgtactattggaggcctgagcagattagtacactgagtctttctcattatggaaatggaatgttgtagggcaccattctaatttcttggagcagttctgttagaaacagaaagggactaatcaccttagcagcaactcatcatatcagtccctctcttgtgttcagaaagccctaagctctggaagtagacctgagaa

SEQ ID NO: 432461 - DNA, 477 bp, Homo sapiens
taccccagaatgtgagcttatttgggaatggagttgttgaaatgtaattagtaagatgaggtcatgctkgagtaaggtgggctcttaatccagtatgactgaaatctgtataaaaagagggaaatttggacacagacataggaatagagggaggacagccatgggaagtgaaggcagagattggaattatgctgccacaagccaaggaacacctggtgctgcttccagaagctggaggaggcaaggaaaggattcttctttccagaaaggctttggagggagcaagcccttgccaataccttgatttcggatctccagcctccagaactgcgagacaatacacttctgttgttttaagccacccagtttgtggtaatttgttatggcagccctagtaaatgaacataaattgtcatgatccaaataccaggtatctttccagcctcctctgcagtcatgtgcctcaattcaccctgt

SEQ ID NO: 432462 - DNA, 558 bp, Homo sapiens
tccagcctccagaactgcgagacaatacacttctgttgttttaagccacccagtttgtggtaatttgttatggcagccctagtaaatgaacataaattgtcatgatccaaataccaggtatctttccagcctcctctgcagtcatgtgcctcaattcaccctgttatcccatgcacactggattatgtacagctcttgaaacacactgtgcacctgcacgcctttgctcatactggtctctggtggaaggctcttcctcttctctgtttgcccaccttctccacaacttcttccttctgctccttcggcaccagatatgtgaacaacaattcttgttctggcctccttgagagcagggactctgcttccctcttctscatccctgttgctttagcactgagctgacctagcataatgctgcaagaattgatctgagttgggtcacatgttctcccacagtttatgatgttgctgggtggtgggattcaaaatgctcattcctccctcctcactggatttccaaagagggtttcaccctgatttcaccgcccactaaaa

SEQ ID NO: 432463 - DNA, 558 bp, Homo sapiens
tccagcctccagaactgcgagacaatacacttctgttgttttaagccacccagtttgtggtaatttgttatggcagccctagtaaatgaacataaattgtcatgatccaaataccaggtatctttccagcctcctctgcagtcatgtgcctcaattcaccctgttatcccatgcacactggattatgtacagctcttgaaacacactgtgcacctgcacgcctttgctcatactggtctctggtggaaggctcttcctcttctctgtttgcccaccttctccacaacttcttccttctgctccttcggcaccagatatgtgaacaacaattcttgttctggcctccttgagagcagggactctgcttccctcttctccatccctgttgctttagcactgagctgacctagcataatgctgcaagaattgatctgagttgggtcacatgttctcccacagtttatgatgttgctgggtggtgggattcaaaatgctcattcctccctcctcactggatttccaaagagggkttcaccctgatttcaccgcccactaaaa

SEQ ID NO: 432464 - DNA, 604 bp, Homo sapiens
tagccatccttctgccatgtttaatatatccttaatcctactcagagtatttttcatctaaaacatkgtagttttcatctctaggttctatttgagtatttttgaaatcatccatgcctctacttaacttttgaacatatagagaacaattataataattattttgacatcttagcttgacaattttaaatctgtttcagttcttggatggttttgattgcttggttattctctttgtgttttcttgcttctttgcatgcttggttatctttgattagatgccagaaatggtcacttttaccttattgggtggtggatctttttgattcttataaatcttcttgagctttgttctgggatgtgttaagttgcctggaaattgtttgatcttcttgggtcttgcttttatgatttatttggcatatctgagcagtctagggctaattatgccccactactaagcaagattttctggggtactctacccaatgctcataaagtatgatttcgttcagctgtcagaggggggaatatgcaatattcccagccccgtgtgagcatcagacaatgttctttaatcttttcaaattatttttcctccatc

SEQ ID NO: 432465 - DNA, 604 bp, Homo sapiens
tagccatccttctgccatgtttaatatatccttaatcctactcagagtatttttcatctaaaacatggtagttttcatctctaggttctatttgagtatttttgaaatcatccatgcctctacttaacttttgaacatatagagaacaattataataattattttgacatcttagcttgacaattttaaatctgtttcagttcttggatggttttgattgcttggttattctctttgtgttttcttgcttctttgcatgcttggttatctttgattagatgccagaaatggtcacttttaccttattgggtggtggatctttttgattcttataaatcttcttgagctttgttctgggatgtgttaagttgcctggaaattgtttgatcttcttgggtcttgcttttatgatttatttggcatatctgagcagtctagggctaattatgccccactactaagcaagattttctggggtactctacccaatgctcataaagtatgatttcrttcagctgtcagaggggggaatatgcaatattcccagccccgtgtgagcatcagacaatgttctttaatcttttcaaattatttttcctccatc

SEQ ID NO: 432466 - DNA, 545 bp, Homo sapiens
catcagtcacatttactgaccagccgtttaatcagttttacacaacacaccggggctcaattcttattacaacctctccagctgaatcaggcagacccagaaagggtcaacccaaggtcatcaagtctatcaccctgcttccagaccaggctaaaacctaggctagatcaatatgagggtctggtacagggcaagaaccaaactctgggagtcaagagacctgagtttgagctggattctgggttgagcccactgcatggttggcaataacrgtaatgtccactggtagcaatttggaaaccctttctctcatttgatcctttcaacaacctgtgagttaggcaaggcagtttctattatccctatttgacagaggaggatactgaggcttggagaagtccagttgcttacccaagatcacggagctggtgagtggaggtgccaggatttgagccaggtctgtctggtcctggaggtgccttctccttccctaccacagtgcccctggagcaccaactccagatgctgctgtgctgtgttcgact

SEQ ID NO: 432467 - DNA, 550 bp, Homo sapiens
accttctgaaagctcaacgggggctgggccatctgcttccaaaatggcacactcacagctattgccagaagccttggtttctcactaactcttagcagaaggcctcagttcctcaccacatgtatctctccatagggctgcttacatgtcctccagaatgagtgttccacgagagggcaacaaggaagatgcaatgccttttatgaccttcagagtcacacaccatcatttttgcctcatcctgttcattagaaacaagtcactaaatgtggctcacattcgaagggaatagaattactctctaccttttaaagaaaagagtgtggacagaattttaaatcaccacacctggtttttctagttgctaagaatatatatttacaagatagattgctagggttatagtctacaagcttgaaatagagttgctaatgattctacaaaaaaaaaaaaaaaaaaactgaactcatggccaccactaacwctttgcagagttctaactagctgtcttgctgtactgcactaacataagtgattcaaaattctttca

SEQ ID NO: 432468 - DNA, 637 bp, Homo sapiens
gggattgagagtcacatttacatgctgaagagctgtgtgacttcagctatagttatcaatcactctgtttcctgttctgtgaaatgcaggccaaacaaggtaattacgaacattagacattagagatgtgaagcatgcatgttattttcttttgctttcatgggtatgtatcatatagttctacttctgtttccatcttccagcatgacctgtggagttaactggacttctgtgtaacatcagtattaaacgttaacagtattgcacaaatattgactttttaaaagatgactaaatggacagtagcagtaactcatgtccttgtttacatcctgacagtattgattaaacttacaagggtattgtactatgccaagtgctttccctatgtgaactcatttagttccctcacccaccctgtggaggaggtattagtatctcattttgcagctggaggaaactagggtctagagagctaaaatgatttgcctaggactgctaagtggtggatttggggctggaatgcatcccgtaggactgccatggaccctcttgcatgttccattagaatgtggcagcagaactgcagtgcgcgcrcacacacacacacacacatacacacaagctaaagtcacgt

SEQ ID NO: 432469 - DNA, 598 bp, Homo sapiens
gaaaaactatgcattgcctaaagcatattccatgggagctattttataacactgtagcatgtcagtaactgacagaaaaccgctaaaacaacacgaaaccctgactcctgtctgtagacaaattctgtccagtggagacatttcaattgacttccctcccctgaccggaagagaacagatttgtctccatttgtacattcattttaatattcctaatctatacatttgcttttttgtttctcctttgaattggtggtaacacctcacyactttcttcataaataatatatttaatgtgttcatttttatatctgacagtcataattttactcttataatgaaaattacttttattctatagtgttggttcacagtttggtgtaaataacttgttctttttcatttctacaaatgtagaaaggttgcactgatgcatcaaggttttcttgttggaagtctgaggactttttctgccaaatttcctgcataggcagtctggcaaaccctgcatcgtcatgtgcaatgccctggtcctatctcttcctgctcccattcttctgggcacttggacatgcatagcttctattgcctctcctgg

SEQ ID NO: 432470 - DNA, 585 bp, Homo sapiens
tgagtaagtcagaggagaattttattaagcaacagaaasaaagttctcagtgttgagaggggacccaaaagctggtagcaatctgtgaggctgagtctggggtttttatgggcttagaatggaggagtgtgtgctgattggtccatgggtggccttggaaaaggcaccattagattagttaaaaggtatcattacagggaaccaatcaagagagagtgggcaagaagggatggaagttctcactccagttttggactgtatggagaactggcagctcagttttcaggctttaaactgtccttggcttgaaggtcgggttgaccagagacctgtccctgtctgcctaggcatttgtctgtctgctgttgctatcactattcctccacccatttttgtctactttctctttattgtttaggcctccatttagaatttacttccactaagaagggttatctgacccctaaatccagccaaagtcccctctatgtggtaacagagctttgtgtactctcatcaagggcttatcataggatattactgccagatggttatttttaggtgtctgccttgttcattgttata

SEQ ID NO: 432471 - DNA, 585 bp, Homo sapiens
tgagtaagtcagaggagaattttattaagcaacagaaagaaagttctcagtgttgagaggggacccaaaagctggtagcaatctgtgaggctgagtctggggtttttatgggcttagaatggaggagtgtgtgctgattggtccatgggtggccttggaaaaggcaccattagattagttaaaaggtatcattacagggaaccaatcaagagagagtgggcaagaagggatggaagttctcactccagttttggactgtatggagaactggcagctcagttttcaggctttaaactgtccttggcttgaaggtcgggttgaccagagacctgtccctgtctgcctaggcatttgtctgtctsctgttgctatcactattcctccacccatttttgtctactttctctttattgtttaggcctccatttagaatttacttccactaagaagggttatctgacccctaaatccagccaaagtcccctctatgtggtaacagagctttgtgtactctcatcaagggcttatcataggatattactgccagatggttatttttaggtgtctgccttgttcattgttata

SEQ ID NO: 432472 - DNA, 492 bp, Homo sapiens
tcattgtgctcattttacaggacataaaattgagtctcacaaaacataacatacctaaaatcacatagctacctggttatggaacttggatttgaaaccagatttttctggcactgccattcctttgctattctgccaagatgttttttcctccctgcgtagctccatgaggataaaaatgcaaacatcgtttattaaatatctactgtacacctcacacacattatcatataaatcctccacgcactacaacacagttactgtcattatcatyttacacatgagcaaacttaggctcagatagctggggtagcttcaacaaactaaaaagtagcacagcaaggatgcaatccccagtacagcagatcctcattattcatggattctctatttgcaaattcacctactcactaaaatgtatatgtaaccccaaaatctgtatttgcagagcttttacggtcatttgctgacttgcacagagcagtgctagac

SEQ ID NO: 432473 - DNA, 554 bp, Homo sapiens
tcctagaggaaatacagatttaggctcctgcaagcctctggtcacgttttcatcagctgattaatacacagtcttgttttatgtgtatttctatttaaagactatacagtttatatatatatatatatatgtgtatactttacacacacacatatatatataccttacatatatctatattctctaaagagtatatattcttatatacaaggggtcttcaaaatgttcatggaaatacatattattaaacactgcgtggatttcaaaatttttttgcaccaaaataaacttgtactaacttgttataatatgtctgaataggatatagtttgaggcactaagaaggataagacatcagtttgaaaaaagtccgtatgagagtaatgtgaattctgccaacattgaagaaagaacaaatatcaaacttatggtaaagcttgggtggacgaaggctgaaatccctgatgtttcacaaaacrtttttggggataatactccaaagaaatcagcagttcacaaatgcataactggttttaagaagacataagatgatg

SEQ ID NO: 432474 - DNA, 576 bp, Homo sapiens
cctaatgaccacctgggtcatggtgtctaccttggactgggtgctcacctggagccagtgttcactgggggcctagtgtgcacctgagactgggggatgcacctggggtcygatgtctacctggtgcctaggtatccatttggggcctaatgttcatctggaatctggtatccacctggggccttgtaattacctggggtctgggcatccacctagggcttgagtatccttctggggccttgagttttactggggactcgtgtctgccttggacctgggtgtacatctgttgcctaatgtacaccttgagagtgatgtcaacctggggacagttgtcctcttggggtctgagtgtgcacctggtgcctgatgtctgcctggggacttgtgttcacttgagacctgatatccacctggggcctgggtgtccacgaagggctgatgttcagctggagactggatatccacctggggcttagggatctatccagaaactgatgtcaaactgggacctgatgtctacctggggactaggtatccatgtgaggcttgatgttcatccgcggccagacgtcc

SEQ ID NO: 432475 - DNA, 576 bp, Homo sapiens
cctaatgaccacctgggtcatggtgtctaccttggactgggtgctcacctggagccagtgttcactgggggcctagtgtgcacctgagactgggggatgcacctggggtccgatgtctacctggtgcctaggtatccatttggggcctaatgttcatctggaatctggtatccacctggggccttgtaattacctggggtctgggcatccacctagggcttgagtatccttctggggccttgagttttactggggactcgtgtctgccttggacctgggtgtacatctgttgcctaatgtacaccttgagagtgatgtcaacctggggacagttgtcctcttggggtctgagtgtgyacctggtgcctgatgtctgcctggggacttgtgttcacttgagacctgatatccacctggggcctgggtgtccacgaagggctgatgttcagctggagactggatatccacctggggcttagggatctatccagaaactgatgtcaaactgggacctgatgtctacctggggactaggtatccatgtgaggcttgatgttcatccgcggccagacgtcc

SEQ ID NO: 432476 - DNA, 572 bp, Homo sapiens
ctttctgggctaaccctatgttccctccctccttctgtgtcctctgtgcaggccacagcccaggaagccaaggccctcctggatgcagggcatcctagaagggcactgggctactgactactggccatcctggctggtggcaacagtgcctgtcacctgcatctgctggctgcctgatcaaactgcatgagtttggaggctttgggggcctgtacaatgtgctstaggaaggttcaggggatgacaacctcccaagatggatagagacttctgcaattggggttgcctgctgctgagcctgaaggacaaggtgagggcaaagaggcctttgcccaggcccttaagctggggctcactttggccgagaatagcctgtgctgggccccaacagtacaggtgtttctgtgtcatggacaatgctgcctggaggagcagtgctacacagaggcttggatgacagccgagatctttctcctggtggaccccggtcaccatggcctgaagaggctgaaggccagaatccaaagagaggcatcgtcagattgccagctccactgatgggagacaaacaa

SEQ ID NO: 432477 - DNA, 572 bp, Homo sapiens
ctttctgggctaaccctatgttccctccctccttctgtgtcctctgtgcaggccacagcccaggaagccaaggccctcctggatgcagggcatcctagaagggcactgggctactgactactggccatcctggctggtggcaacagtgcctgtcacctgcatctgctggctgcctgatcaaactgcatgagtttggaggctttgggggcctgtacaatgtgctgtaggaaggttcaggggatgacaacctcccaagatggatagagacttctgcaattggggttgcctgctgctgagcctgaaggacaaggtgagggcaaagaggcctttgcccaggcccttaagctggggctcactttggccgagaatagcctgtgcygggccccaacagtacaggtgtttctgtgtcatggacaatgctgcctggaggagcagtgctacacagaggcttggatgacagccgagatctttctcctggtggaccccggtcaccatggcctgaagaggctgaaggccagaatccaaagagaggcatcgtcagattgccagctccactgatgggagacaaacaa

SEQ ID NO: 432478 - DNA, 572 bp, Homo sapiens
ctttctgggctaaccctatgttccctccctccttctgtgtcctctgtgcaggccacagcccaggaagccaaggccctcctggatgcagggcatcctagaagggcactgggctactgactactggccatcctggctggtggcaacagtgcctgtcacctgcatctgctggctgcctgatcaaactgcatgagtttggaggctttgggggcctgtacaatgtgctgtaggaaggttcaggggatgacaacctcccaagatggatagagacttctgcaattggggttgcctgctgctgagcctgaaggacaaggtgagggcaaagaggcctttgcccaggcccttaagctggggctcactttggccgagaatagcctgtgctgggccccaacagtacaggtgtttctgtgtcatggacaatgctgcctggaggagcagtgctacacagaggcttggatgacagccgagatctttctcctggtggaccccgrtcaccatggcctgaagaggctgaaggccagaatccaaagagaggcatcgtcagattgccagctccactgatgggagacaaacaa

SEQ ID NO: 432479 - DNA, 369 bp, Homo sapiens
atggggtcctccatggagaatccagtgcctgagccatcacctacagccccggcggttgatcttacagtcctctgcagcccggcttccaagcagagaccaccaagggttcccctaatgagcagggttccctggttttcactggtctcatctccccacaaaactgtcagaatgtaaattggtgcttccaaagagcatgagaacaacgtgttctttgtggattcrccatcctgtgcagtctcacttgctgcaagtgcttgggaaacctctcttgcatagggcagaggatgtcagccccattactgtgggtttcacagatgtgagggccaagctggagggttttctctcatgtccataaggagagatgtgctg

SEQ ID NO: 432480 - DNA, 583 bp, Homo sapiens
gctctgatttactagatttgaaatcaccctttcccatttatgtgaaaattagatttctgtttgtagggaaaagaaagagagctcagactgttactgtgtctatgtagaaagagaagacataagaaattccattttgacctgtaccttgaacaattgcttcactgagatgctgttaatttgtaactttgccccagccactttgccccaacattgagctcacaaaaacatgtgttgtatggaatcaaggtttaagagatctagggctgtgcaggacgtgccttgttaacaaaatgtttataagcagtatgcttggtaaaagtcatcgccattctctagtctcgataaaccaggggcacagtgcactgtgtggaaagccacagggacctctgccctggaaagccaggtattgtccaaggtttctccccatgtgatagtctgaaatatggcctcatgggatgagaaagacttgaccgtcccccagcctgacamccgtgtagggtctgtgctgagttggattagtaaaagaggaaagcctcttgcagttgagatagagggaggccactgtctcctgcctgtccctggg

SEQ ID NO: 432481 - DNA, 451 bp, Homo sapiens
ttatgaagacagatataatacagagtatatgatctgtccaaactggaatgttggaaaccaatartatatgggaatttgagaaattcacaaatatgtggaaatacacacattcctaaataaccgatgtgtcaaagaagaaataatcaaaagggaaatacaaaatattttgagatgaataaaggcacaaataccaaaatatatgcagttaaggcacttagaaacttatacgtgtaaatgtttgtatttaaaaagaggacttcaaatcaacaactaaacctcccaccttatgaccctggaagcaaaaaagcaaactaaacataaaacaagcagaaagaaaaaaataaaaagaattatagaagaacttaatgaaatagacaataagaaaacaactgtgaaaacacaataaaatcaaaagccagttctttgaaaaggtcaacactactaacaagcc

SEQ ID NO: 432482 - DNA, 451 bp, Homo sapiens
ttatgaagacagatataatacagagtatatgatctgtccaaactggaatgttggaaaccaataatatatgggaatttgagaaattcacaaatatgtggaaatacacacattcctaaataaccgatgtgtcaaagaagaaataatcaaaagggaaatacaaaatattttgagatgaataaaggcacaaataccaaaatatatgcagttaaggcacttagaaacttatacgtgtaaatgtttgtatttaaaaagaggacttcaaatcaasaactaaacctcccaccttatgaccctggaagcaaaaaagcaaactaaacataaaacaagcagaaagaaaaaaataaaaagaattatagaagaacttaatgaaatagacaataagaaaacaactgtgaaaacacaataaaatcaaaagccagttctttgaaaaggtcaacactactaacaagcc

SEQ ID NO: 432483 - DNA, 451 bp, Homo sapiens
ttatgaagacagatataatacagagtatatgatctgtccaaactggaatgttggaaaccaataatatatgggaatttgagaaattcacaaatatgtggaaatacacacattcctaaataaccgatgtgtcaaagaagaaataatcaaaagggaaatacaaaatattttgagatgaataaaggcacaaataccaaaatatatgcagttaaggcacttagaaacttatacgtgtaaatgtttgtatttaaaaagaggacttcaaatcaacaactaaacctcccaccttatgaccctggaagcaaaaaagcaaactaaacrtaaaacaagcagaaagaaaaaaataaaaagaattatagaagaacttaatgaaatagacaataagaaaacaactgtgaaaacacaataaaatcaaaagccagttctttgaaaaggtcaacactactaacaagcc

SEQ ID NO: 432484 - DNA, 322 bp, Homo sapiens
ccagttctttgaaaaggtcaacactactaacaagcctgtacctagactgattagcatattaatattattatctcaacagatacacaaaatgtctttgacagaaactaacactttttataagaagcattgaacaaactaggaatagaatggaacttctaactagcaagaaaaaagcatctataaaaaacctacagccaacaacatagtgcaatttgttgcaggacgtcagagcataagaagggtaggaagggtasgtaggagagctgcccagttcatgaagtcagaattccaaaaaagtgataaggcgtctacctgaaacaac

SEQ ID NO: 432485 - DNA, 557 bp, Homo sapiens
gcacaacaccagcagggcagggagcacattgcctaaaggagtaagccagggtggggtgtcaagagttctagagagaaggtagcatctgaataagagggctgcccagcaggaggtaaagaaacccggggctccagaaggatatagggaaggcatcagctcaacagcctagctaagtgtattgtgctagaactgaggaagggttaagagggcatccatgayggaaggtaaccagaaaagaagccaacacctgcctcaggttaagagggcatccatatggaaaatgaaggaaagactgagaagctgtttgatgcattataatgtaaacgcagtaaactggatctttttactataaaatatacaacaaatagcaaaattttaacggggtctgagaattaaatggtagtaacaaatcattgctaatctcttgattttatgttacagaataattatgtgaaagaatgttcttgtttgtagcaacataacattcaggaatgatggagcatcatgtcagtagttactctcatagttcaggaaaaaaactggcatagtgcttgtag

SEQ ID NO: 432486 - DNA, 557 bp, Homo sapiens
gcacaacaccagcagggcagggagcacattgcctaaaggagtaagccagggtggggtgtcaagagttctagagagaaggtagcatctgaataagagggctgcccagcaggaggtaaagaaacccggggctccagaaggatatagggaaggcatcagctcaacagcctagctaagtgtattgtgctagaactgaggaagggttaagagggcatccatgatggaagktaaccagaaaagaagccaacacctgcctcaggttaagagggcatccatatggaaaatgaaggaaagactgagaagctgtttgatgcattataatgtaaacgcagtaaactggatctttttactataaaatatacaacaaatagcaaaattttaacggggtctgagaattaaatggtagtaacaaatcattgctaatctcttgattttatgttacagaataattatgtgaaagaatgttcttgtttgtagcaacataacattcaggaatgatggagcatcatgtcagtagttactctcatagttcaggaaaaaaactggcatagtgcttgtag

SEQ ID NO: 432487 - DNA, 557 bp, Homo sapiens
gcacaacaccagcagggcagggagcacattgcctaaaggagtaagccagggtggggtgtcaagagttctagagagaaggtagcatctgaataagagggctgcccagcaggaggtaaagaaacccggggctccagaaggatatagggaaggcatcagctcaacagcctagctaagtgtattgtgctagaactgaggaagggttaagagggcatccatgatggaaggtaaccrgaaaagaagccaacacctgcctcaggttaagagggcatccatatggaaaatgaaggaaagactgagaagctgtttgatgcattataatgtaaacgcagtaaactggatctttttactataaaatatacaacaaatagcaaaattttaacggggtctgagaattaaatggtagtaacaaatcattgctaatctcttgattttatgttacagaataattatgtgaaagaatgttcttgtttgtagcaacataacattcaggaatgatggagcatcatgtcagtagttactctcatagttcaggaaaaaaactggcatagtgcttgtag

SEQ ID NO: 432488 - DNA, 444 bp, Homo sapiens
taccagggtccccggggtgcagcgcaagcgctgatgrgaagacagtttcttctgtaggggacccaggccccgcttatctgcggcgcggttgttgggtttttctctgccccaggtgcatcaccttcccctcatgggccttctgtccgcttttcggtacccctagcggcgcctgaagcgcaccctggtctcgaaccaggaacgccagggtcccctgggcccagcgcaagggctaatgggaagacactttcgtccgttggggacccaggctccgcttctccgtggtgcggttttttttttttttttttctgccccgggagcctaacctcaccttcctcaaacctcaactgcccctcatgggatatctgcccgtcttggggtacccctagcgggcccaaggcgcacccggggctcgaaccagggtccacagggcccagcgcaggggtt

SEQ ID NO: 432489 - DNA, 553 bp, Homo sapiens
agatacctgtaaatttgggcattacatcagatagtattttattacgttttgaaagttctcagcttactgcacccttgttgtaagtggggatggatgataaatccacaggtacatgcattttctcaatttgtaaatattgtaagtacaattgcaccatgacaggcatcagcaaattttttttatattaaaaagctttttttttctttttagaaattcagagaacatagagaaggaggaacgcaaatgatcagactgtgttttgacggaaaagctgagtagttcacacattatagtcacaattatcttggtaaagtcactctctgtgagagaaggggtggaggkctacagtggaatttttaaggtgtagataatataataactaatggacatttggataaatcacatatggagtttaaattacgtagtgttgtataataacatagtatttatatttattgccttaagttatatggaactttctttcattgtaatggtcagacaaaatttatgattctgagcttagtgtggatagcatgtcaacatatgggcttcg

SEQ ID NO: 432490 - DNA, 564 bp, Homo sapiens
gcacagcttgtggatccaaaagaaaccccttccttccacttgagaagaggagagggaagagttgggaggagtttgtcttgcatcttgcttatcagctctgccacagaaggacagggcaccttgaggtcatgaggcccttgtkccaggttctagctctggggtgacatttctagatacaccctgggccagaaggaaacccactgccttgaaggaaaggacccagtcctggcagcattcatcatctgctaactgaagagcccttgggtcctgaataaccagcagtgatacccgggtactacgttgaggaccttggtgagcttctgagacttgttggcttcaggtgagactatgcacattaccagctgtggtggctatggggcaaaactccttccacttgataaaaacagaaggaagagtaaaggggactttgttttgcatcttaggtaccaacaccaccactgtggggtagagcaccaagtgggcttttgggttcccaattctaggacttgactcttggacagcatttctagacctgcccttggccaaaggggagcccactgccct

SEQ ID NO: 432491 - DNA, 564 bp, Homo sapiens
gcacagcttgtggatccaaaagaaaccccttccttccacttgagaagaggagagggaagagttgggaggagtttgtcttgcatcttgcttatcagctctgccacagaaggacagggcaccttgaggtcatgaggcccttgtgccaggytctagctctggggtgacatttctagatacaccctgggccagaaggaaacccactgccttgaaggaaaggacccagtcctggcagcattcatcatctgctaactgaagagcccttgggtcctgaataaccagcagtgatacccgggtactacgttgaggaccttggtgagcttctgagacttgttggcttcaggtgagactatgcacattaccagctgtggtggctatggggcaaaactccttccacttgataaaaacagaaggaagagtaaaggggactttgttttgcatcttaggtaccaacaccaccactgtggggtagagcaccaagtgggcttttgggttcccaattctaggacttgactcttggacagcatttctagacctgcccttggccaaaggggagcccactgccct

SEQ ID NO: 432492 - DNA, 564 bp, Homo sapiens
gcacagcttgtggatccaaaagaaaccccttccttccacttgagaagaggagagggaagagttgggaggagtttgtcttgcatcttgcttatcagctctgccacagaaggacagggcaccttgaggtcatgaggcccttgtgccaggttctagctctgggrtgacatttctagatacaccctgggccagaaggaaacccactgccttgaaggaaaggacccagtcctggcagcattcatcatctgctaactgaagagcccttgggtcctgaataaccagcagtgatacccgggtactacgttgaggaccttggtgagcttctgagacttgttggcttcaggtgagactatgcacattaccagctgtggtggctatggggcaaaactccttccacttgataaaaacagaaggaagagtaaaggggactttgttttgcatcttaggtaccaacaccaccactgtggggtagagcaccaagtgggcttttgggttcccaattctaggacttgactcttggacagcatttctagacctgcccttggccaaaggggagcccactgccct

SEQ ID NO: 432493 - DNA, 565 bp, Homo sapiens
caaattactagctctatggcttttggcaaattacttagcatctctgaacctattttcgtctctgaaaaaggggaataataatgcctactttgtggattccttgtgaatattataaacagataatgtatgaaaactatgaagaaaagttcccaatgtatttggcacccataaataacataccattcactaaactactattttaattttatctactatgtcctcatgatgaggttcatttatgctaaagttgattattatttacctttcagagtcattcattcattcaaaaaatgkactaagagcctactttatgccaagtaccctgtcccaaccttggatcatggatatataaagacagacaacatacgcacactcaaggaagtttcactagagaaacagttatgagaacaatcgagaatatctaaaatacagatttgagagtaataaaagtaattactataagtaacagggaaggaaagacaaatagagaagaaagactatcatagaagtattcactaaaagcgtaaaatgaaccataagactatgcttgaaggatgaaaaggaa

SEQ ID NO: 432494 - DNA, 567 bp, Homo sapiens
catacaacaggggagtctaagatggcttccaattttcacttagaggggtaagggtagcattacttaagatcattaatacagaaaaattaatcagatttggagtttaccaaggtttgcttttggttgtaacaatgatatatgataaaattaaatgaataaataagtgaatgcactggtgaattaatgarctgatctcagttaagaccagagtacttatttataagaaaagtaacttttctctttccttggtacatcaaactgtactctacagataacagacacaagtgagtttttcaatggctaaaaaaagcctaacttttgaccttatatatgtcgactaaagaaaataaaaataaacttggaaactagctgtgcatactgatattatgtatatatagtgaagtctgcatttagtttgagactcaaaaagaaatttatagaagaaggacacaaccaggaataaggggaaaaaaagatccatattaagaatccacaagatatatattacaagttgaagatatggaaataaattgaagacaaaaaagtacagatgatatcaataatagc

SEQ ID NO: 432495 - DNA, 567 bp, Homo sapiens
catacaacaggggagtctaagatggcttccaattttcacttagaggggtaagggtagcattacttaagatcattaatacagaaaaattaatcagatttggagtttaccaaggtttgcttttggttgtaacaatgatatatgataaaattaaatgaataaataagtgaatgcactggtgaattaatgaactgatctcagttaagaccagagtacttatttataasaaaagtaacttttctctttccttggtacatcaaactgtactctacagataacagacacaagtgagtttttcaatggctaaaaaaagcctaacttttgaccttatatatgtcgactaaagaaaataaaaataaacttggaaactagctgtgcatactgatattatgtatatatagtgaagtctgcatttagtttgagactcaaaaagaaatttatagaagaaggacacaaccaggaataaggggaaaaaaagatccatattaagaatccacaagatatatattacaagttgaagatatggaaataaattgaagacaaaaaagtacagatgatatcaataatagc

SEQ ID NO: 432496 - DNA, 567 bp, Homo sapiens
catacaacaggggagtctaagatggcttccaattttcacttagaggggtaagggtagcattacttaagatcattaatacagaaaaattaatcagatttggagtttaccaaggtttgcttttggttgtaacaatgatatatgataaaattaaatgaataaataagtgaatgcactggtgaattaatgaactgatctcagttaagaccagagtacttatttataagaaaagtaacttttctctttccttggtacatcaaactgtactctacagataacagacacaagtgagtttttcaatggytaaaaaaagcctaacttttgaccttatatatgtcgactaaagaaaataaaaataaacttggaaactagctgtgcatactgatattatgtatatatagtgaagtctgcatttagtttgagactcaaaaagaaatttatagaagaaggacacaaccaggaataaggggaaaaaaagatccatattaagaatccacaagatatatattacaagttgaagatatggaaataaattgaagacaaaaaagtacagatgatatcaataatagc

SEQ ID NO: 432497 - DNA, 567 bp, Homo sapiens
catacaacaggggagtctaagatggcttccaattttcacttagaggggtaagggtagcattacttaagatcattaatacagaaaaattaatcagatttggagtttaccaaggtttgcttttggttgtaacaatgatatatgataaaattaaatgaataaataagtgaatgcactggtgaattaatgaactgatctcagttaagaccagagtacttatttataagaaaagtaacttttctctttccttggtacatcaaactgtactctacagataacagacacaagtgagtttttcaatggctaaaaaaagcctaacttttgaccttatatatgtsgactaaagaaaataaaaataaacttggaaactagctgtgcatactgatattatgtatatatagtgaagtctgcatttagtttgagactcaaaaagaaatttatagaagaaggacacaaccaggaataaggggaaaaaaagatccatattaagaatccacaagatatatattacaagttgaagatatggaaataaattgaagacaaaaaagtacagatgatatcaataatagc

SEQ ID NO: 432498 - DNA, 553 bp, Homo sapiens
atatagtgaagtctgcatttagtttgagactcaaaaagaaatttatagaagaaggacacaaccaggaataaggggaaaaaaagatccatattaagaatccacaagatatatattacaagttgaagatatggaaataaattgaagacaaaaaagtacagatgatatcaataatagctaatatgtctagagcacatattaccattaggtaacatgctaatggtttatacccattttcacaagttctaacagctggtaagtggtgcagctgggaaagcaaaagttttaatgtaaagatttctttttgaaaggccagtaaatctcttattaggaaggataacaacaacttagctagggcatctgtgggaaattaaagaaaggaagaaataagagaataaatttattktgaataatgaaacacaataaaagcaaatacttatgacttttcaaggtttttgagaatcttcacagaagactttttaaaatccacatcattctctggccctgctcctaactagacccttagtatcattgcatattgagagctttacaaagg

SEQ ID NO: 432499 - DNA, 553 bp, Homo sapiens
atatagtgaagtctgcatttagtttgagactcaaaaagaaatttatagaagaaggacacaaccaggaataaggggaaaaaaagatccatattaagaatccacaagatatatattacaagttgaagatatggaaataaattgaagacaaaaaagtacagatgatatcaataatagctaatatgtctagagcacatattaccattaggtaacatgctaatggtttatacccattttcacaagttctaacagctggtaagtggtgcagctgggaaagcaaaagttttaatgtaaagatttctttttgaaaggccagtaaatctcttattaggaaggataacaacaacttagctagggcatctgtgggaaattaaagaaaggaagaaataagagaataaatttattgtgaataatgaaacacaataaaagcaaatacttatgacttttcaaggtttttgagaatcttcacagaagactttttaaaatccacatcattctctggccctgctcctaaytagacccttagtatcattgcatattgagagctttacaaagg

SEQ ID NO: 432500 - DNA, 589 bp, Homo sapiens
agtttgaaatctaccacggcagccgttaaatcttaaacctcaaaaataatcccctttgactatgtgtcccacatccagggtacactggtgcagggggtatgctcccaaggtcttgggcaaactctgtccctgcatctctgcagggtacagcccccacagctgctttcaggggttgggggtaagtgcctacaattttcccaggcacagagtgcaatatgccagcggatccactatgctggaatctggatgatgatggtcccttcttacagctcctctagaaagtaccccattgaagactgtgtgggggtccaaccccacatttccayttggcactgccccaggagagggtctctgtgatggctccacccgtgcagcaggcttctgcctaaacacccaggctttctcatacgtcctctgaaatataggcagagaatgccaagccatcactcttgcactctgcatgcccataggcttaacaccacatggaagtttccgaggcttatagcttgcaccctctgaagcagtaacctgagctgtatcgggggtcttctgagttgagactgctgctgaagtggccaggatgtgggga

SEQ ID NO: 432501 - DNA, 589 bp, Homo sapiens
agtttgaaatctaccacggcagccgttaaatcttaaacctcaaaaataatcccctttgactatgtgtcccacatccagggtacactggtgcagggggtatgctcccaaggtcttgggcaaactctgtccctgcatctctgcagggtacagcccccacagctgctttcaggggttgggggtaagtgcctacaattttcccaggcacagagtgcaatatgccagcggatccactatgctggaatctggatgatgatggtcccttcttacagctcctctagaaagtaccccattgaagactgtgtgggggtccaaccccacatttccacttggcactgccccaggagagggtctctgtgatggctccacccrtgcagcaggcttctgcctaaacacccaggctttctcatacgtcctctgaaatataggcagagaatgccaagccatcactcttgcactctgcatgcccataggcttaacaccacatggaagtttccgaggcttatagcttgcaccctctgaagcagtaacctgagctgtatcgggggtcttctgagttgagactgctgctgaagtggccaggatgtgggga

SEQ ID NO: 432502 - DNA, 549 bp, Homo sapiens
atggtcccttcttacagctcctctagaaagtaccccattgaagactgtgtgggggtccaaccccacatttccacttggcactgccccaggagagggtctctgtgatggctccacccgtgcagcaggcttctgcctaaacacccaggctttctcatacgtcctctgaaatataggcagagaatgccaagccatcactcttgcactctgcatgcccataggcttaacaccacatggaagtttccgaggcttatagcttgcaccctctgaagcagtaacctgagctgtatcgggggtcttctgagttgagactgctgctgaagtggccaggatgtggggagcagtgtcccsgggctgtgtggagcagtaaagtcctggccctcataagcattctttcctcttaggcctcaagggctgtgatgtgatggactgccatggagatctctggaatgcatgaaggccttttccccattgtcttggctatcagcatctggctttcattttaattatgcaactctctagcaagtgtttgctccacagcctgctcaaatt

SEQ ID NO: 432503 - DNA, 587 bp, Homo sapiens
aatgaccacctgggtcatggtgtstaccttggactgggtgctcacctggagccagtgttcactgggggcctagtgtgcacctgagactgggggatgcacctggggtctgatgtctacctggtgcctaggtatccatttggggcctaatgttcatctggaatctgatatccacctggggccttgtaattacctggggtctgggcatccacctagggcttgagtatccttctggggccttgagttttactggggactcatgtctgccttggacctgggtgtacatctgttgcctaatgtacaccttgagagtgatgtcaacctggggacagttgtcctcttggggtctgagtgtgtacctggtgcctgatgtctgcctggggacttgtgttcacttgagacctgatatccacctggggcctgggtgtccacgaagggctgatgttcagctggagactggatatccacctggggcttagggatctatccagaaactgatgtcaaactgggacctgatgtctactacctggggactaggtatccatgtgaggcttgatgttcatccgcggccagacgtccatctgatgctt

SEQ ID NO: 432504 - DNA, 571 bp, Homo sapiens
cctggtgcctaggtatccatttggggcctaatgttcatctggaatctgrtatccacctggggccttgtaattacctggggtctgggcatccacctagggcttgagtatccttctggggccttgagttttactggggactcatgtctgccttggacctgggtgtacatctgttgcctaatgtacaccttgagagtgatgtcaacctggggacagttgtcctcttggggtctgagtgtgtacctggtgcctgatgtctgcctggggacttgtgttcacttgagacctgatatccacctggggcctgggtgtccacgaagggctgatgttcagctggagactggatatccacctggggcttagggatctatccagaaactgatgtcaaactgggacctgatgtctactacctggggactaggtatccatgtgaggcttgatgttcatccgcggccagacgtccatctgatgcttgatgtccgcctcagtcctgggtgtctactggagacctcatgtccaactagagcttaggaacctactgggggcctcgtgtaaacctggggactggtatgca

SEQ ID NO: 432505 - DNA, 587 bp, Homo sapiens
aatgaccacctgggtcatggtgtgtaccttggactgggtgctcacctggagccagtgttcactgggggcctagtgtgcacctgagactgggggatgcacctggggtctgatgtctacctggtgcctaggtatccatttggggcctaatgttcatctggaatctgatatccacctggggccttgtaattacctggggtctgggcatccacctagggcttgagtatccttctggggccttgagttttactggggactcrtgtctgccttggacctgggtgtacatctgttgcctaatgtacaccttgagagtgatgtcaacctggggacagttgtcctcttggggtctgagtgtgtacctggtgcctgatgtctgcctggggacttgtgttcacttgagacctgatatccacctggggcctgggtgtccacgaagggctgatgttcagctggagactggatatccacctggggcttagggatctatccagaaactgatgtcaaactgggacctgatgtctactacctggggactaggtatccatgtgaggcttgatgttcatccgcggccagacgtccatctgatgctt

SEQ ID NO: 432506 - DNA, 547 bp, Homo sapiens
tgggtgtacatctgttgcctaatgtacaccttgagagtgatgtcaacctggggacagttgtcctcttggggtctgagtgtgyacctggtgcctgatgtctgcctggggacttgtgttcacttgagacctgatatccacctggggcctgggtgtccacgaagggctgatgttcagctggagactggatatccacctggggcttagggatctatccagaaactgatgtcaaactgggacctgatgtctactacctggggactaggtatccatgtgaggcttgatgttcatccgcggccagacgtccatctgatgcttgatgtccgcctcagtcctgggtgtctactggagacctcatgtccaactagagcttaggaacctactgggggcctcgtgtaaacctggggactggtatgcagctgggtcctaatgatcccctgggtcatattattcacctagtgcctggtgacacttagggcttgagtgtcaaccttaggtcttgttttcatctttgacctggtgtccacctgggacttgggtatcgacctga

SEQ ID NO: 432507 - DNA, 547 bp, Homo sapiens
tgggtgtacatctgttgcctaatgtacaccttgagagtgatgtcaacctggggacagttgtcctcttggggtctgagtgtgtacctggtgcctgatgtctgcctggggacttgtgttcacttgagacctgatatccacctggggcctgggtgtccacgaagggctgatgttcagctggagactggatatccacctggggcttagggatctatccagaaactgatgtcaaactgggacctgatgtctactacctggggactaggtatccatgtgaggcttgatgttcatccgcggccagacgtccatctgatgcttgatgtccgcctyagtcctgggtgtctactggagacctcatgtccaactagagcttaggaacctactgggggcctcgtgtaaacctggggactggtatgcagctgggtcctaatgatcccctgggtcatattattcacctagtgcctggtgacacttagggcttgagtgtcaaccttaggtcttgttttcatctttgacctggtgtccacctgggacttgggtatcgacctga

SEQ ID NO: 432508 - DNA, 547 bp, Homo sapiens
tgggtgtacatctgttgcctaatgtacaccttgagagtgatgtcaacctggggacagttgtcctcttggggtctgagtgtgtacctggtgcctgatgtctgcctggggacttgtgttcacttgagacctgatatccacctggggcctgggtgtccacgaagggctgatgttcagctggagactggatatccacctggggcttagggatctatccagaaactgatgtcaaactgggacctgatgtctactacctggggactaggtatccatgtgaggcttgatgttcatccgcggccagacgtccatctgatgcttgatgtccgcctcagtcctgggtgtctactggagacctcatgtccaactagagcttaggaacctactgggggcctcgtgtaaacctggggactggtatgcagctgggtcctaatgatcccctgggtcatattattcacctagtgcctggtgacacttagggcttgagtgtcaaccttaggtcttgtkttcatctttgacctggtgtccacctgggacttgggtatcgacctga

SEQ ID NO: 432509 - DNA, 574 bp, Homo sapiens
atagggagcatgtttacagccattctatgaaaaagtgtttggaatgtacagactagcacagaagttgggctaattaaacaagtattgctgaaaatgagtgctgtagatgacatgagagcaggtatggggttgtctgttaggraagtataacttaaaagtttataaagtttcacatacttctctttatattctataggtaatgtagatttgttgacactactttgatttaaaataaatggaaatgtatggaaattttactttttatattaatggaaaacctgaagagtgaaagaagaaaaatatacttactatagtagacaaatataattactaatgttgttttctaaattttagaaaatctcagtaccacggagtgctatgaaatctatcagaaaaataaacagtatctttttatgtagtatttcattaagcttttacataattaaaatgccacaataggtattacagttctgtataatgagcattttatcaaattcccctagttctgtgcccctcaatctggcatatatgcaactatgacaggaggtactaaaagccttagataagcatggtg

SEQ ID NO: 432510 - DNA, 574 bp, Homo sapiens
atagggagcatgtttacagccattctatgaaaaagtgtttggaatgtacagactagcacagaagttgggctaattaaacaagtattgctgaaaatgagtgctgtagatgacatgagagcaggtatggggttgtctgttaggaaagtataacttaaaagtttataaagtttcacatacttctctttatattctataggtaatgtagatttgttgacactactttgatttaaaataaatggaaatgtatggaaattttactttttatattaatggaaaacctgaagagtgaaagaagaaaaatatacttactatagtagacaaatataattactaatgttgttktctaaattttagaaaatctcagtaccacggagtgctatgaaatctatcagaaaaataaacagtatctttttatgtagtatttcattaagcttttacataattaaaatgccacaataggtattacagttctgtataatgagcattttatcaaattcccctagttctgtgcccctcaatctggcatatatgcaactatgacaggaggtactaaaagccttagataagcatggtg

SEQ ID NO: 432511 - DNA, 547 bp, Homo sapiens
ctggaggcctatagataaggggattgaagagtgaggtcaccatagcatagaacaaagttacaattttctgcatctccgtagaatgtccgagtcctgggctcacatacatgaccataagagagccatagcacagtgataccacagccaaatgagacccacaggtagagaaggccttatgtctcccagtgcttgaaggcgtacccaacacarctttcaggacaatagtataggatccaataataaagaggaagttaccaaaaataactaatgagcttagagtgtagcaaaacagttggattcttggggcagaaacacaatccaatgcaaatagtggccctgggtcacacacaacatggtcaataatgtttgggccacagaagggcatctgagagatgagaaaatggggatcaggaaccacagaaagccacaaacccagcacagtatggccagtttggcacagagatgcccagtcatgatattaggatagtgcaagggccggcagatagcaaggttctgatcaaaggccatcacagtcaaaagcaagcat

SEQ ID NO: 432512 - DNA, 547 bp, Homo sapiens
ctggaggcctatagataaggggattgaagagtgaggtcaccatagcatagaacaaagttacaattttctgcatctccgtagaatgtccgagtcctgggctcacatacatgaccataagagagccatagcacagtgataccacagccaaatgagacccacaggtagagaaggccttatgtctcccagtgcttgaaggcgtacccaacacaactttcaggacaatagtmtaggatccaataataaagaggaagttaccaaaaataactaatgagcttagagtgtagcaaaacagttggattcttggggcagaaacacaatccaatgcaaatagtggccctgggtcacacacaacatggtcaataatgtttgggccacagaagggcatctgagagatgagaaaatggggatcaggaaccacagaaagccacaaacccagcacagtatggccagtttggcacagagatgcccagtcatgatattaggatagtgcaagggccggcagatagcaaggttctgatcaaaggccatcacagtcaaaagcaagcat

SEQ ID NO: 432513 - DNA, 547 bp, Homo sapiens
ctggaggcctatagataaggggattgaagagtgaggtcaccatagcatagaacaaagttacaattttctgcatctccgtagaatgtccgagtcctgggctcacatacatgaccataagagagccatagcacagtgataccacagccaaatgagacccacaggtagagaaggccttatgtctcccagtgcttgaaggcgtacccaacacaactttcaggacaatagtataggatccaataataaagaggaagttaccaaaaataactaatgagcttagagtgtagcaaaacagttggattcttggggcagaaacacaatccaatgcaaatagtggccctgggtcacacacaacatggtcaataatgtttgggccacagaagggcatctgagagatgagaaaatggggatcaggaaccacagaaakccacaaacccagcacagtatggccagtttggcacagagatgcccagtcatgatattaggatagtgcaagggccggcagatagcaaggttctgatcaaaggccatcacagtcaaaagcaagcat

SEQ ID NO: 432514 - DNA, 560 bp, Homo sapiens
tacggccattattatttgctttagctgagggctggatttggacagcttcctgcccccacttcctgtggctgaatccctgaaaccccagrgctcggtacctgcgtgggctgtctatatggctgagattgggagggcaactggggaagaggtttttttgtctttgtttggcgcagaaacaagtaaatttccttgtcagttgcattgttcttatcatgaaccttgctgcactgtccacatttgaaaaataccagtaataaattaactgtagcctcaagtctgtgttatttgtagacagtttttcttttgctttgatgcttactttaagactctgctataatctacaggccggatcttgtgtcttcatcaaaagacagtctcagagcctcgtggaagagaccgcattaggtactccaaactattgactcttcaaagctgagctgacatggttttggtaactttcagactgtaccggtaaactgagtcaggattcccataactctatagctgaaaagcggtttcacacaactgctaacccaagatccaatagaatgagaattaat

SEQ ID NO: 432515 - DNA, 523 bp, Homo sapiens
atgggacttcagtcacatcactgcacccattcccaggggcaattctttaaaagcattttgttcctgacagctgcctcacccactatcttcatgttcctggaatgtgtgatacaaagaacaatgtatagccaaccaatagctcgttaktgtaacatgaatgcttgataaacaacttaggaactgcctcttcctttttcctttaaaaacccatttgtaactgctgctaataggagcatctactcagggcaacttgaatctatgctcctgggttgcagtcctcaaacttgagccaaacggactctctacatatatatagatatagatatagatatagatatagatatagatatagatatagatatagatatatagatatagatatagatatatgtttttttaaagaactctttcactgaaacatgaaagtagtcttcagtgaccaccacccatacgcaagccctttacacatacacagatacacagatatatgtattcataagtatagcagaaggtcacaaacaac

SEQ ID NO: 432516 - DNA, 591 bp, Homo sapiens
ctgtgatttaattaaacataaatggggagaaaccataaatcccctaattttcctcatctaagctgacagagtcagtttgttaagtgacattgtgtctgcattacataaaagatacctacaacaaatatacacacaaaattttgtttaggaaatggtagattgctggatgtggtattccaatgtgtcagacggtatgaaagtgccatttgaaatgaatcagctgactacattgcctatcagtcctctgatctttgaccaaagttgcatgctttctgaaaaagaactgtgaggattcagaccagcctsgtgctgggagtcttcacgggatttcgtttgctggaggatggggattcgatcctattgagtaaatccagtgccaagaaacttctacaagatattcaaagggagattcaaagacaacacattcctgaagaactttggagcattacaaaagctcaaagcagaagttagaatctcttctaaaaaaagttcctaagtccactcaagcagttgttcatgcatgcttggtctcttatgcactcagtatcattttagttacgctagatttatctgaagaagatcctctgaaac

SEQ ID NO: 432517 - DNA, 401 bp, Homo sapiens
gcctatcagagatataccactgagaatatcaagataagataatgacctgtggaagataggagaggtggttatgaattcaaagggaatacaattcacctgcatctgtcacagggcatccctgtgactagatcagctatatttgtctccatacagaaaaaatgtgtgcttctygatgcaatagttatacttagatagttaagacttgctacctttcaaactattttaatctattttatatttcacagtatccaaatgtcattatactattttaatgaagagaagatttttaagagtaggttaaaatcacacagattgaattcaagagcagaaaacatttagcagagactgaaaatcaatgattctaaccccactctacccttttcataataataatgatgttt

SEQ ID NO: 432518 - DNA, 588 bp, Homo sapiens
tctccagttctctttctatatttgctttccagaaacatgaactattccctccaataagatattgtaatgtctttctctagggaatctgaatatcccaagaaaagggcccaaagatatggacattggatctgcctcattgaaaccacccaagctgatcaccctgatcttcagcccatagttcccctcagctacatgtacagagtttacaggtagctctgtagtgtcctactcttaaccatgagcagaaggacatggctctccaaacttttagcagtgcatctaatatgaaaaacrgaagggccaaataaacatctaaaaatcacatggaggtaaaaaaatgcaagaaaaaaaatcataaaagctatcactaaatatagcttttatgaataatagtctcagaaagataagaaggtattacatccattaaacagtagtataatgttaaaaaattagataaattttttaaaagctcaaagaaattagaaagaagatagtatatgtaaaaatttcagtgagtagttggaaaataaggttgacaaaatctcacagaaaggagagcaaaaaatacaaacagaagacaacagaagt

SEQ ID NO: 432519 - DNA, 571 bp, Homo sapiens
tatttttactctaaccagtcagggatagtacaagacactgcccagagtttacaggaaaaggcttctgaaatcagacaatgcctttcaaactcttatacccacctctggagttggacgacatggcttctcccctttctaggtcccatgacagccatcttgctattattcgcttttgsgtcctgtatttttaacctccttgtcaaatttgtttcctccaggattgaggccatcaagctacagatggtcttacaaatgaaatcccaaatgagctcaactcacaacttctaccgaggacccctggactgacccacaggctctctgactggcctagagagttcccctctgaaggacactacaactgcaagtccccttcttcgcccctatccagcaataattagctagagtggtcatcgcccagttcccaatagcaatgtcctatttagtggggggattgagaggtgaggccagctgggcttcctgggtccagtggggacttggggaacttttctgtcttacaagaggattgtaaaatgcaccaatcaggaactttcctgtttgacaagagtattgt

SEQ ID NO: 432520 - DNA, 571 bp, Homo sapiens
tatttttactctaaccagtcagggatagtacaagacactgcccagagtttacaggaaaaggcttctgaaatcagacaatgcctttcaaactcttatacccacctctggagttggacgacatggcttctcccctttctaggtcccatgacagccatcttgctattattcgcttttgggtcctgtatttttaacctccttgtcaaatttgtttcctccaggattgaggccatcaagctacagatggtcttacaaatgaaatcccaaatgagctcaactcacaacttctaccgaggacccctggactgacccacaggctctctgactggcctagagagttcccctctgaaggacactacaactgcaagtccccttcttcgcccctatccagcaataattagctasagtggtcatcgcccagttcccaatagcaatgtcctatttagtggggggattgagaggtgaggccagctgggcttcctgggtccagtggggacttggggaacttttctgtcttacaagaggattgtaaaatgcaccaatcaggaactttcctgtttgacaagagtattgt

SEQ ID NO: 432521 - DNA, 532 bp, Homo sapiens
ttttatgaataatagtctcagaaagataagaaggtattacatccattaaacagtagtataatgttaaaaaattagataaattttttaaaagctcaaagaaattagaaagaagatagtatatgtaaaaatttcagtgagtagttggaaaataaggttgacaaaatctcacagaaaggagagcaaaaaatacaaacagaagacaacagaagttcataaaattaagaaattagaaagctagttccagtaattccacattcaaatattagcagcttcagaaagagaaaatgaagaaattgaaagaagcaaatcaaagaactgattcaaaaatatcagtcagaccagtgggtgagtttctaatccgaaggatctatcatgtgcttagcataatggataaaatttgacccatgccacaggcacactgtgacaagtgctgtcatgcaatcctcagatttccattcaggaatgaaggactcwttcccccagctgctgggagtgctgccagccatctttggggattgcattaacagaagaa

SEQ ID NO: 432522 - DNA, 251 bp, Homo sapiens
ctgaaaactagtagacattgaagaaagtttttaaactaagagagaaaaaactgcttcaaacctggaagtttatacccagccaaattctaaatcaagtatgagggtagaataaagacattcttggtctcataaaatttaccactcatgtattttttcctaggaatcaactgcagcatatgcataagtaaaatgatggaatagaccaaaaaacaaaacaaaacmaaaccaaaaaaaacaccaaacagtaaaca

SEQ ID NO: 432523 - DNA, 535 bp, Homo sapiens
cttcctccagtcaccaggccagcattcggggaagcagcctcctcttccagggcttatttcctgggaattcttaaggcctgtagctgctgccttcttgttttatagaccgctttagcagaaatacactcattctctctctcctcaattcaaatgcaagggtagtagctgcacatttttacataagacagagtctgctagcttttaattcagactcaacaaccccaatgaagctggcacagctgtaatttaaagcagaaatgaggctgtggaagtcaagcaagaatttaatacaacaagctatgaaattttatttcgaggtttatttctaggttttcagatagacttgaggaagaatgttttgacaatcctgataaaaactctctaaagggaattgactgttgggcaaagtcaaaaccagaagatgataagtaatatggtasatggtgccttgggctacatgcaaggtcacctagtaggatgcgtagcttgagtgctgaagtgaaactcagaaaccctgagatctagccccagtctg

SEQ ID NO: 432524 - DNA, 567 bp, Homo sapiens
gtaactaaatatcttgtgttttcaaagttactgcaattccccctttttttttgaagttttaaatcccgctttgactactggtggtattgcaatcaatgaagtttattcaaggagtaatcattgctattgacaaacttagtaaacagtttaaatgcataagttccattatcaaaatattgtatatatatatatatatatatatatatatatatatatatayacacataaaataaatttagatttttatatagtcaaaaagattataatgtatagtcaggatttccaataatttttcataaaatttttcttttgttcttagtaagaaaatgtcatatatcttttgcagtttttagataaaacaattggtaaatgaaatacagtacattaaaatactttgaggctttaaaaaaataagaaagaaaagtaatttcagtggaattatcattttagcaagactaagatcattccatgaagaagacagaggtgggtaccctggtgaagccctggcttgtgtatgtgcccacacgtacacatgtaccatttggcaacagacttttaacaagtaaa

SEQ ID NO: 432525 - DNA, 456 bp, Homo sapiens
cttttgatgtcacagaagaatttacccacattttctcatctaatcttcataacagtcctatgaggttgattttatcctcatttttactgattaaaaaagcaagtctcagagagattaggaatttgaggcagagtaaggatttgaacacagattttccaactttagtcctctctgactctactataatatgttttatatactagttccctgccwgtcaggtccagatgattctaaaccccgccccattgattaagaaaacaattaagctcaaatcttatttccttatctatgtggttccaggctcatcttcccagaaacccaaccatatttaaattattgccatgaacgaatgataatcgccatcctccagcattctccttcagtattaacagactcacagcagaaaagtgaatttctacaagtcatatttcttagtattctaagttcccagagttt

SEQ ID NO: 432526 - DNA, 519 bp, Homo sapiens
agaagttttcccctaactactgccaacatcctcaatccttgtttccttgtcccaggttgagcccatctttttctttaggatttgaaagagtaaacttccaatttagaagtggacgaataaaacacaagtgttgaagcagggtccacattactgacctgataataaygacaataaaattaaccaataataaagtttaattgactgaacacctagtgtgccaccaggtacttcagagagatgagatttaagagccacagcaacccactaagtcaagacattggggctcagagggattattaaccttcccaagatcccacaggtagtaagcaacaggtcagcattcaaagtcaggactgtctgattcaagagcctgtatttttaaattattcatcaccacacttggtttctcagacttgttaggaaaactagggcttcccacaggacaaactagcaaggcaagtcaagtaacaactcacatacccaatctttagtttatgaaacaagaaatgtgagacaatg

SEQ ID NO: 432527 - DNA, 601 bp, Homo sapiens
gtcttagctcaaggccaggactaggaagtaataaagcaatgctggataaagtcttggtggaatggtttgttctcgtcaagaaaaatctttttttgcgggccgggcgcggtggctcacgcctgtaatcccarcactttgggaggccgaggcgggtggatcacgaggtcaggagatggagaccatcctggctaacaaggtgaaactccgtctctactaaaaatacaaaaaattagccaggcgcggtggcaggcgcctgtggtaccagctactggggaggctgaggcaagagaatggcgcgaacccgggaggtggagcttgcagtgagccaagatggcgccactgcagtccagcctgggcgacagagcgagagagactcttgtctcaaaaaaaaaaatagaaaaaagaaaaagaaaaatctttttaaaaactcatttggttgttttgtaataaaagatgccccacccacctaaaactcaaactggaataattttaataggtcaagtcttttcgacttgatattggtctaacctgaatagtcttctcctggagattttatttaaatggctggaatggcattcttctaaattaaaaaaaaaaaagc

SEQ ID NO: 432528 - DNA, 601 bp, Homo sapiens
gtcttagctcaaggccaggactaggaagtaataaagcaatgctggataaagtcttggtggaatggtttgttctcgtcaagaaaaatctttttttgcgggccgggcgcggtggctcacgcctgtaatcccagcactttgggaggccgaggcgggtggatcacgaggtcaggagatggagaccatcctggctaacaaggtgaaactccgtctctactaaaaatacaaaaaattagccaggcgcggtggcaggcgcctgtggtaccagctactggggaggctgaggcaagagaatggcgcgaacccgggaggtggagcttgcagtgagccaagatggcgccactgcagtccagcctgggcgacagagcgagagagactcttgtctcaaaaaaaaaaatagaaaaaagaaaaagaaaaatctttttaaaaactcatttggttgttttgtaataaaagatgccccacccacctamaactcaaactggaataattttaataggtcaagtcttttcgacttgatattggtctaacctgaatagtcttctcctggagattttatttaaatggctggaatggcattcttctaaattaaaaaaaaaaaagc

SEQ ID NO: 432529 - DNA, 516 bp, Homo sapiens
tgatgtgcacacaaacatcatgaacaattttgtttcccatattttcaaagtagataatattaaaataattggtaatattttcaaaatgtgaatggcatgttactgtaaaaattgtttttcagttatttaaatttcattgaattcataagttacatggatacaccaggttatttttaacagtgctgtaaacttgaagagctacagtgaattattcttaattatatacatactgtttacttaccatatttatttttaaatggctgcagttttcagatacaaatacataatggtaaaataataaaacagtamatccagatgttaagagatgactgaactattccccaagttcgatccacatatgttttgtaagccaattaactcttctgaacctctagagggtaccaataagaaccctttcaagagtaatttactcaaaaaaaaaaaaaaaaagcctgaaagaattaatatgcctcagaatgtatccaaaaaagcccagtaaacaattactttagacct

SEQ ID NO: 432530 - DNA, 574 bp, Homo sapiens
tttacctgaagctgagtcagtttggagagccaagtgaaatacagggctagaggaagcagtagaaaggccctgggaactcgttgggtcccctagcaggccattcctgcttggcaccacagggatccaacaggagaggagtcgggggtaaaactccacgggagaaggaaatctctagctgaactttgtaataatttgaatggggtgagaagcctcctggccagaactcacaggagggcacaaatctggtgtgcagactgtacaagtaggggaagaaccaagcctttctctttcacagctgggaagcaggtagcctggggcaggttttcaagtccatgtaactctccacctggaaatggactgggggctgttggtgaggcatggtgagagtgasactggcccttcagtttgtatgggagctggttgaggcctgtgactgccagctttcccccacttccctgacaacctgcatgactcagcagaggcagccataatcctcctaggtacacaaatccagtgacctgggaatctcacccacatcccccacagcagccacagaaagacctgtcaaaggaga

SEQ ID NO: 432531 - DNA, 559 bp, Homo sapiens
aaaggtttttgtcccctttttatttcataataccaagcaagatgcccaacaccccatcagaagtcctaagagatgacagagaagtgtccagtacattgtttttcttgcccaagccaaatttctcattgccaaaaacctttctttttcacccagcaaaatgttcgtatatttttcctttttcattgatgtctaggataactaycccacagagttggagaacactcaccagtggtttgggagaaaaagtagctgtgtcaggaaatcttggttctatatcagtaaccctacatcatcagaggcctggattgagcccaaacccatgttccaactatggtttctcattctggaaagctctcttgtcatttggggctttttttttttcccaggaaggctctcactttctctctctacagccaactgactctcttgagtgctaactaaagttggagaatttgaggattgtaaagattgtcattttgtggttggcttagaagaaaacctcgtagggaatcatgtctctaaatctatgaagcagagaaactgttcttaagtgggcaag

SEQ ID NO: 432532 - DNA, 575 bp, Homo sapiens
  misc_feature (1)...(575): n = A,T,C or G
tttaaattttttaaaataaagcttaaaaccccatctttgttggctcagatgcttacatgggagttggctcataatgctttctcatttggaataatcttctgttgctaagagatttgcatatgcttacggatgacttaagaccattggtagaaaatgtactcagtaactaatctatgagaagccattttatacaagaatttttgtcgggtagactttncaagagaaagtattttccttttctttaacaacagtgggagctcgaatctgaatataagcataatgcatccctatcaaggtcaatttgattcagtattcaaggtggcagtgaccctgttaaagtcaaattttccttctaaatcccaaatatttgttctaaacagaatgaatargaaagtggaaatacttaattgcacacatttattgtctcatattttctgtggaccaggaatccaagcatagcttaactgtgtcttctgcttcagggtgttctccaaggcttcaagcaaggtgtcagccagaactgagtctcatctaaaaactcaaccagtgtaagatccacttataagctcactaca

SEQ ID NO: 432533 - DNA, 563 bp, Homo sapiens
tagattgtgaagattttctcccactctgtgggttgtctgtttactctgctgactgttccttttgccatgcaraagctccttagtttaattaggtcccagctatttatcttcatttttattgcatttgcttttgggttcttggtcatgaaatccttgcctaagccaatgtctagaagggttttttcccaatgttatcttctagagcttttatggtttcaggtcttaggtttaagtctttaacccatcttgagttgatttttatataaggtgagagatgaagatccagtttcattctcctacatgtggctagccaattatcccagcaccatttgttgaaaagagtgtccttcagaaaaccaaacaccacatgttctcactcataggtgggagttgaacaatgagaacacatggacacagggcggggaacgttacacactggggcctgtcgggggatggggggctgggggagggatagcattaggagaaatacctaatgtaaatgatgagttgatgggtgcagcaaagcaacatggcacgtgcatacctatgtaacaaacctgcag

SEQ ID NO: 432534 - DNA, 490 bp, Homo sapiens
ctgaaaaatttgacgggaatactgaagaatgtgccagggtcttttaatagcagaattgatggagcaaaaggaagaattagtaagcctgaagacaggttatttgaaaatacacagaggagacaaaagaaaaggaataaaaaaaaatgaagcatgcctacaagacctagaaaatagcctcaaaagggcaaatctaagagttattggccttaaagaggaggtagagaaagagataggggtagaaagttaattcaaagggatagtaacggagaatttcccaaacctagagaaagatatcaataaccaaatacmagaaagttataaaacatcaagcagatttaactcaaagaaaaccacctcatggcattaaataatcaatcccaaaggtcaagaataaagaaaagaccctaaaagcagcaagataaaataaacaaataacatacaatggagctctgtaatacgtttggcaggagacttttcagtggaaacctta

SEQ ID NO: 432535 - DNA, 534 bp, Homo sapiens
ttcatgtggatatagttgctgcccagcatgaaggcagtacatgaggagaagaaacagtgagtttgtatccaagccattaacgagtacaggggggaaaggtgggaggttcaaagacaaaattaagaggtatggaaggaagtatatattgttggcacragtcttaataaaagaaggttttttgccccaggacagaggagtaatcatctgccaattgtaatggcgagctaggagaccatgcagtccacagctcgtgatacatgggtgtagaagaatcagcctcttccatagaggttgcagcagttattgtgctctggggagagcctggagatggagttttgtgaaatggttgaggatataagtcaggttatttacagtggaatgggggtctctgaggagggaagtcagcagtgtgagaaacatccgagtggaatgaaaataatgaatgataataatgcatgtccagcaccatgccaagggtgtgagatatttattttatttaatcattacactaattctgcaatgtaggtgctatct

SEQ ID NO: 432536 - DNA, 607 bp, Homo sapiens
aaatatgctgaaaagcacttataatacaaatacaaattatcactgctcaaagatattttatacatatcaacttgacaaaaatgacatgcttgacaaaacatgcttcttgacaaagtattctattttatacttatcagattggcaaaaatgaaatgcttgacaaaacatgctgttggcagggctgtgcagaaacatatgctctcatgtattgctagtgggcagtgcaaaatggcacaggcccttaggaggggaatttggcaatagctgatgaaattaaacatgtatttattcttttactaagcagtactgaaaatacacctacacaaaagtaaaacaatatatgtataaatttattagtcatgcattattcataatagcagaaagttgaaagcaatgcaaaatctgttcatgtgaactggttgaatgaaccatccacataatggagtactatgcagccataaagaaagaattarggcaatctctatgagtggatatggagcaatttctaaaatgtattaagtttttgggacaaatattatcatgagcctcctaatatatatgatacactaaaaacgggacattacttaagtagcaaacctgccaaaaa

SEQ ID NO: 432537 - DNA, 596 bp, Homo sapiens
ttgctttttagcacaataagatagcccatgagcaacatgtatttttctacccccagacctggaattagacattacccaaaaaatctctggtgcccttttagtgagaatggtggttagagatcaagataatgggcactaggggtaaactattttgtttaatttcattatctaaacgtctttttgttgatatacagaaatgcaatgtatttctgcacagacattcactggggttgcattagaattaaaattaagttctcctaaatctcaatgtatattagaaatattttcagctgcaagtaacaggaagctcactcacaatgrcctacaaaaacaagatgtttagttagctcacctgataaggagtctggttacaatcagtctgggactaatgcaatggctcaatgattctgtcaggggggacccatactgttactatttagctcttagtttgtcctcttgttttttgcctcattgctacaagatgactggcctacaccaggtattgtctacattccaggcaagtgtaaggaaggataaagaagttaatgacaaaaatatattctcctttccaggttttgcttttttattggggaaag

SEQ ID NO: 432538 - DNA, 447 bp, Homo sapiens
tgtttgttggtctttaaataaatgaacttaaaataagattttccaaatttgaaaatagatgccttatagagtagatttcttatgcaacaatataaaaataagaaattaaatctgggaacgagacttaattctccaacatgattttgttttgaagttcagcctcttcaatgagatgcaggtatgggggaagggctccatttaaagagcccaaattcctatctgttacttcagatatcaggtcagattagtacttttagaaagtttaacagacccctttgatgcaacaggaaagaaaaacaagctctctaagcaggaaaattcaggacatcctttttcttagttttacrtgatgcagtgagtcacttagagactctcaggaaaataagcccaggatggccatcaagattagggaacatactggcccaaacagctgcagagcaagtggct

SEQ ID NO: 432539 - DNA, 594 bp, Homo sapiens
tatgtaaccaaatatcacctgtaccccaataacttatggaaaaaaataattaaaagaaaaagaaagaaatgtgaactatgcatacatttaagaaagatagaaaaaagttagtaagataattatttccaccatttttggtgaatcactgagtgacagcttyggttgtggtggtggtgggttaaatcagagaataaatgtttgcataatgaacattgcaaggagtgtaatcacctggcaggctctttctgcctgctgcacaaacaaaaccaattcagtgagaccactgtattgcagtaaagaaagagtttaattaacacaaggcttctgagtgaaatgactggagttatcactcaaatctgtctttccaaaagctcggaggttagggtttttcaaggatagtttgagggacaggggactagagattaggtgctgatgattgattggggatgcaatcacaagggtgtggaaaacagccgtcatgcactgagtccacctttggtttgggggccaccaggccagttgagtcatgagtcacaaatcccgatggggtcagccatttgctgttatttgaaagtctgaaaaacatctcaatag

SEQ ID NO: 432540 - DNA, 498 bp, Homo sapiens
agaaagcagaattcttagggaccttagttagactgaggaacaacacaacagtgaatttcctgggtttccttatcacctcccttacatcccagaragggcactgtgcagaagcctccaactctccaacccagaactgccaagtacagattaaaaaaaaaaaaaaaaaaaaacaactccatgaaaagcctgatagctctagctgtcaggcataacaacagaaaacttttttggcaatacctgccctactccaaccaaacaccagtagaaaatctgtacccttccctgctgtgggatcttccaatgcccaccaggcaaaagcagctggtgctctgattcccatgcagaggtactggtaaagctgagcagaaagctgaccttctactccctgccaaacaaaagcaggcagtttgctgattgccccacagtgtagtgtcagtggggtccaacagcaaactgagcctccatcctcaccaggtagcaatgagacttaaagaggca

SEQ ID NO: 432541 - DNA, 519 bp, Homo sapiens
tgatggggccagtgtgggaactgaatttctaccccacacatctacaacaaggcaacaggagtcagtgcctacttttgccagagtagtatcattgggcaccagagagcagctgaacatacacacccactcagccttcatgctgtacctcaaccaggggacaacctgttaaaaaaagaaaaagaagaattagtagaatccatagtctaataatataatatccaaatgttcaggatatagtcaaaagtcactcatcatatcaagaaccaggaaaatcacatgaatgagaaaagataatcaacagacaccaacgaggagatgaatstgatgatggaattatctgacaaagatttaaaatcagccatcataaaacgcttcaacagataattacaaattatcttcaaacaagtgaaaaaatatagaaaatctcagcaaagaaatagaagttatttaaaaagaaccaaagggagattatagaactgaaaaacacaataaccaaaagagtggatttgacagaggata

SEQ ID NO: 432542 - DNA, 571 bp, Homo sapiens
tgacctaatcacctcccaaaggccccaatctccaaataccatcaccttagggattaggatttcaacatatgacttttgggggtacacaaacattcagtatattgcattctgtccctggtcccccaaaattcatgaccttctcacatgtgaaatatattcattccattccaataaacccaaaagtcttaactcatttcagtatcaactttaaaatctaagtccaaagtctcatccaaatattatctaaatcagatatggatgatattcaagataggattcatcctaaggcaaattcctgccagctgtgaacctgtgaaaccaaacatgttatgtgcttccacagttcaatggtgggacaggtatagacagacattcccattccaaaagagagaaagaagaaagaagaaaaaggggayaggtctcaagtaagtttaaaacctaacagggcaaattccattagaccttaaggcttgagaataatttctttgacttgatgctctgacatccaggcccactgggtgacaatgttgagtggcaatgtcactttcacagctttatggtatgactccat

SEQ ID NO: 432543 - DNA, 467 bp, Homo sapiens
gcacttggatttttactctgagtgggaagtgaagtcattgggaggtgttcagccgaggagtgatggagctgcagtgctgagaatagaccgttgactggtgaagggagaagagaatgatgttttgcactgggaagtggtaagaagtggttatattctagatatattttgaagtaagaacataattgcrgaattgatggattggacatgggtgtcagaagtcaaggatgcctccaatgtttctgccttgagtaggtggaaaaatggagtttccagataccaacatggggtaggtggtgcaagaaacaggcaaggggggcaagattaggagttttgctttgggacttgttaataacttttttactttaaaaataatttttaattgaaatatcacattctagcagaaaagtgcttgtcgaattttcacaaaacaactgcacctgtaatttgcatcgagactaagaaataaa

SEQ ID NO: 432544 - DNA, 467 bp, Homo sapiens
gcacttggatttttactctgagtgggaagtgaagtcattgggaggtgttcagccgaggagtgatggagctgcagtgctgagaatagaccgttgactggtgaagggagaagagaatgatgttttgcactgggaagtggtaagaagtggttatattctagatatattttgaagtaagaacataattgcagaatwgatggattggacatgggtgtcagaagtcaaggatgcctccaatgtttctgccttgagtaggtggaaaaatggagtttccagataccaacatggggtaggtggtgcaagaaacaggcaaggggggcaagattaggagttttgctttgggacttgttaataacttttttactttaaaaataatttttaattgaaatatcacattctagcagaaaagtgcttgtcgaattttcacaaaacaactgcacctgtaatttgcatcgagactaagaaataaa

SEQ ID NO: 432545 - DNA, 525 bp, Homo sapiens
aggttgcgacagaatttgttcaatgtgaagtttttctgatttggtgtatattaggaaactcaatgtctttagggctgtgtttttccgataaacacatttttcccctgcagaggatgtttgaccattttctttgttactcctctcccagaagagaggaaacttctcacctgcaaggactttttgctcygcagttcccttcacactcacatattctcctgtgtcacagctctggggtatgtcttatgctcacccatcacgtagttcgttatcaccactacagatattgacaagctagtgaaacctgcgttttcattgcatttaactttgaaggcacacatctttgaacagaatgctaggtgctaatgtcatagcttacatctagatagggctctatttatgatgctgttatgttgtcttcataatctattgtggtattcagtttagctcataacagctgtataaattcaggttgccaagggtaaaagaggtgacccaacctcccatctggctgtattccccttgcac

SEQ ID NO: 432546 - DNA, 525 bp, Homo sapiens
aggttgcgacagaatttgttcaatgtgaagtttttctgatttggtgtatattaggaaactcaatgtctttagggctgtgtttttccgataaacacatttttcccctgcagaggatgtttgaccattttctttgttactcctctcccagaagagaggaaacttctcacctgcaaggactttttgctccgcagttcccttcacactcacatattctcctgtgtcacagctctggggtatgtcttatgctcacccatcacgtagttcgttatcaccactacagatattgacaagctagtgaaacctgcgttttcattgcatttaactttgaaggcacacatctttgaacagaatgctaggtgctaatgtcatagcttacatctagatagggctctatttatgatgctgttatgttgtcttcataatctattgtggtattcagtttagctcataasagctgtataaattcaggttgccaagggtaaaagaggtgacccaacctcccatctggctgtattccccttgcac

SEQ ID NO: 432547 - DNA, 548 bp, Homo sapiens
agctcccctgtcacctcaaactcctgtgctcaagccatcctcccaccttggcctcctgaggagccaggactacaggtgcacaccaacacaccgggcaaggttagccttatagacagaagttctctacctaggatgatttctatatttttgttcaccaaaaaaggttctctggcctaccagcagcaccctggctgcttttgctgactctagtcattccttaatgagtatacctggtagattcttactggactayaccttagtgcagaaggatattagaatatcccacgcttgatagcagacctggttgaagaggccaacacaaaccagagtcagggataaaaccaagataaaaatctcatctccgctgacatcatagcatccatgcagttgctcaagccgaaagcatcctcgattcctctctgtttctctcccctgctcagatgatctgtactgatccacttttctccatctctgctgctacctcattagtccaagccatgttttgtctccctggaactattaatattagaacagccttttgacctgtc

SEQ ID NO: 432548 - DNA, 596 bp, Homo sapiens
ttttttctttttctttttttgttggacttcatatatgrtatctaaaatttatatggaacagaaaggtccaagaatagtcagttcaatcctgaaaaatatgatgggttgatatgtccaaactctatcaatctttattttaaaactacagaaattcaggtagtatggcattgaaacatgaatagcagctcagatacagacctactcatatgtggaaaattggtttatgactgagcaggcatttcagaccaaggggagataagaagccattcaaaaaatagctctggaacaaacaggtattctacatgaagtcagattcctatctcactccttatacaaaagccagttccagaaagatcgaggaattacagatgaaagatgaaattttaaacctgttagaaataaagatagaagaattctttatgaggctaaggtaggaaagaatttccttttttgctttttgttttgttttgttttgagacatggtcttgctctgttgtctaggctggagtgcagtggtccaatgtcggctcactgcagccttgacctcctgggctcaagcaacccccccaactcagcctcccaagtagctgggacca

SEQ ID NO: 432549 - DNA, 596 bp, Homo sapiens
ttttttctttttctttttttgttggacttcatatatggtatctaaaatttatatggaacagaaaggtccaagaatagtcagttcaatcctgaaaaatatgatgggttgatatgtccaaactctatcaatctttattttaaaactacagaaattcaggtagtatggcattgaaacatgaatagcagctcagatacagacctactcatatgtggaaaattggtttatgactgagcaggcatttcagaccaaggggagataagaagccattcaaaaaatagctctggaacaaacaggtattctacatgaagtcagattcctatctcactccwtatacaaaagccagttccagaaagatcgaggaattacagatgaaagatgaaattttaaacctgttagaaataaagatagaagaattctttatgaggctaaggtaggaaagaatttccttttttgctttttgttttgttttgttttgagacatggtcttgctctgttgtctaggctggagtgcagtggtccaatgtcggctcactgcagccttgacctcctgggctcaagcaacccccccaactcagcctcccaagtagctgggacca

SEQ ID NO: 432550 - DNA, 596 bp, Homo sapiens
ttttttctttttctttttttgttggacttcatatatggtatctaaaatttatatggaacagaaaggtccaagaatagtcagttcaatcctgaaaaatatgatgggttgatatgtccaaactctatcaatctttattttaaaactacagaaattcaggtagtatggcattgaaacatgaatagcagctcagatacagacctactcatatgtggaaaattggtttatgactgagcaggcatttcagaccaaggggagataagaagccattcaaaaaatagctctggaacaaacaggtattctacatgaagtcagattcctatctcactccttatacaaaagccagttccagaaagatcgaggaattamagatgaaagatgaaattttaaacctgttagaaataaagatagaagaattctttatgaggctaaggtaggaaagaatttccttttttgctttttgttttgttttgttttgagacatggtcttgctctgttgtctaggctggagtgcagtggtccaatgtcggctcactgcagccttgacctcctgggctcaagcaacccccccaactcagcctcccaagtagctgggacca

SEQ ID NO: 432551 - DNA, 596 bp, Homo sapiens
ttttttctttttctttttttgttggacttcatatatggtatctaaaatttatatggaacagaaaggtccaagaatagtcagttcaatcctgaaaaatatgatgggttgatatgtccaaactctatcaatctttattttaaaactacagaaattcaggtagtatggcattgaaacatgaatagcagctcagatacagacctactcatatgtggaaaattggtttatgactgagcaggcatttcagaccaaggggagataagaagccattcaaaaaatagctctggaacaaacaggtattctacatgaagtcagattcctatctcactccttatacaaaagccagttccagaaagatcgaggaattacagatgaaagatgaaattttaaacctgttagaaataaagatagaagaattctttatgaggctaaggtaggaaagaatttccttttttgctttttgttttgttttgttttgagacatggtcttgctctgttgtctaggctggagtgcagtggtccaatgtcggctcactgcagccttgacctcctgggctcaagcaacccccccaactyagcctcccaagtagctgggacca

SEQ ID NO: 432552 - DNA, 584 bp, Homo sapiens
accaaaaaaaagggaagtgacatacagaaatcggcagtgaggtacagaaatagctggactggctacatattggcgtttgtcttatttgaacacagtttgaacacttagcagtctgtgagtggttgaagtacggccgctgggattggccaagactcagttactgttacaggcacatacttccaagttaggttttcaatcttatctgcctattaagctagattacagttcatccacgaggactcaaatgtagaagtaaggaggccttctcaggccatatttagtttgctttaacatgtgttaatccygcaaatatcaattgaaataatttttagtaggaaatcagaataaacaactgacagcggattgtgcgattcattttccttccttaaaaatggagtttagtaaggcgggtggatcacgaggtcaagagatcgagaccatcctggctaatatcgtgaaaccccattgctactaaaaatacaaaaattagctgagcatagtggcgtgcgcctgtagtcccaactcctcgggaggatgaggcaggagaatcgcctgaacatgggaggcagaggttgcagtgagcc

SEQ ID NO: 432553 - DNA, 554 bp, Homo sapiens
ccatttttccctctggtctacttggcatctcttcatccactgactttctcctaagccttccctgttctggaaacttcagaggcaacacctcatgttcaaatcttttcttgctcatccagtgctctggttatagctttgtgaatcatctctgcaggcttttccacctcaatcaaaacagtactttatgtctttaatcactgtatagcttcttcttcctctaccattctwtctatccctgatatgctgttaattataatattttttttctaaatcagtacagtgttacaatgcaatatgggagtgtgaaagagggaggctaatttatttattttgtttacatttgcttctattcctctacacaagtcttcaagatttcctcccacactgtattctctgtttttacatcttaactttgttttggaagtgtggaaatcagtattgtcttggagagagaaccggtacaagcaccaatgtcttcagtagagatctactggataaatacttcccccaaagcaaatcacatagcaactgcattaataattctaacatcttat

SEQ ID NO: 432554 - DNA, 596 bp, Homo sapiens
tggttatagctttgtgaatcatctctgcaggcttttccacctcaatcaaaacagtactttatgtctttaatcactgtatagcttcttcttcctctaccattctatctatccctgatatgctgttaattataatattttttttctaaatcagtacagtgttacaatgcaatatgggagtgtgaaagagggaggctaatttatttattttgtttacatttgcttctattcctctrcacaagtcttcaagatttcctcccacactgtattctctgtttttacatcttaactttgttttggaagtgtggaaatcagtattgtcttggagagagaaccggtacaagcaccaatgtcttcagtagagatctactggataaatacttcccccaaagcaaatcacatagcaactgcattaataattctaacatcttatgcattaactaaatataaatcaaaaaaatactaatgaaaaatctgaaggaacatctaggctaacctcaaaggcttgagagaacaaatgagaaattgtgagggtgacttcatgggaggaacagagtaaagcaatgaagaggcttggattttgcagttggctggcccaa

SEQ ID NO: 432555 - DNA, 554 bp, Homo sapiens
ccatttttccctctggtctacttggcatctcttcatccactgactttctcctaagccttccctgttctggaaacttcagaggcaacacctcatgttcaaatcttttcttgctcatccagtgctctggttatagctttgtgaatcatctctgcaggcttttccacctcaatcaaaacagtactttatgtctttaatcactgtatagcttcttcttcctctaccattctatctatccctgatatgctgttaattataatattttttttctaaatcagtacagtgttacaatgcaatatgggagtgtgaaagagggaggctaatttatttattttgtttacatttgcttctattcctctacacaagtcttcaagatttcctcccacactgtattctctgtttttacatcttaactttgttttggaagtgtggaaatcagtattgtcttggagagagaaccggtayaagcaccaatgtcttcagtagagatctactggataaatacttcccccaaagcaaatcacatagcaactgcattaataattctaacatcttat

SEQ ID NO: 432556 - DNA, 625 bp, Homo sapiens
agacacaaattattcatgaaaaactggcttttgtgcataatcatatataacaggtgtatattttaaacacatgagggttaattaatgaatgtttgtattcctaaaatactccttcaagtacattctaggaaataatttctgtatacatttacattcttttattaaaaaaataacaaaacctggaactcattttcaggaatgctttcyctaaaatgtaacaaccattcctcaaaatacttttttcctttttggtagcatatgcttaaatgcactcttaaatagttgaaaattctgtatgagccacatgtgatgcaggcaataaaaatagagagcaaggcctaaatattggatgcatttctgcattacttgtttcgtagaagttttctctgtgttattctgaaagcttataattttgcaatcactttcagttcctgggaacactggaatggagtcatatcctactcttttgaaagtttttttccatattgccagtgacccgagggcgaaaaacaagagacagaagtgggtctttggaaaaataatgcccatattagtagaaatgaccattttgaaatttacaatgaaaacttttaactctcagaatggaattatagctattgttcat

SEQ ID NO: 432557 - DNA, 625 bp, Homo sapiens
agacacaaattattcatgaaaaactggcttttgtgcataatcatatataacaggtgtatattttaaacacatgagggttaattaatgaatgtttgtattcctaaaatactccttcaagtacattctaggaaataatttctgtatacatttacattcttttattaaaaaaataacaaaacctggaactcattttcaggaatgctttccctaaaatgtaacaaccattcctcaaaatacttttttcctttttggtagcatatgcttaaatgcactcttaaatagttgaaaattctgtatgagccacatgtgatgcaggcaataaaaatagagagcaaggcctaaatattggatgcatttctgcattacttgtttcgtagaagttttctctgtgttattctgaaagcttataattttgcaatcactttcagttcctgggaacactggaatggagtcatatcctactcttttgaaagtttttttccatattgccagtgacccgagggcgaaaaacaagagacagaagtgggtctttggaaaaataatgsccatattagtagaaatgaccattttgaaatttacaatgaaaacttttaactctcagaatggaattatagctattgttcat

SEQ ID NO: 432558 - DNA, 545 bp, Homo sapiens
ttgatgagaatcagcaaatctagtcctaccacttcattcctactaatccttggctgggctgggaggactttgtgtggtagggaaacccattgccatggttctaatcctcacatcctgggtgcrtatggtgcatgtggctgccttgcctggaacatgtgttcatagactgttccacatccttggaaagttaagggggctttacctagagtcttgtgccatctggatgtctacctctgacttgcttctctttaatgaaattcatgacatgtgaagtagtgaccgccgattgatgccaaacagcaatttgagcctcattactgacaatgtttgtaaaagcacaaagtgaaccattgtggaaaattaagggaaatggtacttattacgtaataataagaaacttacacattatttttatttggtggagatactttggatggatttgtatgagctaaaatcacatttttcccttggccggtcttaatcacactccaagtctttgcactttctcatgttctcacagaagcatcatagtcatcactggagca

SEQ ID NO: 432559 - DNA, 545 bp, Homo sapiens
ttgatgagaatcagcaaatctagtcctaccacttcattcctactaatccttggctgggctgggaggactttgtgtggtagggaaacccattgccatggttctaatcctcacatcctgggtgcayatggtgcatgtggctgccttgcctggaacatgtgttcatagactgttccacatccttggaaagttaagggggctttacctagagtcttgtgccatctggatgtctacctctgacttgcttctctttaatgaaattcatgacatgtgaagtagtgaccgccgattgatgccaaacagcaatttgagcctcattactgacaatgtttgtaaaagcacaaagtgaaccattgtggaaaattaagggaaatggtacttattacgtaataataagaaacttacacattatttttatttggtggagatactttggatggatttgtatgagctaaaatcacatttttcccttggccggtcttaatcacactccaagtctttgcactttctcatgttctcacagaagcatcatagtcatcactggagca

SEQ ID NO: 432560 - DNA, 545 bp, Homo sapiens
ttgatgagaatcagcaaatctagtcctaccacttcattcctactaatccttggctgggctgggaggactttgtgtggtagggaaacccattgccatggttctaatcctcacatcctgggtgcatatggtgcatgtggctgccttgcctggaacatgtgttcatagactgttccacatccttggaaagttaagggggctttacctagagtcttgtgccatctggatgtctacctctgacttgcttctctttaatgaaattcatgacatgtgaagtagtgaccgccgattgatgccaaacagcaatttgagcctcattactgacaatgtttgtaaaagcacaaagtgaaccattgtggaaaattaagggaaatggtacttattacgtaataataagaaacttacacattatttttatttggkggagatactttggatggatttgtatgagctaaaatcacatttttcccttggccggtcttaatcacactccaagtctttgcactttctcatgttctcacagaagcatcatagtcatcactggagca

SEQ ID NO: 432561 - DNA, 586 bp, Homo sapiens
tttactgagaatgatgatttccaatttcatccatgtccctacaaaggacatgaactcatcattttttatggctgcatagtgttccatggtgtatatgtgccacattttcttaatccagtctatcattgttggacatttgggttggttccaagtctttgctattgtgaataatgccgcaataaacattctaatatgtttctattctgttccatgctacaaatgatggcttaaacgatatttgtgcaatgtatatattacatttttaattaattttattatttaattaagtaatgtgaggtagaacaatgagaattaaattaagaatttctaactttcccttctgtgccttgatgtgacttattctttacttacaaataaaatatactttagttgatgagcatgacatattcatattgaggttattctacatataaaagattcatgcatgtgtagctacaatcgcagttcaaacaacagaggaagtgtatatttycagattaaacaatttaatgtaagcctgaaaagaagcagtttcaccagtgtcagagaatataataaatatctgatattagtggaaatagtttct

SEQ ID NO: 432562 - DNA, 631 bp, Homo sapiens
gtatatggtaaattctcaatttaagattaatacaactctgattttattatttctattaatgaacaagtaaataaaggatttgckatgtttattaattgctttcaggagaaacattttgaaatctatttaactttaaaaatatacatgtctactcttcaatgcactgagaaagacacaacatcacttttgccaaaaaatacatgacctcaatcgaataacaaggatgcctcaagcaaacacaaattgaaggatgctctacaaggcatccagcctgttctcttacaaaatgccatgctcaggacagaggaaaacagaatgtggactgtcagattgaaggagactgagatgtgtcatggaaactacatccagtgtgtgttctggggctgggcattgatgtgaatttatttcctattaaaaaaacattattaggggcattgacaaaagatagttaaggtctgtagattagatcgtagtattatattaatgtaatttcctgatttagttactgtaccatggtaatatcctagttcttaggaaatagtatttactgctataaagtattagtatttagggataaaggggcatggggctgcaactgacatttaaatggttcacaaacatgataatatga

SEQ ID NO: 432563 - DNA, 563 bp, Homo sapiens
tttctaaaaaaacacaaaatctaaataaataatattagaagcagacatatgatacaagaaataccaaaataagtttttcaaacaggaagctttttgcagcaggaaaattggatctatgaaaataaataaattgctctcaaaatagttaaargaaagataaatagaaaaaaatttcttatttgaatcattctgcaagtttattggctgcaaaagcaaaatagaaatattctgaagatttatagcagatgtaaattaaaatatataacactagcacaaaagaagaaattagcagaatactgttttggggtccttgtatatcaagctgtaaaatactctttgaaggaacactgtgataaattaaacatgtatactgtaaccatggggaacctattatatgaaaaaatatgaaaactaagccagtaaccaatggtaaatggatgcattaaaaatactaatcaaaaggcatacagaattcttttttagaattttagagttgatataaaagaaagaattatacactacctataaggaactcattttaaatacacaggtagcatggcaat

SEQ ID NO: 432564 - DNA, 612 bp, Homo sapiens
tggacagaggccactccttctggggcacaaccctgcccaggaaaccccaaatagaggtttgcttcaataagagctatgtttatctaggaaacattccaagttgtggagaaaaaaaggagaataaaagaaaaagaagaaaccttccatccacagctagagacctgaatattgcccaggaagtcttgctaggtttgtctagtgagaccagagacatgtgattttatgtgggatgtgattttacgtgggatggctaagggaaaacgcttttactgcacattcacaggcctaccccgccacgtcatcatgacaattgtggttctctctgtgcccaaatccatgattcaggttttatagctcttaataattgcatcctttcataagacttttccgcagagttactgccagagttaccttttatatatcacatatattaacatggaaatgagatggcattgctgcccaggattcctacagcatagatactaattgacagccgaggaccaaaggcagctcaacttgcattgctgatttcaytgctcatggtagatacagagaaacaaaattctaacttgaattacggcaattgctgggccatgctacaggtcatagaac

SEQ ID NO: 432565 - DNA, 588 bp, Homo sapiens
gaactttcagcttttaggtcacaaatactctgggaatactataggttttcaagattatttttcctttctagctgacattttctttgaatggttgacagaacttatttttttaatcttaaatttagtaaaccataaaawctttaagtctttacatttagtaaactcagctatatctaggaattttataatgcagctaacacccctgaaaatcatgattcatccaaacagtgacatactatacagctattgaaaataataatattgatatgaaagatgtttattatttattgtttttaaccaaaaaaaaaaacaggttacaaaacactatgcatagtatgattccattctgactacattaattcactaaataaactgattgataaattaagcaggcatctgtgcatatgtgtgcttaaaaaagatcctgaaacaaatatcccaaaatcctagcacatataatctataggcaacatgattcaaatgatttttacctcttccttacatcttttattgttctcttaattttttgccataagcatgtctttcttttaagtaatacatcttcactaaaactactcctgttgccat

SEQ ID NO: 432566 - DNA, 589 bp, Homo sapiens
tggtgtttgatcttgattcctttctattgctcatttttatttgaaataagttaagagagcttttctaacatcacagagctgcttcttctgtttgtgtgtttgttttttcatgtagagtttagaaaacatgatggtttgcttcctgagatttcttagctctgtttcctgccacgcttttatttgtagctaactttcctttatctgtattgttcctgtcttgctcctgtttgattccactccctaaaatttctcctcagtttgagtccctgtccatttactctgagtaatctgagaaaccactgaagaatttyaaccaaagaagtgatacaatctaacttatgccttaaaaggatcactctggcctctctgttgaacaaagaatgcaggaaagaagacagaaggaaacagggagatgggttaggaaacaattacagtacctgtactgacagattttatacatgagagaactggggcagatggttaaatcaccttctctagctctccaactgctaagtgatggagacagcattcaaatctaggtattcaactccagaatctggagtaaatatccaccatttgaggatgttca

SEQ ID NO: 432567 - DNA, 567 bp, Homo sapiens
cattcttaaaaaaaagaatttccagctgggcacagtggctcacgcctgtaatcccagcactttgggaggccgagatgagcggatcacaaggtcaggagatcaagaccatcctggctaacatggtaaaaccccgtctctactaaaaatataaaaaaaaaattagccaggcatggtgttgggcacctgtagtcccagctacttgggaggctgaggcaggagaatagtgtgaacctgggaggtggagcttgcagtgagccaagatcgtgccactgtactccagcctgggtgacagagtgagactctgtctcaaaaaaaaaaaraaaaagaaaaaaaaaaagaaatttccagcaaagatttcatatccagctaaactaagcttcataaataaaagagaaataagatcattttcagataagcaaatgctagaagattgtgttaccactagacctgccttacaagaggtcctgaagggaatgctaaacaccagccactacaaaaacacatttaagtacatagaccagtgatactataaagcaaccacacagacatgtcttcataataaccagc

SEQ ID NO: 432568 - DNA, 524 bp, Homo sapiens
taatacatatccacagaacactccacctaaagacaacagaatatacattcttcatatctgtacatggcatatgctctaaaattgaccacacaatcagacataaaacaatcctcagcaaattaaaaaaacaaaacaaaacaaaaaaatcacaccaaccacactctcagaccaccgtgcaataaaaatggaaattgatactaagaaaataactcaaaaccatattccatggaaattaaacaacctgctcctgaatggcttttgggtaaataatgaaatgaaggcaggaatcaagaaattctttgaaactaatgagtacaaagatacaacgtaccagaatctctgggacacagcaaggcagtgttaagagggaagtttgtagcacaaatgccyacatcaaaaagttagaaagatctcaaattaacagcctaacatcactagatgaactagagaggactagaggaactagagaaacaagaacaaaccaaccccaaagctagaagaagaaaagaaataaccaaaatcaa

SEQ ID NO: 432569 - DNA, 443 bp, Homo sapiens
accttatttgaaccacatgtatctcccaaaggaatacctaggcaaagaaaggagaaatgcagctttctaatcagcagcgctgatgaggacagatgctagtttatttttcatacaccccatttttttccatgattttacattgactgtgagcacacatattttatttttcatgctctaattcaggaattatgattttccatattatcaaagcaaaaaaaaaatctctgtgagaaggcaagcaaagcaatgttgtcactgagcwcatcacacaggtgcagatgagaagctgtatccacaggccaaaggggcataaaatagagtgactctgcaaaccaatcaaaaggaccatttccataagcatccatcttattaaatgtatcatcaacaatctacctagggcctctttctgtgggagaagtggggaagataaagattcattttgt

SEQ ID NO: 432570 - DNA, 612 bp, Homo sapiens
tggacagaggccactccttctggggcacaaccctgcccaggaaaccccaaatagaggtttgcttcaataagagctatgtttatctaggaaacattccaagttgtggagaaaaaaaggagaataaaagaaaaagaagaaaccttccatccacagctagagacctgaatattgcccaggaagtcttgctaggtttgtctagtgagaccagagacatgtgattttatgtgggatgtgattttaygtgggatggctaagggaaaacgcttttactgcacattcacaggcctaccccgccacgtcatcatgacaattgtggttctctctgtgcccaaatccatgattcaggttttatagctcttaataattgcatcctttcataagacttttccgcagagttactgccagagttaccttttatatatcacatatattaacatggaaatgagatggcattgctgcccaggattcctacagcatagatactaattgacagccgaggaccaaaggcagctcaacttgcattgctgatttcactgctcatggtagatacagagaaacaaaattctaacttgaattacggcaattgctgggccatgctacaggtcatagaac

SEQ ID NO: 432571 - DNA, 636 bp, Homo sapiens
ctccccatgctccaaggcctccctaacacccagggaggatcgggggtcccctagtggaggctgtcgcctggcactatgcttggtgctttcatctacagctccatccaccccggggaccatcctgagataccctttatcctgagacaccctttatcctgagacacccctttatcctgagacaccctttaccctgagacaccctttatcctgagacacgctttatcctgttctatagctgagagcatcaggaccctggataccatgcaatttgcccgaggtctggggagtggacagccctggactcagacccaaggctgcctgatgccaaagcaagagcttttctcctgtgccaaccctcgytcaataaactcagggaggcaggactgtgtctgtgctgcagtcacgctgctgtggctttgcctgttcgggctcgctggtctggtccctgggaaagcagcttgtaaagggctgaggtgtgagttcagggggtctatggtgcaccacaagctgatccctacatggacagaaatcccctggcagcctctggagcatgggttcctactacccagtcctggacagtggacttggctttgctgagtgttcagaaggattcaagccccaaagtcttccccatca

SEQ ID NO: 432572 - DNA, 592 bp, Homo sapiens
gtaataaacaggtctttgtttgcctgcccaactctccctttgcctttttctataacagtaaaatcactgttcttggggtcagccttcctctacataatgtctgcctacagtggctggagttgacctcactccagttctgggggtagtaagctactggccaaaaccaatcaggtacccagtctcctcggccccaaagattgactcagggatgggcaagttggccccgtctgtgccatgtggggcaggcccaggggttctgtaggaataattggcagggagaacctctttctggatatttgagggtggaagcctggacttgttgacagacctttagtcaccatgagatggggtctgcctgggaacaaaataaactggaggagagtggggcagagagatgatgagagaaagaaaaagagagaggagaggggagaagaggagctggaattaggagaggaaaaagagagagaaggggacagaagagacaaaagggagacactggaccctgaattgtggagagtccaggcatgtgggycatcaccctacctcttcttgcttgagtcagtttgagttggtgttcgttattggtaaccaa

SEQ ID NO: 432573 - DNA, 596 bp, Homo sapiens
gaacagaaagtattctccttgacagccctaagcaccactctctgctgtaatatttcctgttttggtacaattggtaaagttattctttttctctcyctccctcggtttcctgtctctctctgcatctgtggtttatgcttgtgcacatggagagccatttctcttttactgaccatttggctttcgggagcatttctgctgtttttccatgtccatttgttttctcctttgtgtcagaaggacccgatgtccaactccagaagtcaaacattatgaagaactagtgaaatattttttaagaagaaaaatggcaaaaatgaaaaagccccttcctctcattgtcctccaacctgagactgtaattcaagtcctgaaacagtaccatcaccccaggctagcatggaagagttagcatacaggagtgcctgagagtcctgaaatttcctccgagcattctgggctcaggatcatgcaaatggaagtctccaaaaggtggaggggggcctttagtaagggtctttcctggggaagacctgagggtcagctatttagaggtctggggatggcagagttacttcttcctggaccttgtttcc

SEQ ID NO: 432574 - DNA, 596 bp, Homo sapiens
cagcaacacatttgctacattattactgtacctggtgtttaatattgaaaggtcagtatggccaggcaacgtatcagagccctggcatcagaaatgaattgactcacaggtagtaagaagaatttactgacaacagtgtgggtttgaaaggaaagtttcattagatagaaagckctgtagcagcatgcagcagagcacttcagcaagacaggactgagtgtgccgtggtggattttcctttgggctatttatgaaccttaaagcgggaacttcagggtaatttggaccatattagccacataggtcatgataaatgcttacacttgtagttgctttggtaccttaatgtcagcaagggttgacatgcatgcattctggagatgtatagaaattctagttacttctaaattttggggaaagaagcctggagccattagctaaagcaggcatttagctaataggaaagtctaattacttctgaattcatcagataaggaactttgccctggatggtctgcttgatggccaccagggggtcttggatctcctcaactaggaaggaaggtgggtgactagtatgttgtaaaaataattcg

SEQ ID NO: 432575 - DNA, 596 bp, Homo sapiens
cagcaacacatttgctacattattactgtacctggtgtttaatattgaaaggtcagtatggccaggcaacgtatcagagccctggcatcagaaatgaattgactcacaggtagtaagaagaatttactgacaacagtgtgggtttgaaaggaaagtttcattagatagaaagcgctgtagcagcatgcagcagagcacttcagcaagacaggactgagtgtgccgtggtggattttcctttgggctatttatgaaccttaaagcgggaacttcagggtaatttggaccatattagccacataggtcatgataaatgcttacacttgtagttgctttggtaccttaatgtcagcaagggttgacatgcatgcattctggagatgtatagaaattctagttacttctaaattttggggaaagaagcctggagccattagctaaagcaggcatttagctaataggaaagtctaattacttctgaattcatcagataaggarctttgccctggatggtctgcttgatggccaccagggggtcttggatctcctcaactaggaaggaaggtgggtgactagtatgttgtaaaaataattcg

SEQ ID NO: 432576 - DNA, 527 bp, Homo sapiens
catttagctaataggaaagtctaattacttctgaattcatcagataaggaactttgccctggatggtctgcttgatggccaccagggggtcttggatctcctcaactaggaaggaaggtgggtgactagtatgttgtaaaaataattcragtaaatttcctatggtcaaggctggttattatcagcattagggtagtttaatcagtaccccctgcccaataagtaaactgtcaccttacctcacttataccttcctccctctccccatgatgtaggataatctctataggattgtggattactttcctggggtacctgtaacaaattcccacaaactggcttaaaaccacataaatttattctctcgtagttctgaggtcagaagtctgagatcaaggtactggcaggccatgctttttgtggaagctctaggagaatccttccctgcctcttctagtgtctcatggctcaggtgtcctttggccgcttcacttcagtctccgcctctgtcttcacacagccttcct

SEQ ID NO: 432577 - DNA, 499 bp, Homo sapiens
accagggggtcttggatctcctcaactaggaaggaaggtgggtgactagtatgttgtaaaaataattcgagtaaatttcctatggtcaaggctggttattatcagcattagggtagtttaatcagtaccccctgcccaataagtaaactgtcaccttacctcacttataccttcctccctctccccatgatgtaggataatctctataggattgtggattactttcctggggtacctgtaacaaattcccacaaactggcttaaaaccacataaatttattctctcgtagttctgaggtcagaagtctgagatcaaggtactggcaggccatgctttttgtggaagctctaggagaatccttccctgccycttctagtgtctcatggctcaggtgtcctttggccgcttcacttcagtctccgcctctgtcttcacacagccttcctctcttttcagtgttttgtcttctgtctcttataaggacactgccgctgaatt

SEQ ID NO: 432578 - DNA, 635 bp, Homo sapiens
tgagtgtgatggttagtttcacgcgtcaaattcattggatcgtgaggtgcacagatagctggttaaacatgatttctgggtgtgtctgtgagggtgtttctggaagagattagcattcgaagaggtggactgagtagagcacatgaccctgcctcatgtgggtgggcaccatccaagttcttgagggcctgaaaagaacagaaaggggcaggaaggttgaactcctctgcctggctgcttgagctggaacaccattctcctgctgccctcggcactgctggccctgaggccttcagatctggactggaatctacaccatgggttttcagccctcaggtcttagaactacgccactagctttcctgtatctccagcttgcaaacagcagatgatgggacttttcagcctccrtactcgtgggagccaataccttataataaatctctttctagatatctctccatctctatctctatgtctatctctatcttatctctatttccatctctatctatctatctctatttccatttctatctctatctctatctctatctctatctctatctctatctctatctctaactctatccacattctattggttctgtttctctagagaactctgaataaca

SEQ ID NO: 432579 - DNA, 521 bp, Homo sapiens
gacggggttttgccatgttggccaggctggtcttgaactcatgatctcaaatgatgcacctgcctctgcctcccaaagcgctgggattacaggtgtgaaccatgccttgccatcattgaatgtttagagagatttagttttagaaaaaagtgatgctttaaacaaagcccaacacttcaagtgcatgaagaatgcattaacagcctggacactgggctgttggagtattcctactccactgatcttgsgggggatgttgaatccagggctgtgagagctgatgctgttttggggcactctggctggaggtaaaagccagggtatttcatgggattgaaaagtgaacaagtgggagaggagcagtcccaccttcactcagtctgtcgtgagacctgcctaagcggtgatagatgctgagggctgccatcctctcattttgggtcacttccggcaactttgccatactggcctgaaagtacctgttactgttttcagagtggatttgaggatgtgtgaggaat

SEQ ID NO: 432580 - DNA, 334 bp, Homo sapiens
catttatttatttatttagttttttgtctttatattcattttccaccttctttcttccctcattgtttgaataatcttaagccatttgttctggtagggctgagtttgaaagttttaagagcttcaaagatatgaggtttgtacttcattcttttcrctgtgtccccacccaaacctcatctgaaattgtaatctccctgtgcagagggaggcacctggtgggaggtgattggatcacgggggtggtttcccccatggtgttctcatgatagtgagtgagtattcacaggatctgatgagtttataggtgcttgggagttcctccttcactcgc

SEQ ID NO: 432581 - DNA, 539 bp, Homo sapiens
tatagcagtgtgagaatggactaatatagagaccgtgtctcaaagaccccaaaacaaaacaacaacagcaaaactatcctcaaggctgactccagagtcttcatggtrtgcatactccactttgaagcttgctggtacaggcaacgtgagttcaggctgagtagaccatagtgggtatggggagtgggagaaggtttgccaggcaactgggttttgtggagacccacgtatgagaggtccaatttggacagcagggatggggagagacatgggctttagaatgagagctcaattcaaatcctggcctcatctaatgggtgcagaatcttggaaagttattcactttaataggcttctgtttctcactgcaaagtggggataaaaatgatatttgcaactttaggctctttgcaagatcccacagagacaatgaaagacaaggtttcaggctagcatagtcttcagggcaagagtggtccctgtgcccagcaatgtcctcccacttccagggttggagctacattggggtgaggagtctg

SEQ ID NO: 432582 - DNA, 539 bp, Homo sapiens
tatagcagtgtgagaatggactaatatagagaccgtgtctcaaagaccccaaaacaaaacaacaacagcaaaactatcctcaaggctgactccagagtcttcatggtatgcatactccactttgaagcttgctggtacaggcaacgtgagttcaggctgagtagaccatagtgggtatggggagtgggagaaggtttgccaggcaactgggttttgtggagacccacgtatgagaggtccaatttggacagcagggatggggagagacatgggctttagaatgagagctcaattcaaatcctggcctcatctaatgggtgcagaatcttggaaagttaytcactttaataggcttctgtttctcactgcaaagtggggataaaaatgatatttgcaactttaggctctttgcaagatcccacagagacaatgaaagacaaggtttcaggctagcatagtcttcagggcaagagtggtccctgtgcccagcaatgtcctcccacttccagggttggagctacattggggtgaggagtctg

SEQ ID NO: 432583 - DNA, 516 bp, Homo sapiens
aatggggatagtaattctggagccactgcagataatttgcaaggtagaccatccaattataggttattaggagacacaccaagattctttagaaagtagcttgatattgccttatggccataaacaattgaatatgaattaaaatagacctgarataacttggctgctaatttctgccattatttatgtttcccagaactttcatcctgtcatacattcaacttcagcatccttggatacaggagttgcagatgtcagaatgtattttacagttaattgtaccttgtttggaactgtattggcatttttttcaacgctattcatgtggcattgagactcattaagactttatagtagtaaatggaatgaattcgccctataaaacttcaacaatagctcacccttatttctgtttttttccacccacaacaatgttttaaaaagagaaatagcttttttttttagcataaatatatctcccagacatattgaaaacctttaaacatttacaaaaaa

SEQ ID NO: 432584 - DNA, 521 bp, Homo sapiens
tgttggccttggaggactttttctcaacaggtcaggttgcctggcccagctacttatatatgattttgaaagcaaaacctttccagaaacctgcctgccaagctcctggcatctgctctccctcctcaagcccatttcccattatcctggtcagtctaaccaggaagctattgattatttttattcctgaacatatgaggctcttgtgratagtagacacaattagaaccctgcaaagagggacattgtgactctgtttcctgagggggtaacccagcttgagtgagagaacgcctccaaagagctgggcaggtacagcataccaaacgacatgttccctgacccatggaatgtccagagttcaaaaaacaaatcattattctttcataagctcaaatgctcaatccacccactacatactgcagtgaaattgcctcaaggctataaattgttgaaattaattggttaaggtaatccccataaccacttatgaaccacgttctcattgaggaaataaaagg

SEQ ID NO: 432585 - DNA, 505 bp, Homo sapiens
ccctcctgggcttcctgtgtatgtggccatttcataccatcattctctgtcctctttctcatggcatccgtgaccacttgctatggcatgtctttgcttactgcctatctatctccttcaaccacagtataaactgtgagagtagagaatttgcccattttattctctgtgtcttcagcacatagaactgtacctggcacacagtagagacttaatgaacctctagcatccttggagggcagacgtgtctccaacattgttctggttatgaagagtttccttggcamccccagtcagcaacagaaaggatggaattctttcaccaggacatgcttgttctacccaacaagataagaaattccatgtgctcttcacagtggggcttgacatctagtctatcctgccatttcccaaaggacggcatctggggagcaaatgagatggtgggaggtgttacttggaaaagatcaattgcaatagttattccttttaatgtgcatcagct

SEQ ID NO: 432586 - DNA, 645 bp, Homo sapiens
ctgtttaatttccttaagtgagcatttctctaaaagattttttgagcatagaagaacttttaacaccatggcacagctattaacatcatatggtattagattctgcaaaaaaatttagagattgctgtgttagaattcccatgggagcatggatcacatatcatcaattcatttgttcacctatccaagtgtccatctgcccaaccatcaagcattccacccaacatatatttcatgcagcttgtgatgtgtctggcactagagacttagagctgagtgagatgagctccctgccacatggtgcttacattcaggtggaaatgatatgcaatacagatttaatgtttgcgggtagaccacaaggtcaggagttcaagaccagcttggcccagatgatgaaaccctgcctctactaaaaatacaaaaaattagccaggygtgatggcaggtgcttgtaatcccagctacttgggaggctgaagcagggaattgcttgaacctgggaggcaaagtttgcagtgagccgagattgcaccactgcactccagcctgagcagcagagcaacactccataaaaaaacaaaaaacaaaaaacaaaaaaagaattatatatatatgcacatattttaactaatctagatccat

SEQ ID NO: 432587 - DNA, 561 bp, Homo sapiens
ttggttgtagtggccaactgcagccaaaaagtcccagtaatacaagcagctgtctagttacagggaaggaagacacagaaagaaacattactaagcatgatatgctacaagcattatctcaggtaatccttatattcctgagaattaggtttctttttctcctttgtactatacaaaaacaggaatgacaggccctgggtcacagggctcatcgccataaggctaagagtcaaactcaaatttgactgcttcaaaacattcacagaaaaacarcaacaacaacaacaaaaaactgatacatgtgatagtaagagttaaaaggatcatgggtctttggcagcaaaaggcagaattattcactcattcatttgtccattcagtcattcattccacaaagatatatgacattgaacatctgccatgggcaagacagtgctagatataagacccgaatatgaaagtctatcaagagagacatagagcagagaattgtctaacagtgcagaaataacaggctcaaggaagtggagaaagcgggtttaatgtctcgcagtagaaagt

SEQ ID NO: 432588 - DNA, 635 bp, Homo sapiens
tctttagctaattgcagttatgtttttattatactaaagtaatacaaggtcagtatgaaaagtacacagaaaccttaaaaaatatatttccaacattttgccttgtgtatgtgtgtacatatatatacaggtatatatgtgtgtttgtgtatatatatgtatacgtatatacacacacacgcgcacttaaaaacaaaagaaagtagtgtcataaaatgaccctatgggcagtaatacttttatcatgttttacagatgaagatrtttgggcttagggtagggacattgaataacttgcccaagatcacacaggttacaagtaacagagctgggatctgaactcaggtttatctgacttcaaagtctgtgtccctggtaactatgtaatcctgttgccctttctgtgtcaacaaacagattcatcccattttttaaataatgccagacaattacctggtataaatgtgccattaaaaacaatctcacttggtagcttttcagatgaactgaaaaggtgaatgtttggtagcttctgtttctgtattttgtttgaaaagtcatgatgttctgataccaagggttcttcatggttcaaggtacctcaactgctgctgaaaaacagagcactgtgttca

SEQ ID NO: 432589 - DNA, 597 bp, Homo sapiens
atctatatatggatgttatatccatatatctatatatgttatagatattatatctgtatatggatgttacctttttgatagttattttaaattttctcatggttagattcaggctttccatttctatttgcgatactatgtagtaatgttgtaaccatcttagattgtcccatctgtagatacactatgtccacctgcacctcactagagatgttaacttttatcacctaggtaacttctccactgaacagagactgtttttcttgtattaaagaagcaatttgtatacagacactataagatcactcatatatagtgtttctcatcaaaattttcccctagagttggcattctttaatgatttttgtctgaattaatcaatgatttctacaaatctgccacttcctgcacatttaccagttggcagttaacatccttctgtaaataagaacctccctgtgttagtttgtttttgcattgctataaagaaatacctgagggtgggcaatgtataaagaaaataagtttaaytggctcatttttccgtagtctgtacaggaagcatggtgctggcatttgcttctggcgagggcttca

SEQ ID NO: 432590 - DNA, 439 bp, Homo sapiens
tgtccccagctcccattggctccatggagtgtgcagctctggtaaagaagaggctgctgatagcagggagaagccaggcagcaggagcaggcacttttgagctccccaggcccccaagagcacagagacattcaggtcttgagccatgccagggcagctgcagcaacaaccagaaaggatggggcttctgcctgctccatggagagggaggcccagccgtgcctccccactgcagttggtgtcttggcagtggccactctagatgggccgctactgccatcattyccccttctaaagaggtacatctaactgctgttaggatagggatgatggttgctcttaactgcttcatgctgacagggggcattgttttggggaaagcagcagtcagttctctctcagaggcttatctaagagttcccagtaaaaaaggagccat

SEQ ID NO: 432591 - DNA, 439 bp, Homo sapiens
tgtccccagctcccattggctccatggagtgtgcagctctggtaaagaagaggctgctgatagcagggagaagccaggcagcaggagcaggcacttttgagctccccaggcccccaagagcacagagacattcaggtcttgagccatgccagggcagctgcagcaacaaccagaaaggatggggcttctgcctgctccatggagagggaggcccagccgtgcctccccactgcagttggtgtcttggcagtggccactctagatgggccgctactgccatcatttccccttctaaagaggtacatctaactgctgttaggatagggatgatkgttgctcttaactgcttcatgctgacagggggcattgttttggggaaagcagcagtcagttctctctcagaggcttatctaagagttcccagtaaaaaaggagccat

SEQ ID NO: 432592 - DNA, 447 bp, Homo sapiens
tgagggagagggatgagtgagtaaggttggacaatgaattcctctggctgcctccttgtgtccccatagctcttttgaaatttgccttctctaacatctctctcctttcagctttaactgtttgttctttatctccttgggctcagtgccttgagttactgccatgtctcttgtggttcccctatgatgcaggatattttgctccttagctaagtccaggttatagtctcacgaccggaaagaattaggcacgtggtcatcaaagagtgagtggagtacaattcattaaggaaagctctcagttaagagaggggccctggaaagcaggttgctgattaccccctcacagttgaatacaagggcatatgcatatatmtaatgctgacggggctgggttccctatttgtataaggcgcagattcttggtgatgtcaccccattccccca

SEQ ID NO: 432593 - DNA, 607 bp, Homo sapiens
ttaaggaaagctctcagttaagagaggggccctggaaagcaggttgctgattaccccctcacagttgaatacaagggcatatgcatatatctaatgctgacggggctgggttccctatttgtataaggcgcagattcttggtgatgtcaccccattcccccagtgcacctgcagacccttagtctgttgtgagcatgttcaggcgagccccctgtgcaagttcccttatcygcacaaaacatctgcacaagtgtaagcacttgctgggtgggttagaggttccccagggacccaagttggctaactcctttcacctacacctacactttgtaaataatatctttgtgaataaattctatttgaattagcttaatttaaaaggcccttctgtttcctgctggggtcctgactcagttgcaaataataaacccccatcctagccctaatgtgcagtgagatgcatgttaccaaagcaggattctctatattcaatgcattcatagggtttcttttctgtgtgaaatccatggtggtgtgtaatgagggatgaattacagctaaagatttctccatgttgattacacccgtgaggacttattgcagtatg

SEQ ID NO: 432594 - DNA, 508 bp, Homo sapiens
gatgcatgttaccaaagcaggattctctatattcaatgcattcatagggtttcttttctgtgtgaaatccatggtggtgtgtaatgagggatgaattacagctaaagatttctccatgttgattacacccrtgaggacttattgcagtatgaattttctgatgtacaatgacgtgtgttatttttgaaaacaaaagtttcccacatgatgacattcataaggtttctcccatgtttgaattttatggcacttaatgagatgtgatttctggctataggcttccccactttgcctgcatttgtagggcctcttgctctggtaaagttttctttcttgcataagagttatgctctcattaatctcttttctcagattcattacttccataatgcttgtctccactgtgaattctaaaacatgtgatgaagtttgacttttgacctaaggctttcacataatcattacattcagagttttggataattactttcaacactggataagccat

SEQ ID NO: 432595 - DNA, 508 bp, Homo sapiens
gatgcatgttaccaaagcaggattctctatattcaatgcattcatagggtttcttttctgtgtgaaatccatggtggtgtgtaatgagggatgaattacagctaaagatttctccatgttgattacacccgtgaggacttattgcagtatgaattttctgatgtacaatgacgtgtgttatttttgaaaacaaaagtttcccacatgatgacattcataaggtttctcccatgtttgaattttatggcactyaatgagatgtgatttctggctataggcttccccactttgcctgcatttgtagggcctcttgctctggtaaagttttctttcttgcataagagttatgctctcattaatctcttttctcagattcattacttccataatgcttgtctccactgtgaattctaaaacatgtgatgaagtttgacttttgacctaaggctttcacataatcattacattcagagttttggataattactttcaacactggataagccat

SEQ ID NO: 432596 - DNA, 552 bp, Homo sapiens
ttgaactattccccttccctcaggtggaatccatagctacatttgtgattgtagctgatgcctggtacttgattctttcaaagtcttcttgggaaagagcagaatccagtaaaagtggagctggctcatccaacattggttaaacactctgtcattacacaggttcttaggctcttgggaggtggagacaccatggaaatcttctttaccttgggtgcaatgatcaaggacagattcaggcctccaaaccttctgagactcttggttctgccctgaagtcttgctgcaagtctccaggctgaaggttctcctttctagaaagagtgctgctcctgacctcggaagagtcatttgtgtgtgtgtgtgtgtgttgagctgggactaccacctgcttcagaccctgagcccagaggagttttcctgcagccactctacagcccaccctgggcacatgccatgcagtggcacatgccgtttgcctgcagcaaagccagacttcaagtggccgytgggtgtactcgctatcttctaacttattgcaggtgaatatgt

SEQ ID NO: 432597 - DNA, 558 bp, Homo sapiens
gtgtgtccatcttatcaaaattgctcttggatattaggcacacattttagactttgaggtttggttattttctaaacacatgctagtgtttcctttattaaatggtgtacactttcaaatcctttgaaaatgtgtttttatgatgaaatgayggcgatcttccccccaccctcacccccattttactcctcgcatcagaaacagctcaggctttgggctcagacctgggcgtgcctcttggctttgctgctttctagctgtgtgaccctggctaagttacctgcctctctgagcctcagtatcagcaccaacaaaatgaagaagatttctgtgtgtgtggtttttttttttgaagattaaataaaatgaaaagagaaaatggcatgatggactcgaacggtgcaaattgagatctctgcagatagttttcagcgcacagtgtctggcacctgaggcatgaagaggatttaaataaacatgaaattaaataagtttgtcaatttaaagcaactggaatggtgcttggtgtacggtggcctcccagcacatattaattct

SEQ ID NO: 432598 - DNA, 609 bp, Homo sapiens
tatcatttcactacgcagatgaagcagggcctgaataagtatcccctctccatgcygttttttgctcaagtttgagatgagattttgttgcctgcagtggaaagagccttgactctgcttgtgtctggaataaataggggtcatcagaatttgatttaaaagtggcatgctgtctcttgttcctcagtgttgtggaggaagttcttacctgcacaagtgtttctggctgagctttagaacacagaaaacaatctgtttgcctctgcactaaatctttgcttcctttttagttcccccttagcaaagtgatctgagattgggagaaaagtcttggttaacataaaacgtgcttgataaggagttcttatcatcttcagagtctgtttacctgcccagtgtcagctggtaagtacaagaaccattcctgttacagatggggaaactgaggcacagaaatgctaaacgattgggttaaagagacacagtgaagagatcaatccatctgtagctttctgttccctttccctgcaaactttcactttaagaagaatccaaactatgcttgtccaaggggtgtcgctttacctgccctgtagactttgtgaggac

SEQ ID NO: 432599 - DNA, 609 bp, Homo sapiens
tatcatttcactacgcagatgaagcagggcctgaataagtatcccctctccatgctgttttttgctcaagtttgagatgagattttgttgcctgcagtggaaagagccttgactctgcttgtgtctggaataaataggggtcatcagaatttgatttaaaagtggcatgctgtctcttgttcctcagtgttgtggaggaagttcttayctgcacaagtgtttctggctgagctttagaacacagaaaacaatctgtttgcctctgcactaaatctttgcttcctttttagttcccccttagcaaagtgatctgagattgggagaaaagtcttggttaacataaaacgtgcttgataaggagttcttatcatcttcagagtctgtttacctgcccagtgtcagctggtaagtacaagaaccattcctgttacagatggggaaactgaggcacagaaatgctaaacgattgggttaaagagacacagtgaagagatcaatccatctgtagctttctgttccctttccctgcaaactttcactttaagaagaatccaaactatgcttgtccaaggggtgtcgctttacctgccctgtagactttgtgaggac

SEQ ID NO: 432600 - DNA, 609 bp, Homo sapiens
tatcatttcactacgcagatgaagcagggcctgaataagtatcccctctccatgctgttttttgctcaagtttgagatgagattttgttgcctgcagtggaaagagccttgactctgcttgtgtctggaataaataggggtcatcagaatttgatttaaaagtggcatgctgtctcttgttcctcagtgttgtggaggaagttcttacctgcacaagtgtttctggctgagctttagaacacagaaaacaatctgtttgcctctgcactaaatctttgcttcctttttrgttcccccttagcaaagtgatctgagattgggagaaaagtcttggttaacataaaacgtgcttgataaggagttcttatcatcttcagagtctgtttacctgcccagtgtcagctggtaagtacaagaaccattcctgttacagatggggaaactgaggcacagaaatgctaaacgattgggttaaagagacacagtgaagagatcaatccatctgtagctttctgttccctttccctgcaaactttcactttaagaagaatccaaactatgcttgtccaaggggtgtcgctttacctgccctgtagactttgtgaggac

SEQ ID NO: 432601 - DNA, 340 bp, Homo sapiens
ttttaaaaataatccctccatctggtgtgcacttccctccaattaaatcaaatgctctgagggataggacctagaatcactatgtttaaagttttgcagttgcctccaaatttgagaaccacktctctcagtggtgctagttcacctagagccagtgcaagtagtgctgggcgccttgactcaccctcacttgccatcctctcttcccattgctccatgcctttcttgcttgatagctcatttttcctctttttggagttttctggtgggattttgtattgatggaatcatctcagagatgggtgactcagagggtggactgtttgctggtgattcatgc

SEQ ID NO: 432602 - DNA, 541 bp, Homo sapiens
tggtgcatgtctgtgatcccaacaactcaggaggctgaagttggaggatcactggagtccatggggttgaggctgcagtaagctgtgaccataccactgcactccttgggcaacagagcgagaccatgtctcaaaacaaagttgagatcctttattgagatgggaaatctttaattatctttttttctggatacaaggccatggttgctcaagtgcttcaaggaatggtagataggaaaatgttgatagtaagttcttgaacacctgggaaattccaagagtatatgttaggaatgcatttagcggcaaagagaaggcagactacagagggttgaactagtgggtattattttctcccatatgaagtccagaggtagaagtccagacccagtgctgtcagagacctgggattgytctccctttctgctccacaatttccagaatctttgttttgttataacatttgtcacctcctaattgcaatgtggctgctatacctccaagcataaattccgtgtaccaggtagaaagaagaaagaga

SEQ ID NO: 432603 - DNA, 577 bp, Homo sapiens
  misc_feature (1)...(577): n = A,T,C or G
gccatatgaatgagcctcaaaagcatgacataggtggaagaagtcagacataaaagacaacatacagtatgccactacttctaaaaaatatccagagaagacaaatctatggggacaagcagattagtagtggcctgggattagaggtggaaatgggaataactataaacaggcattagggattttattgggatgatgaaaatgttagaaaactggataatggtgatgttgctcaactcagcaagtttactaaaaatcactcatttgtatcctaaaaatgggtaaagtctatggtatgcaaatatacccgtaataaagtcgttaaaacaagtaactgtgattgtattccytgtgtctttaacatattatagtcacataaagaatgaataatgaatatgctaaatagattgatttagccatcccacaatgtatatgtatatcaacacgttatataccataantataagcaattttcacttgtcagttaaaagtaagaaaanaatgaaaaaaaaaaaaagaatcaccaatgatgtatcctttcacaatgttgactagaatgacatcctttctgaaagca

SEQ ID NO: 432604 - DNA, 541 bp, Homo sapiens
aaaaaattccattttagccctctatagttgtatttctcttatcagtcacaaaactgggtgcccttgatctccctcaactctgttacaggaagggagtcttgatccagacccccagagagggttcttggatctygtgcaagaaagaattcagggcgagtccatagagtaaagtgaaagcaagtttattaggaaagtaaaggaataaagaatggctgcttcatagacagagcagccccgagggctgctggttgtgcatttttatggttacttcttgatgatatgctaaacaaggggtgaattattcatgcctcccctttttagaccatatagggtaacttcctgacgttgccatggcatttgtgaactgtcatggtgctggtgggagtgtagcagtgaggacgaccagaggtcactctcgtgaccatcttggttttggtgggttttggctggcttctttactgcaacctgctttatcagcaaggtgtttatgagctgtatcttgtgctgacctcctatctcctcctgtgacttagactgcctt

SEQ ID NO: 432605 - DNA, 482 bp, Homo sapiens
gggagctgaacatacggatacattggttctttggaaaggatctcagaactcattgtacttaacaatttagaagctaaaacctttgaagaggaatttattatatcctacagacccaagaggcggaggaggttgcagtgagccgagattgcaccattgcactccagcctgggcaaccgagtgagactttgtctcaaaaaacaaaaaacaaaaaaaaaaaaagaaagaaagaaagtaaagaaacaaaagaatggctactccataggcagagcagccccaagggctgctggttgactattttttatggtgatttcttgattatatgctaaacaaggggtggattattcatgakttttctgggaaaggagaggagatttcctggaactgagggttcatctcccgtttacatcacatagggtaactttcagacattgccagggcatttgtaaactctcatggtgctggtgggagtgtctttcagaagc

SEQ ID NO: 432606 - DNA, 587 bp, Homo sapiens
ttctatttctttttaaagccaccattgtcttgtcaatgagaagagtcaaactctgtaaaatatttgaagagatttattctgagccaaatatgaatgaccatggcccatgacacagccctcrggagatcctgggaaccagtgcctaaggtggttgggttacagcttggttttatatatttcagggagacatgagacatcaatcaaatacacttaagaagtacattggtttcattcagaaaggcgggacaactcaaagcgggggcttccaggctgtaggtaaatttaaacattttctggctaacaattggttgaatttatctgaagacctgggataaaaggaaatgtttaggttaagataaaggattgtggagaccaagttttattatgcagaggaaactcagatagtcagccttcagagagagagagagcaggttgtaaaatgtttcttatcagacctaaaagggtacctggctcttagttgattatctcctggatctggaaaggaaggaaaacaaaggggaaaggggattctctatagactgtgaatttttcccacaagagactttgcagggcaatttcgaggtatg

SEQ ID NO: 432607 - DNA, 571 bp, Homo sapiens
aaagtaagccatgatatatggggttaaataaaacccatctgatgagaatttatggtttgtagggaataactccctcgagttcctagataggaatttgggcaagataaaaaaaaatcagagcttagtcctcagtcttcagaaaaatgtcatcctaactgatgcctagaccaagagaatgcagccacagctttcatcttgatttctgtacttgagaatatgttttcttccatggaaactcttctaaattcataaagtggacttcacagaggcttgagagtgttgcccaagaaaagtgcctttgagatgacagagaatggggagatttttagcttaatgaatagtaggcactcaaaaatgtgctaagtcagtgcatgatgtaggatgctgcaaataaacatttattgagcatctgccataagccagggactctgcgaggctcaggccagaggggtcamgaacagaaaagtaaattctgggtcagtggccttaagaacactgagataaatgggagagaagagcttgtaagcaaagaatcacaacttgggatgatgagcatggcaggatgttttga

SEQ ID NO: 432608 - DNA, 567 bp, Homo sapiens
ggtgtcatgagtctttgcctgcagatcaaagtaacagtgaacatttatgcatttattgaagcattagccagatattttcggtggatgactaaggtgatcttagaagaaaaagtcaaaattaataatattcaagtagaagttccaaaataaaatytacctgaaaacttcagaatcttctttattttttgagagagaatttgagtgtagaattggactttgccaaaatttattttagaaagatgatatttgtctattgtaaataaaagtggggaagtgaaaataggaggggaaaatatgaaaatggtacatgtagacataacaatacagttttgcattcctagagagtttataaataactcatttctaaatgtatcagtatacagaaaatatattgtctaaattcattcttttttggtctttcgtgatgataagcccagatttttcttgcctactattttaaaagtgatttactaataagttcattttttttggtaattgcttaattatagcattattgtatttttagtgctcataaatgcaatcaaatctttttgcatttgtgttcca

SEQ ID NO: 432609 - DNA, 567 bp, Homo sapiens
ggtgtcatgagtctttgcctgcagatcaaagtaacagtgaacatttatgcatttattgaagcattagccagatattttcggtggatgactaaggtgatcttagaagaaaaagtcaaaattaataatattcaagtagaagttccaaaataaaatttacctgaaaacttcagaatcttctttattttttgagagagaatttgagtgtagaattggactttgccaaaatttattttagaaagatgatatttgtctattgtaaataaaagtggggaagtgaaaataggaggggaaaatatgaaaatggtacatgtagacataacaatacagttttgcattcctagagagtttataaataactcatttctaaatgtatcagtatacagaaaatatattgkctaaattcattcttttttggtctttcgtgatgataagcccagatttttcttgcctactattttaaaagtgatttactaataagttcattttttttggtaattgcttaattatagcattattgtatttttagtgctcataaatgcaatcaaatctttttgcatttgtgttcca

SEQ ID NO: 432610 - DNA, 549 bp, Homo sapiens
atttacatgtcaacaagcgaataacaagataatgtattttttaaactttagacaatatgactgatttctgaaactcacagtttaatctgcatgaacatatattactgtacttatttatttttttggacacaaggtctcactctgtcgcccaaggtagagtgtgtgcagtggcatgatttcagatcactgcagcatctacctcctgggctcaagcaattctcccaccttaccctcctgagtaactgggactaacaggtttccatctccatgcctggttaatttttgtaattttttttgtgtagagatgaagtttcaccatgttgcccaggcsagtctcgaactcttgagcttaagcaatctggccacctcagcctcctaaaatactaggataacaggtgtgagccaccataccaggctggaaatttttggagtaatctgcacttgaaaaatatttattagtattttaatgattatgtcaataattgcaatcatcaagatcaagctaattatattaacataacttataaattcagttaatatttaacatat

SEQ ID NO: 432611 - DNA, 495 bp, Homo sapiens
tattatggctagcacttccagtactattttgaatagatgtagtgagaatgggtatccttgtcttgttccagatatcaaggggaatgcttctagttsttgctcattcagtgtaatgttgaccgtgggtctgacatatatgattcttcttatcttacggtatgttccttcagtacctggtttgttgagggtttctatcatgaaggaacgctggatcttattgaaagctttttctgcttctattgagatgaacatatgatttttgcctttgattctcttcatgtggtgaatcacatttattgatttgcatatgttgaaccaaacttgctttccaagaatgaagcctatgtgatcatggtgatttaactttttgatgttttgttaaattcagtttgctcgaattttgttaaagatttttgcatctatgcttatcagggatcagggatattggcctgtagttttctatttttgtttttttctatgccaagttttggtata

SEQ ID NO: 432612 - DNA, 620 bp, Homo sapiens
aacacctaattaatgttttctagaaaattacaatctcttaaatggtaatatctacataattcagctattaatcttttacccagtgcagagaattaaacaccttataagcatgtaagcattgtatgaactattgagcacayagagtctaaaaattgaaggtaaaaattcagatttcttggtgataatttcttgatatttctaataagtctgagtttcggaagaactctcaatttaattgggccctttctttaagtggagatatttaaagttaaatgttgagcttctgaatagaaaatgcttttaaagcaaaatggcctttattctttctttgctatgacagaaaccatcttcttaaaaaactgaacacaaatgtaatgtgatatttgtacatcatggcaggagaagcctaaagttttagaattacttaagttctatgtattatcggacaccatgacatcatgttattagtggaaatgatgtgttcctagtggtataattgagggatttcatttttgcaagataatgcaactgcctcaatgacctatttcattataacctgacaatttgaagtgttaaaaatttgagaattttgcctaggtcctaatggctatagcatatat

SEQ ID NO: 432613 - DNA, 634 bp, Homo sapiens
cagtgcatatatatatatatatgcttataagcttagggcaagagcaagctgaattcccctctggaggcaataaaagaccaatgacagattaagagaaagatttacaagtattgatatttggaggccattccccagtcttctacatttaatttcattcattcacaattcctaccaggctcacagaacttccagagagtacattaatgcctcatagtttactatgraagtacaactaagaattgtgacacatttgaggaagtaaatatcaaataaaagtggacataaataaaacagatacaaagtagaaggcagaagaaatttaattctaacagcaagaataacaataaacaatcagataacagaaaaggtgtttttaattgaaatttgctagaatataaaaatacataaatagtgaaaaaccattttggaaaatcatcaagaaagcaaaatgaaatagagagttatataaattaataaaataataaattattacaaaacctgatgatcaattgttggaaagcctggtggggaggaaattgtgaaataaatgatgtaagaataattttcaaagttgagagacatgaaatgttcaattcaaagagcacactgagtacctggataaagaattttaaaa

SEQ ID NO: 432614 - DNA, 654 bp, Homo sapiens
tggaatagggaaaaaagcttcaaagttactcttggagagctaatgtgttcatgagtattgaatagagaaagcatttactgcatggactgaatagaatattgaaataatctttataaatttttgcctgaaacactactgattcattttattttgcttttcagagttaagaaaacttttttttgttttgagcaatttagagtttttaacaattgaataaagtatactcttgtaaacaacattgaaaagtttctctttacctgatttatccagaatttgaaaactatttgtaagtactctaaatttatagcaatatcattatttgcataagttcaacgaggctttgactggaatggcatgttttcagatatgagtagactgctttaaagaattgaggttgacatatagagctaataataaccaactggaaaaaytggcctcatttcttgtctatgcagtctctttgcagagctctaagttactttctgacaggcccaggagctccaagttattttagaaacttgagaggagatgaattcacctgattcatacaggtattttcaggcacagatgaattcttggctgggctcaagaggcttttaaaaggcctaatcagataccttatgaaaatattccagcaaagccaatttagaaaaa

SEQ ID NO: 432615 - DNA, 577 bp, Homo sapiens
tacaggtattttcaggcacagatgaattcttggctgggctcaagaggcttttaaaaggcctaatcagataccttatgaaaatattccagcaaagccaatttagaaaaaagagcctatatggcaagtgattattcttgctgtactttatgcaaataatctggccaaaaataatgagactgtaatttatttttcaaagacattggtcctrctatgatttctctttggtaaaatggggaaccagagagagaaaatatgtttcaggaaaaaactatagtatacctcttattagattctagctttgttcattgtttttgattctctactgatgaccccatatctgactgattctcagtgtcattcacctggatgcctcaagattttaggtcagttctatagggactccggaagctagtgctttcactcctaatgttagtgcctattatttatcttatggtttgctgttgactgaagtgctgtgctaaagctgtgaatacgagaactaatgtctttgccatacaaacattgggatcttagccaggcacttgttaataaacacagacaactccaaagtggtttt

SEQ ID NO: 432616 - DNA, 573 bp, Homo sapiens
gcatgtttcctcattttgcagatgttaacaagaagactttgagagataaagtgacttgatcacatcacaaaactaattagtggaagattgtaatttttgaaaaaattcctaactgatgataagcagtgaaacaatataagataatgaatagaaaatcagattagttgaaggaaacatggattttacactggatctaccataaacttggggtttgagtgagaattctttaagtttcttttcagatcactcattttacaaactctgaacataatagttcactttatgaaccacaaaaattaaggcagaaaggattaacggaaagtaaaacgtatttatgttctcaaaagataccttctcatatccacccagtttattctgaactttttctctgtgttgatgtctcctgaaagttgaaagtatgttttaaatgtgcttcattcctcagttcttccatcacatttctcattgtgartggcccggataactctattcattgctcctgtgatttggcaatgctcaggctgttgctttatgaagttgctcctagaggtgaacactatattgagcagaagt

SEQ ID NO: 432617 - DNA, 544 bp, Homo sapiens
ttctcagtcatacaactacaaacaactgccaataacctgaatgagcttgataacagatttttcctcagttaggcctgagaggagtggggacaataaaagcatgttgttttaaacaactatatttatggtcatttgttacatgacatagaaaacactctcaagtcccatgggagcaatgaagcggcagacccaagtagatgctgcacacatcctgggtttgtgttgtggctgaagaactcagactaggaaattttaattttatatacaggaccattagaaaaatttgcscaaactttatcactggagggaaacattagcttgattatcccagacagtaaacaaattttctttctggctgtgaggaagatactatcttaatcctctaaggctgtttactatgcaaatattcttgcaaaaacagtctagaaaaactgctgtcacaagttgcatagaaatgccatggagagtagttgcccatagggcagaatttcttccagtactctaggagaatttccatacagttagctttatacagttggtatgg

SEQ ID NO: 432618 - DNA, 518 bp, Homo sapiens
ttgctcaaaaagtacaaatttttagttataagatgaataaggtctggagatcgaatggactgcacggtcactaataatgtattttatacttgaaatttgctaagagagtagatccccatatacrcatacacaaaaggtagcaatgtgaggtgatggtatgttaactagctcaatcgtggtaataatttcacaatgtatatgtatatcaaaatgtgttgtataccttccatatatatcattttgatttgtcaatcatacctcaacaaagctgaaaaaaagataaaggacaaattttctgctttaactgctttaaatataaagaagacataaatatcatttcttttttattactcaaaatactggtattttaggataaataaacttaagaatctgaaaatactacctaacattaatacaatttaattgattaatttcaaataatacatttgatactatagtttttttagtttttaatatttgtaatacagagaatagtggtttcatacatgcatgacagg

SEQ ID NO: 432619 - DNA, 452 bp, Homo sapiens
tatcatttttacatgcattgttttcctgagctcatcaattgtctttataatcattatttcgaatttgttgtcaggtaatttatatacctctgtttttaagsattggttttgagagatttatttttcccttggattgggccattttatatatatatatttttaactgatccttataagtttgttttgaaatctgggagtggtggtctatgcctgtagtcccaacttctcaagagactgaggcaacaggatcacctgagcctaagggtttgagtccagcctgggcaacttagctccatctctgaaaatgttgatatgcacacatttgaaaaaaatatctcttctcccagtctttatggactgggtttgtacaggagaagaccttttactaattagcctagctacaaatcccaaggtcttcttaaaacttttctgtgggtatgtcttctttggtc

SEQ ID NO: 432620 - DNA, 452 bp, Homo sapiens
tatcatttttacatgcattgttttcctgagctcatcaattgtctttataatcattatttcgaatttgttgtcaggtaatttatatacctctgtttttaaggattggttttgagagatttatttttcccttggattgggccattttatatatatatatttttaactgatccttrtaagtttgttttgaaatctgggagtggtggtctatgcctgtagtcccaacttctcaagagactgaggcaacaggatcacctgagcctaagggtttgagtccagcctgggcaacttagctccatctctgaaaatgttgatatgcacacatttgaaaaaaatatctcttctcccagtctttatggactgggtttgtacaggagaagaccttttactaattagcctagctacaaatcccaaggtcttcttaaaacttttctgtgggtatgtcttctttggtc

SEQ ID NO: 432621 - DNA, 452 bp, Homo sapiens
tatcatttttacatgcattgttttcctgagctcatcaattgtctttataatcattatttcgaatttgttgtcaggtaatttatatacctctgtttttaaggattggttttgagagatttatttttcccttggattgggccattttatatatatatatttttaactgatccttataagtttgttttgaaatctgggagtggtggtctatgcctgtagtcccaacttctcaagagactgaggcaacaggatcacctgagcctaagggtttgagtccagcctgggcaacwtagctccatctctgaaaatgttgatatgcacacatttgaaaaaaatatctcttctcccagtctttatggactgggtttgtacaggagaagaccttttactaattagcctagctacaaatcccaaggtcttcttaaaacttttctgtgggtatgtcttctttggtc

SEQ ID NO: 432622 - DNA, 519 bp, Homo sapiens
gtttccatgagttcagaaagacaaaaattaatactggcagccccatgaaaaggtggcagccacttgcccacctgactgcatggaaatccaatgcatgctcactccagggctgcttcatctacagacgggacagaaatgctctcagagcctgaacatgtttcaaaagagggaaatgtgcttcattactccttttaatgtcttttcccacctttctctctccccagtctttccggaagagctggggaaagttgatctcttacgcatttgcatatttgttaatttgagatcctgtcttacatttaaaagttacaagagcagccagcattaatttgaactgatcctataaagacatatttttccctgcttttggctttggaatggcacgactttccttttgtggatagattatgtgttaaatgacctacagcagattgttaaataacatcygcttcacttgaagaattctgcagggattgaaaaagtcaccctaaaggcattttgtactcttgcttcctttag

SEQ ID NO: 432623 - DNA, 517 bp, Homo sapiens
cgtatcattcttatcttttttcgcactaacatacaaaatactatatttctcccactataaagcaaagaccaccctctcctgatcccactttaccctccagctgctgcccatctttttcctccctttacmgcaaagctcctccaattatttgtcaaactcactgtcttctccttttgcacttaagcctattgcaatccagattttgctccaacttcacaaaaattatacttgttaatgtcacctatgtgttctatcatattttccaaagcttttgggatcattcttaccaataagtaagccatttgtgtgacttgaggaacactgaaagaatccattgtccatcttgataaatttaaaattatctcttttaaacctcccctcttcaaatgatgcaagatcatcccatatttgcaattccctgcaatttcttacatagcttggcaggtatataggtcaattaataacatcctgaaaaatggaaaaatgaatttactccattctgtgcctgttagtgcaa

SEQ ID NO: 432624 - DNA, 544 bp, Homo sapiens
aaaggccttcaagaatactattttaaacttcatttaaagcctaccttccacaccaagaaaagatgttgtatttgagccattgtttggctgccctcttacatatgacacctctccacctccattattttctcacacccaccagcctcccagcacagctcaatcagcaattcttcatcaacctaaactgatcattcaaaatctcactaagcctatgtattttgcacagtcctttctgaccacacttgcttgaagtaataccaccttcctctcagttcycattacaagctttgtctaaactatgcattttgcaaaactgttctgtgaaatctcttctactgggttcttcagccatgttatttttattaatgggctttacatttttagagtagttttagttttacagaaaattgaacaaagtacagagtgttccctctctcccctgccctcagtttctcttatgattagcatcttgtactaccatggtacagttgttacagtagatgagccaatactgatacatgactgttaactaaagtccatagct

SEQ ID NO: 432625 - DNA, 587 bp, Homo sapiens
gttttgccctagagtctgttcatacagtgtctggggaatctgtgtcgtatggctgacaattttgactttcataaaaagctgagatgattgtttccatgtacagtattacaactgtaaggacaaaatgcagttttccaaaactgccatttttcttattttctaacatacttttgaattaaaccatcatagtttaccgatcagaattgctctgccaagttatgtacagttgtaactatatattgctacactaatggaacctcaaaccatggcatagtcctattggaacaaaagcagctttcctcattgtgtgaattttacctcaataataagcctctgtgcaccaaattgattagatttcttgtaaaagaatagctgccrttgcaaatccaaaataatagatggttgacatgtgacactaatagtagccaataaaacagctacaggaaaattttcccaaatgatttgtaaattgattatctataataccttatgataaattgacccataatgtcatctgatggctatttatttaggtagaaattcagcctggggaatttgagaaacaaaatcccagcactgcaatgatg

SEQ ID NO: 432626 - DNA, 612 bp, Homo sapiens
actgagggttgcctgaggctagacaccaacaatgagttgaagccctcaaaccaacagctcttcaagaactgaattctgccaatacccatgtaagtgagcttggaagtggatccttccccagtcaagccttcagataagactacagctttggccaacatttttatttcagccttatgagaacactgaagtgcaggagccagctaaaccatgcctagattcctgacccatagaaactgtgagataactgtttttatcctgctaagttttcrtgtaagttgttgtacagaaataaataaaatacacatctcttagctcacctacttagctattgtctccccaaggcagaaactctaaatgataaaactagatggaagcacagtgcccaatgtaaatgctaaaacatagtaaacactaattgagagaaagattaaataaatcactttactgagccaattttccaattgctgtggaaaaggaatattatttaaccttctctaaatgaatgaataacatataaagtttatactaccctttaatgtcagatcctatgttttgatttttgcctgtttatccactcatttttatttcttcttctgttcttagcgggaagaa

SEQ ID NO: 432627 - DNA, 523 bp, Homo sapiens
ccaaatctctgtgacacacagtttacctatataacaaacgtgcacatgtatccctgaacctaaaataaaagttttaaaaaaactcataaggttgcaatcaattttgaaacatattttcctgggtagcataagtgacagatgaatttttctttgattctagatggtcctaattgcctagcttgtactggctaaaaccaaaggacagaatgggtccccagaaagctatgttacagctgaagggcttcaggagaggaaatacagtctgggatccagtaattagccaaattcattaacttgtctagttgccaaagttagaagaaatagatcatggttgttaagaacataagatttggaatcagagctagatttgaatctcagccccacgttttatttagaatatgtggtttaacctctgtaagccaaaatttctgcatctttaatatgaagatcatcaaactgacctcacmgaaataatgtctgtgaaacacatacagcagtgaagactccacaacagttaatagtt

SEQ ID NO: 432628 - DNA, 462 bp, Homo sapiens
aaaaaggaggcttaccttacactttacaataatacagattgcaaaacaaaaccaagtcagccattgaaatattgatgggattagactgggggcattctatgaaaagggcagtgtcctctccccaagacacacacacagagaaagagagaaagagaacaaaagcgattgtagcagccacggtcatcctcagaggagaagcagcagcaatggggaagtaagacatagatgctgaagccatgtaactctagtcacccattagtgaacttatatgagagcatataatttaactgctgtttcgactaatttaaccaggatgattcaaatttagtcaagctctgatttaactttctttttctattaaaactgacaaattgttcacttgaacttattgcattaactggttgatttatgtttcatgtrgatccaggctgcaaagatcaagaattataaggggagaacccc

SEQ ID NO: 432629 - DNA, 443 bp, Homo sapiens
tattgaagggattagaaggagcaattcaattctgtatatcaaaaagtaaatagggtcaatcaattaaatgttcggtacaagtaaaagaaatgccaactaaggagtcattcacctttaacttgtttccttctttcagttgctatattttggctatcttagttgttttgtatttcctgtctagaagaacagccattaaatggagaccaagtctttatgtttcttaactgcattctggcacccaataaataattccttaggaataatttgccagtcagtggcacctacaagctagaattctttgttgtaktgtaaagcctgatagggagttcaaatcatcttgaatcttagtatgatatctgtgttctaataaagttttgttttcttgaatattaacctcagaaggtaattccttcttgctgtcacagacaacactcagagtagac

SEQ ID NO: 432630 - DNA, 394 bp, Homo sapiens
gatggaaaattactaaggtaagacctgcagggaagggaaacttgctaaaccaacttacagggatctcggtgagggcacactggagtgatcagacatcaaggatgagaggattctctctaaaccgactcagcaggatttctgctaaaactggacttggcaaaggtgaacatggaaaggtctaggcctagtcaagaagagggctcagaggagcctaactraagtttgttcaaggagacagtccatgtttaaaaggtattcaatgtagaaaagcaacatggaaaccttctctccatgtacttcagggttaggtcctagtatcatacagactaaatgggtggaccctatgttaatacttttctatcttttctaaatgtgttcttttaaaggccacaat

SEQ ID NO: 432631 - DNA, 565 bp, Homo sapiens
acacttttagctaagaaagtggggcttttatttttaaaaatgaagttagcatctcaarctccagagttttttgaatgccacaattagagatggattatttagtagatatgttaaaattcttacaaataatatgcatcagttatgttgcatacttaataaatgatacatggatttcctttcttgaaaatctgtgtctaagcaacgatgtatgcggaaaagagatgaaataaatatacctgtgtatacatcaactactctgaaaaagagagtcaaattgcctggttcaagtaaaatctctcattttctctgttttgtgtgaaagagaaatttttaatgagtactgaaatgtctcaaagtcaggcagcaaaatagctggaaaaaaaaatcaaagaatcagaataattttcatcaagatgatttactccctgaaaaactgacattcagtatagaaggcaggctttgaaaagactggttggttttttgttgttgtttttccactactctttacatgattgctcaaggtgaggaagattagacctttcctcactgtcttttatagggagtg

SEQ ID NO: 432632 - DNA, 558 bp, Homo sapiens
ataaatgactaaaaggaatcataaagcacaaaaaataaaagcaatccagcaaatgagtaatgtaagtggactgccatacttccagctaattctcctggttttcctttataggcctcttgaccttatttatataccagtgtattgccttcatattacatccttaatgaggttacttatcctgcatatccaatgacacggtcccctaaataacacggtcccctaaataacacatcctctgttctagagatgcctgagagggcaaccacttcagccactaaaaatttacacttttagctaagaaagtggggcttttatttttaaaaatgaagttagcatctcaaactccagagttttttgaatgccacaattagagatggattatttagtagatatgttaaaattcttacaaataatatgcatcagttatgttgcatacttaataaatgatacatggatttcctttcttgaaaatctgtgtctaagcaacratgtatgcggaaaagagatgaaataaatatacctgtgtatacatcaactactctgaaaaagagagtcaaa

SEQ ID NO: 432633 - DNA, 565 bp, Homo sapiens
acacttttagctaagaaagtggggcttttatttttaaaaatgaagttagcatctcaaactccagagttttttgaatgccacaattagagatggattatttagtagatatgttaaaattcttacaaataatatgcatcagttatgttgcatacttaataaatgatacatggatttcctttcttgaaaatctgtgtctaagcaacgatgtatgcggaaaagagatgaaataaatatacctgtgtatacatcaactactctgaaaaagagagtcaaattgcctggttcaagtaaaatctctcattttctctgttttgtgtgaaagagaaatttttaatgagtactgaaatgtctsaaagtcaggcagcaaaatagctggaaaaaaaaatcaaagaatcagaataattttcatcaagatgatttactccctgaaaaactgacattcagtatagaaggcaggctttgaaaagactggttggttttttgttgttgtttttccactactctttacatgattgctcaaggtgaggaagattagacctttcctcactgtcttttatagggagtg

SEQ ID NO: 432634 - DNA, 573 bp, Homo sapiens
aagttttagagcaaaaacaaacggaagtaaagtactcttggaagagggccaagtgggcgacatgagagatccaagtgcttcatctgacccttgacttagggttttatactgtggcatggttccaaggtttacatttcttttcccctgattcttctcttgaagcaggctgtccacatgcacagtagcctgccagcacttgggaggagccacatgcacaatatgtttactggagctgtgtgcatgcttacttgaggcatttttcccttaccagttaagtgttctagaggaaggttatatactagttgaactctgtcattttatctcttagwgcatatgcttgagcccactcacccagctcctgggattttgtcaggaagcgctgatcaccagcttcaggtgttttctatttattgggaacctgcctttccctggtgctggctgctaccaattattattttagagagacagtttaacatccacctgaccattacctgatggtcacctgacattcgcaaggttgggatgtctctcctgccctgctcatgtctgcctaggtgcctactataacagacc

SEQ ID NO: 432635 - DNA, 553 bp, Homo sapiens
ttatacttgtgaccaacagaggttgattctgggtargcaaggcttgtccaacatttgaaaatcagtcagtgtaatccatatatgtcaaccatctaaaaaaactcatatagtcatatcaattgttgcaggaaaagcatttgacaaaaatctaacaccaattcatgacaaaactttcagcaagttagaagtacaaaacatatttcaacttcataaaatccatctacaaaacttaaaggtaacatcacttaatggtaaaaaaaaaaaaaaaaaaaaaaaaaaaaaagaatgctttcttaataaaatcgggaacaaggcaagggcgtccacttttaccactcttactcaacgtagtactgaaagctctagccattgccacaaggcaagacaaagaaatgtttattctaaaatgtatgtgaaaaggcacaggccctaaaagcactaaaacaatcaataatttgataaagaagaatgaagcaggaggaattactctatccaattgtagtaggctaaatattagccctccaaaatatatgtccccattcttatccctgga

SEQ ID NO: 432636 - DNA, 553 bp, Homo sapiens
ttatacttgtgaccaacagaggttgattctgggtaagcaaggcttgtccaacatttgaaaatcagtcagtgtaatccatatatgtcaaccatctaaaaaaactcatatagtcatatcaattgttgcaggaaaagcatttgacaaaaatctaacaccaattcatgacaaaactttcagcaagttagaagtacaaaacatatttcaacttcataaaatccatctacaaaacttaaaggtaacatcacttaatggtaaaaaaaaaaaaaaaaaaaaaaaaaaaaaagaatgctttcttaataaaatcgggaacaaggcaagggcgtccacttttaccactcttactcaacgtagtactgaaagctctagccattgcmacaaggcaagacaaagaaatgtttattctaaaatgtatgtgaaaaggcacaggccctaaaagcactaaaacaatcaataatttgataaagaagaatgaagcaggaggaattactctatccaattgtagtaggctaaatattagccctccaaaatatatgtccccattcttatccctgga

SEQ ID NO: 432637 - DNA, 638 bp, Homo sapiens
tgtgagaggcaaccactgttttgctttgtagacacagtggatttatatcagttaaattccttccaatatatgtgtttgctctcaaatagagacaaacttaaataaacattatgaagtatatgcttctgaaactcccagagcatttacaatattaatattaatactgcatatacattttactacatgatactttttatttatttagaatctaatccaataaagtgtttttcattttgctgctcctatgcaattgttctgcatacctgaaaacacttgcgactcctgggaacttatttctcctcacactcgacatggaatacttgttcatgtgctttttgttttgtttttatttttttagagatggggtcttactctgccgcctgggctggagtgcagtggcaagatcgtagctgrctgcaacacaagtgccaacctgcgtccagttgtattttttatattattaaatgaacatcaattatgtctgtgtcaattatatcaatctgaacaaaaatatattgcctttattgacatcataactacagatttttttccttaatctacccctactatcacaattctatacaaagtgccagtttagaagttagttatttaaccatacattcctctaaaattgcaga

SEQ ID NO: 432638 - DNA, 638 bp, Homo sapiens
tgtgagaggcaaccactgttttgctttgtagacacagtggatttatatcagttaaattccttccaatatatgtgtttgctctcaaatagagacaaacttaaataaacattatgaagtatatgcttctgaaactcccagagcatttacaatattaatattaatactgcatatacattttactacatgatactttttatttatttagaatctaatccaataaagtgtttttcattttgctgctcctatgcaattgttctgcatacctgaaaacacttgcgactcctgggaacttatttctcctcacactcgacatggaatacttgttcatgtgctttttgttttgtttttatttttttagagatggggtcttactctgccgcctgggctggagtgcagtggcaagatcgtagctgactgcaacacaagtgccaacctgcrtccagttgtattttttatattattaaatgaacatcaattatgtctgtgtcaattatatcaatctgaacaaaaatatattgcctttattgacatcataactacagatttttttccttaatctacccctactatcacaattctatacaaagtgccagtttagaagttagttatttaaccatacattcctctaaaattgcaga

SEQ ID NO: 432639 - DNA, 424 bp, Homo sapiens
cttttgatacctccagctgttagagaatccaactgattttaaacatctcttttccttctgaaagagcgtgaatgagatgctttggctgccaacaattggggatggaggaatctccatgctcatttcctatactgtctacacagattcaacctgtgcttcccaatcctccggatggtgcctgatccacagagacctggacatgccatgcaacatcccttgggtaaaaatacagtcctttttttttttttttttttttgkcttagagacagagtattactctgttgcacaggcaggaatgcagtggcacaatcatagctcactgcagcctggatctcctgagctcaagtgatcctgctgtctcagcctcctgagtatctgagactacaggcatgcaccaccatgccttgttaattttttatttttt

SEQ ID NO: 432640 - DNA, 470 bp, Homo sapiens
atatccgttttaaactccaattatcttttaatcatatttatttgatcctttctgtagttggatgtggtcagatcatctgtaatttctatacctgcaatttgcagcttctttaatttcataatttgaaatccattttaaatggatcttttcttctagtttacctcaagtcaaataaatgggaaattaagccaaaggatggctctgcttgctttcacatccatcaatgcctgccttcccactggggctatttctgcttcacagccattcctctgcacacatgactgaatccrccccaagggtcccttcttgattagccatgtgcccatcattacatttatgactgtcactgccaactctcccttttactctgtcctgtttgctcttcctcctccttgtgtttctttgtctgcctcacaagactcttctctcagcattgcacagcaacgtaaggaaaattggaaatcagaaaa

SEQ ID NO: 432641 - DNA, 639 bp, Homo sapiens
tcttcttcaggagcaactatgttcaaattttacttctgtaattgacttcaaaatttctcagtaataggtgtattctgctatcactacatcaatttcaggcaatatttgttaaattgctattacaggaatttacacccttctctatatcccatcttgttacactgttatatcacaaattttggttgttttcatttcagtgtttgtattactatgagtatgcaagctactacttamtactgagccaagtaacaaactataactagattccctttcttcaacatcttttttttctagatgtaaaacatatccctaatattttcatttgcttgatttctctgtatcttaggctatatcccctcatacttctaccatctgtgtaaaaatcctcctcatgaaaattttcaggctaggcacagtggcccatgcctgtaatcccagcactttgggaggccaaggcaggcagatcacctgaggtcaggagcttgagacaagtctggccaacatgatgaaacccaatctccaccaaaaataaaaaaaaaattagctgtgcacggtggcacacgcctgtagtcccagctacttgggaggctgacgcagaagaattgcttgaacctgcaaggcagaggttgtagtgagcca

SEQ ID NO: 432642 - DNA, 639 bp, Homo sapiens
tcttcttcaggagcaactatgttcaaattttacttctgtaattgacttcaaaatttctcagtaataggtgtattctgctatcactacatcaatttcaggcaatatttgttaaattgctattacaggaatttacacccttctctatatcccatcttgttacactgttatatcacaaattttggttgttttcatttcagtgtttgtattactatgagtatgcaagctactacttactactgagccaagtaacaaactataactagattccctttcttcaacaycttttttttctagatgtaaaacatatccctaatattttcatttgcttgatttctctgtatcttaggctatatcccctcatacttctaccatctgtgtaaaaatcctcctcatgaaaattttcaggctaggcacagtggcccatgcctgtaatcccagcactttgggaggccaaggcaggcagatcacctgaggtcaggagcttgagacaagtctggccaacatgatgaaacccaatctccaccaaaaataaaaaaaaaattagctgtgcacggtggcacacgcctgtagtcccagctacttgggaggctgacgcagaagaattgcttgaacctgcaaggcagaggttgtagtgagcca

SEQ ID NO: 432643 - DNA, 639 bp, Homo sapiens
tcttcttcaggagcaactatgttcaaattttacttctgtaattgacttcaaaatttctcagtaataggtgtattctgctatcactacatcaatttcaggcaatatttgttaaattgctattacaggaatttacacccttctctatatcccatcttgttacactgttatatcacaaattttggttgttttcatttcagtgtttgtattactatgagtatgcaagctactacttactactgagccaagtaacaaactataactagattccctttcttcaacatcttttttttctagatgtaaaacatatccctaatattttcatttgcttgatttctctgtatcttaggctatatcccctcatacttctaccatctgtgtaaaaatcctcctcatgaaaattttcaggctaggcacagtggcccatgcctgtaatcccagcactttgggaggccaaggcaggcagatcacctgaggtcaggagcttgagacragtctggccaacatgatgaaacccaatctccaccaaaaataaaaaaaaaattagctgtgcacggtggcacacgcctgtagtcccagctacttgggaggctgacgcagaagaattgcttgaacctgcaaggcagaggttgtagtgagcca

SEQ ID NO: 432644 - DNA, 583 bp, Homo sapiens
agaaaagaaaagaaagacttcaggagggtgaaattcaactagaaaacagcccatatttttaatgatgttcattcaaaagtattcatttttcttcctcaacttgttcttcttcctcccttccccttcatttccttccttttccttccyagcaattcagtccaaaatgcactcgatggggcaaggcaaggtaggcatccatgcaggcaaaggggtggcatgcatggagtaacaaagcccaggcagggtgatgagggtgtttactgaggggcaggaaggagaagtcagaagccaaatagggcagtgagggcatccatgctggagggtgggctggtatagggtgtcggagcacaagttgggaaaatagagggtgaccatgcagagggatgcccagggtggacaatcagacactgagcagtgtgaggagggcatccactggggggctgcccagcttagggtagcagagcctaggccatatgaggaagacagcacatggagtggggggtggccaggcatggggagccagcacccaagcagggtggagaacaacctggtagaaggaggcagagcccaggtggaataagaa

SEQ ID NO: 432645 - DNA, 573 bp, Homo sapiens
ttttggtttgttccctatacccatgatcagctttcttcaaaattattttcattattgaccacacaaaacagctctattagtggtgttctctgaagccacgagttaacttgcagcactgcttctatgcattcagctaaatatgactgaggaggctttagttgaaaaaacctgtgcttttgagttaggcatgcctagatttgaattctggctctgccgtgtatcactgggtaaaatgcctaataaccctcaatctccatttcctcctttagaaaaatgaaccaaatgactgacagctcaaagtgttgtgaytatagttaaatgaaataatgtgcctgtagaaaaaaaaaacaggtagatagaaagttttcacttaaaataattgccattactattgttattttctcccaggtgcataaaaagtttttatttatatagttgcagtattgttattattcccttcccacttttttctaatagacctgcctgctctgagtaatctcttctccagctacatacttatgcatattctctttgtgaaaatagaccatattaataccagtatgaattcaactc

SEQ ID NO: 432646 - DNA, 578 bp, Homo sapiens
gctttagttgaaaaaacctgtgcttttgagttaggcatgcctagatttgaattctggctctgccgtgtatcactgggtaaaatgcctaataaccctcaatctccatttcctcctttagaaaaatgaaccaaatgactgacagctcaaagtgttgtgattatagttaaatgaaataatgtgcctgtagaaaaaaaaaacaggtagatagaaagttttcacttaaaataattgccattactattgttattttctcccaggtgcataaaaagtttttatttatatagttgcagtattgttattattcccttcccacttttttctaatagacctgcctgctctgagtaatctcttctccagctacatacttatgcataktctctttgtgaaaatagaccatattaataccagtatgaattcaactctgcagctttccttaattcttcacgctcataacacaggacaaacttgctcattacgacacacccagttggcctcctgccactctagagaagatgatgtgggggaaatgaggggctttgctgggggtcattgggaagaggcatggccaacccttggct

SEQ ID NO: 432647 - DNA, 562 bp, Homo sapiens
attgagttacctgagtcctgattccttcatcactagaataaagataatgagaactacctcatggggttgctatgagggttaaatgagagaatgtgttactaatgtacttagcacactctctgacacagggtcatcactgaatacattgtagtagttgttccagttgctcttgtacttgttcatagaagacagtgtgatgagtaggaaatcagccacctggtcaacactgtaacccagaataacatcttatggtaatttttccattagaaaatattgaaatatcagatacatcataaaggtgtcataaaatttaattcatgtggtattaacatacccataggtgtgcacatagatcacctaagttcctaaattacatttatactgttgttctaagaattcaatattataagaatatttagtaatcattattattaaagacaataattatttattttctttgcttctaagataacagtttaaaaaatggaaatgcccacagctattttttttgatagacttaacrtattctcaagattttgaatgtacagatttggtacaattt

SEQ ID NO: 432648 - DNA, 620 bp, Homo sapiens
atagacttacctacataggatgatttgaaggagatgcagcaaaataagtctcttttgcaaatatctcctttacctgaatttaaacgtaaacaatttatatttcatgttgtgtatgtacttttggaattgaagaatctgtgtactaaaatggaactatttctggtggaggagagaataaaagaagctcacttaagtcagagttggtaaataatttccagtttacttgatgattccaattgactggtaatgatggttaagggtagtgcattgatagataatatatcatgatcaagttacatgaatttcaagaaggaaaagttggtttacacgtttacactggcaaaaaaaatctatatgtatgatctaccagattaaagaaacaagttattatgtcacaatgtgkagaaactatttggtaaacttaacacccatttgtgtgtgtttttttttaaaagctcagaataaaaatcaaagctttcttaacctgacaaaatttgtctatcaaaaatttacagtaaatataaattttaacggtgaagtaagttaaaatcaggaacaagaaaagaatgtctattatcatcacttctgtttgatataatagacagtgtaataaggacaaa

SEQ ID NO: 432649 - DNA, 623 bp, Homo sapiens
attcattttttcttactttggtaactttgtcttctccaaatatgatgtaattgtatccatgagcaaagaaaaggtgaattcaggcactacacgagcatggaaaaaaaactctcatgttaatttatggcagtttattttatatccatatgggaaagttcacttggcttgaactttttttccagaccccgatgaggctgctattgatttagtactctactagaatacaaacccacaaaacccataacatgagaaaacctaattatgataataagaatcaagcatgcataattccattaaaaacagttagtcaccrctcttcctatatcacgacactgctttttttacaactcttctgttcattaggagcaaattaccttttagtgttaagcagactatagatgcactgtttatgttgaaagtggaaaaaactaatgttacatttcatgttaaaatgataattgcctttggtgttgccttactgtattatttcaaatgggtgtgtaaatgaaaacaaagctttgcacatgctgtgtcgctgtctaagcttccatggaagaagagcaactcacttgctgagtttacgggtggacattagtccaggcttaagtaagttaccaaaagtt

SEQ ID NO: 432650 - DNA, 628 bp, Homo sapiens
tttttaaaagaaaacataaggggatattttaatggttttgggtaagcaaagatttcttaaacaggatacagaaactactaatgaccaaatcaaggaaataattgctatgttaagcagctttaaaactaagaagttaaagataatccacagaatgaaagagtgtacttacaatggatctatccaacaaaggagttgtagtcagaaatcctgaaacccaacaagaaaaagacaatgcaatagagaaactgggcaagagacttacataggcacatcagaaaagaggagctacaaagggccacaaaaaaacatataactgctcaacatcattagtcatcagtaaaataaacagatgtcatcagtaaaataataattatataattatataaatagataataayataccactacatatccaccacaatagctgaaattaaaaagattgaccatactaggtgtgggcagtgggcaaggatgtgaagcaattagaacagcttgtagagtgtaacctggtccaaacactggaaaactatttgtcaatattattagagttgattatacatataccttatgtccaataattctactcttgatataattcctaaaataaatgcatcaacatgtgctccaa

SEQ ID NO: 432651 - DNA, 548 bp, Homo sapiens
agtggagggcctacaagtggacaaaccagagcatggggaggaggaaaaggcaataggtacacaataggtaaaggtttggccaggcagtctatatgggtgtagtatggcagcaggatacagaaacaagttcagcaggacatctgtcctgagaaggttgagcagaaggcaatacccaaaatcaagaagaaacaaagctcagcacaaggcttgttcaccaagattgagcaaaatctacttaytagtacttcagtaaaaggccagagcagaaccaccagcaatttgtattatatgctactcattcaatgctcttcaaaaccccttgaagagtaccaggtctaagggaggggaggtggcaggaggattgttggaagactccacctgtgaattctgggagtgttataaccagaagcaatataagatgtgtaaagggagggagtatgaaggattgaaaaagaacagtcctgattaggctcagttttttcacttcgaaagtagaaactaatataagctgctagggttgttgaaaaggctgaacataaagtggatag

SEQ ID NO: 432652 - DNA, 297 bp, Homo sapiens
tgaaacattttaaaaatgagttctttcagtattgaactatttcattttcacatcatggttggcaaggtaaackcttgctttgacaacatgaagactatttatataagacttgtgagatcatgtgtagctcagatcatatggtatatttgcataaatgtaaatgacagcctttaagaatccttttgtctcttgctccagtggtacttttcccaaatgcaggctgataatgtttctacactaattaatctatttataaaatcaggcacaacaaaacaaaacccattgtccttgccctca

SEQ ID NO: 432653 - DNA, 603 bp, Homo sapiens
tgagtcagcttcttgtggagttcctcagacagctggcatcaatggaatccctcagaccagctgacgtcagtcgtttcactggtatgcaggatataaaataatatcycaaaggaaaaattcaccatttcataatgttcaaattgttatctatagagcagtcaaaggaaactataatcttgtaacatggtctacattattctacaacaataggcaccacacaactatgaggaagaaagtcagagagcacactgatttcatgattaatgtcaatcatgctgcaagcttggtttattttcatttctccccctcacttcttctctgattaattttataaagtgtataggggcagtttcaccactgccactgccagagccccaggagaacgcaaggcattgaactgggcattcaactgtccacacaaagctcctcctctctttctccaggtatttcttatattgcctgccaccctcttgttcagatgagaggacctagaacctgattaccaatggctcaagatcttagagcagatgaagaaccactaaagatttgaaataaaaaatgaggaagctgaggtggaaaatatgacactacagacttctggtg

SEQ ID NO: 432654 - DNA, 622 bp, Homo sapiens
gctgacgtcagtcgtttcactggtatgcaggatataaaataatatctcaaaggaaaaattcaccatttcataatgttcaaattgttatctatagagyagtcaaaggaaactataatcttgtaacatggtctacattattctacaacaataggcaccacacaactatgaggaagaaagtcagagagcacactgatttcatgattaatgtcaatcatgctgcaagcttggtttattttcatttctccccctcacttcttctctgattaattttataaagtgtataggggcagtttcaccactgccactgccagagccccaggagaacgcaaggcattgaactgggcattcaactgtccacacaaagctcctcctctctttctccaggtatttcttatattgcctgccaccctcttgttcagatgagaggacctagaacctgattaccaatggctcaagatcttagagcagatgaagaaccactaaagatttgaaataaaaaatgaggaagctgaggtggaaaatatgacactacagacttctggtgagcctgaagcctcaccaagtgcagatagaactaccctatttataaaaggagatgaatcaagcagcaatgcgaggtttc

SEQ ID NO: 432655 - DNA, 580 bp, Homo sapiens
cataaaagactgcaattgatgtgtgttctgagaaaccagagtcaatggaaacaatattgctaaaaatgcgtcccattcatgtctctatagtcacaaatttacctttctaaaactattataattgacatgtgtgtatgtgtaatgtacataagcagttggtctcatcaaaatcattgttgttccaatgattctgatacaacttgaagtatgtcttagggatactaaatacagtgcctggtgtctcgtccttactgacaatttctggtattgtctctcccaaaatacactatatatttgcccaacatgatggtagatttcatgcctagaactgcatgaaagataacaatttacctcttcctatgaatagcttcaaatccatgtaaagggcacagattagccttttgtgtagagtggtagttgttgttttacaactagtattccaaaggcacaagcatggatggctgatttttagcaacagaaattgttattgtctttttcttttgctcttkattcccattgaaagatcttcccaagggttcaagaaattttgggacctttctagcaaaaaaattctgaagaa

SEQ ID NO: 432656 - DNA, 589 bp, Homo sapiens
tttccgttttctcatattgtaacagcctaacacgttcaccttgcccacagcccaaaaaagccactgcactgagaatggcaggtaccgtagcagggaaagagttcaatgatcacagggccagccaagtgtgaggacaggagataattctcaaatccacctccccaacagcttggaggctagggttttcaaaaataatttggtggattgggggctagggaatgggtgctgctgattggttggggatgaaatcataggagtgttggaattctctctgtgctgagtccgtttctgggtggaggtcatagaatcgactaattgagttacagatctgaatgggtccaggtagcatcagtcagttctccagaatgcagaagyctgacaaatatctcaaaaaccaatcttaggttttacaataatgattttttccatggaagcaactggggaagctgcaaattttgtggcctgtggctacttgactcctgagcaataagcaagctagggaacaatggcagaatatcacttaactatgcatagttcttagcagaattgaggcacctcccataattctaaccttgtggcctttcattaa

SEQ ID NO: 432657 - DNA, 575 bp, Homo sapiens
ataaactaaattcctcccatagttagcttggctgatgcccaggacagttagcttgtgtgtttagaagcaagataaaatcagcttgtgttagatttctccctctgtggtaatattgcaaaggcagtttcaacattatatgcttattggatctcttgttatatacatatyagatgtctctgtctctatgtccatgtctcttttcctgaaattccatatactattcctgtagaatatgtagaaaattttgagtttggcttaaagcaatttagttttaatggaatgcaatctacagttcactcttgcctttttaaatagacaaacacactaagaaatctttcctgttcttacattactccctttctacatcaccccagttgttttaggaaagcaacatcctcctgaatgtcactgaaaaaaataaagtattgtaaacggtttcctaaacttttaaaaaataaacaatcatttatctgaattttaccagatagactcccatgttttaaatgataaaatcttcattttgcctgttgattttcttctgtttgatcattcttaccagcaggaacctatatgaa

SEQ ID NO: 432658 - DNA, 499 bp, Homo sapiens
atcttcaggaaataaagatgttttgagaataacaagaggataaactactttgagtagagaagttagaaattacatctttgaagaagcgacatttaacctgagataagaaatatggagtaaaatgagttccaagcagagggaataggaaggaaaagattgtgaggcaggaaagaccttggtgtgttcaaggaaagaaaggaggctaaagtagccagagtatagcagatgaacagagctctgagaagtaggcaggaatcagatcttacttggccttgaagaccacaagaagaattttgaattatcttctaagttctgcacaaagaagctgaaggactttaaacataatacaattcgattaaccctctaaaatctctgtcaactctgtgartatttgattgagtaattattggcttagaaagctgtgtcagtactgatgctactcactgaaatgaaaaattcctgctgagaataggtttcagggtagatgaatattttggac

SEQ ID NO: 432659 - DNA, 606 bp, Homo sapiens
ttgtgcttttttaaaaaagcaaaagtgatttgctggtacccaatagcaaatatccagggccacttttccatgctaaaaaagagcacatgtgattgcactgctcatcttttaggtttcactaacttaaactttggatgaattggtactgaatcttctaaggttgcctttggccaaggagagaatgaggtggctacccgagtttcatgaggtaggctgagcatttctgatagggagaccagtgtggagcagaagggagctgtactgtgcctggacagtgccartgatagcgatctcccctcctattttcttctacctcaggagcagcacacaaacatgcaacctaagcaggggttttagaaggaagccatgcttcccactgtggaactgggaacctctggaaggaaataattgatgctctaggcatcctagcacagcacctggccttctcattcctggaagatttttatagagagtgcataaaactggtaaacaacaatcttcacagcatagacccttctatgtaggaaagttactattaattggtattatgtttccttattggcatgtaattgggaaaggagagctccaaggggatccctgatatga

SEQ ID NO: 432660 - DNA, 630 bp, Homo sapiens
gcatgtaattgggaaaggagagctccaaggggatccctgatatgaaacattagtctctattataaaaacacgtaactagagatgatggtacctgtacaagcaactctacacattttcgtaatacagcaaattacaacattctagccaaaacaacatttagataatgatcaattcctattaygttgggacaaatacgagccccaaagaatggaagataaatttatctttcagtggcctgcataaatcccttagttgggagaggggaaagggatgtgaaatatcactaagaaaatcaatatctttattgattaatcaagctactgtgatttattgggcactcactcatttgtttgttacagtcatttcatgcattgcctctggctgtgataaatggtctggcctcctctttggcaaagagggaggctttttagctgtccttctaaaagtgtgggcccttccagatacctgcaaatttgcttctatggcaagttaaagcctacagactgctgtgaaatatggccttgaaaataccagattcacccaatgtgaggagcccaaagagcagtgcacatagacatcaactctgggtgcttccaaatggaaacagaaagctaaagcagaagcgtgctt

SEQ ID NO: 432661 - DNA, 630 bp, Homo sapiens
gcatgtaattgggaaaggagagctccaaggggatccctgatatgaaacattagtctctattataaaaacacgtaactagagatgatggtacctgtacaagcaactctacacattttcgtaatacagcaaattacaacattctagccaaaacaacatttagataatgatcaattcctattacgttgggwcaaatacgagccccaaagaatggaagataaatttatctttcagtggcctgcataaatcccttagttgggagaggggaaagggatgtgaaatatcactaagaaaatcaatatctttattgattaatcaagctactgtgatttattgggcactcactcatttgtttgttacagtcatttcatgcattgcctctggctgtgataaatggtctggcctcctctttggcaaagagggaggctttttagctgtccttctaaaagtgtgggcccttccagatacctgcaaatttgcttctatggcaagttaaagcctacagactgctgtgaaatatggccttgaaaataccagattcacccaatgtgaggagcccaaagagcagtgcacatagacatcaactctgggtgcttccaaatggaaacagaaagctaaagcagaagcgtgctt

SEQ ID NO: 432662 - DNA, 545 bp, Homo sapiens
tggcctcctctttggcaaagagggaggctttttagctgtccttctaaaagtgtgggcccttccagatacctgcaaatttgcttctatggcaagktaaagcctacagactgctgtgaaatatggccttgaaaataccagattcacccaatgtgaggagcccaaagagcagtgcacatagacatcaactctgggtgcttccaaatggaaacagaaagctaaagcagaagcgtgcttgatatccaggatataattatactgacagggttaggagctactgtctcaaaatcagctggcattttctgtatatattgcagatattctcattaggatactagcagtctaatttctataacagcttagttatttttgtctcccaggtccttttaaactgcattcagtggacatcattcccctttgcctctagatgaaaactgttgtgagacattattgctgatccttgagtaataagtaaactcagctttctttaagccattgcagcagcaaatgcaataaaaagaatgtccagtccaagatatcaaaaggcc

SEQ ID NO: 432663 - DNA, 450 bp, Homo sapiens
aaactgttgtgagacattattgctgatccttgagtaataagtaaactcagctttctttaagccattgcagcagcaaatgcaataaaaagaatgtccagtccaagatatcaaaaggccatagttgacttagtattatatcttctccctttcccgcaaagggaaggaagtatgacacttctctgcaacttcaccttaggaacttctgcccctactycacatcaagctgctgtttcactccaggccagaggcaaagcaaaagggcgtgaggatagatcagttatgcctcggttgagtggctttccacaccctcgcctgccaggtggtgaaagctgtaaccctgggtggtaccctacatactgataaaggtgactttctccctccagggaggcttacatgggcttcagaggttccctgctagatcctgctgtcctataattgcactgccactag

SEQ ID NO: 432664 - DNA, 450 bp, Homo sapiens
aaactgttgtgagacattattgctgatccttgagtaataagtaaactcagctttctttaagccattgcagcagcaaatgcaataaaaagaatgtccagtccaagatatcaaaaggccatagttgacttagtattatatcttctccctttcccgcaaagggaaggaagtatgacacttctctgcaacttcaccttaggaacttctgcccctactcsacatcaagctgctgtttcactccaggccagaggcaaagcaaaagggcgtgaggatagatcagttatgcctcggttgagtggctttccacaccctcgcctgccaggtggtgaaagctgtaaccctgggtggtaccctacatactgataaaggtgactttctccctccagggaggcttacatgggcttcagaggttccctgctagatcctgctgtcctataattgcactgccactag

SEQ ID NO: 432665 - DNA, 602 bp, Homo sapiens
tgacagggagagagactccttatataaataacaatttggtgccaccatccagaatgttacaactattacttctccatagaccaaatacttctgctccttcccatttcacatcattactcagctcagttgaagtttttttttttttttaatgtctctttcagccactctttttgtcatacagctggtaaaacagctctgctacaactatacagacatatgggtttctggaactaacttacaactccccttaaatttctgcactcagtcaaaggsagaactatttcattctatagacatggggccctttgccatcaagattgacttgagagtttccatttgaaatttcccctgtagcaactcaaatctcccaaacagcagtgttctggatgtgccgcatgtaattcttcaacttcttttattctgggctcatagccaaattcccacatttcatgactttatgccttccaccctaaacatctgttcctgctttaggatttctttctaatgggttgattgctcaaatcctgccaatcaggaacaactcttcctgattcttcccaagctgtttgcttctgcaaagaaaaacctccaaactgtttttc

SEQ ID NO: 432666 - DNA, 582 bp, Homo sapiens
gggtagtggctggatttggtgctagagatgacacatggacccagaacatgacagggagagagactccttatataaataacaatttggtgccaccatccagaatgttacaactattacttctccatagaccaaatacttctgctccttcccatttcacatcattactcagctcagttgaagtttttttttttttttaatgtctctttcagccactctttttgtcatacagctggtaaaacagctctgctacaactatacagacatatgggtttctggaactaacttacaactccccttaaatttctgcactcagtcaaagggagaactatttcattctatagacatggggccctttgccatcaagattgacttgagagtttccatktgaaatttcccctgtagcaactcaaatctcccaaacagcagtgttctggatgtgccgcatgtaattcttcaacttcttttattctgggctcatagccaaattcccacatttcatgactttatgccttccaccctaaacatctgttcctgctttaggatttctttctaatgggttgattgctcaaatcctgccaatca

SEQ ID NO: 432667 - DNA, 582 bp, Homo sapiens
gggtagtggctggatttggtgctagagatgacacatggacccagaacatgacagggagagagactccttatataaataacaatttggtgccaccatccagaatgttacaactattacttctccatagaccaaatacttctgctccttcccatttcacatcattactcagctcagttgaagtttttttttttttttaatgtctctttcagccactctttttgtcatacagctggtaaaacagctctgctacaactatacagacatatgggtttctggaactaacttacaactccccttaaatttctgcactcagtcaaagggagaactatttcattctatagacatggggccctttgccatcaagattgacttgagagtttccatttgaaatttcccctgtagcaactcaaatctcccaaacagcagtgttctggatgtsccgcatgtaattcttcaacttcttttattctgggctcatagccaaattcccacatttcatgactttatgccttccaccctaaacatctgttcctgctttaggatttctttctaatgggttgattgctcaaatcctgccaatca

SEQ ID NO: 432668 - DNA, 602 bp, Homo sapiens
tgacagggagagagactccttatataaataacaatttggtgccaccatccagaatgttacaactattacttctccatagaccaaatacttctgctccttcccatttcacatcattactcagctcagttgaagtttttttttttttttaatgtctctttcagccactctttttgtcatacagctggtaaaacagctctgctacaactatacagacatatgggtttctggaactaacttacaactccccttaaatttctgcactcagtcaaagggagaactatttcattctatagacatggggccctttgccatcaagattgacttgagagtttccatttgaaatttcccctgtagcaactcaaatctcccaaacagcagtgttctggatgtgccgcatgtaattcttcaacttcttttattctgggctcatagccaaattcccrcatttcatgactttatgccttccaccctaaacatctgttcctgctttaggatttctttctaatgggttgattgctcaaatcctgccaatcaggaacaactcttcctgattcttcccaagctgtttgcttctgcaaagaaaaacctccaaactgtttttc

SEQ ID NO: 432669 - DNA, 581 bp, Homo sapiens
ctgcaaagaaaaacctccaaactgtttttcaactacctacttcagcatccttatcaagtgcttcaatttgcctctccaagactatcacacctgccctcaggaggccgctagtccagacatctcatttgggcacatagctcttcctgggcagtgttaacatagaataacagaatatcagcaattaaaatacatttcaattatttgcagctagaggaagataatctcaatttcacatatgagtttacaaaaggagtaatacgcaacagagctggtgccagagtttatatgcccagtgggtagtgtaatgattcattttcctccacccaccattaatataagctgatgtcatcatgaccccagcctatttcttgacttggctggacagaaaacaggaatgtctaggtgtctgtccactgagtgcacagacactggacatctgctttaagtctttcaccygagggtattttccttttctttgcagttattgggggtgtgcaaagaaaaggaaaatgtcctctggtgaaaggcttatagctaaagactatgagttaacttatagttaaagaacagagggttacaga

SEQ ID NO: 432670 - DNA, 428 bp, Homo sapiens
tgttttattctttataattttgttaacattttctctagcttacttcattgtaggaatacagtatataatatatatgacgtgcaaaatatgtgttaattgactgtattatcagtaaggcttcctgtcaacaattggataataggtaagtttttgggaactcaaaagttaaacacagatttttgactgtgtgcgggggagattggcatccctaaccctcatgttgttcaagtgtcaaacaatacttcaaatcatttctagagtacttatatctaatacaatgtaaatgctatgtaaatcattgttttactgtgttgtttcttatttgyattattttgtttttatatacttcttcccagtatttttgatctgcagttggttagagctgcagatgtggaacctgcagatagggagggccgactgtttccaaa

SEQ ID NO: 432671 - DNA, 599 bp, Homo sapiens
aggaaaaacagctactggcaaattaaagagtcctggaacagagccatgagaactaaatggctaaaaatgaaaacaggcaaacatttgagagtattctacagaatacagatctttcarcacctccccctttcactggttaattcatcgtcatggaaacagaatttatcaaaatgttcttgctcactcctagtgacccagtgagtagacttagagagctggtgaaaggtaactcaggctgaagcaatttttacaaatgatatgctgcagttcatacattggtgaattttgaatggtgccattgtgtcgattgaacatgtttccaaatctcaaagggttcacttttttgtttgttttttaaaaagctgccaggcagagaaacgagaaacctttgcaagtgagtgagcacaggtgactaactccatggaaagtggccgaatttaggtttgaactcacctttccccctcaatttgcttcccccccacccccgcttgtctaaaggatgttcaaatccagaatttggtagacatttctttggttaatttatctgcctcagcagctctcttctgttctgtagctcagaaatacaaaaatccttcatt

SEQ ID NO: 432672 - DNA, 599 bp, Homo sapiens
aggaaaaacagctactggcaaattaaagagtcctggaacagagccatgagaactaaatggctaaaaatgaaaacaggcaaacatttgagagtattctacagaatacagatctttcagcacctccccctttcactggttaattcatcgtcatggaaacagaatttatcaaaatgttcttgctcactcctagtgacccagtgagtagacttagagagctggtgaaaggtaactcaggctgaagcaatttttacaaatgatatgctgcagttcatacattggtgaattttgaatggtgccattgtgtcgattgaacatgtttccaaatctcaaagggttcacttttttgtttgttttttaaaaagctgccaggcagagaaacgagaaacctttgcaagtgagtgagcacaggtgactaactccatggaaagtggccgaatttaggtttgaactcacctttccccctcaatttgcttcccccccacccccgcttgtctaaaggatgttcaaatccagaatttggtagacatttctttgrttaatttatctgcctcagcagctctcttctgttctgtagctcagaaatacaaaaatccttcatt

SEQ ID NO: 432673 - DNA, 554 bp, Homo sapiens
gtttctggcagctggataattaatctatattgagactgcaggcaaagtgtccatgtttgcatctgtgactactctgtgttagagctggaaaatgaaaacttccaaccatcagagcagctcatctttaaaaagaaaataatcaaacactcagacactctggatttatttgctgacctctgtttgaatacagaattcactactcttcagaaataccattatgcagcatgtacactaagccctgagtatatctggggcttkctttactctccagatatgggaagttcactcatcctcctcccttcgttaatgctaattaatggacaagagacccttaagagagggaacaaagtaagtctggtcaattttcttttttaatttagggagcattttggcatattttttttttctagtgaaaaataaagttgactttgaacatctctttaattaaaacagagtgtaaagccacaacaaattttatgtaactgaggtaaaagcaaatacttgcattatgttacatgattatctgtctacctattaatatctatctatctaac

SEQ ID NO: 432674 - DNA, 566 bp, Homo sapiens
gttgggtgaagaggaacaatttactaattcaaatttataaagaacaaagcacttgcccttgaatttatatcatggctagtactttgcagtgccttcaaagagaaaaataaaagccctttagaacagcagtgtttttgtttttcttcttatttatttagacacaaagtagccttgaaagattatcacataatcctggagacgtttttctatttatttacttatttaatacttcgagggggtgggggagtctgtgtatgaagaaaaataattaagtgtgacaggttatttgacagcttgctaacacaaattaaccttcttttaacactggctgcatgtgaacatccagttttactcctctggcttggtgacacagtcacagtttgtagggactatcctgaagcatgtaaaagtttgragagcaaagctacttctgctctattctgagcactgtgaagctttccatgaacaatgcaatgtttttgtttggcttgggacctgtctattgatattgagtactttgggcaagaatgccattttccccttctcatttaatggttgaagaaact

SEQ ID NO: 432675 - DNA, 575 bp, Homo sapiens
taattaggttatgaggatgaagatctcaggaaggaattagcgcataagagacctaagggagcttgctttctctctttactctctgytgtgtaaaatgagaagacagccatctccaaaccaggaaacaagccctcaccaggcaccggaaatgacagcaccttgatcttggaattcccagactccaaaactgtgagaaataaatttctgttgtttaagctgctcagtctatgatattgttttttaatatgtatagcagctgaactgactaagacaagttttttttttaaggcagggtataataagaggctgaatgtaaggtttggccagtggtgtgagttaaaggacatttacacaaaaataagtaccttgctactcatgcttattgcccccagatgatttatcaagccaagtatattcttcacattctagtaaggatacagtacttgttccagtactatatgcatagtaaacatatttcatttcatggaaagaagaattttaaaatatcttgctatgtgccacatgtgaagctcagaatgtatgccactgatgaattcaaatagagagtacaattt

SEQ ID NO: 432676 - DNA, 573 bp, Homo sapiens
catgaacttttgctccaataactaccataggaacataccagtaaagcagagagaatccaaagaccctttgagggaactagatcactgcttcagactccctgagatgctgaaaaactgtgagtctgcttgctttctcagcaagaaggctggtggtctggagcaagttctcagacatggtcacctgctgccaggaagtagactcggtgctgttgtgggggcacagtgggagtgagactggcctttaggcttttgggctgcgtggggaggaggtgaggcctgtgactgctggctttctctggtgacctgtatgactcagaagaggcagccataatagccctgagaatataactccattggcctgagaaccacacctccatcacccatagcagccgcagcaagccttgcccgaggagagactgagctcagacatggctaaacctgccccracctgatggtctttctgtacccaccttggtagctgaagacaaaggtcataatctcttgggtgctctatgaccctgcccaccgcctgagaagcctgaatacttaaccaggtgtccttagggcaagttt

SEQ ID NO: 432677 - DNA, 609 bp, Homo sapiens
tatactcatacctgtgtttttcctccagtcccacaggcaatttgtgatcagttcactgaaaatgccatgtgttctttgtagtgggaaatgaaaagaaactgagttttcagcatcactgtgagatttgcatttgaaaaataggtgtcacatactttggtccccatttcgtttaagtgtgaagctaaatgctagtgacttcactaagtgtttggaagcaagatgttaatatcataattatctttttccttaatgagataatattgagcagcagctttagaaaaaaaaaatctgaataagatgctgagaataaaagaaagatgcgttggctggctttcctttctttctcttggtggggcccaggctgaagagatggggatgtacccatgaagtgtttcttgaaaactcaggctaccctttctgtataccctaaaccattctctgtgaactgcataagagctaaagtctgaggaggttctgtttttagacaaytgttggtttctttaggcatagaacctcaggaagtcactgtagaatttctggagaattgcagtttcttccccatccctccatgcagttccacttgcaatttcaggagttaccaagaccact

SEQ ID NO: 432678 - DNA, 564 bp, Homo sapiens
agtgaattacatcaatgtattgcagtgtgttgcagaccacttatgcatgacacagtgcctagagtcacagttttagctgatctccttggaggccatacctcttctcaaytcaaccccatcctttacagatgaagaaattgacatccagggaaattggcgtactgtctccaggccatgcacctacttaataggaaagctttaaagttcatctctactaaacaaaattctggtaagatgtgtaactgcattttctcaggttctgaattataatttatctacaggctatgtagattgtaattgaaatgaaaagtagagaaagcagttattttagccccaccctcaaaataactccttggcctggcttctgggtacttttggtggtatgtctcctagttccattgtaacatgttgataagagccagctttcttattttccccaaatagctctcacacataaacactaacccaatccatctgggcttgtattgttcagttatcgtaagtatgggatgtttattcaggactagggtggggtggaggaagagtcaagccggagagtcgatt

SEQ ID NO: 432679 - DNA, 564 bp, Homo sapiens
agtgaattacatcaatgtattgcagtgtgttgcagaccacttatgcatgacacagtgcctagagtcacagttttagctgatctccttggaggccatacctcttctcaattcaaccccatcctttacagatgaagaaattgacatccagggaaattggcgtactgtctccaggccrtgcacctacttaataggaaagctttaaagttcatctctactaaacaaaattctggtaagatgtgtaactgcattttctcaggttctgaattataatttatctacaggctatgtagattgtaattgaaatgaaaagtagagaaagcagttattttagccccaccctcaaaataactccttggcctggcttctgggtacttttggtggtatgtctcctagttccattgtaacatgttgataagagccagctttcttattttccccaaatagctctcacacataaacactaacccaatccatctgggcttgtattgttcagttatcgtaagtatgggatgtttattcaggactagggtggggtggaggaagagtcaagccggagagtcgatt

SEQ ID NO: 432680 - DNA, 564 bp, Homo sapiens
agtgaattacatcaatgtattgcagtgtgttgcagaccacttatgcatgacacagtgcctagagtcacagttttagctgatctccttggaggccatacctcttctcaattcaaccccatcctttacagatgaagaaattgacatccagggaaattggcgtactgtctccaggccatgcacstacttaataggaaagctttaaagttcatctctactaaacaaaattctggtaagatgtgtaactgcattttctcaggttctgaattataatttatctacaggctatgtagattgtaattgaaatgaaaagtagagaaagcagttattttagccccaccctcaaaataactccttggcctggcttctgggtacttttggtggtatgtctcctagttccattgtaacatgttgataagagccagctttcttattttccccaaatagctctcacacataaacactaacccaatccatctgggcttgtattgttcagttatcgtaagtatgggatgtttattcaggactagggtggggtggaggaagagtcaagccggagagtcgatt

SEQ ID NO: 432681 - DNA, 564 bp, Homo sapiens
agtgaattacatcaatgtattgcagtgtgttgcagaccacttatgcatgacacagtgcctagagtcacagttttagctgatctccttggaggccatacctcttctcaattcaaccccatcctttacagatgaagaaattgacatccagggaaattggcgtactgtctccaggccatgcacctacttaataggaaagctttaaagttcatctctactaaacaaaattctggtaagatgtgtaactgcattttctcaggttctgaattataatttatctacaggctatgtagattgtaattgaaatgaaaagtagagaaagcagttattttagccccaccctcaaaataactccttggcctggcttctgggtacttttggtggtatgtctcctagttccattgtaacatgttgataagagccagctttcttattttccccaaatagctctcacacataaacactaacccaatccatctgggyttgtattgttcagttatcgtaagtatgggatgtttattcaggactagggtggggtggaggaagagtcaagccggagagtcgatt

SEQ ID NO: 432682 - DNA, 572 bp, Homo sapiens
tgttgagtctggctgtaggatggagatattttaatggatcgtttttcacagtaaatggctgcatattgtataaattgtattgagttgttatgatgttaatatataaatattaagaaaaccattggggaaaagttacagtgtaattgagatagcctattttccaatgttaataagttcttcattaatttttttctccataaaaatattgagggagtttaattcacattaaaaacttataaacatacatttaaaaartattttacatcccaactcaacaacaggaaacaataccactcctcatctggaaaacctctatgtatcatttaaataaggcatagaaaaaagaaaaacaccccaaagccaaagtaccccatggtaacaaaaaaatcttcagagaggtttttcaggagagagaatttgtttcttcctatttagctttagggcaatgatctttttaaccatgttgccgcagacaaaagattcaatattagcattaatgcctgcttttgataaagtataagagaatgaaatataatctacaataacacaaaaccctgatcataaaagtgaac

SEQ ID NO: 432683 - DNA, 576 bp, Homo sapiens
cttttataagacctgactttaacttaggtattatttattcttggactggtgtgaaaaaaattcatcagcttttttttttaaaggtttaattacatatacacatgagtgtatgtcgctgctcacacccaattttctttgccttctgttatgctatgactggaaagcagatgtttattwtaaattatatttcttttaatatgtgactaagtaaatatatgggattgaattctttctttcttgaacttctgctaaaacttaaactatactaatatcaactctgcagaatctgtttaaaaataggagcagctggggtacagtatttcatgattgaatactaaagctttcaattcgaaagaaagctgggaggtcggaacaactgaaagactccaaatgcatcatgtctaaaaaagccaaaagacaagccaaagctataaaaatttcttgtcgtattcatttcttctttctatctatacagttagagtactgtaaagcatttgatttctttcaaaactcttggctggacatttgttctcaaattattagaatttttttattgtatagagaatgtatattctt

SEQ ID NO: 432684 - DNA, 576 bp, Homo sapiens
cttttataagacctgactttaacttaggtattatttattcttggactggtgtgaaaaaaattcatcagcttttttttttaaaggtttaattacatatacacatgagtgtatgtcgctgctcacacccaattttctttgccttctgttatgctatgactggaaagcagatgtttattttaaattatatttcttttaatatgtgactaagtaaatatatgggattgaattctttctttcttgaacttctgctaaaacttaaactatactaatatcaactctgcagaatctgtttaaaaataggagcagctggggtacagtatttcatgattgaatactaaagctttcaattygaaagaaagctgggaggtcggaacaactgaaagactccaaatgcatcatgtctaaaaaagccaaaagacaagccaaagctataaaaatttcttgtcgtattcatttcttctttctatctatacagttagagtactgtaaagcatttgatttctttcaaaactcttggctggacatttgttctcaaattattagaatttttttattgtatagagaatgtatattctt

SEQ ID NO: 432685 - DNA, 576 bp, Homo sapiens
cttttataagacctgactttaacttaggtattatttattcttggactggtgtgaaaaaaattcatcagcttttttttttaaaggtttaattacatatacacatgagtgtatgtcgctgctcacacccaattttctttgccttctgttatgctatgactggaaagcagatgtttattttaaattatatttcttttaatatgtgactaagtaaatatatgggattgaattctttctttcttgaacttctgctaaaacttaaactatactaatatcaactctgcagaatctgtttaaaaataggagcagctggggtacagtatttcatgattgaatactaaagctttcaattcgaaagaaagctgggaggtcggaacaactgaaagactccaaatgcatcatgtctaaaaaagccaaaagacaagccaaagctataaaaatttcttgtcgtattcatttcttctttctatctatacagttagagtactgtaaagcatttgatttctttcaaaactcttggctggacatttgttctcraattattagaatttttttattgtatagagaatgtatattctt

SEQ ID NO: 432686 - DNA, 470 bp, Homo sapiens
ccctccagtaattccctctccttcatcccatgaagactgagtggaaaggtaactccatgtgyttgctttcttactagagaaactaaaaaggccatgtagatcccttactctatatagatccttcttcttaactccggtactgtcaagagcatcttgaccaactagatatacttcctcaagggaaaactgaaccttgaatgggatgacgcagaaacagattttatttattcttatcatagcagtgccaaggcgggacttccaggtgtttcctgtgactgagatagggactgcctgctgcctattcccatcttacttccttttggtcctataaacaacttcatgcccttccaataaattattaatattatgattcctaggctgactagctagtagtaatttctgctgctggtgtatacagataatatgtcagctattatttcagctctgatggtgatgttaggtttgtgttc

SEQ ID NO: 432687 - DNA, 470 bp, Homo sapiens
ccctccagtaattccctctccttcatcccatgaagactgagtggaaaggtaactccatgtgcttgctttcttactagagaaactaaaaaggccatgtagatcccttactctatatagatccttcttcttaactccggtactgtcaagagcatcttgaccaactagatatacttcctcaagggaaaaytgaaccttgaatgggatgacgcagaaacagattttatttattcttatcatagcagtgccaaggcgggacttccaggtgtttcctgtgactgagatagggactgcctgctgcctattcccatcttacttccttttggtcctataaacaacttcatgcccttccaataaattattaatattatgattcctaggctgactagctagtagtaatttctgctgctggtgtatacagataatatgtcagctattatttcagctctgatggtgatgttaggtttgtgttc

SEQ ID NO: 432688 - DNA, 526 bp, Homo sapiens
cagcacgtgtagggctccaagaagtttaatactgaaagaaagggaagaaaaaaatggtagcacctggatcagcaaggtcaacggagaatgttttaattgctactgtcattgggctatttggctaactctaggtgggaaagcagtttaataacttactttaactatgaaaaaatttacctcaaacccagaaatatccattaaactgaagatttgtggactgtttttatccgtgtgagtcagggaagtgcactgcatttgcaggaaaaagtccaggtatgtatgccaggtataaaagatcggtttcacctgtgcagtctatccagcacagctgattagggctctctaccttctggatgctgccgctggcacagaggctgtcttggaacagaagagcttgagctctttatgctgtaatagctaagccagcacttttaccccwtgctggccttgaggccagcttgtccaaggcactgaggacacatgtgcagtatcatatgtccctctcttctttaaattaggtcagcca

SEQ ID NO: 432689 - DNA, 534 bp, Homo sapiens
accgtataccagcgccaaccaccatctcaatattagctaatggcctccatttccatttcacagaaaaaaaaagaaggtgccacatggkaagtccataactttccactgcctgcatcccactcaccctcttcccctgcttcccttctcttataattcagaaagatcctttcttccatattaggtcaatccttgtaccttgtatgtgcactttgaattccatccttactgcctttctaagaatctttctttttcttctaacaaattgttgattacccactctctttcttatatcttcatcttctccctctcaaccggattcttttcatccttaagaatgcccaaggcttcgtgatggctcacccctgtaatcccagcactttgggaggccgaggcgggcggatcacgaggtcaggagatcgagaccatcctggctaacacggtgaaatcccgtctctactgaaaatacaaaaaaaaatattagctgggcatgatggcgggcgcctgtagtcccagctactccggaggctgaggcag

SEQ ID NO: 432690 - DNA, 558 bp, Homo sapiens
catgcagtgggcagtgggatgatcttggctcactgcaaccttcaccttccaggttcaagcgactcttgtgcctcagccacctgagtagctgggattacaggtatgtgccaccatgtcctgctaatttttgtaattttagtagagatagggttttgccatggtggcctggctkgtctcaaaactcctgacctcaggtgacctgcccccctcagcctcctaaagtgctgggattataggtgtgacccaccgcacctggcctccaattggttttctacagtacaaccagtattatatttcaaatctgatcttgtcaccctctcactttaagctttttagtgcttctcatgggtcttaggatcttacaaggccctgcatgatccagcccgtttgtctctccaacctggccctcatctcacacattctctcactttgtttttgcttgcattctttcctcttcctggaatcaatctatctatctatctatcatctatctatctatctcttccatatttcttacacacacgcacaactttccttagttgaatcaaacacactttt

SEQ ID NO: 432691 - DNA, 558 bp, Homo sapiens
catgcagtgggcagtgggatgatcttggctcactgcaaccttcaccttccaggttcaagcgactcttgtgcctcagccacctgagtagctgggattacaggtatgtgccaccatgtcctgctaatttttgtaattttagtagagatagggttttgccatggtggcctggcttgtctcaaaactcctgacctcaggtgacctgcccccctcagcctcctaaagtgctgggattataggtgtgacccaccgcacctggcctccaattggttttctacagtacaaccagtattatatttcaaatctgatcttgtcaccctctcactttaagctttttagygcttctcatgggtcttaggatcttacaaggccctgcatgatccagcccgtttgtctctccaacctggccctcatctcacacattctctcactttgtttttgcttgcattctttcctcttcctggaatcaatctatctatctatctatcatctatctatctatctcttccatatttcttacacacacgcacaactttccttagttgaatcaaacacactttt

SEQ ID NO: 432692 - DNA, 549 bp, Homo sapiens
aatatattgtgaatggcattctggcccatggcctattaataagtggaaggaaaggaaaggaagggaagggaagtgaaggggaagggaacgggaaggggagggagaaaggaaagaaggagtggggggaagggagggaagggaaataaggacagagagaggcaaggagggaaaggaaggaaagaaatcataaatcaccaccattcatctccttaggataattttgaaccagttttttatcccctttctwctttacattcttccataaagccttaccaaatctccttcttgtgtcctgttatataataatgtcatgtacattatataattaaggcaaataacccatgcccttatggggcttctttttcagaataagaatacacataggcaaacaaggtcactgcagcccgtgctaagttctaggagaacgtagagggatatgatcatgagaacaagggactggatagtggcacagcactggaagaaggcctgtctgagtcactgagatttatactgaatcctaaagaatgtggaaagaggaagcctttctga

SEQ ID NO: 432693 - DNA, 549 bp, Homo sapiens
aatatattgtgaatggcattctggcccatggcctattaataagtggaaggaaaggaaaggaagggaagggaagtgaaggggaagggaacgggaaggggagggagaaaggaaagaaggagtggggggaagggagggaagggaaataaggacagagagaggcaaggagggaaaggaaggaaagaaatcataaatcaccaccattcatctccttaggataattttgaaccagttttttatcccctttctactttacattcttccataaagccttaccaaatctccttcttgtgtcctgttatataataatgtcatgtacattatataattaaggcaaataacccatgcccttatggggcttctttttcagaataagaatacacataggcaaacaaggtcactgcagcccgtgcyaagttctaggagaacgtagagggatatgatcatgagaacaagggactggatagtggcacagcactggaagaaggcctgtctgagtcactgagatttatactgaatcctaaagaatgtggaaagaggaagcctttctga

SEQ ID NO: 432694 - DNA, 533 bp, Homo sapiens
taagaaaactaatcttcctaattcatatgtgcaaccacaaatatttctaagagaaagaaaagaggccatgcagcatcaatgcaattgagactaccacggtagagtggaaccctttactccaattctccgtggaatatataatcaacctaggaatccatcatatagtggcttgatttatctgttgaaagccacatgaagtgatttttgcaccattcatttgcttagtytatgaaaaggtgctatgtatccaggacagcgtctaggatatggtggctaagagactagactcaagacacagactgcttctgtgtaagtccaggtctgcaatttactgtgtaaatttggacagcacttctctgtgcagtacaatattctgtgcctccgttttttcctttctaagatgaaggtgctcatagtgcctgccttatgggattgttgtgtggattaaatgagttcttatatgttaagtgtttataccaatgctggcacatgagaagttacacgtaaatattagcttttgttgttattatagt

SEQ ID NO: 432695 - DNA, 576 bp, Homo sapiens
tcatcaacttgttgctggtggagggttttgcctccatttgatggcagccaactaatcagagtggaagttgctgaaggttggattggctgtggcaatttcttaaaatgagacaacaatgaagtctgccacagcacttcattcttcctttcacaaaatatttctctacagcatatggtgctgtttcacagcattttaccctcagaagaacttctttcaaaaatgaaatcaatcttctcaaaccttgctgctgctttatcaactaagtttatgtaatattctacatattttgttaccatttcaacaaggttctcagcatctttcccagtagtagattctatttccaaacccactttattttctcatccatatgaagcagctcctcatcygctcaagttttatcatgagattacagcaatttagctacatcttcagattctacttctaactctacttctcttattttgaccacatctgtggttactttctccactgaaattctgaacccttgaaagtcatccatgaaggttggaatcaacttcttccaaattcctgtcaaagttgacattttgaccttta

SEQ ID NO: 432696 - DNA, 614 bp, Homo sapiens
actagttttgctagcatctgttcccacagcaaaattcattttgcttcattttgcctcagttccctgacctatgaaatgttcagaagaatggacagttactctctattaaattattatgtatgaaagaataaaataatttttagctgtggtcacacagcataactggtattatgctgatgaaaacagtatttttgtttttaatgtaactgagtttgatgtacttttccatcattcaatatagatacttaaaaggcaatgagccccatcataggcatggttcaaacatactgcaatcgctgttcaaaataagcttgtgcttcacaaagcatgctcactaacagtacatgacttcacaattcagtgaggtgcagagggtggatttcgttacagctgtggtacacttgtcaaaaattatagattaaatgacttgtccagggtaataagactcagagtctggactcagacccaggtcttctaactctaaaagcaagttgcatcatggtacaccygcatgtgcagaggccatgttccacgtacattcacatattacttgtgatttttaaaatttgtaattgttttctttgaagtcaatctaaaatattttaaggttaact

SEQ ID NO: 432697 - DNA, 597 bp, Homo sapiens
gttttgctttgctgtccaggctggtcttgaactactggcctcaagtgatacccctgccttggtttcccaaaatgttgggattataggtgtgagccacacaccaggtcagaataatttattttaaacatgaaagaaagtaattatctatatagaattctatacagagttaaattatgtagaagaaatgagtactttcaagaaagagtatttctaaccactccctgacaaattctttttttggttttaatttccatttttatcttagtttcatggggtacatgtgcaggttcgtaacacaggtatattatgtgatattgaggcttggacttctggtgatcccatcacccagacagtgaacattgtacccaataggaactttttcagcccttgccctcctcctgccctccctmtttttggagtcaccattgtctattttcgtctatatctgtgtgtaggcaagatttaactctcactgttaactaagaacatgtgatatttgatttcctgtttctgcattgattcacctagggtaatggtctccagctgcatccatgttgctgcaaaggacactatgtcatttttttatagctgcatggt

SEQ ID NO: 432698 - DNA, 597 bp, Homo sapiens
gttttgctttgctgtccaggctggtcttgaactactggcctcaagtgatacccctgccttggtttcccaaaatgttgggattataggtgtgagccacacaccaggtcagaataatttattttaaacatgaaagaaagtaattatctatatagaattctatacagagttaaattatgtagaagaaatgagtactttcaagaaagagtatttctaaccactccctgacaaattctttttttggttttaatttccatttttatcttagtttcatggggtacatgtgcaggttcgtaacacaggtatattatgtgatattgaggcttggacttctggtgatcccatcacccagacagtgaacattgtacccaataggaactttttcagcccttgccctcctcctgccctccctctttttggagtcaccattgtctattttcgtctatatctgtgtgtaggcaagatttaactctcactgttaactaagaacatgtgatatttgatttcctgtttctgcattgattcacctagggtaatggtctccagctgcrtccatgttgctgcaaaggacactatgtcatttttttatagctgcatggt

SEQ ID NO: 432699 - DNA, 545 bp, Homo sapiens
taaataaaataattgataatagaaggcttgtcacagaggagatttgcaggcaatgctgcttctctttattgtgttatgcacagatttgaacttgaaagtgaagcagagaggcggtcatcctgaaattttcagaactcaccaacatttttcattagccctccctaccgtcattacccaaggtggaaattcaaattcagcttgcccctaaaccattggtccccaacctttttggctccagggacctgtttcgtggagggcaatgtttgcaygaatgagagtttgggggtttgaggggatagtttcaggatgaaactgttccacctcagatcatcaggcattagttacattctcataaggagcgcacaacctagatcctttgcatccgcattttacaatagggtttatgtgcctatgagaatctaatgcctgctgatctgacaggagatggagctcaggcagtattgctggctcacccactgctcacctcctgctgtatggcccggttcctaacaggccacagatgaatactgatctatggctcgggg

SEQ ID NO: 432700 - DNA, 513 bp, Homo sapiens
ccctgtggtgtgggggaaggagaggaaaacgaatgggagcagcagcagcagctctccataacttgagtttacatgaacccctgctctcttttcatattcttctgtaaagtcttgtaatatgttcatgttctcctatatccctccacgccttcctctcctactctatttctctttctttcttttttttgttttttgttttttaaacaatcaagacctaaatgacagctrtaccccaaagtgttttgagataatggttgcttaaaatggcttaatggatgctgggtagcaaaatgctgttttatctttttaaatctttgttcccaaatatatgaccaaaggagagtaacaacaaatccaccgacagtagaaaatcagggacaatatgttgttttctaaaaagtaaaactgagtgatattttcatgcaaaatagaaattttgacatgttgcattttcatgcaaatgacatgctggccctaaagcatttgaagttcaagttaacatgtatctaaaag

SEQ ID NO: 432701 - DNA, 559 bp, Homo sapiens
agactctctcattaatttctgtattgacctagcaagcatttagcaataattaggtgaatgaataagttgaatgaatttaatccagggcataaaattactaaataatacaaatatgtttctcttagtgtcttttaatataaaaacaaaaattatattgcagcaactcagactgtaaaataaaggattagaattagatgtgaattagaattttacatttaataagacaggtggtaaatatcatggaaaagattcattatgaggaaactgacttgacaaatatcttctgaataaaattgctacgaatcttattatgttaaatytaaactgttaactttggtcactagttactagactaattcttgtcatttatgctaacattagccacatgtattttggctggacattaaggattctaacaaatctgagatggcttagcataactatttcccatttttaaagaaagtatgaggagctaattcagtcaggtcatgtctcctagtaaatatgattggtgggtgcatccagtatgttgggtcagttgagttgaggatatactttt

SEQ ID NO: 432702 - DNA, 562 bp, Homo sapiens
agtcgtcacattgctgcaacagtcatttcagccggcagccagccacatttcatccgttctttcccactccactcacacccctcaaccccactctccactcttgctttccctaaatctgagttattttaaaggaaatttcagtcrtcagatcattttatcccatagcattttagtatgacatttaagtactcttaaaacaacaacaaaaaaccttaacactttttatcatatctaaaaatattataccttaaaaatccttcatatcaaatttgtagtccatgtttgtttccagaattgtcttaaaatctttgaaaatttagtttgtttaatcagaattcaaacaaagtccacacatttcatttggttgctgtgtctcctaagtctcttttaagaatctaagttcatagatttctcaccattttttattacttgtaatttgtttattgcagaaaccaggatgtttatcctatagcatttacaacattctagactttgctgaactattctaatattcactatctcatttaatattctcaataactctatgagtaggcactactgt

SEQ ID NO: 432703 - DNA, 562 bp, Homo sapiens
agtcgtcacattgctgcaacagtcatttcagccggcagccagccacatttcatccgttctttcccactccactcacacccctcaaccccactctccactcttgctttccctaaatctgagttattttaaaggaaatttcagtcgtcagatcattttatcccatagcattttagtatgacatttaagtactcttaaaacaacaacaaaaaaccttaacactttttatcatatctaaaaatattataccttaaaaatccttcatatcaaatttgtastccatgtttgtttccagaattgtcttaaaatctttgaaaatttagtttgtttaatcagaattcaaacaaagtccacacatttcatttggttgctgtgtctcctaagtctcttttaagaatctaagttcatagatttctcaccattttttattacttgtaatttgtttattgcagaaaccaggatgtttatcctatagcatttacaacattctagactttgctgaactattctaatattcactatctcatttaatattctcaataactctatgagtaggcactactgt

SEQ ID NO: 432704 - DNA, 562 bp, Homo sapiens
agtcgtcacattgctgcaacagtcatttcagccggcagccagccacatttcatccgttctttcccactccactcacacccctcaaccccactctccactcttgctttccctaaatctgagttattttaaaggaaatttcagtcgtcagatcattttatcccatagcattttagtatgacatttaagtactcttaaaacaacaacaaaaaaccttaacactttttatcatatctaaaaatattataccttaaaaatccttcatatcaaatttgtagtccatgtttgtttccaraattgtcttaaaatctttgaaaatttagtttgtttaatcagaattcaaacaaagtccacacatttcatttggttgctgtgtctcctaagtctcttttaagaatctaagttcatagatttctcaccattttttattacttgtaatttgtttattgcagaaaccaggatgtttatcctatagcatttacaacattctagactttgctgaactattctaatattcactatctcatttaatattctcaataactctatgagtaggcactactgt

SEQ ID NO: 432705 - DNA, 396 bp, Homo sapiens
gactgtgtgctctttcccagcctatggacacttgataccctcatgccgttgctcatgcccccttttcctagagtccctttcccttctcagcctgaagtagtctcttgctttttcaattcttagagccctttgtgtttcttttagagactacatcactttgcatcattctctagttatttgaagtggtgacttctgtatcccctttaaaggcaaagcccatggcttacccatctttccacccttttctcgtaatatcttgttgtttgtagtgagtgcctcctatgtgttggttgtattaatttctactacaagtccatgttgttttaagttgtaggagaaggaarcgtgggagcacaagcagcttgagggccctggtgttttacagcccttagggaa

SEQ ID NO: 432706 - DNA, 579 bp, Homo sapiens
tgttgtgcttctgattagttgccctctcaaccataagcagcctataaacagggcctggctccatccttgttacttccccattgcactgaattcagtatttttccctcaaggtagatagttgtggggcagcatccctaaaaatgtccagttatataatggcatccagtaaatgttttcttaattacttacctccattaacaagctttatgcaaaaaaaaaaaaaaaaaaaggaatgctgactttagacttcatctccacttaaaggaagatttctgttgcttttcacaatagatatgttggatattttgcacaagtgaaacatctctacaactggaatctccctccaagacggatactctttataawaagattcattatttattcgattcgtggtaagtgctttatgtgtaattgaagaattgggcaggagggccaatgtccccactctgggagagttttgctcatagttatatatacagatgagcctaactcatacctgtctttttacatattgtcacacaggaactcctccttatttatgcccctcctcctgcaattgcccattgattgccagccctg

SEQ ID NO: 432707 - DNA, 603 bp, Homo sapiens
aatctttttttcatggctatttggcagacacactcatttcaaagagtgattctgaaactttataggcttagggttttttgtgcaattaataattattgcatagaagtaaccaacaccctgaattaggtgtttgtcattgtcatgcacttttcatacattttaccatatatgtgtatggccataaatcatatgtagaattggtgtttctgtcctaaaatttcaatcatataactgattgtacattataaatatattattcagcagctttcttttgcttactcagcgttatagttttgagatcagtcgatatgttttgttcacacccattgatttgtccaaagagatgcattgctattttcagaagtagttctagttgagtttacatttcctatagtatttcatgctatgacagtaccacatttaattcaactctsttttgtggtgagaaaaagataaaaacattaaaaaatgatggcatatcccaaagagcttttgtttaagtggattgtatctattgatatttactatatcagaaactgaagctgaataatttaaaatataagcatgcaccaccatgcattccaatagccattataactctgg

SEQ ID NO: 432708 - DNA, 346 bp, Homo sapiens
agcgaattggataaagaaaatgtggtacgtatacttcatggaatactacacagccataaaaagaacaaaattatgttctttgcagcaacatggatgcagctggaggccattatcctaagcaaattmacacaggaacagaaaaccaaataccgcatattctcacttgtacgtgggagctaaacatcaggtattcatggtcacaaagatggaaacaaaagacattgtgggctactagtggggaaagggagggtggtggtgagggttgaaattctaactgttgggtagtatggttggtatttgggtggtgggtgtattcataccacaaaccttagcatcatgtcattta

SEQ ID NO: 432709 - DNA, 587 bp, Homo sapiens
ttcaaatttgtgctgtccataataccttgcagccagaactactttatgtgttcgatgggatggaagagaaaaagggatcccaaactccatacagctgtcatcttccaagcacgtattttcttgggaacttggtatcatgttttacaggagcctacttacttggccacttctctcaaatccttggtgtgtgtttgggggtttaaaaagaggtgatcatacccatcttctcttctagattctgagccaatccaaaacagacagaagaagccagatgtagatgtaatacaatatcagctttgtttaaggtaaagctggtgggttagagaatgcagcttgattcaagcctggaccagagcttcctattctccctgaccaaccagccagtcagaaattgaacagtagagaactcaggtggaaaacctctctggtgagcttaaccaggtagaggaagaagtagggaagakaccttctctgcttgctggcagaaagagagagcgaagagggcactcggctgagccataatcaaaccattctcatagatctctcccttgcaatgaagagtgagggagagcgtatgtgtccaccca

SEQ ID NO: 432710 - DNA, 608 bp, Homo sapiens
gtgtttttctggagaaggagcaagcaggaagagcattagatgagatgttatgggcagcctgaagagagttccaagtgcagaaaagaagcagagatgaggcctgcaattaggatgtagctgttcaacacagcccagggccaggaatccagccacctgggaagactgaaactactgtggcattcctggcccagcggctragatacctgacctgttatcaaagcagggtccaggcttggcagaacccaccagagaacatgattccagtagagcaaacctggggcttggtcctaggaacatgtcagaagtcagagccaggccacagagccagaatattctccacttaagacatgattacatttcctaagctaattgctttttctccaaagaagcctcagatctccggtttagagctttcgccatgatgtacaacgttatgcttaaaacacatcaaaacatcctccttgctggggaatgctactggattctctcatcttggcttagcatgctaccatattccaattatcctgaggctctttggagacagagacgggcaggatggggaaaagctcttcagcctccaggctaagtttgaaacatactctctttgt

SEQ ID NO: 432711 - DNA, 538 bp, Homo sapiens
atggagcacagggcatgcataaggatggatggacaagaagtttttgaaaggaaaagaccacagagtctgtattcaacaaagatttgctgaaccgcttctaactcacaggtaatgtttggtactggagttgcaacagagagagctctgtccttgtcctgcaataatagcaaatgcaagagrcaaagacttgggggacacagaaaatcctctgtctttgagagagtagttctaggacagtttatcaacatccaaactgcagaggtaaggagaaggcaaagaaagtagaaagagtaggtgtaagttacttactccaagcgtttgggggctagaagaaagaaaaagattaatagttgactaaaaaacaaataaagcagagaaaactggtttagtttttaagatggggaaaatttgagaagatttgaaaggagaaaaagaaagaaaaggcccgtgaagaaggtaagattggtgagcccaggaggagaaagtgggataaggatggactggacactcacaggtgagacatccagggaaagaaagg

SEQ ID NO: 432712 - DNA, 567 bp, Homo sapiens
tttgcttctcctttcagacttccttttattttaaaaaataatttgaatgcaaatgagagatattaatgcagggctcttaataattgactcttgttttagtcattaactattgaattaagtaggcaaacaaatatgtgttcagcattcattagcccacccctgcataacttcagggagctaagaggaaaacccagagggcttttatacatggagggaaatggaatgtgtagctgccatatgacctagtccagttggtgagaatagtagatgtggcattaacttaaaatatatttttgtgaattgtaatttacatgcaaatttgctctttttgaccttgcctttggtgtttccttcaaatgagtaaaatamtaagcttttataaactgcatgatttcattagatcacaaaagttcagtagaataatgcatgctatagttatttcttaactactgtgctaattagagttcttgaaggccaaggtcatttaaatactatgtgtaatggaaagagaattgaactgggaatgaggaagatacagccatatttccagcaaggccaacagccagc

SEQ ID NO: 432713 - DNA, 535 bp, Homo sapiens
attattaagataaatagagctttgttgattcccttcccctagtgaatggattcctccccacacattcacaaatttggtaatagagaatatgttaccagagaaaaaggaatacttttattgattttttcttttttacaaacatcatgtgcaagcaccacagtatgattttatgctatctttatcccagaatgagtgaaatgttaaattttatctaatattggcttctaggggcaatagggagtgaaatagattaaagtggattatctcagaggcggggcagattgaaattccagtgctttgatgtgggagacaggtgtagtatggcattagaaatagtgctggaaatcctaaactgagaccattaggtatttgaatgctgtttgcatgaataataccaaataatttgcatatatatgtctttgcagaggctgaaaatgaacaygtagcacttctgccttgggattctaagcaaaggccttgttggctgaatgttgcctttgggaggaaagatcattctaggggagtttactattga

SEQ ID NO: 432714 - DNA, 396 bp, Homo sapiens
cccagggtcttggtttgcctggaggatggaaggaaaatataagaagcacttgcagatagcatacagtctggctttgaatgatcagatgtgaatatgtttcttgggatttgagggaggttggacaaggggtaggtgtggaagtgcagagtgagttggagaaagaagtctggcaaagaagttgtaatgactcaggaaagggaatagggttgtctctttccctatgggtagaggtagatattttaggaaaaaagagagagagagaaaaaggataaaaytttgttatgatccccccaaaacttgttatgtaagatatatatctactgataggacattttgaaaattagtatcagctttatatttgggcacatgatttcactgagatggttcttgggcaga

SEQ ID NO: 432715 - DNA, 534 bp, Homo sapiens
acctgcttgctgagggcacacagctacagggcattagggctgtattgccttagaacccgtgcacatgacccctcattctctgcctgccacctctttgctttcaaagtaatcatcctcacacatagcacagactccactagcccagatcatgaggcccatcccaggatggtccttcctgtctttgtgcttcctattccctgccatgaatcttgygattcaactctgcagactgtaaggcacacccccaaacaccacactcttttacttctcccttccctggcacatcctcctctccttacagggaccgttgtatatgccagactcatagtctacacatccagcgtcttcccatgggaaaattccccctcagccagcaggaacccctcaaaagttcactcctccctgaagtccacctgacctctcactcactcctgtctttcataactgtgctttccttggttacagtacctaacacatttatcatcctcagagggctgcgcatgtgctttgaaataattcatttgcttgtctggc

SEQ ID NO: 432716 - DNA, 534 bp, Homo sapiens
acctgcttgctgagggcacacagctacagggcattagggctgtattgccttagaacccgtgcacatgacccctcattctctgcctgccacctctttgctttcaaagtaatcatcctcacacatagcacagactccactagcccagatcatgaggcccatcccaggatggtccttcctgtctttgtgcttcctattccctgccatgaatcttgtgattcaactctgcagactgtaaggcacacccccaaacaccacactcttttacttctcccttccctggcacatcctcctctccttacagggacygttgtatatgccagactcatagtctacacatccagcgtcttcccatgggaaaattccccctcagccagcaggaacccctcaaaagttcactcctccctgaagtccacctgacctctcactcactcctgtctttcataactgtgctttccttggttacagtacctaacacatttatcatcctcagagggctgcgcatgtgctttgaaataattcatttgcttgtctggc

SEQ ID NO: 432717 - DNA, 534 bp, Homo sapiens
acctgcttgctgagggcacacagctacagggcattagggctgtattgccttagaacccgtgcacatgacccctcattctctgcctgccacctctttgctttcaaagtaatcatcctcacacatagcacagactccactagcccagatcatgaggcccatcccaggatggtccttcctgtctttgtgcttcctattccctgccatgaatcttgtgattcaactctgcagactgtaaggcacacccccaaacaccacactcttttacttctcccttccctggcacatcctcctctccttacagggaccgttgtatatgccagactcatagtctacacatccagcgtcttcccatgggaaaattccccctcagccagcaggaacccctcaaaagtycactcctccctgaagtccacctgacctctcactcactcctgtctttcataactgtgctttccttggttacagtacctaacacatttatcatcctcagagggctgcgcatgtgctttgaaataattcatttgcttgtctggc

SEQ ID NO: 432718 - DNA, 562 bp, Homo sapiens
gcaaaactccatctcaaaaaagaaaaaaaaatttattatttctatttatttatcttgtttttctctttatgctgtttgaaatcacagtggactatgtcagcaagagcataaaagtaccacttagtttaaatcctgctaygtcttaaagaaattataatggtaagttgtgggaattctagagatgcaattgaatagagagtggaaattggattataaagccaatagctgtgttttttattttaaaattgttttgtacatattatgtattataaaaaagactcatatttgctgcagatatgtattcatcatattctgacttagaagaaacatgttctatccatgtcagagtttagaatgaaatgttaattatctttctattgattttctctgatttgagttaattgattttgttagcataattgttattctaccattccttagcttcattgtgatcaaaatacacagtaaagaaaattatgaggggaattcttactatctgatttaatatttcatgtagagctacaatagtcaagacagcttggttttggagaaagaatataca

SEQ ID NO: 432719 - DNA, 445 bp, Homo sapiens
gacattattgtttcaaatgtctgctaagttgttgggtcataaatacttcttaaattatttgactttacctacttaataattagaaacttaagttttccttttggtctaagggctgtgcaaaggaattgctgagacactgaggacatagtggatctacagtctggattcttatgattatattaatcactctttaattaaaatcattcattcactgaggtggaacctcactaaggaggccatcacttaatctgcaactcctcttatgcatccatgaaagtatcacaagagagcgtaaaacaggaacttaaacaggactcagcaggcctgaggctgcgactcctccttaagtccgtatgtcacccaactgatcaagaaagctggyctctccatcagcaaattcaaggtggtctggagagaaaggaagcccacaggcaaaggcttggcc

SEQ ID NO: 432720 - DNA, 565 bp, Homo sapiens
ggtgtggttgtggctcctctgctggattcttacagtgttgggagcggaagctgtggtacctgtgttctgtctcccacccacggcccagttgctcagcagaattatgtgaaagcttccaaatgtgtgttttgaagaaatcaaagaatgtaacagagtaggtgagggtgtggagcctggagcaagaagacacttgcttgtgtttagtcttgtcttggccacttcttaggttgtgacctcgggcatactgtgtcaatctttcygagctgggttttctcacctgtaaaatggagagaataacagcaccaattttgcagagttgtgcttaggattacagcagccaatgcgtggaaagcacttagcccagttactgatgatcaaatggtatgtgcgaaatcagcacttgctgctgccctatcattattattactgaatcccatatttttgttttcaacttaaaagcataggctttggcttaaggaacattagaaatcctcctcattggtctcttcacagaggaggaaaaagaggaccagggagggggtctgtctggttaagaagaggcagg

SEQ ID NO: 432721 - DNA, 558 bp, Homo sapiens
agattaatatacttataaagctacaaaactcattatataaaattggttaaaattatagaaaattaaactgtaaaacacatggaagttgcatttcagaattaaaatgagctttaccatccctgtcagagcggagaggcttctaaatcttatagctttttaaacaggcaccacttatttctatctttacacttttaatacaagctgtaatatttggtaacactccttcacagccaagaatycactgtacattaatatcattaaaacggccattccttaccccacccccagcagaaaatgactattaattaagacaagcattttatacatactggaaaaaacgaaaaggcaaagttgaaacaaaatgctttgccaatgtatacaatatatgatatgcataggtagtgacttcgccagtggaatattattgctaatgtgcttttttctctaaaaactcatctctttgtccttgctgtgtataatcatttgttatttcttccaacacagaaaacagaagttcttgtgctgcttgtcatactacttcagtgtgtgctctttaaa

SEQ ID NO: 432722 - DNA, 597 bp, Homo sapiens
gttcattctctttccataaggcagatttcttttcccgttgtaacttggatgtatgttattcagacaataacccgatgttttcctacaaacagacctcagcagctctgagcaagattagggctcggatttcagtttccacggctgcctggaagcatccttttcctgacggtcaagatctcagaaattctcgaccctgaaagatgctttctgctgcctctgctcagaattaayacagaactgggcaacagaacacttttaaggtggatcttaggatcataagccctttttggctgccaaaaccatctctcctgtaacaccttacagttattctcactgttgcttactgagacttttatgagggttaggttttccaggcatgggtggagacaaggaggcaggctgcagcagggcttggagatggaaacactcagcatgacggcgatcgcccagggagttacttcttagcatggagacatatgtacttcttgtgaaatgttcactttctcagttcagcaaatctccttcctatggatgaatttttaggcagaaattcatatagtgcctccaggtgtccaggagcctgccacactactcctt

SEQ ID NO: 432723 - DNA, 608 bp, Homo sapiens
aaaacagttaaaatggtgaattttatgttctgtatrttttaccataccaaaaaggacataaaacatattgagatagtttttgagatttgtagatacatggatctttagatttctcttagggaatgtgtgcacagctgctcatgtatttggagaattcatgtctagtgtccttcacggtctgaatccagccctcttctctcacttcattttccttgttccagccacctggcagctcacacctgctaggcttttgtacaagttgttctctctactttcagtgccccttctccccgcacccagttgctgaatggaatctgatacttcaagacccagcccaagtggccaccacatttggaaaagttgtgctcactcctccagacgtaacctgtttcttcctctcctgtgttcccaaagaacttttctgcacttcagatacgtcccatgcctgtccccaaacagagtgaattgttggacagagatggtgtctcacctttgcaactcctacccatagcacagagcaaaacttgaagcagggccttagtaaacagttcagtaactgaatttttaaaatatatatatgtgattctttccttataaccctccgctgg

SEQ ID NO: 432724 - DNA, 608 bp, Homo sapiens
aaaacagttaaaatggtgaattttatgttctgtatattttaccataccaaaaaggacataaaacatattgagatagtttttgagatttgtagatacatggatctttagatttctcttagggaatgtgtgyacagctgctcatgtatttggagaattcatgtctagtgtccttcacggtctgaatccagccctcttctctcacttcattttccttgttccagccacctggcagctcacacctgctaggcttttgtacaagttgttctctctactttcagtgccccttctccccgcacccagttgctgaatggaatctgatacttcaagacccagcccaagtggccaccacatttggaaaagttgtgctcactcctccagacgtaacctgtttcttcctctcctgtgttcccaaagaacttttctgcacttcagatacgtcccatgcctgtccccaaacagagtgaattgttggacagagatggtgtctcacctttgcaactcctacccatagcacagagcaaaacttgaagcagggccttagtaaacagttcagtaactgaatttttaaaatatatatatgtgattctttccttataaccctccgctgg

SEQ ID NO: 432725 - DNA, 631 bp, Homo sapiens
  misc_feature (1)...(631): n = A,T,C or G
nnnnnnnnnnnnnnnaacacttctaccacctaaagatgatgaatattaatgatcccttatgtttcccagaaagttgccatgcatatatgagtatgtacatctgttctgcacagtcatggccattcaatactacccttattttttcatttttaatgtatctgtgagattcttatcttgcagtgcatggggacttatatttaaaattaaatctttttaaacttacttagagttcattacaggatgagccgtaatttctttaaccagctttcaatatacatgcaggctctagttctttgttttccatatataagggtgtggcattgttttccaaataatgccataccattatatttttgtgttgaatattatgtgattagagctataaggtataatttagagtatgtccctacaggtggaatcacttgttcaaacgaaaactaaattaaacatatttatagacaatgctatctcaccagctgggtattacagtgttgtttccccagtttaccaarcttttatatttttacccatctgataagaaaaacagttatatccatttgtgtacatgtttaataaaaatgagatttcctgcgtttctaagccttttcttccccctgtgatcacactccat

SEQ ID NO: 432726 - DNA, 626 bp, Homo sapiens
ctgagctaccgagattacaaacaagaggctgacacttgtgcatgagctggacatcctataaatcccataaaaatgattacaagaaaatatgagatggtgggggcaggcagagagagagagaaggtgtgtgtgtgtgtgtgtgtgtgtgtgtgtgtgtgtgtgtgkgtgtgtgtgtgtgtgtaggagagagaatgcgttggggcagaatttcaatatcaataaaagacctttctgatagatgttatccttggcctgattcaaataccaagaagcaattactggaatatatatatctgtttcttatttatttttagatatagtttgcatacaataattattcatcctttttaatgtacagttgtgagttttgataactgcgcacccttgtgtaaccaccataatcaagacaccgagtatttctgtcactctcccaaaccctttgtgctcctttgtagtcacccttttcctccacccaaagaccctggaaaccacagatctaattttggtccccacagtttttgtctttttcagaatgtcaaataagtggaatcatgcatttatacaaaatcatacgaaagggtgtcatttttgagtctgggttctttcatgtagcacaatgcatttgc

SEQ ID NO: 432727 - DNA, 626 bp, Homo sapiens
ctgagctaccgagattacaaacaagaggctgacacttgtgcatgagctggacatcctataaatcccataaaaatgattacaagaaaatatgagatggtgggggcaggcagagagagagagaaggtgtgtgtgtgtgtgtgtgtgtgtgtgtgtgtgtgtgtgtgtgtgtgtgtgtgtgtgtaggagagrgaatgcgttggggcagaatttcaatatcaataaaagacctttctgatagatgttatccttggcctgattcaaataccaagaagcaattactggaatatatatatctgtttcttatttatttttagatatagtttgcatacaataattattcatcctttttaatgtacagttgtgagttttgataactgcgcacccttgtgtaaccaccataatcaagacaccgagtatttctgtcactctcccaaaccctttgtgctcctttgtagtcacccttttcctccacccaaagaccctggaaaccacagatctaattttggtccccacagtttttgtctttttcagaatgtcaaataagtggaatcatgcatttatacaaaatcatacgaaagggtgtcatttttgagtctgggttctttcatgtagcacaatgcatttgc

SEQ ID NO: 432728 - DNA, 534 bp, Homo sapiens
taagccaccattatctgtagcctggaattctgcaatagcttctctaactgatctcctgctcctgaccttgacctctatcawccattctcatactgcagccagagatagcttttaaaaacacaaatcagaccatgtcagtcccctggcctcccacagttcttagaatcaaaaccaaattcttcattatggtctggaaggcctaacggaatctggcctctgcttatctctttatttagagaataaatgagcaaatgaatgcatgagagtgatacagcaatgctccacctatcttggatgaagcccagaatgtcttgcataagaggggtgactgctactgctgtcatttaacctttttggaatgtcttgagcactccgggctgtgtacaaaacacaatgataattcaatccctcaatcccagttttgtacactgggctgtgtacaaaacacaaagataattcaatacatttcaagagctgtattccaagaggttgttttccaaacatggaaagaagagaagggtcttgcttggcaac

SEQ ID NO: 432729 - DNA, 534 bp, Homo sapiens
taagccaccattatctgtagcctggaattctgcaatagcttctctaactgatctcctgctcctgaccttgacctctatcatccattctcatactgcagccagagatagcttttaaaaacacaaatcagaccatgtcagtcccctggcctcccacagttcttagaatcaaaaccaaattcttcattatggtctggaaggcctaacggaatctggcctctgcttatctctttatttagagaataaatgagcaaatgaatgcatgagagtgatacagcaatgctccacctatcttggatgaagcccagaatgtcttgcataagaggggtgactgctactgctgtcatttaacctttttggaatgtcttgagcactccgggctgtgtacaaaacacaawgataattcaatccctcaatcccagttttgtacactgggctgtgtacaaaacacaaagataattcaatacatttcaagagctgtattccaagaggttgttttccaaacatggaaagaagagaagggtcttgcttggcaac

SEQ ID NO: 432730 - DNA, 557 bp, Homo sapiens
ggtctctggtgtttcaagacaaaaccactggacaaagaacagacaatgcrtaaaagaaatacctaatggccaataaatatacaaagagatgctcagccttgcttgtaatgtaaataatgcaaggaaaaccagtacagcaatttttctatcaggatggcaaactctaaaagactgacagcaatgtaggcatgcaggggaatgtgcggaaacaaacacctttgtgtattgctgatgataatgtaaatttgtatgacttgagcataaactcagccaactcagcaagtttatcactatcaaattgttaaatgtttccaccttttgacccaacttttaaggtttccttaaacagataattgtacatgtgaacaaagaagatgcaaaaacatattaattgccatgtgatttataatagtgaaaaacagaaaataaattatgtccactaatagaagattggttaaataaattattgctcattcattcaaccattggttgagggcctactgagtgccagatagtattctatatacaatatatataatgcatccattaaaataatg

SEQ ID NO: 432731 - DNA, 545 bp, Homo sapiens
agacagagtgcaagtcctctccttgcctgccaaagcacgtcctcactgtggttgcttctttaagaatctttgtgaatgaagcattaaatgaaatgattaaaagagaaagaatacaccatgttcattattctgacgctgcacagtaaaagttactttcattttctttaatcacatttttgtagaatggtatcagaagtttaaaacagtctaatctcaaacttcttaaatagttgaaagaaaaatctctaggataacaactgaagtagtataatcttttcttataactgttcaggaataaaaggtttatgtttgcttgtgtgtgtgtgtgtgtgtgtgtgtgtgtgtgttcataatcagtgattcatactgaatcaataccttttgtggttttattgaaataatatgtttgaagtaatcaaraaaatttttaacctcgattcaaatttcaatacttaaagcttagtaaattatttataacttctgtgcattcaaagggaacaaccaaaagatgaaaagataacctatggaatgggagaattcacaaa

SEQ ID NO: 432732 - DNA, 567 bp, Homo sapiens
tactttcattttctttaatcacatttttgtagaatggtatcagaagtttaaaacagtctaatctcaaacttcttaaatagttgaaagaaaaatctctaggataacaactgaagtagtataatcttttcttataactgttcaggaataaaaggtttatgtttgcttgtgtgtgtgtgtgtgtgtgtgtgtgtgtgtgttcataatcagtgattcatactgaatcaataccttttgtggttttattgaaataatatgtttgaagtaatcaagaaaatttttaasctcgattcaaatttcaatacttaaagcttagtaaattatttataacttctgtgcattcaaagggaacaaccaaaagatgaaaagataacctatggaatgggagaattcacaaatcatatatctgataaggggttaatatccagaatatctaagaaacttgtgtttttacaacaacaacaaaaaaaacacctgatttaaaaatgtacaaaagacttgaatagacatttctccaaaaaagatacacaaatgaccaacaagcacaggaaaagatactcagcatcacta

SEQ ID NO: 432733 - DNA, 456 bp, Homo sapiens
tttatgtaaaagccctagactactggaagtgaaatctgagctgttaaggcactgaagtggactggagaggtagttygaggcctgtgaagcaggagctagagatggcaagctgggatgacacagaaaaaactggagaaagaattcacatagtcaagatagtcttaggagtggtcttaacagccattctgaatttcccctgatttcttgcagagtcatcatatttccgaagctgtcattggataacattacatccagctttaaattctgtgaatgtcagtcttgaccaacatttggagaacatgttttccaaggcacccttcagtacaactttagactgcaataaaataggtcatactggctgactcagaagaatgcaaatctccagtaactcatcagctaataaatgcggaacacaaatattaaacaaacaccaagacacatgatttgactctatcc

SEQ ID NO: 432734 - DNA, 595 bp, Homo sapiens
aaatcccaggtggcagaaagtcctgaaaatgtcaaggtgtttaagagcaccctgagttcctgcgccccaaaggaagcgtgccatttgtaactcaccaagagttttctttacgagtgtttttttttctatttttattaaataagaatccatgaataaatgtattcagatgcataaagttaaactttttactcttgattatgacaggagagtacagagaaagaaaaaaggaaggaaagatagaagaaaagacagaaggaaagaagaaaggaaggtgggaaggaaggagggagggagatgggaggaaaacaaggaaataaagaggaagaaagaaagttgggttttgcaaaattaaaaatgaaacctttcctactttgtggcctcaataaggttaaacatcttggcaaaattctacttctattackcccattttaacaaagacaaagtggagtgttttaaagttctcatttctcaaatacagtatttctaccccagtcatttttttagggcataatttttccccaaacagagtttagtttgtatttctcaactgtaaatcaaattatattcttcaggaccaaagcaggctgccttaaca

SEQ ID NO: 432735 - DNA, 604 bp, Homo sapiens
tgttaaatgtgttgacataaataaaataataagagctgtaagctgagtttaaaaactaaaggaataactaggttttcaaatttgtacctttaaaaagtgaatattaattttaaaaccaaaataaatcccttgaattcacttttgtgggcaaaaaaaaccccacctttgttgccaccaaaaactcacatttcctagttgtaacattttgggacaacttgcaagtagagaaggctgggtgagcagtacagagggtggatttcacaggtgcttggttctattggtaggggttctattcataaaagagtgccatccctgaagaaaacctgacacctgaaggtaatctataactaagggttataatcccttggggcttgaaaaggcaaaccaactccaaaccacataattttactctctaatggctgaaaattaatagggagtagaaggagaaagagaagttgtgatgagaytggccctgtttttttaattgtctacttcataatatctccaggcgtactccacttgttaactcttggagatgatcagaaacttatgtgggggctttaaaagacaacctcagacacttcaaaagattaacaactttaat

SEQ ID NO: 432736 - DNA, 521 bp, Homo sapiens
tagagaaggctgggtgagcagtacagagggtggatttcacaggtgcttggttctattggtaggggttctattcataaaagagtgccatccctgaagaaaacctgacacctgaaggtaatctataactaagggttataatcccttggggcttgaaaaggcaaaccaactccaaaccacataattttactctctaatggctgaaaattaatagggagtagaaggagaaagagaagttgtgatgagactggccctgtttttttaattgtctacttcataatatctccaggcrtactccacttgttaactcttggagatgatcagaaacttatgtgggggctttaaaagacaacctcagacacttcaaaagattaacaactttaatcaatgcctccaagtgtgtctaacaatcacagcagctaatgatatatgggagatgccacaggtataatgttcagccacaaactcattctccatctagctgaaaatggtggtcttcccttctgagaccttgtgtgactgtc

SEQ ID NO: 432737 - DNA, 521 bp, Homo sapiens
tagagaaggctgggtgagcagtacagagggtggatttcacaggtgcttggttctattggtaggggttctattcataaaagagtgccatccctgaagaaaacctgacacctgaaggtaatctataactaagggttataatcccttggggcttgaaaaggcaaaccaactccaaaccacataattttactctctaatggctgaaaattaatagggagtagaaggagaaagagaagttgtgatgagactggccctgtttttttaattgtctacttcataatatctccaggcgtactccacttgttaactcttggagatgatcagaaacttatgtgggggctttaaaagacaacctcagacacttcaaaagatkaacaactttaatcaatgcctccaagtgtgtctaacaatcacagcagctaatgatatatgggagatgccacaggtataatgttcagccacaaactcattctccatctagctgaaaatggtggtcttcccttctgagaccttgtgtgactgtc

SEQ ID NO: 432738 - DNA, 632 bp, Homo sapiens
atatcatatatcatattctagacagagttcctatgctaccattttatgtaaattgtagaagtcttacaaccataagacttttacctcctcaacttttttttttttttacagaatctcactccttcaccaggctggagtgcagtggtgcaatcttggcttcactgcaacctccgcctctcaggttcaagcgattctcctgcctcagcctcccaagtatctgggactacaggcacaygccaccacgcccagctaattttatatttttagtagagatggggttttcaccttgttggccaggatggtctcaatctcttgaccttgtgatctatctgcctcagcctcccaaagtgctgggattacaggcataagccaccacgcccggtctacctccttaacttttatctcctcaactaacctttatggtacggctgttatatgtattatatctacatatattgaaaatccctccagaaatgtaaatttgttttcagtggtagtacctaagcacagggaaaaatatttaccatttctgttgctcttctttcattcctgaagatccaaggtttgctctggtatcatttcctatcagcttgaagaacttactttagcatttctcataatgctgatttcct

SEQ ID NO: 432739 - DNA, 519 bp, Homo sapiens
attgtgcatcacttagtgccctgctcttgctttgcccaaaaatagtcactgagaaaatcatctttatgcagcatggtgtcatggaaaggtcactaaaaaggaagtcaggcttcctgagtcttgacctgattctgctatcagttgactgtgtgaccctgctcaaactacttcacctctctggaccttggtcttcatctgaaaatgagggagttacattattttatcactgagctcttttacaactgggtcaaccggtggtctttggtcattcagaaatagataaatasaacacagtggaaatggcaaaaaaagaaaactaaaattattctaatcctatatctcaggtctagtgataactctaacagggaaaaaggggctacaaaatgtttgcctttcatagaaactgactttgttcctcctggtttcttagggaaagaaaaagtctctctgcaaatagtgtgccaatgggtgcctttcacccaggaagggtggccactgagaaagtgaatagaaaatcca

SEQ ID NO: 432740 - DNA, 507 bp, Homo sapiens
  misc_feature (1)...(507): n = A,T,C or G
gtttgtgtggaaagaaaataccagggaatagcctttaaaagtatgaaaatgaagaccagtgaaggggaacttaagttatgagttactataagttaatagaaaaccactgaaattaaatcaatatgggattggtgtagtgagagattaaataatcagtaggatagaatagggagtcctgaaatagattccagtatgtataagaatttaatatatgataaaagtgtcgattcaagtcagtgggragaagttggattagctaataaatggtgctgacataacacaccgtctgtcatgggaagagcaaaattggacccaaatcttaaaccatatacaaaaatgaattccaggtggattaaaaatgtgaatgcaaacaataaaataattttaaaatcttcaaagaaaatccaggagactctatatactacataaggataacagagttgttcttaagcaagaccagaaatccagaagctataataggtagnnnnnnnnnnnnnnnnnnnnnnn

SEQ ID NO: 432741 - DNA, 611 bp, Homo sapiens
atctcaagggcactgtggtatggaaaaggacgccacatgagtaaattttaaaaatataaatattttaaagggtaaaaatgagggtccctgtatttgaggatataaaagatgaaactgaagaagaaaagataggggaagaagaaaatgaagaagaccaggtgagtgagaaaacacatactcagaccagcgtttgttcctctaaattgacaatgagaaaaatgttctttctgttcttttcttttttttcaaataggtcttctataagcctgttattgaagacttaagcatggaattggccagaaaatgcacggaactcattagcgatgtaagtggctggagtaatttttgtcttattttgcattgcacctgtggtattattatgttatagagkcatagagctgtgggggaaaccctgaaatcaccttttaaaacacagtcactttccagatcatggaacaaagtcctgaaattttcagtgatttccccaaggtcacctatacagagaatttctgctagagcaagtctcctcattcttaatccagaatcctgtcccttatgagttttgctgtcacgctggcatgaaatcataaggcattgaattgcagtattta

SEQ ID NO: 432742 - DNA, 192 bp, Homo sapiens
gcatatatgtatctgtatccattcatctgttgatggatgcttargttaatcccatatcttgggtattttgaataatgctgcattgaacatatgattgcagatatttttttgagccatcgatttcattttctttggatatttttatccaaaaaaccccaaaacaacaacaacaacaacaaaagaagaaaaatt

SEQ ID NO: 432743 - DNA, 536 bp, Homo sapiens
gaaggagaaattttggataagattgccatttctggcctcttggaagcacctctgtaaatagttctgcttaggtgttcagacctgggtgggcaagaggggtattcagtgatttgcatggacccagagagtcagcagatgggtgctgggaggaggatactgagtcacatatgtggtctagacatatggatgatgggaaagaaaagtcatttatgacattaaatatatcaccttccagtgccactaaatcatgttttctgagcagagcagagtcacagctccctactttaccctgtggtattcagcaggccaaagatttaaggaaggacttaaaaagtgtcctttggatgccttcatcacagtgcctgaaattgcatgctgtgactacaagcctttgtcatgtttactgatatggtttgactctgtccccacccaaatctcaacttgaattgtawctcccagaattcccacgtgttgttggagggacccaggggggaggtaattgaattatgggggctggtctattcttgtgatcatga

SEQ ID NO: 432744 - DNA, 504 bp, Homo sapiens
gacccaagagagggtcttgctctgctgcccaggcccgagtgcagtggcacaatgatagctcactactacattgaacccctgggctcaagccatcctcccattttagcctcctgagtagctgggactacgggcacatgccaccatgctgggctaattttttcttttttgcagggacagagcttcactatgttgaccaggctggtctagaacttctgggttcaagtgatcctcctgcctcggcctcccraagttctgggattacaggcatgagccactgtgtccagtctacaaattacttcaaatggctgcagggcagaggtcacattcatccttatcaactgtaaatagcaatttatttgtggtcaaataataacttcaaaaccattagctaatattcagaatctattgacaaatgatggggaaaatctttttgtcagggaggtctttctggtgcacctcgaatcactccatgcctttgttgttgttttgcttgtcaaacctgga

SEQ ID NO: 432745 - DNA, 598 bp, Homo sapiens
tctatctactccaaactccaggaccgggccagttcagatgctcatcctgcctctcaaatgttttggtttttgtttttcttctctgctgcaggctcctgggatagagtctacttttctttccttttaacagttgccaatactccttcttgcccttaggtttctggtctcctcaaaattagctgtagagtgggacacatttacctggttacccttcacttttctttattgaccttgaagactagcaaataccattaactttttttttttttcttaragtcttgctctgttgcccaggctggagtgcagtggcatgatctcggctcactgcaacctccacctcccagattcaagtgattctcaagcctcagcttcccaagtagctgggactacaggctaatttttgtattttcagtagagacagggttttgtcatgttggccaggctggtcttgaactcccgacctcaagtgatccgctcatctcggcctcccaaagtgctgggattacaggtgtgagccaccgtgcccggccccattaacttaaaaaaaattgttgtaaaatatgcataacataaaatataccattttaaccctttgtaa

SEQ ID NO: 432746 - DNA, 586 bp, Homo sapiens
catgtataaaaaaagaaaatagccaaaaaatacctgctctccaggccacaaggaagctaaagtgcttacattcactgactcaaactttcctccaacaggcttctcactgctacaycttcatcctctccttctgccttctttctagtttctgtcttgggttcatctggtttggttttagcatatctgtgttcttacctaaaccactccaactcttctttgtagaaaaatgtagcgctaaattgataaactaaatacttcacagggacctttaatgactgacatgaatctaaatttgcctactagagaactctctatgcatagagaaatgttccaaatccttatttctggccaaagacctgtgtattatttttactttcccagataattacctttaacattattggatttttcacatacagttagatgattttcacactgataatttgggaattacattgcccctaagttaacccttttctacctaaaattaaattttgctgctaccccaaaacatgaggaaattgaatgcccccaagggctttgtagttcaagtcataacacagtggtttaacacctatagaacccc

SEQ ID NO: 432747 - DNA, 596 bp, Homo sapiens
taaggtgccaataataggctcagcaatggggaccccaggtctgaacacaaaactgtgaaagaaattattgaactctgagaatgtcacctaatagagagactgctgtgctcagagtatgagacatgggtcctaatcccaactgtaccactgatttgttgtgtgacaacaggtgagtttatctgtccacactccagtttcctcacccgtagaaagggatacccaccctgccaactttacccatatattatgaagacaagttagcagatgacttagtgcttagaaaagttaaagcacttggaaatgaaacacattagtatgcagtctccttccccatcccctttctacatctcattttgtgtttctcttgctgaacctctccaagaaaccctcttaagcaatgaaagcaaagccttctctttgagcatcaattctgtaatcctccaactgtatttggaagggaaacaaattctccaccatgttaaaggcctgtttgtcctcctcttccccctaamaaaaagaaaaattgcaataactatcactattaatatatatatatcactatgtttgtcactattaagcatatatcaagtaagtga

SEQ ID NO: 432748 - DNA, 619 bp, Homo sapiens
ttgaatctaactttttcctataaggttttatgcataaaatggctacatgtgcttcttcactaggcttcttaaaatcatgctgtctttaaaattctcagtaacaccaagcaaaactttgcacaagcaagtgattaaaattgtttaaacatcttataatcattcagaaattcataattattaaagctgtttaaagaatctaagytcttcttttaaattaaaatattagctgataatataaatgtgttgcaaaaccaaattttttcacgttaagaatttcaaaataataatgaaattctaatgggcagagtgcacacaagtcattattagtgcggtgctcctgaagataacatagatgtcactccatgggcatatcgataacaataacgcaggaacagacctatcaatgtgtgaaggcagagattcggggtggccacctacgactgtgttctccatcaaggcaactaatccagaccaatatttcatgcctgtaatctattcacacccacccattgggaagctctgccctacatgaagattacaaacctgcatgggactccttccaaagttcagtctgtggtttttccttcactacacacattctagttcctgcaattgaaac

SEQ ID NO: 432749 - DNA, 550 bp, Homo sapiens
  misc_feature (1)...(550): n = A,T,C or G
tgattgtcaagacatcaataggaagttctgtgtaaacacaggcactatagctaatcagtaggatgtttattgtatcattgcttgtcaaccattatcaataaggatttgagtgctacaaaggagaattaactggtttctaattaartaattatactacctctatagaataagaaattcattaaagacaatttccaatcattctgatcgttcacatatttggttttagcctaatatattgtagcaaaaagtattcagaaatagtacgcagctgccctcttgtgtcactttcatataattaaatctattaatgtttaccagtgattcaattagctttgcatttttaaaggtcaccatataccactacgcttccacttctgatgataatatcctaaatggtcatttacaaagtatgatatgtggaaagataccagttctctctaccaatgaaacttagtggcataaacatctaaatattgaagaggtaatataatttactctgtcctccaggtcctctcctcatccaaataccnnnnnnnnnnnnnnnnnnnnn

SEQ ID NO: 432750 - DNA, 574 bp, Homo sapiens
aatccaacactaagaaccatctataaccaattcatttaacttgattgatgcaagagtttgccattgttttcccatcttggtgataaaaagatgtttcataccttcatcatatgggttggttgaaaatctcagaaattctttgattatgacagtaaaaattatagtaataagataaataatggtttataattaaaatttcaagagcagtaaagatggtgactatcaaagagttaaaagttaataatgtaatttaataacctctgtacccggtgaaacatcgaaacggtctatagtaactaggattttrtgtattttgaacctattttttatttttattttaattatttctaattttgtactccttgaaataaaaaacctgttaattcaagaataagttaagcaaaatttgttatatactagcaagtaactacttgcatagttgcaaagctctacttattttttttttctgtttgcaaattcaaactcccatagttcttgggcactaattataccctcaacttactcagcttttggtggagttgggcatagttaacccttcattcctttttgaagc

SEQ ID NO: 432751 - DNA, 593 bp, Homo sapiens
taaactcacattgcctaaggtgaccacgtttgccgctttccacatcaattcttcattaatacttctctgtaaaataaaatttgggagttagttgtattctttcccttcctaatattgtcatatcttctaaccaagtccttgcattgttcctacagtcctgcatctgtctgcatcccaaaagcaaatcaccttgattcttatcaccaaacacccgggctgttctaaaggcctctgtcttcctaacagtgatttaacatcaactgagtatttgctactttaaatcatatatttctcatcaaatcctcacaamaattttgagcttggtgctactattattcctggctttttttagaccaaggctgtagaggttgtgggaacgttattttgtaagccagacagactccagagcctccatggccagcatgtcaccatcctgctggtcagtcttccccgtctgtgaacactggattagttttcataaagtattgatttgttactttcctgcccagaatcctcctgtggacttcccattgtctagtgaagttaacatgtaacaaagagctcacactcgtggctgtgctccggctgtcagc

SEQ ID NO: 432752 - DNA, 554 bp, Homo sapiens
ttgcttaattatttatttcagcatttgtcataaaaacagaaaacaataactttctatattcttttctataccagcaggatgaggtagcctaagatcaattagtgttttgaagcacttactcacttaattttcatttattttcctctctttggtctccatctatcactgttgccaaaaccatttttacttacaaggcataattgtgtcctaacctttagttaagaatatttggtcagttactaytttttatttttatttttcattaaacaactctttttagagacagggtctcactttgtcgcccaggccaaagtacagtggcgtaatcatgtctcactgtagcctcaacctcctaggttccagcagccctcctgcctcagcctcccaagtagctggcactacaggtgtgtaccaccatacccagctgatttttaaatttttttgtagagatataggttcttgctgtgttgcccaggttggttagctaccatttttttaaaaatgtatctcaaattcagcatcagtcttttttttagtgaaaacacataaactgt

SEQ ID NO: 432753 - DNA, 565 bp, Homo sapiens
attccttgctaagatatattcttaaaatctcaagcgcattcacataatgaaatacagatgttttgtgttttaaactattcaaaaaatgggctctcacagaaggactttttttttgatgtgagaaatctcatgctttgttagtataggattagtgatcttggtagttttaaatttttaaaaattaacctttattatgaaaactttcaaaataaacaaataggaaatggatggctcagtcaaaagaaaaagaacaaagaaaaaattgtttaagaaaaaaatgaattaaacaaacagaagtagagcaatataagtaacctctgcatattgatctcccagattctacaaaaaaaaaaaaaaaaaaaattagccyggctaattttttgtatttttagtagagacgaggtttcaccgtgttagccaggatgatctcgatctgctgaacttgtgatccgcccacctcggcctcccaaagtgctgggattacaggcgtgagccaccgcgcctggccaattaccaagatttttctatgtttgcttcatttgtctctttttcagttttctctttc

SEQ ID NO: 432754 - DNA, 516 bp, Homo sapiens
tttgtaagaacactcacgacctattaagcctatgcaaaaataatgaaggtttttctgtacattttcatagaaataaattaggaatattgcatagaattattagcgactttaaaatctaccctatgaattaaaaatctaataagagacagctttcaacaaactcaatcaatagcctctattttctgcagaaagttctcatttcatgaattgctaagccagagactaccttaagaaattttatagatacagtttagaggtgaagaatctagattgggaaggagagacaaccctccagggctaagcagggagctcagatcactgcgcactccacagatcaactcattgyctgaggcaacagtggcttctgccagtaaataaggatcaagtatacacctgactgcattggctgcagctggctcttactcgtaagtgtcatctattggcttatagtggaactgtacagttcaatataaaacctgctgacagggtaaacaaggctaagaagcaaagccgaaa

SEQ ID NO: 432755 - DNA, 483 bp, Homo sapiens
ttggcctccccttgcctatcaagctagcagatagaaccagtgagctggtagcttcatcaacatctggcatctggtgttcacctttgagtccaaggtggtgattmcagtcttcaccatttcaaagctagcaggaaaggagaaagaggacaaggagggcgagtagcttccttttgcagaacccagctgcacacgtcacctttactcacagccattttcaagaatatagtcgcacagccacacgcctcggggcatctgggaaatgcagtcactgccacagcaatcgagagtcctgttcacacttagcaagaaaagggtattattctgtttctaaaaggaaaaaggggaaaatgaaggaaggaacacttactaatctctgccagtagccttgggcaaatcgctcttttcaagtctatttataaaatataagctagtaaaatatttacaaaaaaaaattaaaaaatatttacaaagggccaggcgtgg

SEQ ID NO: 432756 - DNA, 527 bp, Homo sapiens
ataaattatatttttacacattcacttattttcactacattttatttttcttttcattgacattatatatcggcatctgtcattttgttagttatgtttttactttttgttacagtagccagaaacaaggtataaatacctggatgaattgagataggagttctatccatagtaattcatctttattgtagtaaaggtaggatactgaatatgtattattaaagatatgtttaaggcatttgggaaaaggatcaaatttgagttcatcttawgaacttgaatttcctgacaactatttaggtcttgttgaggataaaatgtttttattttaatacttgcttactaataatacgtggttataattcaggttaaaaatactgtagtaccagtaaaactgtttgaccgaagacattataaattctttgatattatcacattagaccaatgtagagttggttggtgttactttttggggtatagccatgtttttgggaatccctgtggacagatctctgttgaacaacaaa

SEQ ID NO: 432757 - DNA, 527 bp, Homo sapiens
ataaattatatttttacacattcacttattttcactacattttatttttcttttcattgacattatatatcggcatctgtcattttgttagttatgtttttactttttgttacagtagccagaaacaaggtataaatacctggatgaattgagataggagttctatccatagtaattcatctttattgtagtaaaggtaggatactgaatatgtattattaaagatatgtttaaggcatttgggaaaaggatcaaatttgagttcatcttatgaacttgaatttsctgacaactatttaggtcttgttgaggataaaatgtttttattttaatacttgcttactaataatacgtggttataattcaggttaaaaatactgtagtaccagtaaaactgtttgaccgaagacattataaattctttgatattatcacattagaccaatgtagagttggttggtgttactttttggggtatagccatgtttttgggaatccctgtggacagatctctgttgaacaacaaa

SEQ ID NO: 432758 - DNA, 527 bp, Homo sapiens
ataaattatatttttacacattcacttattttcactacattttatttttcttttcattgacattatatatcggcatctgtcattttgttagttatgtttttactttttgttacagtagccagaaacaaggtataaatacctggatgaattgagataggagttctatccatagtaattcatctttattgtagtaaaggtaggatactgaatatgtattattaaagatatgtttaaggcatttgggaaaaggatcaaatttgagttcatcttatgaacttgaatttcctgacaactayttaggtcttgttgaggataaaatgtttttattttaatacttgcttactaataatacgtggttataattcaggttaaaaatactgtagtaccagtaaaactgtttgaccgaagacattataaattctttgatattatcacattagaccaatgtagagttggttggtgttactttttggggtatagccatgtttttgggaatccctgtggacagatctctgttgaacaacaaa

SEQ ID NO: 432759 - DNA, 553 bp, Homo sapiens
ttttttcatacgtaacactacatgtacacatacactacattacccactacagatcagtagtttcctgtcagtaaacaatctttaaatgcagttttactatttctctttttttcatgttaacattatttctagtttaatgcataaattagtagatctattagataatttatgattttttcttgattgattttcaaggccttaaakgttaataattgttagtattgataccttaccttctcatattgttcatgacaatagccagagctattctttcaaactagttagctctctcttttatttattgtattttactttttttttgagacagggtctttctctgtccccatgctggagtgccatggtgtgatcacagctgactgcagccttgatctctcagtctcaagccatcgtcccatttcagcctgctgtgtagctgggactaaaggggcatgccaccatgcctggctaatttatttgtattttttgtagaaatggagtcttactatgttgcccaggctggtcttgactcctgaactcaagtagtccttctgcc

SEQ ID NO: 432760 - DNA, 553 bp, Homo sapiens
ttttttcatacgtaacactacatgtacacatacactacattacccactacagatcagtagtttcctgtcagtaaacaatctttaaatgcagttttactatttctctttttttcatgttaacattatttctagtttaatgcataaattagtagatctattagataatttatgattttttcttgattgattttcaaggccttaaatgttaataattgttagtattgataccttaccttctcatattgttcatgacaatagccagagctattctttcaaactagttagctytctcttttatttattgtattttactttttttttgagacagggtctttctctgtccccatgctggagtgccatggtgtgatcacagctgactgcagccttgatctctcagtctcaagccatcgtcccatttcagcctgctgtgtagctgggactaaaggggcatgccaccatgcctggctaatttatttgtattttttgtagaaatggagtcttactatgttgcccaggctggtcttgactcctgaactcaagtagtccttctgcc

SEQ ID NO: 432761 - DNA, 565 bp, Homo sapiens
taattttaaatggtttatggctctgatactctgtgtcatatatatgtaaactaccaaatatatatttggctaaaaatacatattgttttctacatataaattctctcacatatttttgttctcttcccttactaaataaacttcactgataagaaaagagctaagtaaactgagggacactagcattaaaacttactctaaggcagaaagactgcttgatgccagcctgggcaatgtagcaggaccccatctctataaaaaataaattagctgggcatgttggcatgcacatgtagtcccagctacaaaaggaggctgaggcaggacgatcacttgaacccaggagattgaaactgcagtgagtcatgattgtgccactgcactccagcctggttgacagactgagatcctgtctcaaaaaaacaaaaaacaaaagaagccctcatayagctagtaagtagtggatccagattcaaagcagacagtctactttcaaagtctgtgctcatcatcactacgttatgctgcctctcatagtatatacatctgatcacactttaagaac

SEQ ID NO: 432762 - DNA, 565 bp, Homo sapiens
taattttaaatggtttatggctctgatactctgtgtcatatatatgtaaactaccaaatatatatttggctaaaaatacatattgttttctacatataaattctctcacatatttttgttctcttcccttactaaataaacttcactgataagaaaagagctaagtaaactgagggacactagcattaaaacttactctaaggcagaaagactgcttgatgccagcctgggcaatgtagcaggaccccatctctataaaaaataaattagctgggcatgttggcatgcacatgtagtcccagctacaaaaggaggctgaggcaggacgatcacttgaacccaggagattgaaactgcagtgagtcatgattgtgccactgcactccagcctggttgacagactgagatcctgtctcaaaaaaacaaaaaacaaaagaagccctcatacagctagtaagtagtggatccagattcaaagcagacagtctactttcaaagtctgtrctcatcatcactacgttatgctgcctctcatagtatatacatctgatcacactttaagaac

SEQ ID NO: 432763 - DNA, 563 bp, Homo sapiens
cttaatttaagttttcattccaaaaaagtgcactttcagagacaagttataacctatttattaccttcaccttttctcatatctaagtattgcactagatggactcctactatctctccccttttcccttcaatatatcccacatctcaaagtcaaaataggctttctgaaatactttctcctactattcccttgctcaaattctttatttttaattcaggtttaagtttaaattcttctgtctccaagctagagttaaattttgtttactagtaagtactttcccaaagaaggacataagacttttattatttttgtgaaatgacatcacattaactsggtaaattcaagagtctggccaagcctgggggctcatgcttgtaatcccagcactttggaaggccgaggtgggaggatcatatgaggtctggagttcgagaccagcctggtcaacatggcaaaaccctatctctactaaaaatacaaggctgggcgcagtggctcacacctgaatcccagcactttgggaggccgaggcaggtggatcacaaagtcaggggttc

SEQ ID NO: 432764 - DNA, 563 bp, Homo sapiens
cttaatttaagttttcattccaaaaaagtgcactttcagagacaagttataacctatttattaccttcaccttttctcatatctaagtattgcactagatggactcctactatctctccccttttcccttcaatatatcccacatctcaaagtcaaaataggctttctgaaatactttctcctactattcccttgctcaaattctttatttttaattcaggtttaagtttaaattcttctgtctccaagctagagttaaattttgtttactagtaagtactttcccaaagaaggacataagacttttattatttttgtgaaatgacatcacattaactcggtaaattcaagagtctggccaagcctgggggctcatgcttgtaatcccagcactttggaaggccgaggtgggaggatcatatgaggtctggagttcgagaccagcctggtcaacatggcaaaaccctatctctactaaaaatacaaggctgggygcagtggctcacacctgaatcccagcactttgggaggccgaggcaggtggatcacaaagtcaggggttc

SEQ ID NO: 432765 - DNA, 529 bp, Homo sapiens
ggtctgcccatcagaaacactgcctcccccatgggccctcatgctgttcccagcaatgcccagcatacagaagatgctcagtagcagatgaatggtggaatcaacgaatgaataaatgaaaattcaaaggcacgatcatttccctctggggactgtcaatgctccccttctgcttcttgctcaccagttttcacagctgtctgtgcattgaagctggagtattcgtactctttcttcgtgtcctcaaccagcctgagtgcaccacaggcaggagtgtgccctcttcatctccctggtcctgacacctttcatggagggctctcaaatagtggttgcctcaatgaayacagaagcatgtggtttacagatgtctgtttacttctctgttcccctcagtggaccaagagtacctagagatgaggacaggctctctcctctctagagctcaggatgcactcaatacgtgggggatggacggatggatggatggatggatggatggatggatggatgggtgattgggaaccac

SEQ ID NO: 432766 - DNA, 539 bp, Homo sapiens
tggggacaggactggactatgtcccaggagctcctggaggcaataccctttctggctggtcctgagattccagatcctcatgcacagagggctggaggtgaccttccatttctctaagctgggctgtgaggcacctgggtcacagaccccacaggaagtggatactgccaggaagttcttatgtttatcccagttcaattctaccttgttggtttcagcccagagtttccagagaggtagggattttctggggttctccagctrggaggggacatccacagctcccctggacactcccatgcctccagaggctccctccccagggcatctcttcatttcattcattcattaattcaacaaacgttcactgaacacccattgggcacccagtacagtgctaggcacagggacccagaggtggaaggatggttcatggtatagacaagtggatggcaaagaagcagatcatttttctctagtatggtacgagtatgccaagggattataggggataggagggggacctgcttcagtcttag

SEQ ID NO: 432767 - DNA, 579 bp, Homo sapiens
actggcctcttcctccctattttgccttccaacataaaattatatagatattccttccatcaatttacctgacctatatagctcaatgaactgtgttcattcatattttcaagctttaccaaaagaaccttttccttaatttaatcttagattaaatctaagattagtttaatcctrgattaaaccaaggaatacatatttttggttgcatattctacttttagcccatttttcccccttttaaggttgatcttaaaagttgaaccgaacagctatatttacataaagctgctctaaatcatacagaagcttattttttactttatatttttagttccatatatcataaatgaatatattccccatgtaaaaattcaaaccaagaattacatgaaacaaatctaaattaaagtatgtaaattctcctttgtctgtatctatgtatgcatgcaaatatatgtatgtaatcatactctatcaactgatatgcaacttgtttgttacacacacagcaaaatatattgaagatctttccatatctatacatgtaacactatctcattctttttttaataactg

SEQ ID NO: 432768 - DNA, 579 bp, Homo sapiens
actggcctcttcctccctattttgccttccaacataaaattatatagatattccttccatcaatttacctgacctatatagctcaatgaactgtgttcattcatattttcaagctttaccaaaagaaccttttccttaatttaatcttagattaaatctaagattagtttaatcctagattaaaccaaggaatacatatttttggttgcatattctacttttagcccatttttcccccttttaaggttgatcttaaaagttgaaccgaacagctatatttacataaagctgctctaaatcatacagaagcttattttttactttatatttttagttccatatatcataaatgaatatattcccmatgtaaaaattcaaaccaagaattacatgaaacaaatctaaattaaagtatgtaaattctcctttgtctgtatctatgtatgcatgcaaatatatgtatgtaatcatactctatcaactgatatgcaacttgtttgttacacacacagcaaaatatattgaagatctttccatatctatacatgtaacactatctcattctttttttaataactg

SEQ ID NO: 432769 - DNA, 550 bp, Homo sapiens
ttatagataatttgatgtatgtttaatcttaattactcttgtcataagaccaccattataattagagatgtttggttctcatttctggaaaaataagaatgcttgtcttaatattagtgattaagaattgcttaaaataactggaagagtgtgtgtgtgtgtgtgtgtgtgtgtgtgtgtgtgtgtgtgtgtgtgtcttgtgcatctttagatgtctcttagtacagtgcctagcagagggaagtcattcwatcagtacttgtgaaataaatgttattgattaaaatctgcaaattattacaactcaatcctttttgcgcttttaaaattgaaataattttaggcttagaaaacagttgcaaaaatattccagagaattcctgtctatcttcacctaccttccacttacatagacatcctatataaccacaacacaattatggaaaggaggaaatcaatattgatgagacacaattaattacttcacaaaccttcacatttcaccagttttttcactagtgtctgtttggatcctggactatatggtatt

SEQ ID NO: 432770 - DNA, 571 bp, Homo sapiens
gcataagcacatacctatatatctttgtctatccatatatatatatacttacatacatatatttacatatgtatacayatatatacatatgtatacacatatacacatatatacacgtatatttacatatgtaaatatacgtatatatacacatacatacatatgtatacacatatacatctatacacatatatacacatatatttacatgtgtatatatgtatacacatacacacatacacatatatatatacataaaccatgaattcatactaatacctttagttttaataccataccacacagttcattctattctcccccctttccttatttgtaactttttttctccaaaagtgaaaaacccaactttcattgtccacattatatttacatatttgttcaatcccagtataaacttaagtagtattatggacatttttattttaaaaaaccctcggatattatttgacataattcctttattttacaagtgagaaaatccaggcccgcagtgattaagctgccagaagaaagaaacaaattactagaagaattataaatgtcagga

SEQ ID NO: 432771 - DNA, 571 bp, Homo sapiens
gcataagcacatacctatatatctttgtctatccatatatatatatacttacatacatatatttacatatgtatacacatatwtacatatgtatacacatatacacatatatacacgtatatttacatatgtaaatatacgtatatatacacatacatacatatgtatacacatatacatctatacacatatatacacatatatttacatgtgtatatatgtatacacatacacacatacacatatatatatacataaaccatgaattcatactaatacctttagttttaataccataccacacagttcattctattctcccccctttccttatttgtaactttttttctccaaaagtgaaaaacccaactttcattgtccacattatatttacatatttgttcaatcccagtataaacttaagtagtattatggacatttttattttaaaaaaccctcggatattatttgacataattcctttattttacaagtgagaaaatccaggcccgcagtgattaagctgccagaagaaagaaacaaattactagaagaattataaatgtcagga

SEQ ID NO: 432772 - DNA, 510 bp, Homo sapiens
attctaagctatttcaagtaaaatgtaactcattatcataatttttctgtatttttcaacagtgctatctacaaatatgattaaacatgcagggctaaaataatctacgagtagtcagtcttgatatatgtccccccaactcaaattcataggttgaagccctagaccccagtgtgactgtatttggagatagggcttttaggaggtaatgaaggttaaatgtggttataagggtggggccctagtctgataggattggtagccttttaagaagaggaatagaaagacttatttctctstctctgccatgtgagaactcagtaagaagatggccacttgcaagccaggaagagagccctcaccagaaactgaatcagccagaaccttgatcttatactttcagcctccagaatagtgagaaataagtttctcttaagccacacagtctacggtattttggtgtgactacttgagcagatgaatacaacttctttagcaatatttccaata

SEQ ID NO: 432773 - DNA, 393 bp, Homo sapiens
atcaaaacatactaaacatagaaataatgtgttgtgttatgacattataatggctatgatgtcactgggtgataggaatttcttagctccattataatcttatgagacaatagtcatatatgtggtctgtcattgatcaaagcattgttatgcagcacrtgagtatatatggaaaatgattgctaaacgcaaaaggcaaggggttcagattagagagctggacctagaccacatctgaatcaaagcagtggaaggccaatactaagctagaaaagtagcattgtaaacaacacaattgggttgacaggaacagagaacagagatgagaactctaaaggcacagcatcaagtcacagaatttagtacctcctttctcctagtggatgacctccc

SEQ ID NO: 432774 - DNA, 542 bp, Homo sapiens
ttttaaaaccagacaagcgcacaacaaaaaatgaaaacttcaagccagtatccctgatgagcatagatgcaaaaatccataacaaaatactygcaaaccaaattcaacagcacatcaaaaaggtaatgcatcataatcaagtgtgatttataccaagaatgcaagggtgattcaacatacacaaatcactaaacatgaaacatcacatcaacagaagaaaggacaaaagccatatgattatctcagtagatgcagaaaaagcatttgaaaaaattaaactatattaatcagggacagaactagtaggatatatgtatacatgaaagggagtttattagggataattgtctcacatgattacaaggtgaaatctcacagtaggtcatctgcaagctggggaagagagaagcaggtaatggttcagtacgagtctgaaagcctcaaaaccaggaaagctgacagtgtggccttcagtctgcggacaaaagcccaagactccccagcgagccactggtgcaagtcctagagcgcaaaggccaaag

SEQ ID NO: 432775 - DNA, 535 bp, Homo sapiens
aaacaccatattagctgaaatatgaagaattagttggtcttctgtgaatgaggaaggcaacaaaagggtgatcraagaaaaagaacagcatatatatatagaaagaacataaaagacattatttatatttggggaaataaattataatctattgtgctaagaatatggagtgggtaggttatccaatgtgttggcacacaaattcatagtacttttgttcatagtacatttttataattctttttgattctgtaaattcagtagtaatattccctctcgcatttctaattttagtcttctcgtgtttttttcgtagtcagtctagctaaaggtttcttaattttgtttatatttttaaagaaccagctcttggttttattaattttgtttcttattttctattttatctatttctactctattattttcttctttctgctagctttggatttaatttgaaaatttttcctagtttcttaagggtgtaaagctagattgtcgatttgagacatttttaatgtaaacatttgtaact

SEQ ID NO: 432776 - DNA, 614 bp, Homo sapiens
gtctctgtgccaaggatcagcctaaggtataaacttaaggtcttctcacaacttttctgatcctgtgtctttccctgggcatatatgatcaccttttaattttccccatatgtgcagttgtttctgtgtgtcctagtttttaaagtctggcttccaaaaggggaaaatgagaaaactttgatgaaaaaagaaaaatgtcactggcccttaatatcccctggaagtcacttcagttggagaggaagggctggcaacaattagggaaggtgtaacagcaatggctgcctaactctttgcacctctaagctcagaagcatccatcaataatcagaacacagatcactgatatctgggggacagagttatttttgccaaccttgcctcctataaactgtatgcaagttgctccagggaaacatgcacaactgcctgctacgggctatgtgtagaggatgctaattgctgctgtgctaagagctgaatgtgattraaattaatgtaatttaccatccacccttcctctagaagttgcaaacctttaatagaatccagagttccaaaatagttacaacagacagattatggcagtcaacttttgtctggacccggagaca

SEQ ID NO: 432777 - DNA, 614 bp, Homo sapiens
gtctctgtgccaaggatcagcctaaggtataaacttaaggtcttctcacaacttttctgatcctgtgtctttccctgggcatatatgatcaccttttaattttccccatatgtgcagttgtttctgtgtgtcctagtttttaaagtctggcttccaaaaggggaaaatgagaaaactttgatgaaaaaagaaaaatgtcactggcccttaatatcccctggaagtcacttcagttggagaggaagggctggcaacaattagggaaggtgtaacagcaatggctgcctaactctttgcacctctaagctcagaagcatccatcaataatcagaacacagatcactgatatctgggggacagagttatttttgccaaccttgcctcctataaactgtatgcaagttgctccagggaaacatgcacaactgcctgctacgggctatgtgtagaggatgctaattgctgctgtgctaagagctgaatgtgattgaaattaatgtaatttaccatccacccttcctctaraagttgcaaacctttaatagaatccagagttccaaaatagttacaacagacagattatggcagtcaacttttgtctggacccggagaca

SEQ ID NO: 432778 - DNA, 538 bp, Homo sapiens
agctgagtcatcacatgacagaaggcaagagggtgagagagcaaaaggaggatgaacttaccctttcataagggcccccatgccacccttgagggcagagccctgcagctaatcacctcttaaaggccctaccctcttaatactgttacaatgcaaattaaatttcaatatgagtttcagagggaacaaacattcaaatcatataggtatctcatcacagctttttctcagaggcttagatttctattgtattcctctgccggtaatctcttgtccccaggtgtccattggtctgcaatctccctgcatttttcttgcactatagcacccaccacttcctttcatggctttcatccttagaaacaacctatgctgttttaytccacctgagcattgagtcaggtgagaccaaaaccagcacctggagcagctcaaagaccagaatgttacaaagaagttttgttatgctccttccattttgagggaaggaacaaggaattggtccaggtgacaccagggagatattggggctagagca

SEQ ID NO: 432779 - DNA, 512 bp, Homo sapiens
atttcaaataactattaaatcaaaaagactaaattttaaaatgttagaatttttttctaaatatcagaatattttagtgtttgtaagactatgcgtgattttttccatcaacgttgctgtattttataaatttttaaaaaagtttttaaactgacacrtaataattgtacatatttatggcgtatacagtaatttttccatacatgtaatgtatagtgatcagatgatggtaattagcatctccatcatttcaaacatgtatcatttctttgtgttggagacattcagtatcctccttgatatagtttggatatttgtcctctccaaatcttatgttaaaatgtgacccccagtgttgggtgggggtctggtaggaagtgtttgggtcgtgggggaggatccttcgtgaatgacttggtaccctgcccatggtaatgagttgccacaagatctggttgttaaaaaaggtctgggacccccaccactacctctcttgctccccctctcttgtt

SEQ ID NO: 432780 - DNA, 480 bp, Homo sapiens
cggcactatcgtacataactcattgcagcctcaaactcctggaagccagcctcctgagtagctaggactacagatgcatgccaccatgcccaactatatttatttagagatggggtctcgctatgttgcccagactggtcttaaaatcctatcctcaagagatcttcccacctcagcttcccaacacactggrattacaggtatgagccattgcaccttgcccctattttttttagaatgtactctacttattttttaaaaaaattgattgtaaaacagcctcagacaggtccttcagaagatattccacaagaaggcattactatcacagaggatgccagctccacgtgttactgccctgaagacattccaatgggacaagatgtggaggtaaaagacagtgacagtgataatcccctccctatgtaggactaggataatgtgtgtgtttgtttcttagtttttaacagaaaagtttaa

SEQ ID NO: 432781 - DNA, 480 bp, Homo sapiens
cggcactatcgtacataactcattgcagcctcaaactcctggaagccagcctcctgagtagctaggactacagatgcatgccaccatgcccaactatatttatttagagatggggtctcgctatgttgcccagactggtcttaaaatcctatcctcaagagatcttcccacctcagcttcccaacacactgggattacaggtatgagccattgcaccttgcccctatttwttttagaatgtactctacttattttttaaaaaaattgattgtaaaacagcctcagacaggtccttcagaagatattccacaagaaggcattactatcacagaggatgccagctccacgtgttactgccctgaagacattccaatgggacaagatgtggaggtaaaagacagtgacagtgataatcccctccctatgtaggactaggataatgtgtgtgtttgtttcttagtttttaacagaaaagtttaa

SEQ ID NO: 432782 - DNA, 567 bp, Homo sapiens
gatacagaggaggcagcacaatagaacacacaagacaacagaagcagaatattactcacagatccaggagaagaagataacatgcctccctgggccaacagaaaacaggtagggagcaggagagagataagggcctgtggcccaaagcctgtattggagtctaaggttctacccaagctggttgctcaaggggaattctaattggtgaatttaaagcaagcaggcattggctccatggagtcacactgtgactgagaggtggtcactgtggcatatatgcacagtccacgcagggtgtgaagtctgtggggcaagtraagtcagttgtatctagctgtaccacaaagacatggtcaccaggaggtggttacaaaaggcagacatctggatccatcaatctgaggaagtgggaaaaagaagaaaactagaaactggatcaagggtgaccaagtcctgcttttggtatgagaaagtccaacttatactcaaaacagatactgaggcaacataaaactataagaattcactacacagcaactggaagcttaataaaaatgtagcacccca

SEQ ID NO: 432783 - DNA, 575 bp, Homo sapiens
ctattgtttaagctgcccagtctatggtattttgttatctcatccaaactagacyaaaacagattgtcatacagaggtagttgaataattgggccaataatgcaatctaccaaaaagacttatctggattttagacagaaacaggcagtcattgtggtagttttaaatcacttacacaaatttgttgatgctcctctcataaagaggagtccacaatccctccacttgaaccagggaggactcatcaatgaatagaatgtgccagtagagatgctacatgacttctgaggctttgttagcaaaggccccatgcttttaaaaaaaaaaaatccctcaatccttctgaataataattattgtgctaaataaatgtgttaatttgcataatatgttagtaaatatgtttggttagagtgactaaactatatctaataatgaacacctttaattgtgcttaccttcacattttaaaaattgttttatttacaatctataaacaaattaaaaaatagaaaaatgacttttggctttgcttacagaactcagctttcaaaccatatgactcacaataatta

SEQ ID NO: 432784 - DNA, 610 bp, Homo sapiens
gtatactgtctccagggggataaaaattaaattacaagaaacaatttcaaaacagctcaagaatgcatataaataattaccaagttgaagttctgtaaatttttctagagttgtagaaggaaagagtaatyaatttaagagcttttttgctaattcactgcttaaaatattaagaggaattagctttgaagatcagttacctgtctccttggggtagagaccactcaccactaaactgcacacattcttctcctcaagccttgggaaagtcctgacagcaatcagacccctttctacacatccaaacagaagatatagccccacacagagcaaggtagtcacaccatttccactcactctattctcaggctacctcctagatatagtcatgaccagcctctgctccatctcagaaacatcagacttcatttgttcactctctgaccacactctcttgttattgctgtcctctcacaccccaagcccacgtccaagcctttgacctcaaagagatgtctggtctactcatctttttattttcttccagtctatcaattcctgttggtctctcttaattttttagatcattggtttccagaatattcccagc

SEQ ID NO: 432785 - DNA, 608 bp, Homo sapiens
acacaataaatttgcttaggagcttgttaaaatgtatggagagttgaaatcttatgcaaatcatgtgtacacgaaccttctgtttcagaagattcttgagcagtgaggggcaatggttaagaattctagttttgtggtcaaacacatttgctttgttgagcagtagctgtgaggttttgagacaattaagtagcctctccatgccttcatgggtaagtggaagacaataacaggacgtatattgaaggataataatgaagattaaattaactatagcctgtgctatacaatgcctgataggcagttagtgctccaaaaagttttaggttttgttagcatttgacattgccttggtgctatcattatataatcaaccatcaatctatgtatgagaaagccttaatgtggaaatcttctgatagttttctgtatgtggtttgtatatttttttattatttatttatttatttttcgagatggagtcttgctctgtygcccaggctggagtgcagtggcgtgatctcggctcactgcaacctctgcctcccgggttcaagcaattctcctacctcagcctcccgagtagctgggactacaggcacgtgcca

SEQ ID NO: 432786 - DNA, 488 bp, Homo sapiens
aaaaaagagaaagtgaggggagaaaaattaatgtaaaaaaattactgattaagatggtttaagataaagcaagatcatcataggaaaaaaaagaccagttttcaaagaagtctgatacccactgatgtcaccttaagcccagaacctagtacttcattcttagtatgttaattgttccacctcactctagaatatcaccaaagtgttctcttaccacctttaatccctggggtagtctggaatttttgtttgtttgtttgtttgtttttaaatggactctcactctgtcgcccaggctggagtgcagtggcatgatctcagctcactgcaagctccgtctcctgggttcacaccattctcycgcttcagcctcccgagtagctgggactacaagcgcccgccaccacgcctggctcatttttttgtatttttaggagagacagggtttcaccgtgttagccaggatggtctcgatctcctgaccttgt

SEQ ID NO: 432787 - DNA, 569 bp, Homo sapiens
tcacttcaatcaagtcttctaatcaaacatctaaaagatgtcttccatgaccatgccatctaaaatggctgccacccatcactcttagtaccacacctgcctttccttttctcttcatagcacttacaattatcatttatttgtatgagaattgactgtctccaccactagaatgtaagatccatgtggacagaaacattgatatcttttcaacagtgtccttcacttagaacagtaactggtacatatggtgccactatatacttattggatgaagaaaagattaagtaagaaactcttgatatgatagagaggaatttaaggaagtctagagcttccagttttcttaaggtggtattgaactaaaaaaaaaatktatttgatattgcctaaagaaatattgttgatctcctgacatcacaaactgatgttcgcatttggatgtttgaaaggtacctaaaactgaaatccacgcttgatcttaccccaaaaccagtgcttccaggttctaggttaccaatttctgacagttttatgttctgaccatgttcaaggtaccctatttatct

SEQ ID NO: 432788 - DNA, 569 bp, Homo sapiens
tcacttcaatcaagtcttctaatcaaacatctaaaagatgtcttccatgaccatgccatctaaaatggctgccacccatcactcttagtaccacacctgcctttccttttctcttcatagcacttacaattatcatttatttgtatgagaattgactgtctccaccactagaatgtaagatccatgtggacagaaacattgatatcttttcaacagtgtccttcacttagaacagtaactggtacatatggtgccactatatacttattggatgaagaaaagattaagtaagaaactcttgatatgatagagaggaatttaaggaagtctagagcttccagttttcttaaggtggtattgaactaaaaaaaaaatgtatttgatattgcctaaagaaatattgttgatctcctgacatcacaaactgatgttcgcatttggatgtttgaaaggtacckaaaactgaaatccacgcttgatcttaccccaaaaccagtgcttccaggttctaggttaccaatttctgacagttttatgttctgaccatgttcaaggtaccctatttatct

SEQ ID NO: 432789 - DNA, 572 bp, Homo sapiens
cctgttaacatgacatccatcatcatctgcccccagtctacactccactgtcatcaaactgatacctttaaaatgcgaatcaggttatccccacattcaccaccacatcccacacacatacacacagtcacttccacctaaagtgcttcaaggcttcccagttcttttataataaaggcaaaattcttaacactgtctccaaggccctacatggcctggccctgtcgacctcacaatcactatcttgccttctatgctgrttctctgttttcaaggcatacagcccctcactctcctcacagagagcctgcagtccactttccttctatgagaatgcccttcctccttgtcccttctcagtccctccttcttggctcagttgatttctactcattccttagaatgagtggtttgtctttcacaaaaatggccacaacaacacttttgttccataagagcttccccagaaccttgactcactcccataaagaggtggattcgattttctcttctccttcaagctggccataactttgtaactaccttcagaacaaaacagtagaagcaacacc

SEQ ID NO: 432790 - DNA, 528 bp, Homo sapiens
ttccttggctcacagcaacattggaccaagtttttcacatgcttcaactccctctgacttccccatctgccatatcgctgtttctgcctccattttctgcctttgagagctcatatgattacagtgggcccaattagagtcagctgattggtgaccttaatcacatgtatagagcctttcaggacaatatctagattagtgtttggttgaataaccaggggatggaaatcttgggtggacaactttagaaatctgcctactgtagtgtgaagtgccatgctgagataatacattccatatattatcaaatttaattttccaaaaaatagtataaccaggtgatargtactgttatcactaaaaacaatagcaacaacaaaaatcttcctattgtttgtttccagctgatgatagctatcaagctactttaaaacatctctaataggattttgtttttaaagttatatatttaaaaaataactcttcaaagaacatgtctgttgcataagcaagggacaagtataactg

SEQ ID NO: 432791 - DNA, 638 bp, Homo sapiens
ccccatgcaagtccaaattcaggggggcagtcaaaccttaacgctccaaaatgatatcatttgactccatgtctcacatccaggtcatgctgatgcaaaaggtgggcacccacagccttgggcagttctgctcctgtggctttgtggggtatggcccaactcctagctggtttcacgagatggcattgattgaggattttccaggcacaaagtgcaagctctcagtggatctgacattctgggtctggaggacggtggccctcttctcacagctccactaggcagtgccccagtgaggactctgtgtgggggtttcaactccacatttcccttccacattgycctagcaggggttctccatgaggtctctgcccctatagcaaatttctgcctgtacatccattcttttccatacatctgctgaaatctaggtggaggttcccaaagtttaattcttaatttctgtgcacccacaggctcaacaccacatggaagctgccaaggcttggggcttgcaccctgtgaagccacagctcaagctgtacctcgggccctttcagccacagctagagtggctgggatgcagggaaccaagtccctaggctgcacggagcagaggatccctggccgatccctgg

SEQ ID NO: 432792 - DNA, 638 bp, Homo sapiens
ccccatgcaagtccaaattcaggggggcagtcaaaccttaacgctccaaaatgatatcatttgactccatgtctcacatccaggtcatgctgatgcaaaaggtgggcacccacagccttgggcagttctgctcctgtggctttgtggggtatggcccaactcctagctggtttcacgagatggcattgattgaggattttccaggcacaaagtgcaagctctcagtggatctgacattctgggtctggaggacggtggccctcttctcacagctccactaggcagtgccccagtgaggactctgtgtgggggtttcaactccacatttcccttccacattgccctagcaggggttctccatgaggtctctgcccctatagcaaatttctgcctgtacatccattcttttccatacatctgctgaaatctaggtggaggttcccaaagtttaattcttaatttctgtgcacccacaggctcaacaccacatggaagctgccaaggcttggggcttgcaccctgtgaagccacagctcaagctgtacctcgggccctttcagccacagctagaktggctgggatgcagggaaccaagtccctaggctgcacggagcagaggatccctggccgatccctgg

SEQ ID NO: 432793 - DNA, 593 bp, Homo sapiens
ttcaactaactttcaaacatcttaaatatctcttaggttaaaggtcaagatcctcagtcaaaagaacaaggaagaattatggtctttaaaactttgaactctgtgatataatcttaagttatcatgttcaaactttctaagtgacaaaaacagcaaacttgggaaatagctatagaaggagagaaccagatttgggaaatgcaaaactggctggccttctttacaaagaaaagcaacttgagagtgagtcacatttgaatacccagtagccaatrtagacaaattcatataatataaaaaggcatcattttctatccctgaactacaataataatacttccacacaaatttgaactagagcaattgattaacttgctaattctttattcccaggtgacaataaatggcccttatcctgcccaaggatggaataggttatagggtgaacataaatggttgaaagttattggagaatagatgtgctgccagattaccatttacagaactgactcactatgtttcttagacatcctgggtaggttccctatttatcacatggggttcatagaacttgtaggtaaaaatagatgaac

SEQ ID NO: 432794 - DNA, 570 bp, Homo sapiens
aatggatccgtgccttataaaagtgctggaggaaagtagtttaggccttttgttctcctgctgtttctccacatgaagatacatacacagcatcatgcatgagaaatgggccttcactgcttgctcttgatcttggacttcccagccttcagaactgtgacaaataaatttatgttctttatgaattagccggcttgtggtatttggttacagtaacacaaatggactaagacagtaagacaggagtttttttaaaaagatattcttgatgtcaatcctttatcagatatatgacttgcaagtattttttcccattctgtgggttgcatttttcactctgttgctagtatccttttatgtacaaaaagttttaattttgatgaagtccaayctatctgctttttaaattttgcttcttgtgttttggtgtcatatccaaaaagtcattgccaaattcaatattatgaagggtttttaaatttttcttctatgagttttataatttttatcagttatatttaggtctttgattcattttgagctcatttttgtatatggtgtaagataagc

SEQ ID NO: 432795 - DNA, 445 bp, Homo sapiens
ttaagacaatttatgcagagttgggcttcagtttgcttacacaggaacccagggcactggagccatctgagtctaccagccacacaattaattattttaaaccatttaatagcagctccccttcctcgccactctcacctcctggtagcttccacactactctctctgtgagtttgaatattttagatatctcatataaatgaagtcatgccatattcatccgtgtctgacttatttcagtacaatgtccttcaagttcatccatktagtcacatatagcagaatttctttcttctttctttttttcctttttgcagagaaaaaggtctcactgtgttgcccaggcaggtgtcgaattcctggcctgaagtaatctatccacctgcctatgtctgcctccctaagggataggtttacaagtgtgaaccactacactcagccagaa

SEQ ID NO: 432796 - DNA, 595 bp, Homo sapiens
caaaacctcaaaagtagggaagccaacagttcagccttcactcaagagccaaaggcctgagagcccaagtccaagagtccaaaagctgaagaacttggagtctgatgtttaagggcagaaagcacccagcacaggagacagatgaaggctagaagmctcagcaagtcagcttctcccaccttcttctgcctgctttatcctagccacgctggcagtttttggatggtgcccacccagattgagtgtgggtctgcctttcccagcccactgactcaaatgttaatctcctttggcaacaccctcacagatacacccaggaacgatgctttgcatccttcaatccagtcaagttgacaatgttaactatcacacctgtatattattaatatcctactgtcttccatgtgtttgcacacgccattttcctttcctgatatacctttaaacctcatgtttaagtcttttcagaaaaatgtttcataaagtttaatttacagtaaatcaggatggattatcttttatatatacctaatgtatactgccctctatttcatattcataaatccaatttctccttcaaattttcacattttgt

SEQ ID NO: 432797 - DNA, 595 bp, Homo sapiens
caaaacctcaaaagtagggaagccaacagttcagccttcactcaagagccaaaggcctgagagcccaagtccaagagtccaaaagctgaagaacttggagtctgatgtttaagggcagaaagcacccagcacaggagacagatgaaggctagaagcctcagcaagtcagcttctcccaccttcttctgcctgctttatcctagccacgctggcagtttttggatggtgcccacccagattgagtgtgggtctgcctttcccagcccactgactcaaatgttaatctcctttggcaacaccctcacagatacacccaggaacgatrctttgcatccttcaatccagtcaagttgacaatgttaactatcacacctgtatattattaatatcctactgtcttccatgtgtttgcacacgccattttcctttcctgatatacctttaaacctcatgtttaagtcttttcagaaaaatgtttcataaagtttaatttacagtaaatcaggatggattatcttttatatatacctaatgtatactgccctctatttcatattcataaatccaatttctccttcaaattttcacattttgt

SEQ ID NO: 432798 - DNA, 595 bp, Homo sapiens
caaaacctcaaaagtagggaagccaacagttcagccttcactcaagagccaaaggcctgagagcccaagtccaagagtccaaaagctgaagaacttggagtctgatgtttaagggcagaaagcacccagcacaggagacagatgaaggctagaagcctcagcaagtcagcttctcccaccttcttctgcctgctttatcctagccacgctggcagtttttggatggtgcccacccagattgagtgtgggtctgcctttcccagcccactgactcaaatgttaatctcctttggcaacaccctcacagatacacccaggaacgatgctttgcatccttcaatccagtcaagttgacaatgttaactatcacacctgtatattattaatatcctactgtcttccatgtgtttgcacacrccattttcctttcctgatatacctttaaacctcatgtttaagtcttttcagaaaaatgtttcataaagtttaatttacagtaaatcaggatggattatcttttatatatacctaatgtatactgccctctatttcatattcataaatccaatttctccttcaaattttcacattttgt

SEQ ID NO: 432799 - DNA, 562 bp, Homo sapiens
gttccaatgagcatcctgtattttatcaagcaaccctataattaaatagcaaattgttcctttaatgaawtaacttggttaggtttattgtgaatgtgagggattaatattaagatgtcacaaaaaacatctttttttcggctggcaagatggccgaataggaacagctctggtctgaagctcgcagcaagatcaatgcagaaggcaggtgatttctgaatttccaactgaggtacccaactcatctcactgggactggttagacagtgggtgcagcccacggagggtgagctgaagcagggtggggtggggcatcacctcacccaggaagcacaagaagttgggcaactaccacccctagcaaagggaagccatgagagactgtgccgtgaggaacggtgcattccagccagatactacgcttttcccatggtcttcacaacccacagaccaggagatttcctcaggtgcctacaccaccagggccctgggtttcaagcacaaaactgggcagccgtttgagcagacactgagctagctgcaagagtttgtttttcatacc

SEQ ID NO: 432800 - DNA, 562 bp, Homo sapiens
gttccaatgagcatcctgtattttatcaagcaaccctataattaaatagcaaattgttcctttaatgaattaacttggttaggtttattgtgaatgtgagrgattaatattaagatgtcacaaaaaacatctttttttcggctggcaagatggccgaataggaacagctctggtctgaagctcgcagcaagatcaatgcagaaggcaggtgatttctgaatttccaactgaggtacccaactcatctcactgggactggttagacagtgggtgcagcccacggagggtgagctgaagcagggtggggtggggcatcacctcacccaggaagcacaagaagttgggcaactaccacccctagcaaagggaagccatgagagactgtgccgtgaggaacggtgcattccagccagatactacgcttttcccatggtcttcacaacccacagaccaggagatttcctcaggtgcctacaccaccagggccctgggtttcaagcacaaaactgggcagccgtttgagcagacactgagctagctgcaagagtttgtttttcatacc

SEQ ID NO: 432801 - DNA, 562 bp, Homo sapiens
gttccaatgagcatcctgtattttatcaagcaaccctataattaaatagcaaattgttcctttaatgaattaacttggttaggtttattgtgaatgtgagggattaatattaagatgtcacaaaaaacatctttttttcggctggcaagatggccgaataggaacagctctggtctgaagctcgcagcaagatcaatgcagaaggcaggtgatttctgaatttccaactgaggtacccaactcatctcactgggactggttagacagtgggtgcagcccacggagggtgagctgaagcagggtggggtggggcatcacctcacccaggaagcacaagaagttgggcaactaccacccctagcaaagggaagccatgagagactgtgccgtgaggaacggtgcattccagccagatactacgcttttcccatggtcttcacaacccacagaccaggagatttcctcaggtgcctacaccaccagggccctggstttcaagcacaaaactgggcagccgtttgagcagacactgagctagctgcaagagtttgtttttcatacc

SEQ ID NO: 432802 - DNA, 535 bp, Homo sapiens
tatatccttataaaacttactgttttaaaagcgcagtccttgcaagttgatttgggtgttttcagatagtgaaaaacttttaaaagatattaaattattacttttacttatgaagaataaaaggtaacatagagacatagaaatcaagaaatcctcgagtattttctttagaaacaccccgattagagaaggagtttccgtttttaagagaaaattaaaccagatgaccttaagtcctttttaacacaagtttgtattaataccaattaataaattaatcagatttgaaagatttktggacaaatgcctttataacgttcttaactgatatggactgaactgtatgccccccctttccccctggaattcatatcctaaagctgtaactcccagtgtgactgtatctggaaatagggtctttagaaggtaattaaggttaaatgaagtcatagggaaggatcctaatcccgtaggactgtggccttaaaagaagagaaagagatgtatgagttccttatatattttggatattaaa

SEQ ID NO: 432803 - DNA, 574 bp, Homo sapiens
gcttgtaagaaaagtcataaaatgttataactattattaaaaatgaaagggaaaattattttttaaaaaactcagtctgttctctagtcagttggtgagaaatctggccaaaaggatgcaaagtcgggctttctgaaaacaggagttcatcacctttccaaaaggccagctgaggaaatgtgtttttttatcctcttccataactcttgatggtacatttttgcactgtattaagctagaaaagaagacctggactaactggatctcatgaatgtgtgaacttcgtatttaaaaaatactagcactgaaagaatccatcttagtgtcctggaccatccaactagaaataatctatgaccctcgtgtgatgaattgataaatgtctgccaagctttttgttaaytcctcttcactattcctttcttcttgaatctgaagctcttcaatctaccattgtctttgtacaatttcctcctttctagggaaggcaatgtagaaagccagtaaagtattatttaccaagctctagagtcacaacaagtttaagtcccagctcatctacttaaaacataaa

SEQ ID NO: 432804 - DNA, 614 bp, Homo sapiens
tagttttttctataatctcctcccacaaagccaaatggttttcatctcttttttctaggaaaagcttcagctccctgtattctgtttccttataatctgaggatcttctctgcactcatctgcacagatgttctttgcatagatctttctctctgtccctgtcccacgtggccatgcgtcagggcagactgggttccctttgttttartttaagggtcctgggaaattttcataccttagccactttgctcctaaatgttacaaacaaaatttatatttatctattgaatttacagcagccattgataggtccttaccccttcacccttccacacatttttgctgcctgctttttcagctttgtttgaaatgattctcctgcatgcacatgctcctctgaatctactgtctgatcaactttcagtttcccacagataccagtctgtctctgggatcagggtcttcccacatgttcatctcattgtctggaattttcttttctttcttattcacttgatcaatttttattcatcttttttatctcaacttggattttgggaaactttttgtaaactctcagggttttgattttatgtattccgtgtatagtgtgc

SEQ ID NO: 432805 - DNA, 566 bp, Homo sapiens
gcaaatggttaatggatagagaagagaataggaaagaccaagagaaaggcagttattgtaagaattagtcagatgatgatgaggtcttacctaagccagtattagcagtatgtggaaaaaaagcacatttcctggataaattaagctatatacatctggctaaaaataactaaatgaggaaaagagacatttaattatttcaggctattkagtctcccactacaatcaatgatagcaagccccagaatgtatgtgagaatgtatttttggagtcttagttatcaagtacattttacttactgccaactggcctctctgagtatgattcttgtatttaaggatttttactttttcgtgaaacatggcctttaaacaaaagtcaaccacttcatttgcactcaatatgttctgttgctgcagggaaagctggtcatgttgaacttactgagagacagtatgtcagactctgatgtgatgatttcctaaggtattctcaaggatgcttttgaccatatgtaattattctcctttgaagatgacttcagcatccactccctgtgtaggtt

SEQ ID NO: 432806 - DNA, 566 bp, Homo sapiens
gcaaatggttaatggatagagaagagaataggaaagaccaagagaaaggcagttattgtaagaattagtcagatgatgatgaggtcttacctaagccagtattagcagtatgtggaaaaaaagcacatttcctggataaattaagctatatacatctggctaaaaataactaaatgaggaaaagagacatttaattatttcaggctattgagtctcccactacaatcaatgatagcaagccccagaatgtatgtgagaatgtatttttggagtcttagttatcaagtacattttacttactgccaactggcctctctgagyatgattcttgtatttaaggatttttactttttcgtgaaacatggcctttaaacaaaagtcaaccacttcatttgcactcaatatgttctgttgctgcagggaaagctggtcatgttgaacttactgagagacagtatgtcagactctgatgtgatgatttcctaaggtattctcaaggatgcttttgaccatatgtaattattctcctttgaagatgacttcagcatccactccctgtgtaggtt

SEQ ID NO: 432807 - DNA, 513 bp, Homo sapiens
ttatcttcttcaatatagagtaattcaatacaaacagaaaacagttgcattttgagaagtttgtaaataatttgattttcctagaagtttaacagaaagattcattctacctataaatgtaaagaaggttgttccttactccataaacactggcatactccactttatcacaaaataccaggggccgagtcttcaatattgcagtcctttgtagctaaccgcctgtatggacatttagttacagccaaaggtatttgttcttcatttgactggatgggatcctgagcccttttgactattggctgatgtaattacagagcyctcaactttctaccacaggagcccctgatgatgcctaagaagaactacagcaaaacataatgggctatgagttgaagaggagggtatcctggtgcctcactggtgatggcttggccagccaggttgacattccacaccactgttaaagacaggtgcccatcagaagcagcaggccttctgggaaactgagga

SEQ ID NO: 432808 - DNA, 601 bp, Homo sapiens
ccacactatgtttcgaggagaattaataactatgacctggaatgrgttaataaaaatatgcatgcatggctgggcatgatggtcaaattcagaggagggcactccttaagaaaacaaataaaacttatgagtaaaaattaaaaagataccagatcttggaagaatccttgcatatgaggagttcttaaacttaagcttcattagtttcacagtaaagcctacttttgctggtgtcagccagaagtgtataagggaggcctgggctctacctcaattcatgggcaagacggaagtttttgccatttggtcagcaacaataagatttaagaattggtgttgaagtgtttgggggaagaagtagatagaagatctgtgtctcatgtgaatgtgtacctgaggtgctcaccatgaaggaggtgctgaggtaatggcattctctatgctccttctctaaactcccagtgattgcccaatgagctcatgaacaaagtagctatggtggcagggatggtagctcttcatgggctcaaatacatgaatttacctcacaaagacctacctggctactgcctctgctgagtgctcaatttacaagcagtag

SEQ ID NO: 432809 - DNA, 541 bp, Homo sapiens
gctccaaagttattcttctcatattccactattttttttttgccatggctttagggtccacacattatagcaatggcattacaatgagattatcatgagggattttatatatacaggcatctccaactagcaatggtttttcagctttacaatgggcttatcaggatgaagcctcatactaagttgagaatctccttatgacttaagatggggttatggtttctactgaaggcatatcactttcacatcaacataaagtaaaagaatcctaaatcaaaccgtcataagtgaaggaccatctgctcttttgccagcactatatgcactttccacttaatgatatttttaacttatggtrggtttactgggatgtaactccattattcagttgaggagtctgtgtgtatagaaagagacacagagagagagagaaacaggcagagagagagagggagggagggagggagggagacagagagggaatttgtagtcagagaatcaccactcaaatgagcaaagagtaattgcagcaaagctaaac

SEQ ID NO: 432810 - DNA, 541 bp, Homo sapiens
gctccaaagttattcttctcatattccactattttttttttgccatggctttagggtccacacattatagcaatggcattacaatgagattatcatgagggattttatatatacaggcatctccaactagcaatggtttttcagctttacaatgggcttatcaggatgaagcctcatactaagttgagaatctccttatgacttaagatggggttatggtttctactgaaggcatatcactttcacatcaacataaagtaaaagaatcctaaatcaaaccgtcataagtgaaggaccatctgctcttttgccagcactatatgcactttccacttaatgatatttttaacttatggtgggtttactgggatgtaactccaytattcagttgaggagtctgtgtgtatagaaagagacacagagagagagagaaacaggcagagagagagagggagggagggagggagggagacagagagggaatttgtagtcagagaatcaccactcaaatgagcaaagagtaattgcagcaaagctaaac

SEQ ID NO: 432811 - DNA, 595 bp, Homo sapiens
actctgccctcacatgtggctgggtatagaaccctaaatttaaactctctttttatcagtaccccgaaactattcttctgttgtctcctagtgtctcagtctatcgggaatagacactagaatacccagcaggtattacctcttgaggttaatctctttctgtttcaatatctgcaagttgaccaagatgtctgtctgtctatctgtctatcatctatctatctatcatctacctatctctaatttgtgtgtgtttacctcattcatcccactttggtacttggtaagacttttcaatctgtgacttttttcagctttaaaaaataactatatattaaaagtgactccccctaccttcattttctaatgtctatgctattggaactccttttagatggatattgaatctctgaaataattttctacctctcagttttctctacattcttttcccattctatctatttgcatacccttrtagaacactaacattgcatattttccagaggaaaaattttgtttttagccatgactccagaccatatacatatttggaaattatgtttctaatttgcaagcatgctaccttggtctt

SEQ ID NO: 432812 - DNA, 626 bp, Homo sapiens
catatttggaaattatgtttctaatttgcaagcatgctaccttggtctttgatagtttccttttcatggcagtgcagtattacactatggctacaatatatttttcattctgggaaatagaattatttgtaatttccttgctatttgttacattatctctatttcttcttttatcagttctgtttattgaatgaaatccttcccttttattctgtttttacctcttcaactgtctggtgattcttctagtctatatgcattaattaatttaggacctagttggttagaagaagtctgtgtttatttcctcagtgtttgagtaggwctgttttccccatagttatcttgcccttatatagtagcctatgggaagggctttgtataaagtggaagaaagtctggctccattcaagggagagcaagcgttgagcacaaggtcaagtttgggatcccttcaactttctaagtaagaaggactttgctctctattgtaaagaattctggagtacttttgccttggatgaggctgtagtttttaaatataatctctctctgtctgtttagacatcaggggttactgtgagctctttcaggctgctatctcagctcctaatattcagagtatg

SEQ ID NO: 432813 - DNA, 605 bp, Homo sapiens
ccaaaagaaaggaaatcagtatgccaaagatatatctacactccagtgtttattgcagcattatttacagtagctgagatgtggaatcaacccaaatatctaccagtagatgaatgkataatgaaaatgtggtatatatacacaatagaatactattcagccacacaaaataataaaatcctgccatttgtgacaatatggatgaacctagaggacattatgttaagtgaaataagccaggcacagaaagataattactgcatattctctctcatatgtggaatctaaaaagttgatctcatcgaagtagagagtcaaatagtggttaccagaggctgggatggttgggaggatatgggaagatgttagtcacaggatgcataattacagttagatgagttggatgggggaataaactttaaggggtctattgtacaataaactgattatagttaattacaatatattgtattcttgaaaaatgtgaagagtggatgttaaatgctcaccacaaagttgtaactatgtgagtaatgcatttctttgctagctaggtttacacattctacaatgtatatatacttcaaaacacgatatggttttat

SEQ ID NO: 432814 - DNA, 575 bp, Homo sapiens
caagccaaaccaccaaggattgctggcaatagcaaaagctaggaaaagcaagaaagcatttcctcacaggtttcatagcgtagttctaccaacaccatggtttaaaacttctagcctccagaactatgagacaataaagttcttttgttttaagtcatccaatgtgtggtgctgtgctatagcagctctaggaaactgatagagatgggctggaataactcctgacaataatatcatgtttcattgaatgagacactctactgagtgactgcaggtctagctggtctaagacgtcagagtcaacaatgatcaaattctaagattttggaaaaagttgccatttcgaccttttgtgaacacactcttggctggatgttcctctcctaggtttacttgaatcattttctttaagaaactgcctaatgaatatcaggcttaagattggtttccatacttggaaaatctgagamcgggaatagggaataggcagaactgagagtataatgacatctctgcttccctgttctctctctctaactgacctcctctgtgtgcagaccgaaagtacacccaga

SEQ ID NO: 432815 - DNA, 610 bp, Homo sapiens
taaattggcaactgacataaggagataattcaaaaatcatgcactatcatgagtaatctcagatttttaggcaaatttccatatcacgaataaacgcaaaatcaaataaartgatgaatgtatatatttactaataaatatgtagttagatattctatattaacagagaatattttaaaggttttttaaattagcaatatacaaagataaatcccataataggccatgtggaaccatcattttcaggtattgctggggatagcaatttggcaatgtagtatactatttcttataaacatcttttctatttgtcctagtaattccaattctgtggatttgtcccaacaaaataaatcaaaggatgtaaaaatatgtaacagagaagttaacagggtcattatttacaacagcaaaaaagctaatgtcatgaaagaaataaataagtaaactatggtacattcacataattaaataatttacagtccttgaaaataatatttatgaagtaatttaaatataacattagaaaatccaattatgttaaataaacaaataaaacatatatagaaaaaaagagtgaatataaatacagaaaaattattagttgttt

SEQ ID NO: 432816 - DNA, 606 bp, Homo sapiens
gttcatatcccattagtcagaacttctcacacagcctctccctaatcgtaagtggggtgagtgaatatggagatgcatgtaaatgtttcttggatatttggtgagcagaaaacaaatgctgccacaaaaactgagattcagagaaatgatgtgactcactaggtcgcaaagctaataaacagtagagcccatatctctagccatcaccatctgagatctaggtgatctgaggtccttagcctccagccacacagcctgaatagatactgggctagatataaatttcagaatgttagcccacaaaggccgttgttttcaaactaactccagatccctgccaagtatctcagtktgactgtgtcctctctctttctccattcaaatactatggtaccttgtttccaaatatccatccccttccacataagaagtatataacactaacccccctgaacatgagttgcagagcttctgtgttagtggctaaaattttctcagactagtagaagacttggtcatgttaaaagagcaactttggccaaattaaatttaagagtttaattgtgcaaagaatgattcaccaattgggcagcctcccaagccaga

SEQ ID NO: 432817 - DNA, 602 bp, Homo sapiens
  misc_feature (1)...(602): n = A,T,C or G
cctgtatataattgcttgattaaattctcagagttgtatcatggcttactatatttakcttgcaatttctcaagatttgatcatctattgaagtatcatcccccattccttgttcatatactctgccattctcatattagaaattttgattccaagaatatcttccacaatgcatcctcacttgtagttcaaggcatgcaagtaagcaaaatcttatgttcattttataaagggaagccaggtattttagcccagccagctctgcatttgcacaatctgcattttacttttatgaaaagaaaatagtgagcaggaaacatgtcaatagtgggtattaattctataaagcatgttctagggcacaaactcaggtaactaaagaatcaatgtaaatagatcatctactatcttttttataatgcctaaggaaagctgttatttaactgatcaggttctatgcattgggacgtcaataaaaatagtacattcatttggagattaaaaaangtttataatgacttgtatatcactgtgctagacattagggctataacagagaggaagacttacacaccaccatgaaggcccttacagattttgga

SEQ ID NO: 432818 - DNA, 602 bp, Homo sapiens
  misc_feature (1)...(602): n = A,T,C or G
cctgtatataattgcttgattaaattctcagagttgtatcatggcttactatatttatcttgcaatttctcaagatttgatcatctattgaagtatcatcccccattccttgttcatatactctgccattctcatattagaaattttgattccaagaatatmttccacaatgcatcctcacttgtagttcaaggcatgcaagtaagcaaaatcttatgttcattttataaagggaagccaggtattttagcccagccagctctgcatttgcacaatctgcattttacttttatgaaaagaaaatagtgagcaggaaacatgtcaatagtgggtattaattctataaagcatgttctagggcacaaactcaggtaactaaagaatcaatgtaaatagatcatctactatcttttttataatgcctaaggaaagctgttatttaactgatcaggttctatgcattgggacgtcaataaaaatagtacattcatttggagattaaaaaangtttataatgacttgtatatcactgtgctagacattagggctataacagagaggaagacttacacaccaccatgaaggcccttacagattttgga

SEQ ID NO: 432819 - DNA, 507 bp, Homo sapiens
  misc_feature (1)...(507): n = A,T,C or G
ccagccagctctgcatttgcacaatctgcattttacttttatgaaaagaaaatagtgagcaggaaacatgtcaatagtgggtattaattctataaagcatgttctagggcacaaactcaggtaactaaagaatcaatgtaaatagatcatctactatcttttttataatgcctaaggaaagctgttatttaactgatcaggttctatgcattgggacgtcaataaaaatagtacattcatttggagattaaaaaangtttataatgacttgtatatcactgtgctagacattagggctataacagagaggaagrcttacacaccaccatgaaggcccttacagattttggaatatagattgggaaacagaaaattcaaggccaaaatgtacgtgctgggataagtagcgtataggctgctataggatcacgaaggagatgtatcagttgagttggagctcagagaggtgtgagaaaggaaggaagtgttcctggacgaccccatcgt

SEQ ID NO: 432820 - DNA, 507 bp, Homo sapiens
  misc_feature (1)...(507): n = A,T,C or G
ccagccagctctgcatttgcacaatctgcattttacttttatgaaaagaaaatagtgagcaggaaacatgtcaatagtgggtattaattctataaagcatgttctagggcacaaactcaggtaactaaagaatcaatgtaaatagatcatctactatcttttttataatgcctaaggaaagctgttatttaactgatcaggttctatgcattgggacgtcaataaaaatagtacattcatttggagattaaaaaangtttataatgacttgtatatcactgtgctagacattagggctataacagagaggaagacttacacaccaccatgaaggcccttacagattttggaatatagattgggaracagaaaattcaaggccaaaatgtacgtgctgggataagtagcgtataggctgctataggatcacgaaggagatgtatcagttgagttggagctcagagaggtgtgagaaaggaaggaagtgttcctggacgaccccatcgt

SEQ ID NO: 432821 - DNA, 609 bp, Homo sapiens
tgttagaacaaatggatctccaggaaagtttttcattccagcctttctattctcaaaacttgcagtggtccccacctgccccctctatccacagtttcggttaccctgtcaaccatagtccaaaaatattaaattgaaaattccagaaataaacaattcattaagaaggtcaatagtagcctaacatatgtcacaacttctataccatttaccttacttcgtctcatcacatagrcattatattgagagagagagaccacattcacataacttttcttgtagtgtattgttacaattgttctatttcattattagttattgttgtaaatcctttgctgtgcctaatttataaattaaactttatcataggtatgtgtgtatggaaaaaaaatgtagtatatatgggattaggtactctccacaatttcaggcatccatagggtcttggaatataccctccaccaaggataaaaagggaccactgtgtttacatttatctttcttcaaaaattagtaggttttgccaaccgcggtggctcatgcctgtaatcctagcactttgggaggctgaggcgggtggatcaggaattcgataccagcctggccaac

SEQ ID NO: 432822 - DNA, 511 bp, Homo sapiens
agactactagaagaattaggttgatgaagtaaaaatggctcccctttgaaagaaggcatgggtagaagaaaggcacaattttttcttacaaactttgtagaaaaaaagtatttgaccccttaaacacagtgcatacagattttaaacattaaaaccagacttaaatcaaaaaagccacctgtatgtaattccaaatcaaaagcaatttataaagcagaacatagaagagaatggagacagtttcgctatctgtggagactaatacatattggataaccatawactttcagggacagaaattaagctcttttaatggatgtttcttgtacatgtcattttagaaaacatctgaccctaactgtcagccttattctctgtttggcagaacttcccctggctctctgtgtcactgtaacaggtgaataactaagaaaaaactgtgtctgtagacacttgtttataatggcattcagggtcctggagctaggctgacagatgctcctccagaagg

SEQ ID NO: 432823 - DNA, 509 bp, Homo sapiens
tacgatgttagctgtgggtttgtcatacacggctttaattattttgaggtatgttccttctatgtctagtttcttgatggcttttattgtgaagtgatgctatatttaatcaaatgctttttctgtgtctaaagagatgatcttatagtttttgtttttaatcctgtttatgttgtgaatcacatttattgatttgtatatgctgaaccgtctttgcatccctggaataaagctcatctgattatggttattgtctttttcttgtgctgttggattmgatttgttactattttgttgaggatttttgcatctatgttaatcagggatattggtctttagttttctttttttgttgcgtccttgcctggctttggtatcagggtgacactggcttcatagaatgagctaagaaggattccctcctccttgattttttgaaatagtttcagtaagattggtacccattcttttttgtatgtctggtagaaatcagctgtaaatctacctgg

SEQ ID NO: 432824 - DNA, 570 bp, Homo sapiens
taaatagctaaaaaaaatttcctctagaagagtttggtgaggaatggtccaaacaggttggtaagtatccacttgaatatgtagccaagaaagagaatgacttgtgggcaaagctgagcctgaaatagaaactttgtaagcagcctatgtctagaagccaactttggtactggaaggaaaaaaataataagctcttcagtgatatgacaaggagatgatgtrgcctatgtcttcagggatgccagtcaacattgtggtcacatggccatcagccttcaacctagagtgaaaatggtactttgaccaaagggctggctttcacagtagctaataaacatgcttaggtgatccaaacctaattttttttttgaaggagtctcactctgtcacccaggctggagtgcagtgtcacgatctctgctcactgcaacctccgcctcccaggttcaagcgattctcatgcctcagcctcccaagtagctgggattacaggggtgcgccactgtgtctggctaattttttttatatttttagtagagatgggttttcaccatgttggccaggctagtc

SEQ ID NO: 432825 - DNA, 563 bp, Homo sapiens
gatgatgtggcctatgtcttcagggatgccagtcaacattgtggtcacatggccatcagccttcaacctagagtgaaaatggtactttgaccaaagggctggctttcacagtagctaataaacatgcttaggtgatccaaacctaattttttttttgaaggagtctcactctgtcacccaggctggagtgcagtgtcacgatctctgctcactgcaacctccgcctcccaggttcaagcgattctcatgcctcagcctcccaagtagctgggattacaggggtgcgccactgtgtctggctaattttttttatatttttagtagagatgggttttcaccatgttggccaggctagtctcgaactccckgccttaagtgatccacccacctcagcctcccaaagtgctgggatttcaggcgtgagccactgtgcccggcccaaacctaatttttaaactataaacgaagagtcaaaagcccagtatttcagaactgccactcacatccttgggcagatttgactgttttttaggataaagtaatgtttgaaagtgtttaaattc

SEQ ID NO: 432826 - DNA, 549 bp, Homo sapiens
gatctggtctaattgccttactcaagggtgctttcattagctccaacaactatcagctctttttatttcactgaaatctgtaacaaacagactttgtcactgtggcctgtcatccttggactcaagtgatcctaagttcctgatctctcacctcgtctctagtgaggatggggcagaggcatagacaaaagattytaatcccagctcaagctgtagcatcatcacaggggggttctctgtggttggttttgtgttacagaaacagagtagtcaaggtatctaatatttgtgttataccaaaaaaaaaaaaaaaaaaaagatggaggttgtttgttcagccaagagaacctaaagtaggaaaaatatgaggaagtgtttatggaagtagttgtagcttggtgttcgctgcaccagacgacagaaataggactgatgtgaaagttatcagaaagtaattttcaacccaaaggaaggaatttgttaagtggagatactcaaaaatggaacatggtacatcctagaggaaagaaacaaccatttgtagaacat

SEQ ID NO: 432827 - DNA, 632 bp, Homo sapiens
acagaacaggtaaatcaaaggtttacaaaaatccaattttgagaagttttcaggtccctcccagccctgaggtcctttgatgcctcaattttcaagggtttttttgatacttccccagtaaggatgggggactatcctggtgggtaagtgggctggtgattccaatcatggaaagagtctatgcctcctggcttgtgagaagcttccaagagaaaaataacatcagaggagccacaaaaaaagaaagcctgcccctcagaaagagtctgagatttcatccttaacattatgattcccataaactacaatgtcacagggagataatttttcaagcaacttcagacattatgctctagaaagaagattctttcagggcccttatggaaggttttgagtagttctgtgtcctgtggtaggagaaagaacakcagggaaaggagcagaactaggaagatgcacacaacaaaaatagtacctcttatttgactgctcaacctcagtccccgcagccatatgacagggactgcctgcagaaatctctgcataactgatgatgcatcctcaggctacatagcacccaggaaaatgaacttctgtatacatctgtctacatcagttatgatgcctgccag

SEQ ID NO: 432828 - DNA, 582 bp, Homo sapiens
ccatccataagaaaaaaaaatcaacagaatgtaccaaaccttgacagacaaccattaaaaattataagaaacaattacccaagccagaaagaaaaggaaatagaagcatttcatctactcctgtgcctgccagcatttctggagagaaagaaaggaacatgaaacaaatattttacattagctatgtttaccaatttgttttcaaaaaagaaagaaaagaaattatcttttactttaaacctttccaagaagacaaaacaaaattttctcacctgactaacccgtaagtctgccartttcaaatgactttgaaataaaagccagtggaagaactgagtagctcagcttcccaaattacagatcctcggtgatggtatagattgccagtttagtggcagaatgacatcttttagtaaaggacaagaaaacgtcatcccacagagtcctgcacaaaatggactgttgacttgtaactaatgcaatagccaggattttactaactattcttcttggttacttttttttacagcaagacagggaaggagatgaaagtgatattaacaagaaggagatcttactata

SEQ ID NO: 432829 - DNA, 609 bp, Homo sapiens
gtttggtgactaaatggtcttttttcatgcacaagcaggtggtagcatggaaaaatgagccaggcttgaggtcaggaaggccaggatttcaaccctgcaattcccatttgacacttccttctatgtgcctgttcccttttctgtgaagctgggattacattgctgaaaagattaaatgagaatgcatgtaaattgtttagtacagaccactcacccagtaaacaggtggtggtttttcttgcaagctgtccyatggtgaattggatcaatccctcaaagcttactgatagcaacaattcaaaacataatctgtcaagaaaacaccagttccacggttttgcctcagataaattatcttcaggaataaactaatcatttaatgccagtaagagctgagaaatccatttacaaaatacttttttaaaatgttctggcaccagtaccccccaaaatgtaaaacatgtaggatagatttcccagcctttttagatggaatatgaagaaattaaggaatgtaagaagaagaccaaaagtgcagataatctttgaactaaggctcaaatcctaatcagaaacatataatgatgtttacttcttagattcatatct

SEQ ID NO: 432830 - DNA, 603 bp, Homo sapiens
aggtcctaaggcccaagtccatgacaagcagccatgtcaaccgtggactgggcctttacaatcactatatgtattcctgtgccttttacatgctgactatggatacaggctgttctgctacatgtgtttctttagtgtaaattagcacatgtgtaagtaaaaaagaatatcagtaaacactgaagtcttagtgattcacttttgaatctccaagaaggttaattttgaggcaatagtatcaaactttttcacagttaaagagaaatatttagcaacatatgaagacattagggaagaaaacaactaaaaatcttgcagagagccttttttagtgcaaaaaatagctgatttagtggctccaagaacccctattctttccactctatagagccctgtggtaaaactacaagtaaaaaacacaagccccaggatactaggctgataagaatgtactgtgattataagtacaaatgccattggagatttgcaatgactggtatatttaataagattaytattgttttagttagaggtctctacattctacaagttttgagtggactatcttaactgtattttcctcataaacactgtgcaattagt

SEQ ID NO: 432831 - DNA, 611 bp, Homo sapiens
ggtaaatactttcatcaaaataagagtgctgaagaaatttaatcagctccacctcatgtgatgtacccactaccacattgattaaacgtaggtatgcagggaaagaaatttgcagttagcctctctcccagcccaaaaatgtacacttcctaactcaatcaggaaggcttggcaaagatgttatttaaattgctccactttaggatgaaagggtaaaagtaagrcttgaaagagttttaagaacaactcagccgaactgagtttaggcaacagtggtcaatatttttgcctgttctttcttaccagggagcaaggttttcctaacagaagtttattgcttataaaaattattcagagaggtctacaagaaaaatgtcatctaaagaaaagaaagaatggccattcaactaagacttccaatttcacctcatccctagatacaatctttatgatgcccaggaaaagatgaaaagtgaatcaaagttctttcaactctcaaatttggtacttctagatttagcctagaaatgtcaggtgacttaatatgtccttcagaatttcagtttgggaaattcagtaccctccctcaaattttggcaattcccaagaaa

SEQ ID NO: 432832 - DNA, 522 bp, Homo sapiens
atgtgggtgtttagcactataaacgttcctcttaatactgctttagccatgactcagagattctggtatgttgtatctttgttttcattagtttcaaagaatctcttactttctgcctgtattaggcaattttcatgccgatgataaagacatacccaagactgggcaatttacaaaaaaagaggtttaattggacttacagttccatgtggctggggaagtctcacaatcatggcaaaaggcaaggaggaccaagtgccatcttatatggattgcagcaggcaaagagagaatgmggaagatgcaaaagtggaaatcctgataaaaccatcagatctcatgagacttattcactactatgagagcagtatggggaggaaaccgcccccatgattcaattatctcccacaaggtccctcccacaacacataggaattatgggggtaaaattcatgatgagatttaggtagggacagagatccaaaccatatcactatcttaatctcattgtttacccaaatg

SEQ ID NO: 432833 - DNA, 546 bp, Homo sapiens
aggaactctcaaaaccacacaagtacatgaaaactaaacaaacttgctaccaaatgactttgagaaaaacaactaaattaaggcagaaatcaaaaacaattttgagacaaattaaaatagaatcataatatacaaaatctcttggatacacccaaagcagtgctaagaggaaagtttatagtgttaaacgcctacatcaaacaaatctataaggaactcaaacaaatcaacaagaaaaaagcaaatagccccattaaaaattgggcagaggacatgagcagacatttttcaaaagaagacagacaagcagccaacaagcataaaaaatgctcaacatcactaatcataagagaaatgcaaatcaaaaccacaatgagataccatctcacactagtcagaatggctcttactaaaaaagtcaaaaacstcaggtgttgttgaagatactgagaaaagtgaacacttatacactgttggtgggaaggtaaattagtacaacctctatggaaaacagcatagcaatgtctcaatgaactaaaaatagag

SEQ ID NO: 432834 - DNA, 561 bp, Homo sapiens
aatctcagataagatgtttttaaagccaagaccagccatggatttgtaccatcaaatacctatgtgttggatggatttctctcttcttaaggtcccaagacaaacttggggctcatgagcctgtcagaaagtgacattttttacttaccacaggtcaggaaccctgtatgggaactgtgtagacaaaggtattaggccatttttctcaaggggcttttattgtctctrtaagtcaagttggattccttaaagaaaagcacaccattccagtcaaagccttggtaaaattaccagtttctccaattgtatcctattacaaataaaaacatattcttattgcacttatgcaaataactgtattgccataagttaagaatactcacaaatagtttccaaattctagagaaattaggtagaaatattctccaaattttgttcatgggagtatactaaatagtttaaagctgtcaatagctcaaaagaaaagtttgcttgactgaaaaaaaaagaaaacaaataatcaccattttaagcaaaaagtcaaaaaaattacttcagcct

SEQ ID NO: 432835 - DNA, 561 bp, Homo sapiens
aatctcagataagatgtttttaaagccaagaccagccatggatttgtaccatcaaatacctatgtgttggatggatttctctcttcttaaggtcccaagacaaacttggggctcatgagcctgtcagaaagtgacattttttacttaccacaggtcaggaaccctgtatgggaactgtgtagacaaaggtattaggccatttttctcaaggggcttttattgtctctgtaagtcaagttggattccttaaagaaaagcacaccattccagtcaaagccttggtaaaattaccagtttctccaattgtatcctattacaaataaaaacatattcttrttgcacttatgcaaataactgtattgccataagttaagaatactcacaaatagtttccaaattctagagaaattaggtagaaatattctccaaattttgttcatgggagtatactaaatagtttaaagctgtcaatagctcaaaagaaaagtttgcttgactgaaaaaaaaagaaaacaaataatcaccattttaagcaaaaagtcaaaaaaattacttcagcct

SEQ ID NO: 432836 - DNA, 613 bp, Homo sapiens
tcaaatacctatgtgttggatggatttctctcttcttaaggtcccaagacaaacttggggctcatgagcctgtcagaaagtgacattttttacttaccacaggtcaggaaccctgtatgggaactgtgtagacaaaggtattaggccatttttctcaaggggcttttattgtctctgtaagtcaagttggattccttaaagaaaagcacaccattccagtcaaagccttggtaaaattaccagtttctccaattgtatcctattacaaataaaaacatattcttattgcacttatgcaaataactgtattgccataagttaagaatactcacaaatagtttccaaattctagagaaattaggtagaaatattctccaaattttgttcatgggagtatactaaatagtttaaagctgtcaatagctcaaaagaaaagtttgcttgactgaaaaaaaaagaaaacaaataatcaccattttaagcaaaaagtcaaaaaaattacttcagccttctattatttcagttcatacagttaattcctgttctgcttgatagtyatgaacatttcagctctccatgagtcctcaaagtttttcctctattttgatgtcac

SEQ ID NO: 432837 - DNA, 569 bp, Homo sapiens
atctatttattcctctgtggtttacttttttgactattatgttattgcaattcatccatattaatacatacagaggtaattcattttcgctatcatattcagyttttttaatataccacaatttatgtgtttcacagttgaaggatatttggattgtctcatgtatttattatctgaggaaagctatacacatttttctatatcactcttgatgtgcaggtgaagtacatttcttgtaggcaacaaatcattgggtcttgtttttcatccattattcagtcactctatgtcctttgattgtagagtttaatccatttacattcaatgttgttatcgataagtagggacttactcttgtgattttattaatttgtttactgtgttttattatttgcagtcttctcttctttcctttcttcctgttttagtgaagtgattttttatgttttaatttctttctttttattttttgtgtatccagtttatgttttttgatgtggggttaccctgaggcttgaaaatatttcataacccattattttaaactgatgacaacttaacactgattg

SEQ ID NO: 432838 - DNA, 569 bp, Homo sapiens
atctatttattcctctgtggtttacttttttgactattatgttattgcaattcatccatattaatacatacagaggtaattcattttcgctatcatattcagtttttttaatataccacaatttatgtgtttcacagttgaaggatatttggattgtctcatgtatttattatctgaggaaagctatacacatttttctatatcactcttgatgtgcaggtgaagtacatttcttgtaggcaacaaatcattgggtcttgtttttcatccattattcagtcactctatgtcctttgattgtagagtttaatccatttacattcaatgttrttatcgataagtagggacttactcttgtgattttattaatttgtttactgtgttttattatttgcagtcttctcttctttcctttcttcctgttttagtgaagtgattttttatgttttaatttctttctttttattttttgtgtatccagtttatgttttttgatgtggggttaccctgaggcttgaaaatatttcataacccattattttaaactgatgacaacttaacactgattg

SEQ ID NO: 432839 - DNA, 432 bp, Homo sapiens
tacttaggagtaggattgcagggttgtatggtaagtgtatatttcacttttttaaagacaaggtcttattctgttgcccaggttggagtgcagtggcacaatcacagctcgctgcagcctagatctctgaggctcaagctatccttccacctcagccrcttgagtagctgggattacaagcatgcaccaccatgcccaactaacagtgcatgtttcaactttgtaaaagaaagtgttaaactgttttccaaagagactgtattttgcactaactcagggcacgtgacttcatccaaacttctgcactaagtgatgaccagctttctagcatgtcttctagcagtgcaaagttgtgtccttaagatgaccccagccccacattaaaattcctgcctgagaaagctcagaatgttctggtttttttagccaaca

SEQ ID NO: 432840 - DNA, 579 bp, Homo sapiens
tacatgaaaatacagacatgctgtgataagagatcttccctaggcaagtagcatacctgttgaaygaaacattttcatgaaatatgtcgtgataaatatgttcttttcaaaatatatttttctcctacctactattaacactgaataaagaatgtggccagtgggtcttatttgctgtgatccattaagacaattgggtgtgggataggtggcactgtgttttttatctgtggatccttgccctcctctgcgtcaggttaggccatgacaattcaagacaactgaatattttacttctatcctattatgtgctgtatatcactgtgtagatataagttaataattagtaacaataacatatctcctctaaattcttgaatgcttccatgatgcatatattctatttcacagaagtattcctttttatgagatatactggaaggaaatgaatcttcttctagaagctgatactgaaaatctttttcaaagtctccacgtacaaatatgcatagagacttgcatgcaagttgaagattttcagattagaagcatgccagtaaaacaagtctcatcaaatat

SEQ ID NO: 432841 - DNA, 414 bp, Homo sapiens
aagtgtagaaggcatggatggactcaagtgtgctggaaatatcacttcattttctataatagtataatttctgcttcttagtctccattttagaggaatgattgaaatttaaactctcgttttcagtgttctctaccctatagaatycatgctacacttttaggatctcacactacactaatattttaggggagagatttttgtcttcagttatctgaccatgcagttaccacagagatgactgttatctcagcctgaatgaatctgtcaggtatagggatacacagttgatttttgtgccaaacctagatataggaatctttgctgaggcttaacttcttgtgtcaagcatctaactcacactccacagccattcccctccaggacttgttacctctttgacagtgcttacag

SEQ ID NO: 432842 - DNA, 460 bp, Homo sapiens
aggttcctacaattttttccccataaacatgcttgacacgaaagacctgcttattaatggaattattttgaatagactatggagacctgtaacaaaaaaatagaacaaaagaaaatttcaacaaagtggaatgaatatgaaaaacctctttctgttatatattttaaaaggggagaaatagactctatgcattatggaaagatgcacttgtgtgattgtgtgcaagggctaaggatagcagatggagtaggggcaggacaagaagttgcttttcttactactgaacaaaaaccagacyaaggactattttcttttctgagagttacacataaaattatgtttcatccctctttgaacacacatgtttcttaatgcatattcaaagaagccatacgcctggagacgtgtcaataaggcaattagcccacctgtatgttctaaatctaaaacaattgaatct

SEQ ID NO: 432843 - DNA, 626 bp, Homo sapiens
tttacaaaacacatatctaataacgtttgcgttgcacacttactattacaatggctaaaatccaaaacacaggcaacaccgaatgctggagaagatgtgaagcaaatagaaactttcattcatttctggggcaacacaaataatatagacccttcggaagacagtttgacagtttcttgtaaagctaaacataggcttatcatagaatccagcaacaatattccttggtatataaccaaatgagttgaaaaattatgcccagaaatttccgcatactgtgttcatgtcagctttattattgctaaaacttggaacaaccaagatgtcctccaacaagtgatcagataaactgtggttcatcaataaaataagctattattcattaattaaaagaaatgtgctaacaagtcwtgaaaatacatgaaggaaaggtaaaagatattgctaactgagagaagccagtctaaaaaagatacatactgtatgattccaacaatatgtcattttagaaaatacaaaactatagagacagttaaaaaaaatcatggttgagaacagaaggagaggagggtaggatgaataaataggtggagcatatgaattatttatggtagtgaaagtattct

SEQ ID NO: 432844 - DNA, 626 bp, Homo sapiens
tttacaaaacacatatctaataacgtttgcgttgcacacttactattacaatggctaaaatccaaaacacaggcaacaccgaatgctggagaagatgtgaagcaaatagaaactttcattcatttctggggcaacacaaataatatagacccttcggaagacagtttgacagtttcttgtaaagctaaacataggcttatcatagaatccagcaacaatattccttggtatataaccaaatgagttgaaaaattatgcccagaaatttccgcatactgtgttcatgtcagctttattattgctaaaacttggaacaaccaagatgtcctccaacaagtgatcagataaactgtggttcatcaataaaataagctattattcattaattaaaagaaatgtgctaacaagtcttgaaaatacatgaaggaaaggtaaaagatattgctaactgagagaagccagtctaaaaaagatacatactgtatgattccaacaatatgtcattttagaaaatacaaaactatagagacagttaaaaaaaatcatggttgagaacagaaggagaggagggtaggatgaataaataggwggagcatatgaattatttatggtagtgaaagtattct

SEQ ID NO: 432845 - DNA, 565 bp, Homo sapiens
agaatgtgtagaaagtcaagccctcatacatttatacatttctggtggggatgtaaaatgcttcagccactgtggaaagttaaacatagaattaccataggacccagcaattcccaagagttttgaaaacacatctccaaacaaaaacttgtacatgaatgttcataccaccattattcataatagccagaggtgtgaacaacccaaatgtccatcaactgatgtacaaattttaaaaatccaaacaacagaatattagcagaaagaaggaaagatatactgatatgtgccacaatatggatgaaccttgaaaatattatacttagtgaaagatgtcagtcataaaaggccccatgttgtatgattgtatttatataaaatktccaggataggtacatatcccatatacacagaaagtagatcgtggtttctagggtctggccgaagaggagaatggagagtgacagctaatgagtatgacatttgttttgggggctatgaaaatgtactggattgcacaactctttaaatatactaaaaaacactgaattgtttattttaaagg

SEQ ID NO: 432846 - DNA, 598 bp, Homo sapiens
aggtacctgctattcactattttattaatttgcataaaaacaatatgaggtaggtataatggcccacattttacatgagtttacgcaaagttatacagtcagtaaattgtgaagctgggctttcagccttagttgactatatcatctatacttctaacctctttaatatactaccctgttttctgaacttcagttttttcatcagtataatgaggaaagtctatttaaatgttgtggtaaaatcagaaatatcttaaagcwtctaacatatattaatggctctataaattgtagctacaattattattataatttattcataaccctacccttttaggcacatatcaggggataaggcagtaagaatttttatacattcaagaagatgcatcccttggctgtttctacaggaaccatctttaaggttagagaatttacccaaagtttaatatcctggtgggttataataatgattaacaagatactaaaaaaataaaacttaacttttgtctatcacacgttccaacagcaaaaaatattatatatgggtgcatatacacacacacacacacacacacacacacgtattccagctctg

SEQ ID NO: 432847 - DNA, 598 bp, Homo sapiens
aggtacctgctattcactattttattaatttgcataaaaacaatatgaggtaggtataatggcccacattttacatgagtttacgcaaagttatacagtcagtaaattgtgaagctgggctttcagccttagttgactatatcatctatacttctaacctctttaatatactaccctgttttctgaacttcagttttttcatcagtataatgaggaaagtctatttaaatgttgtggtaaaatcagaaatatcttaaagcttctaacatatattaatggctctataaattgtagctacaattattattataatttattcataacmctacccttttaggcacatatcaggggataaggcagtaagaatttttatacattcaagaagatgcatcccttggctgtttctacaggaaccatctttaaggttagagaatttacccaaagtttaatatcctggtgggttataataatgattaacaagatactaaaaaaataaaacttaacttttgtctatcacacgttccaacagcaaaaaatattatatatgggtgcatatacacacacacacacacacacacacacacgtattccagctctg

SEQ ID NO: 432848 - DNA, 585 bp, Homo sapiens
ctcgtcatgctacagtataagttatttctatttatattgaaaagatatgcaggaccaatcttagtgcatgagaatagatcttacaaaattttaaatagggaacctttatatttagaagtatcatcagaagaaatgggcagggatatttgccttgtgttttcatgaggagcraggatgaggatgcccgtcataatcatagctggtgggatctgggtctcagattatggaagggctcagaagcataaatccaatatagaagataatagagactccaacaactcagtgtctcccaaaagtcttgttatatagctcattttaccataaagaactagcatttttttgacagaatctatggtatattcatggataatagaacatgcataaggaaataagactcttccagactataataatcaacaactgagaagaggttttcttctctgtctagaggaggaagaggaaaaagggagaaatcactgatgagggagtacgtaatatcttctagtcaaaaaatcacaatgtgctgcatatgcctaactgcacaatggaataccatacaaacaagtacaatgagctaggattcag

SEQ ID NO: 432849 - DNA, 541 bp, Homo sapiens
ccaacaagcatattaatataaatcaagcataggaatagaaaccattctaccataaaaccccatgcacacaaatgttcattgattgcagcactcttcacaatagcaaagatatgaaatccacctaaatgcccattaatgacagattagataaagaaattgtggatatacaccatggaatactgtgcaggcatgaaaaaagaacaagaacatgaattgtgtgggaacatggatggagctggagaccattgtccttagcaaactaacacaggaacagaaaaccaaatatcacatgttctcacttataagtggaagcttataagtgaaatgatgagaactcaaggacacaaagagggggaaaacagacattggggcctacttgagagtggagggtgggaagaaataaactaattaaaataaaagtaataactatttgtacttggcttagcacttgggtgataacataatctgtacaacaaaaccccatgacatgagtttacctatgaacctgcacatgtaccccrgaacctaaaataatagtttt

SEQ ID NO: 432850 - DNA, 582 bp, Homo sapiens
cactctcagttgcctcagtataagaggtacagatggtctctcaggtatgatgcagtgttattagcagtttctctattaataaattggtcttgttaaaagacacatagctaggtctgtttgtggatgagggtcagaagtcagggagtacttctgctatttctctttgatcaggctggaggatgttttctccagttgcagttgtctggggaagctcactaggcttgacaatctgatttgatttgaataatttattaataatttgggaaaaccctaattaaatttgtgtataaatmtaaagttagagcagctacagggacccagatggaatataagtacaagtggaaacacttcaaaatattctgagcctgaatttccccagccccactttccctctaatatgtgcacttatgtgctctctctctcttctcgtcttctcactctgtttacccatttatttctgtctctctgactatctctgtatctttttctcttgacacacacacacacacacacacacacacaaccatggctaccgctactaccattaccactactgatcagagttggcaagtgggaataacc

SEQ ID NO: 432851 - DNA, 617 bp, Homo sapiens
ccatgtgtaggacagagtatgcaacattcatataagatgctgagggaagtagctagtgtgatgaagagcatgggctttagaggaagacagagccaaattttaatcctgctctgaaactttccacccttttgaattaggacaaactcctcttggcttcggttcccttatttgttaaaataagactaataatattaactcaaaatgtttacaaacctaaaagtgcttatgaatgtcttgtacctggtcaactctcaacaaatgctgctttcrtaggaatatttattaatttttgtcaccacatcatcatcaaaacattattttagaatatgccctctgtaggttctcatgcccccatccatgactcaagcacatgcatgataccttatgcaaacccaggtaagtagttcagctctgaagtggtgcagaatccagtgcctgtagccgatacgatgtcccttctccagaattttttaacactctttcaggaaaaggaaagtaaatgtattatggctctacatgatttcagaggcccttggctccacatgagtaatgtctttagagataaaatttaggacaaggagaaacattttaaaagttggtatctgtgtcttaccaag

SEQ ID NO: 432852 - DNA, 604 bp, Homo sapiens
aaactgtgagcaagttcaacttcttttcttataaattacccattctcaggcatttctttaaagcaatacgaggacaaattaatacagatataaatgaaacaataagtatgagagatgctcagagtttaagaaaataactcattagttgaacagtgatgaagcagagcaaatttaaataagggaaagatagtaggtcaattctgctcatgtgatatcacaataactaatcttgataatttgtgaagaggctaagtatatttgggcatgtttaccagcaggctggtttattacatacttatggatctgacatagatgtatttagtacatttagttttagattattataggtttctaccaaatacctcatgcacaaagtgcctcatctccatgggctatgtgtgaaatggtattgcctcattgttttcataaaacttggcctttttttttagggcagatgagtaygaaaaacagaccagtgaaaaattaagaggtgacatgtttagagtaagaattaattgtaactacagggtctcccaaatggatattacagtcttgagataaacacatgtatatttgtggtcataagaaaaatcggtattaaaag

SEQ ID NO: 432853 - DNA, 600 bp, Homo sapiens
gtccacccttgttttcaccaccccacagacaagatattggatattctcaacacccttcagggtttcttcatgcctctttatcccagtgggatgtttcagaataaagctctcattaacatttgtgtacaattattggtttgggtatgtgcttcaattcgttttgggtaactgyttcagagtggaagtgtcatgtcatattttaagtacatgtttaactttttaagaagctaccaaactgtttctcaaagtgattgtagcatttttacatttccctcagcagtgtataatagtcttactttctccttgttttgatacatatatacaatgtgtaatggtcaaatcagtatatttagcatttcgatcatctaaaacattcattctttatggcaagaatatttaaaatcctctcttcaagctattttgaaatatatcaatagatcatttttgagtagtgattgtaaaggcaactataaaatttattcctcactcaaatttttcatcctattctctggcatagtcttaaggtctctgggtaggttccctacccaggttctgaatgattaaaaataaaacaaaggagagggaggtagagaaccaaaa

SEQ ID NO: 432854 - DNA, 502 bp, Homo sapiens
ttactaatcccattattgatggattaataatgaactattgtaaaataataagaatctattaattactttagaaaggtaacaatgctacctgtgtgtgccaatgggcctcctattctctagcattgaactacataattatacttagaaaagaaatgttggataataaacaatcaaaagacttataatgatgtggtcttcagaaggctgaaagcataagataattttagtaattcagtgtcaccattaaagttactttttacctggatattgaaaataactagcataytgggaatatgtccttaacttttagcaagcagagtgcatcctttaaaaacaaaaatcccttccgttgtagatctcttaaagtaagacaaacatcctcaactctttcaggtacaggcattctctgagtggtgatcaaccaaatggactctaaagattcagtcgacagagcctctgtggatttacttaaggacaggaaaatcatgttttaaggaacaga

SEQ ID NO: 432855 - DNA, 585 bp, Homo sapiens
tggaactgacagaaaaaaaagtgagcaaaagcaaaaatcataggtgacattagcttcataatcataaatcttaaaaaaaaatccaagaactttgggcattaaggaaaggagagaagagaaatgaaatgtggcagagaaataaggagagggtgcagtggctcatgcctgtaatcctagccctttgggatgccaaggcaggaggactgcttgaggccagrggttcaagaccagcctgggcaacatagtgagaacccatctctacaaaaaaaataaaaattagccgggcatggtgttgtacctatagtcccagctacttaggaggctgaggcagaaggattgcttgagcctgagaaatcgaggctgcagtgagctataattgtgccactgcactccagtctgggtgacagagcaagaccctatctctgaaaaaaaaggaaagggcatttttatgcccagcacttagagatacaatagtctccctttatctgcaattttatttttcatggttttagttacccttaatcaactgtggtctgaaaatagacgagtacagtacaataagatatttagggagagacaaagaaa

SEQ ID NO: 432856 - DNA, 529 bp, Homo sapiens
tcctcttccttaggatgaagtaaaatttgttaagttatattaagcctctaaacaaactgctttatggctccagcagctttgtgttgtttcttatctttgtaacattttgccacaggtacagtatataatgaaataggtgggggtggctagtggagaggttgtaacactgtcaatgagaaggcacccgggatttgtccgtctgacctgctcagtcagagtagtggagccacccggagttctagggagcatcagtctaggagggagatgggcaatgttgcatctcctggaggccagcacagttcaaagttggttttctgagtctcggtcttgtggttttaggattttatggcttttggtgggtatgtttgggaaggaagagccttcattccttgcttaacctgtgcaaataatcttcaaggactttgatcactgggcagagggataggagactgccatctgtcctccagatgaaaggkttcttcttggcaggagcactacagagatggaagttgtgattttttggttgttt

SEQ ID NO: 432857 - DNA, 567 bp, Homo sapiens
actattgtagttttcataaatatctaggtaaatgattaaaatacaataattaaccaaatgtaatgggataaatacttgtagacaaactcatcataatttagaagctaaagttatattaaagtaaataatagatatgtcattatttgggtattttccaataaaactatattataggaaaacattatttcaaaaaagtgtgtcttttttaaaaaggtgaacaatttttgtctaattcaaaccttatataaatgttatatataaaacaaggtaaaaggagccaggaaataagagagatgaaatgaaagttataaaaataaagaggttttttttttttttttgtaaraaagcttaaagagaaataattttacattagacagaatcttgtatggtcaatttagtcctaaaataaaatgactggttgtttaacaaacagggatgttcaggacaaaccagaaagtccaagcatgtcatgaatagtctgtgtaagtcacaataagatgatttatttaaaaaacccccaaaacttttatatgatcaaattgtctattaattaaagggaaattgtag

SEQ ID NO: 432858 - DNA, 547 bp, Homo sapiens
tggtttaaattcctttccacatgcttccatgcctctctcaaaatctattttgtagtgaaatgaaaattcagcagtgcggcgggagcagcactctttattttgtgtcccgaagttggtgcctgagccagcatatgcacagactggatcttggtgctgcgcrgcctctgctgctcactcacactttccagttggctacctactgtgctagtccagatagctgacagctttctagatttccctgtctgcttctactttctcctgaagggtaggcataaggtagagatgtggtgaggctgggctgcagctgccctcaccagcagcgcattggctgttcttttctgttccccgcactgccttgctgcagcaaccccaggactggctgatgcctgtcagactccacttagtatgcttgtggttcagatcagctgcttagtattatgaaatcatccaaccagattagtgcatatggttttgtctatcagtctgactggtgatatcgttacattcactgctttttacgatttctttgttttagacaaaattgcta

SEQ ID NO: 432859 - DNA, 500 bp, Homo sapiens
tggtaaatccactgaacagatactttttgagcacctactgtttgccaggcacaactatagmggctgaggatacagcactggacctagaaagacagtctgttctcagatgctacaatagatggggaaggtttccagggcctgccaaatgtaagaggatgcctgtcttctctggcaaaaccataccactattattttttgattctgatagaaagaaaaaaagacaaaaaaacacaacagggtaccaggaacagagatcaaaaggtgttgtattctatctgtattttctttcgaaatgcaatactaagcaatatccagatagcgtctgtcctctactttcttcttttttcaaaaagaaaaaacttataaattaaaaaatctaacagacttacacaaaacataaatgccaagcttaataaattgtgacagatccttgtaatcaccacccaaggaaatagaacagaacattgactgctcctggatgtccctgccccccatgtgcc

SEQ ID NO: 432860 - DNA, 441 bp, Homo sapiens
gcaaatccaggatatttcacaagatgagaaaggccttagccattttcatttaaattcctattatatatttttacgaagagaaaatatctatgcacaatttgaaaacagtgttatatataaaatatttagtccttttagtgtatctttaagaatatataaaacctcttacttggagaaaacattaaaagcataaatttaaacatttcataatactgcaatatttttaaaacacttataaaacaccttccagaaaggtttgcatagacaaaaaaaaaaagtttgggaaacgttgcattacattgcattttgcaacagtcttcctgaatattggcagtgcatattggcrtactaaagactcctagaagacctacaacatagaagttggcttaactttgcttacttaattgtttctcaaacctaatgaatcaaaacgccattttc

SEQ ID NO: 432861 - DNA, 494 bp, Homo sapiens
atttatttactgcttagtccctagttcctgcagctgtgtcctttcaatgactgctttatggtggccaagagagttgaggtcgactgccaggactcagagatctggaggaacacatggacacattattcttttgctctgaagctatccaattcctgttccggtcagaaggggagatagtgggaggatatctctgaaactgcccagcgcttactgctgatattcctcakgtctgacattattgcaagagaacaaacttagatctaccctctgtgtgttcttcagtggaaggtgaattactaacgaaagtgtaataatacaaaacacaattgagtgtagccttggctttatttgtaagacctactctggagatattattttctttactccaagactacacattggatccagtctgcttcaaacaagagaccgggaaagacgggttactatgctaattgaatactaacgaggcctttgcttaagttgggttttgttgc

SEQ ID NO: 432862 - DNA, 581 bp, Homo sapiens
atttcaaatcagctagaagagacaattttgaatgttctcaccacaaagaaaagaaaaatgcttgagatgatgagtatgctaattaccctgagttgatcattatgcaatgtatacatgtagtggaatatcacactgtaccccatagataatatgtataactattatgtgtcagttaaaaataaaactaaaaaaaaaagtaagtaaacacaatataaacaccaaaaaaaaaaaawaaataaaatgcagagaaactactgctaaaatgtaataaagagaatgatagaaaaatacaagtatattgactggttattaactttgcaaagatgcacatctttattcttatagctctttcaaaggtatattagaaaatggacagtctgaccagggcctacttgagggtggagggcgggaggagggtgaggatcaaaaaactatgtatcaggtgctatggttattacctgggtgatgaaataatctgtacacctaacccctgcgacatgcaattttcccaaacaaacctgcgtgtgtacccccaaacctcaaataaaagttggaaaggaaaaaaaaagaaaaggaaatgg

SEQ ID NO: 432863 - DNA, 581 bp, Homo sapiens
atttcaaatcagctagaagagacaattttgaatgttctcaccacaaagaaaagaaaaatgcttgagatgatgagtatgctaattaccctgagttgatcattatgcaatgtatacatgtagtggaatatcacactgtaccccatagataatatgtataactattatgtgtcagttaaaaataaaactaaaaaaaaaagtaagtaaacacaatataaacaccaaaaaaaaaaaaaaaataaaatgcagagaaactactgctaaaatgtaataaagagaatgatagaaaaatacaagtatattgactggttattaactttgcaaagatgcacatctttattcttatagctctttcaaaggtatattagaaaatggacagtctgaccagggcctacttgagggtggagggcgggaggagggtraggatcaaaaaactatgtatcaggtgctatggttattacctgggtgatgaaataatctgtacacctaacccctgcgacatgcaattttcccaaacaaacctgcgtgtgtacccccaaacctcaaataaaagttggaaaggaaaaaaaaagaaaaggaaatgg

SEQ ID NO: 432864 - DNA, 547 bp, Homo sapiens
tggctcagcagtcccatgcccatggagccttgctcactgctagcacagcagtcggaaatcaacctgtgatgctgtagctgggcagtgggagggtcgtccaccattgctgaggcttcagtatgtaaacaaagtggctgggaagctcaaactgggcagagcccaccacagctcagcaaggcctaccgcctctctagastccacctctgtgggcagggtatagctgaacaaaaggcagcagtcaacttctgcagacttaaacatccccgtctgatagctctgaagagagcagtggttctcccagcacagcattcgagctctgagaacggacagactgcctcctcaattgggtccctgacccccatttagcctgactgggagacactcccaaaaggggccgacagacacctcatacaggtgggtgcccttctggaatgaagcttccagaggaaggatcaggcagcaatatttgctgttctgcagcctccgctggtgatacccaggtaaacggggtctggagtggacctccagcaaactaaacagacccgca

SEQ ID NO: 432865 - DNA, 547 bp, Homo sapiens
tggctcagcagtcccatgcccatggagccttgctcactgctagcacagcagtcggaaatcaacctgtgatgctgtagctgggcagtgggagggtcgtccaccattgctgaggcttcagtatgtaaacaaagtggctgggaagctcaaactgggcagagcccaccacagctcagcaaggcctaccgcctctctagactccacctctgtgggcagggtatagctgaacaaaaggcagcagtcaacttctgcagacttaaacatccccgtctgatagctctgaagagagcagtggttctcccagcacagcattygagctctgagaacggacagactgcctcctcaattgggtccctgacccccatttagcctgactgggagacactcccaaaaggggccgacagacacctcatacaggtgggtgcccttctggaatgaagcttccagaggaaggatcaggcagcaatatttgctgttctgcagcctccgctggtgatacccaggtaaacggggtctggagtggacctccagcaaactaaacagacccgca

SEQ ID NO: 432866 - DNA, 547 bp, Homo sapiens
tggctcagcagtcccatgcccatggagccttgctcactgctagcacagcagtcggaaatcaacctgtgatgctgtagctgggcagtgggagggtcgtccaccattgctgaggcttcagtatgtaaacaaagtggctgggaagctcaaactgggcagagcccaccacagctcagcaaggcctaccgcctctctagactccacctctgtgggcagggtatagctgaacaaaaggcagcagtcaacttctgcagacttaaacatccccgtctgatagctctgaagagagcagtggttctcccagcacagcattcgagctctgagaacggacagactgcctcctcaattgggtccctgacccccatttagcctgactgggagacactcccaaaaggggccgacagacacctcatacaggtgggtgcccttctggaatgaagcttccagaggaaggatcaggcagcaatatttgctgttctgcagcctccgctggtgatacccaggtaaacggggwctggagtggacctccagcaaactaaacagacccgca

SEQ ID NO: 432867 - DNA, 523 bp, Homo sapiens
cctgtggggtaattgatgcaaacacctggggacaacccctaggagtggagagtctaccaactccagcctacagtcaacaaggaaatgggaactgagcttgccaacagtcagtgatcttgaaaacytcagatgatatcaaaatcccaactaacacactgatttcatccctgtaaggttctgagctgaaaactcagctacaccatgctcagatttctgacctacagaaactttaagataatacacgtgtatgttggtttaagccactacgtttgtggtgagtttgccacacagcaatagaaggccaattcaaagagtgattcatgaattaaaatgtgtcaagttagtttagtcaacgagaatattttcatggtttgactccaagagctcctcacccaatagtaagttatttttaatgttttactatgcattaaatcaaaaagcatcaaagaagttaacatcatagagggaggaggagggagactaaggaaacaacagctttttttttttggcaagagtttcattg

SEQ ID NO: 432868 - DNA, 523 bp, Homo sapiens
cctgtggggtaattgatgcaaacacctggggacaacccctaggagtggagagtctaccaactccagcctacagtcaacaaggaaatgggaactgagcttgccaacagtcagtgatcttgaaaacctcagatgatatcaaaatcccaactaacacactgatttcatccctgtaaggttctgagctgaaaactcagctacaccatgctcagatttctgacytacagaaactttaagataatacacgtgtatgttggtttaagccactacgtttgtggtgagtttgccacacagcaatagaaggccaattcaaagagtgattcatgaattaaaatgtgtcaagttagtttagtcaacgagaatattttcatggtttgactccaagagctcctcacccaatagtaagttatttttaatgttttactatgcattaaatcaaaaagcatcaaagaagttaacatcatagagggaggaggagggagactaaggaaacaacagctttttttttttggcaagagtttcattg

SEQ ID NO: 432869 - DNA, 590 bp, Homo sapiens
gactcaggccatccagcctgggataccctgcccgcacatttctgtaccaagagccggtcaacttcaaaatcagtctatgagagacctagtcattacaacacacaaggtttccttccttcctttctttttttttctttttctgagacacggtcttgttctatagcccaggctggagtgcagtggtgtgatcatggttcattgtagccacaaactcctaggttcaagtgaccctcctgcctcagcctcccaagtagctggcactacaggtgcatgccatcataccagggttttttttttwaatttttttatttttttagatatggggtcttgctacatcgtccaggctgaatacaaggttttccgaacaagcttcagactagaatcagaaggctctgggctagtggagagggcgtacagggagagtcaggagaaagtcggtctggtggatggtcagcagatgatgaatcagttttggctttgccaagttatttaacctttctgagccttaatttactcatctggaaaatggggaaaatacagagcaggttctggaggcaggcaagctaaaattttaatcacttttagcaatt

SEQ ID NO: 432870 - DNA, 548 bp, Homo sapiens
ttgctttccagccctttaaacagccaagacactgagtacagcgggagaattgctttctagttgctgtggcccgcgcacctgttcacataatgcagcgtcgtaacgccttctgcttgaactttcctttgtgttgttgagagtgtttcctttggcatcgtatcactgcatactgcttgctttagaacaccagggccacgtgactcaattatgcatatttcttgttatgcaccaggcttcctgagccctttctcaactctgtatgctagatcagtcattcttcattgtaggttggcttgtttgccttgcctccttcctcccgagtagtccttcgggtccaggtccctcttgggctcatcgtgtgcatttctcaccatttctcactccctcctgcctcaatgaaaggtcctcaagtttgagtggcgacagcagcatatggtgacttgcatttatataatctaaattttgttcctttttttttttctstttctctgtctgctaagatgctggatttgagattccaaacttatttgtggtgggatatgccttag

SEQ ID NO: 432871 - DNA, 614 bp, Homo sapiens
atcaatataaaattctaagctccatgtcctttctcttcaataagtgaacgcattacttgttcattgtcttgcatccagtattgtatctcagaggactcaaatctgagattttatttttattgccttgtgaagtgcaagaaatggagagaaagtctaggatctatgcactgtgggagtctgatagaaacacctatggcagggccgggcacagcacttcacacctgtaatcaaagcaatatgggaggcggaagcaggtggatcacttgaggccaggagtttgagaccastctggccaacatggcaaaaccccatctctactaaaattacaaaaattagccaggtgtggtgacccatacctgtagtctcagctactcgggaggctgaggcaggagaattgcttgaaccaggaggtggaggctgcagtgagccaagatgtgccactgcacttcagcctgggagacagcgggactcagtctcaaaaaaaaaaaaaaaaaaaaaagatttagcaaacatggttattaaaactattaaaacatctgctaaaagtgttccagatatttaaaatttttaaagttaagtggagatataaaatatacatttttaaggacccaaat

SEQ ID NO: 432872 - DNA, 363 bp, Homo sapiens
taattcataacagaaagaattatctctgaaaaaatttaaaaaaagaaactaaataatagagttccaaataagctatgggtgaaacaagagatgaaaggggaaataaagtatttttaattaaatgaaaatgaaataaaacatgtcaaaatttgtagatgcagctaaagtaatacttaaagaagctgtatagcmttaaacacctatattaggaaaaaaaaaaaagaaaggttttaaacaagtaactacagatttcactttaagaaagtagaggccaggcacagtggctcatgcctgtcatcctagcactttaggaggttgaggcaagaggatcacttaagcccaggagttcaaaaccagcttgga

SEQ ID NO: 432873 - DNA, 492 bp, Homo sapiens
agtgttccagaaaggctgtctatagagtcacccatgtcaagctcccaggggagaagccagagttgtttctgcagtggtggatgaggaggaaaagaagtccccttcaagacccttcacaagcaccagggctgcctgctggtgagacagagcygcagatgttccccactgagcccagcattgcaactgtgcctctgctgaaagaaacttaccaccaggggaaagatctgagattcaaggcctgctgttcagattcttttgtcccatgcggtgttgctttgatgtggtgtattctcccttcccctaggaataggagtccctgagagtcagactacagtgagtgctgttcctcctctggatctagccccacctggggctgccatactccaggctggtactggggaatatctgcaatggatccaataatgtaatctgtcctcaaatctcctagcagcaggtaccagccctgatgagggtggtaggggaatgacgtgg

SEQ ID NO: 432874 - DNA, 534 bp, Homo sapiens
gctgggaacccccacaatacaggtcttcctgtagctacaaaagaaaagaaatcccagcactttgggaggctgagacgggtagatcacttgaggtcaggagtctgagaccarcctggccaacatagtaaaaccccatctctaataaaaataaaaaattagccgggcatggtggcgcacacctataaataatctcagcagagtcgaggtcgtgtcactgcactccagcctcggcaacaaaggaagactctatctcaaaaaaaaaaaaaaaaaagaaaagaaagaaagaaaaagaaaagaaattctcctcaacatttaaaaattcacaaattcagagatttggggcctgaactccaaccctaagtgaaagctttggcctcaggaagggctctggagagtccctgttgggccctgccccacactgggccgtgacaaaggacgcctcacgcttgcttggtggtccagatcacctgttcttagcagggaactccaccatctcatgcaaatagtcatcctgacactgaacatccctgagag

SEQ ID NO: 432875 - DNA, 571 bp, Homo sapiens
ttaatactgtaatgctgggtccccattcaggcaagattaattccctcttcccaaatccttctgctgacactgcaatgaatccatttggaaggctgtaaaggcagctgcagacattgctcccaacacgtgaccagcgaagagatgaaacctgggcctctgagcttaacaagagagaagaggaagttgggttaggcctgtgttcagagaggtggaatagcccagtggttaaaagctcaaactctgaggctgaatacagtggttcacgcctgtaatcccaacactctgggaggccaaggcaggaagatcgcttcagcccaggcatctgagaccagcctgggmaacatagtgagacctcaactctacagaaaatttgaaaaattagccaggtgtggtggtgcatgcctgtagtcccagctccttggcaggttaaggtgggataattgcttgagcccaggaggttgaggctgcagtgagccatgactgagccactacactcctgcctgggtgacagagcgtgaccctgtctcaaaaaacaaaacaaaaaagctcaaactttggactcaaacagccc

SEQ ID NO: 432876 - DNA, 594 bp, Homo sapiens
agatgtatcatattttattcattttcctgttgctggacgtttggatgtttctggtttaggactgttagaataaggctgctgtgaacatccttgtacaggtcttttttgtggacatttttttttgtttgtttgtttttgagatggagtttcgctcttgttgcccaggctggagtgcaatggtgtgatctcggctcatggcaacctctgcctcccgggttcaagtgattctcctgcctcagtctcctgagtagctgggattacaggcatgcaccaccatgcctggctgaattttttttatttttttatatttttagtagagacggggtttctccatgttggtcaggctggtctcgaactcccaacctctggcgatccacccacctcggcctcccaaagtgctgggattacaggcgtgagccaccgcacccggcctggacatgtgcrttatttcccttagggatggaattgctggatcagtggggaggcgtatgtttaactttataagaaattgccaaagagatttccaaagtgtttgtcctattttacaccctatcagcacatatgagagtttcaattgcttcatgtgctcaccaa

SEQ ID NO: 432877 - DNA, 569 bp, Homo sapiens
aagtggacacatttgtcttgttccagatcttagaggaaaggcttttaatttttttcccattcagkatgatactagctgtgggtttgtcatatatagtctttattgttttgaggtacccagtttgttgagcatttttatcataaagggatgttaaattttatcaaatgctctttcagtatctattgaaatgatcatatgatttttatcttttgttctgtctatgtgatatatcacgtttattgatttgtgtatgttgaaccatccttgcatctctgggatgaatcccacttgatcatggtgaatgatctttttaatgtgttgttgaatttggtttgctattttgttgaggatttttgtgtctatgttcatgagggagattggctcatagttttctttttttcttgtgtccttgtctggttttggtatcagggtaatgctggctttgtagactgagtttggaggtattccctcctcttcaattttttttaagtgtttagtagaattgacattagttctttaagtgtttgttagtactcagcagtgaagccatcagatcatgagcttttctt

SEQ ID NO: 432878 - DNA, 569 bp, Homo sapiens
aagtggacacatttgtcttgttccagatcttagaggaaaggcttttaatttttttcccattcaggatgatactagctgtgggtttgtcatatatagtctttattgttttgaggtacccagtttgttgagcatttttatcataaagggatgttaaattttatcaaatgctytttcagtatctattgaaatgatcatatgatttttatcttttgttctgtctatgtgatatatcacgtttattgatttgtgtatgttgaaccatccttgcatctctgggatgaatcccacttgatcatggtgaatgatctttttaatgtgttgttgaatttggtttgctattttgttgaggatttttgtgtctatgttcatgagggagattggctcatagttttctttttttcttgtgtccttgtctggttttggtatcagggtaatgctggctttgtagactgagtttggaggtattccctcctcttcaattttttttaagtgtttagtagaattgacattagttctttaagtgtttgttagtactcagcagtgaagccatcagatcatgagcttttctt

SEQ ID NO: 432879 - DNA, 628 bp, Homo sapiens
gaagaaaaaatggaaagccagcttgccctgtcaagacataccataaaaggawattaacaatcaacctttatatagtgcttaacagtttacaatgtgaatacatatggtctacggtttacagagtttacagtaaataaacagtattcattttctttagagatttgggactgggccttaagtaaacattaaaatgcctttctcttacagtttcatcaacaacattttatatgatgcaggtcaaaaaatagcaagacaagatccccaataagatcctgaagttcggccgggaacagaggctcactcctgtaatcccagcagaaatggggccagtttggtggagtatgatcaatctgaaaaccctgacctcacgaaaccctgcttacacacccccctcccaacatgagactaactttacttgattaaagaccctgccatgatattacctgaaacctcacaaaaaagattctctctaagcagaactctagttagagtctctagatctctaactagaatcagatttcccaagggaacaagtaccaaacctaaataaataggagacagcttacattccaaaagaactataagactttaatacattatactggcagaaacttgggaatacatgtgg

SEQ ID NO: 432880 - DNA, 413 bp, Homo sapiens
cccaccttaaggaagagggattctagtttctatggttagcctcgggggagaatgagaggccagagacaggtgggcaggaggtcagagagagctgcttctgaggtcttcattttggggtttygttttctgagaccctacatcagcaatggtttttcactagtgagataaatggtcttcaagatgtgtgcattggctaaagtatttaaaggctctttctgttctttgcacaagtaggataaaaccaaaaatctagcacgagcactagtctgtatcttttggaatgtgccccatgcttgactgcagacagaacagctactgattcaggggattcttgctgtctctatccaactataaggttagctgaatccacccatttacagacaatttatttttgacaaaggtaccaagaacac

SEQ ID NO: 432881 - DNA, 622 bp, Homo sapiens
ctattcataatagccaagatatggattcaacctaaatgcccattaataaataaatggataaagaaaacgtggtacatatacacaatggaattcagcctttaaaaagaaagaaatccagtcatttgcaacaacataggtgaacctgaggacatcatgttaagtgaaataagctaggaatagagagataaatacattatctcacttacatgtggaatctaaaaaagaaggagagaacagaatggtggttattgaggaaagggagggtttgattgggaatatattggtcaaagggtacaaaattgcagttaggaggaataagttcaagagatctatcatatacatggagactatagttaataacaatgtattatattcttgaaaattgctaagacagtagatttaagtattctcaccatttaaaaatgaygtctgtggatgtaatgcatatgttaattagtctgatttagccattccacaatatatacatgtttgaaaacatcatattacacataataaatacatataatttttatttttcaaaaaataactatgcaagttacaaattaaaaaatttttaaaaaaataacattagctacacattgccacattttcctctcatgga

SEQ ID NO: 432882 - DNA, 607 bp, Homo sapiens
ttaaaatcatataggggcatcttggtttcctcccctgaggtgccagtgacatatccagtacctcgaagtccccatcccatgctaagtgaaacgtgctttctcaacacacagctgcaatctctacatttaaagatactgaaactgatatascgggttctctggctcctggaaaagataagtctactacaaagaaactaggcaaaactttaaataatatgataacagctatcttcccctaaatgttatagagttaataatgtaccttattgtgacttatacaatagaacgtatttgtatagtattgtaatgccagttaagttgtagcatcattatgacaccaatcatttacaatttaaaggaaaataaaatattttaattgattatgggctctttaaaagccaaaaattattaaacccttcaaactagaaaagaccactgaaacatcctacaggttttaatttccaataaagtaaatactgataactataacccacataaaaagctctttggggtcctcaataattagttttagagtaaaaagttcttgagaccaaaatgtgagaaaaccacgtgaattaatcccagccttgttattagatttatttct

SEQ ID NO: 432883 - DNA, 360 bp, Homo sapiens
attcctcactcggggcaaaagccagtttggccagacctccacgcagaacgacaacagcagccccacagcgctgggcctggggcctcctgggttcctgcctctcaccccccgccttcgtctccccggccaccagcccgggaatcccagtcggtctccttgcagcccaaccaggtctcggtgtcgtaccccacggagagcagctggggggtgcccgccaggtacagctccccagagtgcccctgatacctcccttccacccgcgtcaycagcgcagggggcagagcagagcccccgatgggacaaggtacgcgcggcctggcagcccgacaggtgacggccccggaaatgcggcccaaccgg

SEQ ID NO: 432884 - DNA, 360 bp, Homo sapiens
attcctcactcggggcaaaagccagtttggccagacctccacgcagaacgacaacagcagccccacagcgctgggcctggggcctcctgggttcctgcctctcaccccccgccttcgtctccccggccaccagcccgggaatcccagtcggtctccttgcagcccaaccaggtctcggtgtcgtaccccacggagagcagctggggggtgcccgccaggtacagctccccagagtgcccctgatacctcccttccacccgcgtcatcagcgcagsgggcagagcagagcccccgatgggacaaggtacgcgcggcctggcagcccgacaggtgacggccccggaaatgcggcccaaccgg

SEQ ID NO: 432885 - DNA, 392 bp, Homo sapiens
aattggctcagaagttatcttataaagatgacaacctgcctttaaaaaaccaaaaacagaaaaccatgtagaaactgttaattccagcaatacatttaacacaccaaggaaagtaggtgaaatacatcaaagatacaattgttactaaccatttcattctgttgcttaaaaaaacgctccctgtcctcagcatattttttcatctctttatttcgtatattctctgcttctttcgcttgagtgataagcatcattttttcttctaaccatttctttctatcagcattatatttctgttcagactcctgtatatataaatggtataagttattatcgcatgcctacaaagtagtcawtacatgtttctataacattttcatacaaatccatta

SEQ ID NO: 432886 - DNA, 552 bp, Homo sapiens
ttgttcctgttcttctagtgtcattcgcatgtcttcaattattttctctttaacatttagatctaaaaatcgggggagaacattttagaaattaatagcctctagatatccaatttttcttaagttcttctaaaattaaaatacatttttattaactgtaatagaatattagttccatatagrcagaaactttgtcttattcatcgcaatatcctcaatgtctacaacagtactggtatatatgacatactaaatatatatttggtgtaaagatggatgcttggatgattgcaagagtggatgaatggaaaaaagttttttcaggtaaaattaacaatttctaatacaattaaactattccgatacaactaactattactatgaacataaatcttaggatttagggggaaaaaccattatttggcaaaatacttattttcagtgttaatattctccaatcaaactaaaacctttacctcctaaaactaaaaaagctcaatcccaatttgaactattttttttaacatcaagtagttactttttctagaaaaa

SEQ ID NO: 432887 - DNA, 615 bp, Homo sapiens
cctgtggctctttgtgttggcagtatagagaacacttggctattcttattcctggctgaagtcgctgccagttacataaagaacagagcttacattgataaggctgtaaaagtttaatgcctcccatccccatacgtagagaattcaggcaagttctaccagcaatatgagatttcctatactattccttcatctcagacactctgctgcctgtggatagctcacaagaaatgggtcgtgtttcatctaggaagccatctagstatcggttaggcctctgatgtgatgtgcccagcctccacagttacaactagtgacttacacttttttttttgatacggagtctcgctctgtcacccagcctggcgtgcagtggtgcaatcttggctcaccgcaacctccgccttccaggttcaagagattctcctgccttagcctgctgagtagctgggattacaggcgctcgccaccatgcctggctaatttttgtatttttagtagagacggggtttcaccatgttggccaggctggtctcaaactcctgacctcaggtgatccgcctgccttagcctcccaaagagccaggattataggcgtgagccactgcagccggc

SEQ ID NO: 432888 - DNA, 588 bp, Homo sapiens
ttatacatcatttttatttcattagttctcaaacttcagaatgaatcagaatcacctggagggcctattaaaccacagtattgttttctaacaatttgcattcaacaagttccaggtgatgctgatctggggtaccatactttaagaatcactgacacatctcaataccattcacatgataagtgacagtgttgggtgaatggctaacactgagagggtaagctgcacatttgatgacaattactcagtagaacccattgctgatgaagaaggtaaaaaacatgttcctggatatattgatttaatcatttctcatctttttggggtgcaaagatgcatttctatgcccctgaacatagcaaccttctctcctagctgagccacgttccctaaatagcatacactggtgaagtaaagccattctgttgcctgcttctctttctgtggcttaaacagagyttgcagtggcctgaaaagtcatcagtcatgagaaacaagcttttctaaacactaggccagacagaacagattaggaaatctccaaactggataattagtcaagaaaaataaatatcctttagcaaaaac

SEQ ID NO: 432889 - DNA, 552 bp, Homo sapiens
agtgtgagttgattaagaagtctatcttttcagtgatttaaatcagcataaaaactgtttcaaagacagcctagataattcactctaagatttagtactgatttgcacagtgtcttcaaattartttaaatttccttttcttccttaaaggtgtgtatcactgtgtctttaacagtatatatccgcagttctcaaaatacggtttagggacccctggaaatttctgagatcctaatggatggtccatgaggtcaaagctattttcaggataaatactaaaatgttatttgccttttttactctaatgaatacacagtggagttttccagaagctatatgacatgtgatacagcaacaatttgaatgcagagacagaaatgagaatccatctgccttctattatgtcagacattaagcagatttgcaaaagtatcaaatgatgccactcttctcaccttctcacatttttttggaaaatatagtctttttcattaaaatatattgtttatgtcaatgtataataggtttgttaatgttatttttaggtaagtt

SEQ ID NO: 432890 - DNA, 552 bp, Homo sapiens
agtgtgagttgattaagaagtctatcttttcagtgatttaaatcagcataaaaactgtttcaaagacagcctagataattcactctaagatttagtactgatttgcacagtgtcttcaaattaatttaaatttccttttcttccttaaaggtgtgtatcactgtgtctttaacagtatatatccgcagttctcaaaatacggtttagggacccctgraaatttctgagatcctaatggatggtccatgaggtcaaagctattttcaggataaatactaaaatgttatttgccttttttactctaatgaatacacagtggagttttccagaagctatatgacatgtgatacagcaacaatttgaatgcagagacagaaatgagaatccatctgccttctattatgtcagacattaagcagatttgcaaaagtatcaaatgatgccactcttctcaccttctcacatttttttggaaaatatagtctttttcattaaaatatattgtttatgtcaatgtataataggtttgttaatgttatttttaggtaagtt

SEQ ID NO: 432891 - DNA, 552 bp, Homo sapiens
agtgtgagttgattaagaagtctatcttttcagtgatttaaatcagcataaaaactgtttcaaagacagcctagataattcactctaagatttagtactgatttgcacagtgtcttcaaattaatttaaatttccttttcttccttaaaggtgtgtatcactgtgtctttaacagtatatatccgcagttctcaaaatacggtttagggacccctggaaatttctgagatcctaatggatggtccatgaggtcaaagctattttcaggataaatactaaaatgttatttgccttttttactctaatgaatacacagtggagttttccagaagctatatgacatgtgatacagcaacaatttgaatgcagagacagaaatgagaatccatctgccttctattatgtcagacattaagcagatttgcaaaagtatcaaatgatgccactcttctcaccttctcacatttttttggaaaatatagtctttttcattaaaatatattrtttatgtcaatgtataataggtttgttaatgttatttttaggtaagtt

SEQ ID NO: 432892 - DNA, 571 bp, Homo sapiens
aaccttttgaagttagtacttcttatccccattttacagatgaagaaactgaggtatgtgacagttggcacttaggcgaggatgtgttaatatcaccaagtggagggcttgggatgcaggccccagacctccatgtttccctgttagctccctctgcctctgccatcccctctaacattacccactatggggacaccatggctcagccccactgaatgtctcactgtgagtacagcataaatcaaggcagaaaaggacgattgtcaagatgcaaacagytctcattggcttgccccagtctcctttcccccttttaagtcataggaaaggaaaggaaaataaagagtaaattaatagaataaaagagagattaaagtacagatattatgaaattggaaggtgctggcagcagtcccttgggtgtctgcctcttgagttaaactggacagaactgcatacaccggatgccccttcctctcctatgggcccagatgggtgataccactgctagcagtcaagttatttaagaacatttttgtaccattcagcgtaaaagcaaacttatggaata

SEQ ID NO: 432893 - DNA, 571 bp, Homo sapiens
aaccttttgaagttagtacttcttatccccattttacagatgaagaaactgaggtatgtgacagttggcacttaggcgaggatgtgttaatatcaccaagtggagggcttgggatgcaggccccagacctccatgtttccctgttagctccctctgcctctgccatcccctctaacattacccactatggggacaccatggctcagccccactgaatgtctcactgtgagtacagcataaatcaaggcagaaaaggacgattgtcaagatgcaaacagttctcattggcttgccccagtctcctttcccccttttaagtcataggaaaggaaaggaaaataaagagtaaattaatagaataaaagagagattaaagtacagatattatgaaattggaaggtgctggcagcagtcccttgggtgtctgcctcttgagttaaactggacagaactgcatayaccggatgccccttcctctcctatgggcccagatgggtgataccactgctagcagtcaagttatttaagaacatttttgtaccattcagcgtaaaagcaaacttatggaata

SEQ ID NO: 432894 - DNA, 566 bp, Homo sapiens
agaggagattaaaaattcatagaaagtgatagtaattctatcagttgagagaaaactcctggttttcagcctaagttttgaggtgaaaattaagaaacgtgaccttgttggtatcttttctcaagtccagtactattagacacaataccgttcagtctttgaaatgtttttatattattttatggaagtaaccatctgatctcccaaagctgtgcttttatctttagtgaccataggtgagcattatattgacttttttccatgctattcctgatcccatccttgaatactaattataccttcactgctaatagccacagccaaggccagatgaccaatttattctccaaatttctttgccagtctgttgactatatacttaggctacctgcctacttttgttactaatttctctataaatgcaagctatgatattaactagataatatttaagtagaaaatacaaatttaaagataatgctggatagcttaygaaacaccagagaaccacacttaaagctttgcagccaagggtgataaccaaaccatgtactagtggaagaaat

SEQ ID NO: 432895 - DNA, 593 bp, Homo sapiens
agaaatatgtttccatgcttaaaaagtaaagcacaggtgtttctttctaaagatttttaaagatttccttcttggtagtaatgacatggtatccattccttttattcttttgtagaaatgagttagcattttttaaggcttggtgctgatttgacctgtgaaaatagaaaggcttagtttgttaccttaattttacctcagtatcaattagttacggtaaacataaacttgaactgtaagctatagaatcatgaattatgtaatttttaccatatagcctttcttaatgtgagtttcttccttaatgttgatcttcttttatgttcttttgatcttactcctactttcagcattttggatttatcttatggtcagatgggaaaccacgtttcagtatcttttttatagactccacaaaggggcttgtaaattgctgaattcagttttcttaaactgagacttgagcaacagatttgagaaaatatgtgaagagattgtttttcctacaggttcatatgaacaagaatgcccactgtttycctgggtggcgttagtagacaggtgcttttttccttgtgtttctgcaaggttgg

SEQ ID NO: 432896 - DNA, 534 bp, Homo sapiens
gagctttctgtcttgatctcagctgggctgccctggtaaacctgtgtagaaagcagtcacatcgactcccaagtgggggctctttgcgtgatagtgcaagcatcaaaacctaagagaaggaagcagggcaggggctctttggatcacccaggctggagtgcagtggcgtgatctcagctcactgcaacctccgcctcctgggttcaagtgattctcctgcctcagcctcccatgtagctgggattacagcgcgccacaacgcccgactaatagaagcctctggagccccttccacgtgcacggtggtgtgggagagamacgaacagcagacatgcatccagtgctcagacctgcctgccgggaggcagaagagagcaggccacaagaataggccgggcctggtggctttcacctctaatgccagcactttgggaggccctggcgggaggattgcttaatgccaggagtttgagactatcctgggcaacacagcgagaccctatctgtaaaaaaaaaaaaacaaaaaataaaaaa

SEQ ID NO: 432897 - DNA, 534 bp, Homo sapiens
gagctttctgtcttgatctcagctgggctgccctggtaaacctgtgtagaaagcagtcacatcgactcccaagtgggggctctttgcgtgatagtgcaagcatcaaaacctaagagaaggaagcagggcaggggctctttggatcacccaggctggagtgcagtggcgtgatctcagctcactgcaacctccgcctcctgggttcaagtgattctcctgcctcagcctcccatgtagctgggattacagcgcgccacaacgcccgactaatagaagcctctggagccccttccacgtgcacggtggtgtgggagagacacgaacagcagacatgcatccagygctcagacctgcctgccgggaggcagaagagagcaggccacaagaataggccgggcctggtggctttcacctctaatgccagcactttgggaggccctggcgggaggattgcttaatgccaggagtttgagactatcctgggcaacacagcgagaccctatctgtaaaaaaaaaaaaacaaaaaataaaaaa

SEQ ID NO: 432898 - DNA, 534 bp, Homo sapiens
gagctttctgtcttgatctcagctgggctgccctggtaaacctgtgtagaaagcagtcacatcgactcccaagtgggggctctttgcgtgatagtgcaagcatcaaaacctaagagaaggaagcagggcaggggctctttggatcacccaggctggagtgcagtggcgtgatctcagctcactgcaacctccgcctcctgggttcaagtgattctcctgcctcagcctcccatgtagctgggattacagcgcgccacaacgcccgactaatagaagcctctggagccccttccacgtgcacggtggtgtgggagagacacgaacagcagacatgcatccagtgctcagacctgcctgccgggaggcagaagagagcaggccacaagaataggccgggcctggtggctttcacctctaatgccagcactttgggaggccctggcgggaggattgcttaaygccaggagtttgagactatcctgggcaacacagcgagaccctatctgtaaaaaaaaaaaaacaaaaaataaaaaa

SEQ ID NO: 432899 - DNA, 581 bp, Homo sapiens
ttagggcagccacaaaacaaatccaggtgatcctgattcaatttggcatttccctccagtctccagaaatgacaaataatttcctaggatgagttacctctacagaggaatatctcatcaatcctgtactgatttttacccttttttcttttagaagatgactgatttttaatttctgaaattatagccacatatacactattaaatcttacaaaatttaactttttaaggtctatttcttgattccccaactaactggctatctctttgtgggcagggtctatgttttggtttaggtcacagaagctaaygtagtatagagctcatatataagatatttaaatattagattgaataactatggaaatttaaaaaattctttatctaattctttgctttcttttatactcttcaaaatttatcatatacaatgtctaaaatagacatgctagaaaatttataaatagtctaaataataattaaacagaaaaagactgatacctgaattttccccccatattatgagatttgtaccaaattgtggtaaaaagcagaaaataagaatccccaattgttctact

SEQ ID NO: 432900 - DNA, 602 bp, Homo sapiens
gtatataattttaggcaccacactctaaagggaacattgaaaacttgaagcaggtcaagaagaaaaaaactgaggtatggagaaaacttgaaattatattgtaggaagaatgtyggaggaactgcagatgtttacctgggagaagagtgaaaggatgggagggaagaggtgaggaagtagacatggaaattactgtatggatatttgcaaggctgctactatgtaggagacttattttttatgactctgggttggcagaactgcccaaaaacagatttttgccttaatttaaggaaaaacttgtcccttagaactgtctgacaaaaggaatggagaaatgggctgcctctggagtagcgagtgttccagcatggactggattggcacttattggaggtgttgcagtgaaagttcattcattggataagtgttggattaaatgacctccaggttcccctttcaactcagaaagtcagtgacttaaattctgatccctacttaccaataatcactgaatagatttgacagtgatgcattcttttgtgttgcctgttcttccaattgttatttccttagtaacactcctcccgcccctggcaggt

SEQ ID NO: 432901 - DNA, 602 bp, Homo sapiens
gtatataattttaggcaccacactctaaagggaacattgaaaacttgaagcaggtcaagaagaaaaaaactgaggtatggagaaaacttgaaattatattgtaggaagaatgttggaggaactgcagatgtttacctgggagaagagtgaaaggatgggagggaagaggtgaggaagtagacatggaaattactgtatggatatttgcaaggctgctactatgtaggagacttattttttatgactctgggttggcagaactgcccaaaracagatttttgccttaatttaaggaaaaacttgtcccttagaactgtctgacaaaaggaatggagaaatgggctgcctctggagtagcgagtgttccagcatggactggattggcacttattggaggtgttgcagtgaaagttcattcattggataagtgttggattaaatgacctccaggttcccctttcaactcagaaagtcagtgacttaaattctgatccctacttaccaataatcactgaatagatttgacagtgatgcattcttttgtgttgcctgttcttccaattgttatttccttagtaacactcctcccgcccctggcaggt

SEQ ID NO: 432902 - DNA, 602 bp, Homo sapiens
gtatataattttaggcaccacactctaaagggaacattgaaaacttgaagcaggtcaagaagaaaaaaactgaggtatggagaaaacttgaaattatattgtaggaagaatgttggaggaactgcagatgtttacctgggagaagagtgaaaggatgggagggaagaggtgaggaagtagacatggaaattactgtatggatatttgcaaggctgctactatgtaggagacttattttttatgactctgggttggcagaactgcccaaaaacagatttttgccttaatttaaggaaaaacttgtcccttagaactgtctgacaaaaggaatggagaaatgggctgcctctggagtagcgagtgttccagcatggaytggattggcacttattggaggtgttgcagtgaaagttcattcattggataagtgttggattaaatgacctccaggttcccctttcaactcagaaagtcagtgacttaaattctgatccctacttaccaataatcactgaatagatttgacagtgatgcattcttttgtgttgcctgttcttccaattgttatttccttagtaacactcctcccgcccctggcaggt

SEQ ID NO: 432903 - DNA, 614 bp, Homo sapiens
cttatttatgtatgtaagtaatcaaattcctaaaagcagcattgctggtcaaagggtatgcgttttaaactgatctatattgccagatttttctccagaaaaaggtttacagaattttcactcccagcaatgtgtgagaatgccagtttcttccctgaaacaggcttcttctcattatgtaatcagcattggttttttaaaatgtctgacaattttttttaaaataatttaactagctggtcttacatactagctcagttcttaaggtactaatcctaatgtaaacatgttctctacaaatgtaaatcttaacttgcgtgtcttctgtgtaaccaagaaaaagaagaaactagatcagagacaactatattgcaagagataattgacttacaagagttratattggaattgctactttaactcagtgtaacttagagaagtttcgatgagacttaaaatccttggcctttttgctgagattctttggtaacccttggcttatttatatatgttttaaaagaatttattgtacctgtgagagtgaattaaatttctagagagtcataaaagttgaagctgagttaaataaaaagttaattgtattggcgaataat

SEQ ID NO: 432904 - DNA, 607 bp, Homo sapiens
aacctgtttcagaaaagtaaatcagtgttgggtttatcagtgtttaacattgtttgatagtcccctcacttcttgaataaattgttttttttcacctcactacttgtagtgtgtaaaaatgaatctgtatttccggtgaaaaagtgtttgaaatgtccagccgcaagactgatattagtagtagaatatatgcagttaaacattcttatggtaaaaatatgtccattgtttagtggttgtcagaaagtaaaattcctgcaaaattaaaattaggaatttaactaggaagaatatctaaagaccctttaaaaatagatcagtgtatttggtatttcaagtagatttatgacatcaggctcatttataaatttatataaaatcacaatacttaatccatgcatacacagtgacagataatgggagttatgtttttaaggagtcttgaaaaggcctctaayatgatgagtttaaaaagtaattctcctacacacctatctcaaactttgctatagtgcggtcagtggtggtcagcagaccactggtctgggggtgttgaagttaggccttcttatacttgctcttatgcagagttcatgtatttggcaga

SEQ ID NO: 432905 - DNA, 640 bp, Homo sapiens
tgatggttttaagtgtgccacttcctcactctttctcacacactcttgcctgccaccatgtaagacatgccttgcttccccttctccttcagccatgattgtaagtttcctgaggcctcccmagcagtgcagaactgtgagtcaattaaacctcttttctttataattacccagtctcaggtagtagctttacagcagtgtgaaaacagactaatacaggtgtgctccttagaattggtgagagaatgtttgagtcaacaaattggaagctgaggatttccccagctcattcctgcccttcttccatggtactaggcagatagttggctccactcagggatgagtaattttcagaggggaacaagtgcaaaacctatgcatataatgaccacaagaacataaaataatccatagagcgagtagaattccaaccaaaataccaacaagtttgtgtatgtgtgtttgtaaattgacaaatcaattataaaatttatatgaaaatgtagagtcaataagtactggactcaattaaaagttgaattaaaataaacaatagtggaaattacagagcaaaatgtaattttataaatattgataatggtaaaaaaatatatcatataaaacagacatgtgggaaaaa

SEQ ID NO: 432906 - DNA, 640 bp, Homo sapiens
tgatggttttaagtgtgccacttcctcactctttctcacacactcttgcctgccaccatgtaagacatgccttgcttccccttctccttcagccatgattgtaagtttcctgaggcctccccagcagtgcagaactgtgagtcaattaaacctcttttctttataattacccagtctcaggtagtagctttacagcagtgtgaaaacagactaatacaggtgtgctccttagaattggtgagagaatgtttgagwcaacaaattggaagctgaggatttccccagctcattcctgcccttcttccatggtactaggcagatagttggctccactcagggatgagtaattttcagaggggaacaagtgcaaaacctatgcatataatgaccacaagaacataaaataatccatagagcgagtagaattccaaccaaaataccaacaagtttgtgtatgtgtgtttgtaaattgacaaatcaattataaaatttatatgaaaatgtagagtcaataagtactggactcaattaaaagttgaattaaaataaacaatagtggaaattacagagcaaaatgtaattttataaatattgataatggtaaaaaaatatatcatataaaacagacatgtgggaaaaa

SEQ ID NO: 432907 - DNA, 525 bp, Homo sapiens
gactattgcacatcatatgaatgtatcaaaatatcatgtaccccaaaagtatgtatatctattatgtagcaatttaaaatgtatatttttaaaaatgaaaaagctcaattctagtcagaaaggagtggtatctttaattcctttaggtttaaaaacattagttaaaaaatgttattgggaagctagatattaatctgatctcaaactaacgtttcacgtattacttattaattgcaaaggagaaaatgttcctttacataaagagatcttctggacatcgyccataaataaaattgatatcatgggcttcttgacacaatgcattgagaaggacacagcatcatctatgtagtattcctgccaaaaaaatgtttagtctgaatttattaatcaggaaacaagtggttaaatccaaattgaaagatattctgcaaaatagttggcctagactcttcaaaaacatcaacatcctgaaacacacaaaaaggttgagcaactactccagattaaaggagattaaagata

SEQ ID NO: 432908 - DNA, 560 bp, Homo sapiens
ttgagaaccatgatgtagcatttgcacagtatgtagctaaggcaaagatagacaagcactcaacacaccacattatttgttcttgaagacttcccttggcttacttagtcatccttacaggcccctgttaagtcttggctctcccatgaagcctttctaatttttctaactcataaagaacttttctgttttggaattccaactgcacttatagcctgaaccacaatttaacatttagactgagcatgtaataagtgctcaatctaagtaatttgttactactctatgtagtcattatacatggaatgaaaagcagaggaaccaaacctcaacatccgtctcctgatggtcaaagctttagaaaaaagatgcagtgcatagtgcttgcaaagcctgcatctttggaaaacaataagaaatatttatgtacttacaccatcatacgaaccaaggacaaaatcagtaatagagaatatatcacatgcgtgtgaaagaacttcatgygtatttgttaaagcttccaaaataagctttgctgactgcttctcagtgtttcagga

SEQ ID NO: 432909 - DNA, 560 bp, Homo sapiens
ttgagaaccatgatgtagcatttgcacagtatgtagctaaggcaaagatagacaagcactcaacacaccacattatttgttcttgaagacttcccttggcttacttagtcatccttacaggcccctgttaagtcttggctctcccatgaagcctttctaatttttctaactcataaagaacttttctgttttggaattccaactgcacttatagcctgaaccacaatttaacatttagactgagcatgtaataagtgctcaatctaagtaatttgttactactctatgtagtcattatacatggaatgaaaagcagaggaaccaaacctcaacatccgtctcctgatggtcaaagctttagaaaaaagatgcagtgcatagtgcttgcaaagcctgcatctttggaaaacaataagaaatatttatgtacttacaccatcatacgaaccaaggacaaaatcagtaatagagaatatatcacatgcgtgtgaaagaacttcatgcstatttgttaaagcttccaaaataagctttgctgactgcttctcagtgtttcagga

SEQ ID NO: 432910 - DNA, 589 bp, Homo sapiens
ctttttggctctaggtggtgccttaagcccaggttcactttggctccagtaaacgattatagcactgtcctttccaaatargggaggtcccaaaggggatgcactggtaatttgggaaggctgtctagaggtttgtgcccaggggacttgtaggatgaatcccctacaatgtggcaatgcagaaaagctgctctgttttggtgcctcctttggctgagtgaaacagcatagtttccagggctgtaaatggcagtcttaactcccctctttgtctctgcctgttctcgggaatatttctcccttcaggtgctcatgatgcttcccataggttaaggcaaggagaggtctcctgacagggaaaccaaaatgttggagaaactggttgtccacctcaatttcacttttttgagggggatatctttctgttttgtgctgggaagaatggaaggaggggtactgcagatgtggaagtctgagtatattaccatctgcttaaagtttatttatttttatttttttaacttcgctgtggccccagaaactctctcatgttgatattttggctctgggatatttctggttatgatct

SEQ ID NO: 432911 - DNA, 562 bp, Homo sapiens
tactgttgagggtgaccactccatttttctctcctggaaacatgtaatttaatgtgaagcatctattgatgaactgcaagtatgaagaattctcaggataatgtacttgattttccccttgaaatgcaattcacatttattaagtatcttttctatacaaggcatggagcaaggtgcttcatgcacataatctcatttaagcctcacagttgcctctgaggtaggtgcatcattagccagcttttatagacaggataaaagggaaaagaggaaatggtagcccaggattccaaaaagtgcaaattcatttccagtggatgaatacacttatgattttgtttctcttagatgggttatgataaacatctttaatattaatacctgccttacatttgcataattctttcaacttttcaaagcacctcttttataycttatttgatgctcatgctaagccctatgctcctaacagtctcgaactccttgatggtgtctctttgagagcctaaatctctgcagagctggcttttgttgcatagctaaggttcaggactaagctaat

SEQ ID NO: 432912 - DNA, 471 bp, Homo sapiens
gtaaaagttgcaaaaatattggatgaaagtcatttcatgccctgttattccaccaatttttaagaagagtaagygctgtgccaaaaccttatatagaacaatgtgcaaaaaacaatacaaggacccatgaggaatgcaaagataaacaagatgtagtctttttctttcagcagatttagtcctgaaaggagaataaaatgagtacaagcagtaacataacagttttgagggaagtaacaatgatatgctaaaaaaaaaacagcacacgtctatcaattacttttgatggcagatctaacataaagaaaataaaaatgtttcatctttctcccttttaaagtaattctgcttagagaatgctatttaatcactgtatttaaggtgacatttgaattctgaaggttttatctcctattgactctattctagagagagagagagagagagaatacgcatgtgcacagttttgag

SEQ ID NO: 432913 - DNA, 502 bp, Homo sapiens
tgacctcgtgatctgcccgcctcggcctcccaaatgctgggattacaggcgtgagccaccgcgcctggcctggatgactattgtttaagttattattaccttcttgctttgtgggtgattcatttacttctctaattgctggttgaaaggtgcctggaatctgccttgaagggattcaaaatttttcctttatctctacgctggggtttggggcctagtcttgcagcctagttcacatttcagctcagttactagttgtgtgaccatggaaaaggtagaggtgactgagttggggcatcagttccaactgatggcaggcrcctaagaggggcctctgctctgtctcagaagtggggttagtttggagcagaaggtaagagttcagtttttgtcatattaagttggagacagccatgaggagatgttaagtgaggaggtgactatgggagtctggagctcagtaaagacgtctgggctggaggtattaatataaactgggaca

SEQ ID NO: 432914 - DNA, 600 bp, Homo sapiens
tacatatatttttcattcaactgtcaaggactgtttatttgtaaatgttgtagctcagaaggggcttgaatggtggtctcttgccattacttgccttcaaagtgaagttartatggaggatgaaagtataatgcagcacagttcttacgcatacgtgaatgagcagactaaggtcacgggaagaaactcaaggaaggtttttttgaattgcaagagacaaaaactcttagcacataaagcctgtgcgttataagcaggatacgtcttggtggagctgctgtgcgtaggagcattgttcttagctttcagtgcatagaaactcagttttatactttgactcaggagtggttgactgatgtatactaaccaaacttacacggctgttgactgatttttttaagcaaatgtatagaaattggcttattatttcacactgagagcaatatattaggcatactaacaggttctgaacatttttataggatactcagtctctgcaataaaggatagtactaattataataaattacatttttgatgctttacattttctagatttttcattcaaaaatactactttgtaagaatagaatttgagca

SEQ ID NO: 432915 - DNA, 600 bp, Homo sapiens
tacatatatttttcattcaactgtcaaggactgtttatttgtaaatgttgtagctcagaaggggcttgaatggtggtctcttgccattacttgccttcaaagtgaagttaatatggaggatgaaagtataatgcagcacagttcttacgcatacgtgaatgagcagactaaggtcacgggaagaaactcaaggaaggtttttttgaattgcaagagacaaaaactcttagcacataaagcctgtgcrttataagcaggatacgtcttggtggagctgctgtgcgtaggagcattgttcttagctttcagtgcatagaaactcagttttatactttgactcaggagtggttgactgatgtatactaaccaaacttacacggctgttgactgatttttttaagcaaatgtatagaaattggcttattatttcacactgagagcaatatattaggcatactaacaggttctgaacatttttataggatactcagtctctgcaataaaggatagtactaattataataaattacatttttgatgctttacattttctagatttttcattcaaaaatactactttgtaagaatagaatttgagca

SEQ ID NO: 432916 - DNA, 545 bp, Homo sapiens
ttttttttaatcacatgggttgtcaaaaaataacagctttgttataaatgtgcctatatagtattttagctgttaaaaataaatgttaaataatatttttaattcttaaaattagcaggattatttttattattttcattattctttatttttttgagacaaggtctcactctgttgcctaggctgaagcacagtggtgtgatcatggctcattgcagcctcagcctcctgggctcaagtgatcctcacacctcagcctccagaatagctgagactacaggagtacatcaccaaacctggataatttttttttaaagtttttgtagagatggtgtttccctatgttgcccaggctggtctcaaactmctggactcaagcagtcctcctgcctcagccgcccaaggtgctgggatgataggcataagcctccacacttggccagaacttttttggattactggaatagcctaaacctttatttccccttcccatcagtgatactgaaagaaagcagggatttgttttgaccttgacttttgagctt

SEQ ID NO: 432917 - DNA, 613 bp, Homo sapiens
aaattaaaatgagataattgataagaaaggttttgcaaactcctaagaattaaaaacatgcaaagttatttttatgaatcatctttgctgattcctatagtatgttaaatggttcttgaagatgcagaaattgaaattaaacattctgggggtaataacagcatgatgtaaggtagaggccctaaaagaataagaaaatggaaaaagaataatgaaagtgaagacagatgatgttgggagaatataggtaactcatggaaagtactgaatactttatttcatagaaaattccaaaatatsacttcagcaacatttctaactttaatacagtaatcccttttatctcgagttttgctttccaaagtctcagttacccacattcaaactcctgtctgaaaatagatgaggtcagtacaataaaatatcttgagagagagagaaagagagagattgcacatttatataacttttactacactgtcctgttacaattgctctattttattattagttattgttgttaatctcttacagtgcataatttatttaaacttcatcataggcatgtatgtacagaaaaattatagtgcatataggatttggttctatctga

SEQ ID NO: 432918 - DNA, 613 bp, Homo sapiens
aaattaaaatgagataattgataagaaaggttttgcaaactcctaagaattaaaaacatgcaaagttatttttatgaatcatctttgctgattcctatagtatgttaaatggttcttgaagatgcagaaattgaaattaaacattctgggggtaataacagcatgatgtaaggtagaggccctaaaagaataagaaaatggaaaaagaataatgaaagtgaagacagatgatgttgggagaatataggtaactcatggaaagtactgaatactttatttcatagaaaattccaaaatatcacttcagcaacatttctaactttaatacagtartcccttttatctcgagttttgctttccaaagtctcagttacccacattcaaactcctgtctgaaaatagatgaggtcagtacaataaaatatcttgagagagagagaaagagagagattgcacatttatataacttttactacactgtcctgttacaattgctctattttattattagttattgttgttaatctcttacagtgcataatttatttaaacttcatcataggcatgtatgtacagaaaaattatagtgcatataggatttggttctatctga

SEQ ID NO: 432919 - DNA, 613 bp, Homo sapiens
aaattaaaatgagataattgataagaaaggttttgcaaactcctaagaattaaaaacatgcaaagttatttttatgaatcatctttgctgattcctatagtatgttaaatggttcttgaagatgcagaaattgaaattaaacattctgggggtaataacagcatgatgtaaggtagaggccctaaaagaataagaaaatggaaaaagaataatgaaagtgaagacagatgatgttgggagaatataggtaactcatggaaagtactgaatactttatttcatagaaaattccaaaatatcacttcagcaacatttctaactttaatacagtaatcccttttatctcgagttttgctttccaaagtctcagttacccacattcaaactcctgtctgaaaatagatgaggtcagtacaataaaatatcttgagagagagagaaagagagagattgcacatttatataacttttactacactgtcctgttacaattgctctattttattattagttattgttgttaatctcttacagtgcataatttatttaaacttyatcataggcatgtatgtacagaaaaattatagtgcatataggatttggttctatctga

SEQ ID NO: 432920 - DNA, 609 bp, Homo sapiens
atggcataatctcatgccagcctgggtgacagagtgagactctatctctttaaaaaaaaaaatcaagagtctgataaaaaaaaatatgtgatgcccatatgatattttccaaatatttatattccacatatgttatagccaataatttgtaaaaagtacatttatagcttatagaacagtcattcttacttattttcaatgacttgacaaattctttcttgctcaagcccagtctaaatgtctttactatgcatattctcaaaattcatcagggttgatcattatgggacatattgtggcaatgctgctggaagctgcttaaagcctcaccaaggcacttactttctggcattttgttaagtaggacatgctactccattgatgcaaaacccatgttgaggaccaaataagagggaaggaaaactcattaaagctttaaagaatatacttcaagcactgaaataattaagggacagactaagctattataaaaargccccgaatagtggctcaatgaagttacaagtttatttttctctccagaggcaggcaggcggccaggccgagagagtagttttgctccattaggtcattcgggaacgccggtgc

SEQ ID NO: 432921 - DNA, 618 bp, Homo sapiens
atgtgggcaatctatggctaatattaattaccagaagatcagatacgtttttgtacgagtttttttaagtacctgcaatgtaatttgtaataacacctatgaaacatctgagtttaacaactttaagctagccaaaagataatatttaacctgacaacagttacagttgttagaaacagaaatgcttttatctgctatgcaacattgtcataactcaaaaatctatgaaacactgtgaaattaaattgaaaaacactgatatacagagttcctatcactagacacatacaggagtgattctgtcataactactcagatgtagtgatactttgtttctctctctctctctctctctyttttttttttttttttttttttgagatggaatctcactctgttgtccaggctggaatgcagtggcacaatctcagctcactgtaacctctgcctccagggttcaagtgattctcctgcctcagcctcctgagtagctgggactacaggcatgcaccaccacgcccggctaattgctttgtttcctctctaaaaattggcttttaaaatcttttcctttcttagaggaagatatacatgcagcataatgtgggttgagaaacc

SEQ ID NO: 432922 - DNA, 535 bp, Homo sapiens
gataatgccccagggctgccccttttccagaaaaaggacatatgctccccttgaaaatttcgtagaagagtcagaaattcattgttctgctcatcaaatcattgatcatttatctgtgggggcttttagcctctttgcaactactgcacacacaacctggtctggcccttccttggagttcacgggtggtggaggctgacagtggggacctaatgctctttgataagaccagtagtctcctcagatgctccaccatcagccacgtgcttctgcgcctggctttgagtaacaggctggccagctgcaagagaggcacagccaggcaytgccctgacagctgacaggtggtgtgggcctggagtgagggaaataatctgcactctggaaatttgccatactgcaacctggcccatggaagaacccaaggatgcatgagctccagctcctcacctttcatcttagagagaaatatgggctgtgagagttggccagaggaggtgcatatgtccaggaagcacacctgggagctcaggct

SEQ ID NO: 432923 - DNA, 617 bp, Homo sapiens
aaaccatatcagatagtgagatcaagttgtggatagtcttgaaatgtaacttcagagatgggctctcctgggtaagcaatcagcagtacatgaaggctgattatcaacagtgttgtaattagagttgggtcagaggaagattaaactggcagttgtgtgcaaaattaattggagcaggaagaaacagaaaccaaacaatctgtaagtagtctgttgcagtagtccagaaaaaaatgtaatgatgttcctaactgaagaactggcagtaagaatgaatggatgacaaggatagagtgggcatgaaaaaaaactgagatagaattttctgaacttcagagccagttgtatataacgatgagggagtaatatcctgtaatcaaagagtggaatccaaaaatatttcaaggttttatgcaccagtggctgagaaggctcaaatgaaataaagataaataagggataaacaggtgcaaatttgttgaataatacaaagtaatcrattaacacatctgaatgtcccctctgggatatctgtgttgtgcttcataaattaatgaaacagccatttctaggctaagatgcaataggactttaacaatgtaaagcaacattagcag

SEQ ID NO: 432924 - DNA, 551 bp, Homo sapiens
tgcatcctgctcaaattccctttgcccgttgattaaggatagcaatggatcargcagaatgcttccaatattgaaatcactgttaacatcattatgaattggttgtggcataacagagaattttctcaaagcagctcagttgaatctgctgattcctcatggaatcccctgcctccaatcatctcctcctctacctaattctagatgtcactgcctgagtgagtaatcttcgaaaatgtagatttaataataggggatggggaagcctctcattgtttaaattaaaaaaacattaatattcaatactctctataacttttctttctggcttcagcttccactctatctcttcactccaaccaaattaaatatgttgtttgtagtaggaagaatgaaacctttccctcccctgaccccctgaccgatgatgtccacatcctatttcccagaacctgtgactctgttacttacatggctaaggggaaggaagtttgcagaaggaattaaattttcttatcagttcctttaagatggacagtttatcctggatt

SEQ ID NO: 432925 - DNA, 359 bp, Homo sapiens
cacctgccactcacctcctgctgtgcagcctggtccctaacaaaccacggacctatacttgtcgggtccatggccctggggttgggggcctctgatctcaagggtccttataagtaaaaagcggaactgagagagagaataaagaaagatttgaagattctagacagctggctttggagatgaagataggggaagccaaggaatgcaaatgacctatagaagctaaaaaaagcaaagacarcaacaacaaaaaattgaattattccctagagcctgtagaaaaatgcagccctatggaaactttgattttatttcagtgagaccagttttgaacctctgacctccaaaactgtatggta

SEQ ID NO: 432926 - DNA, 511 bp, Homo sapiens
aaagcattctacacatcaaaatactcattcttgggtgtttgaargctaaggctagttgaatacttgaccattagtagtctactgggaaaaaaattctgatgtgcagaaatttattaacagctgctctgacatgatcatttttcaaggcttgtcagagcagagggctctgaatatcttctgagaatacatgaggctggatgcagtgaaaaactaaaactactaataggaataggaggggatagatcagagatgcacctttaaccccaaatgaaatgtgataaacaagattaacattttagagtactattataacaagaatggtgcttggtaaatgcagcttatgttagagtgtataagaaatattcattccttaatatatactgatttgctgtgtgaatatgtaatacaaaatgttaattcatcttgatattagagacttctgtaagtgggtctacatgtacactgggactagaaaatagcaatgtgataatagaggaattttcttgctcca

SEQ ID NO: 432927 - DNA, 511 bp, Homo sapiens
aaagcattctacacatcaaaatactcattcttgggtgtttgaaggctaargctagttgaatacttgaccattagtagtctactgggaaaaaaattctgatgtgcagaaatttattaacagctgctctgacatgatcatttttcaaggcttgtcagagcagagggctctgaatatcttctgagaatacatgaggctggatgcagtgaaaaactaaaactactaataggaataggaggggatagatcagagatgcacctttaaccccaaatgaaatgtgataaacaagattaacattttagagtactattataacaagaatggtgcttggtaaatgcagcttatgttagagtgtataagaaatattcattccttaatatatactgatttgctgtgtgaatatgtaatacaaaatgttaattcatcttgatattagagacttctgtaagtgggtctacatgtacactgggactagaaaatagcaatgtgataatagaggaattttcttgctcca

SEQ ID NO: 432928 - DNA, 511 bp, Homo sapiens
aaagcattctacacatcaaaatactcattcttgggtgtttgaaggctaaggctagttgaatacttgaccattagtagtctactgggaaaaaaattctgatgtgcagaaatttattaacagctgctctgacatgatcatttttcaaggcttgtcagagcagagggctctgaatatcttctgagaatacatgargctggatgcagtgaaaaactaaaactactaataggaataggaggggatagatcagagatgcacctttaaccccaaatgaaatgtgataaacaagattaacattttagagtactattataacaagaatggtgcttggtaaatgcagcttatgttagagtgtataagaaatattcattccttaatatatactgatttgctgtgtgaatatgtaatacaaaatgttaattcatcttgatattagagacttctgtaagtgggtctacatgtacactgggactagaaaatagcaatgtgataatagaggaattttcttgctcca

SEQ ID NO: 432929 - DNA, 492 bp, Homo sapiens
atatgtaatacaaaatgttaattcatcttgatattagagacttctgtaagtgggtctacatgtacactgggactagaaaatagcaatgtgataatagaggaattttcttgctccagttacatgatacttcttaagtgaaagtgtagttagtaatgtgtgtgtcctgttggccataacacaatagtattgtttaaagaatgttaattgagtcacagaagatgtactgatcattttatccatgctcaatatatgataggcagatacattattatagcccaacttttggagaycaaagtgaattattgatgggaagactgtctttcaaagtgatactttcccttaataaagtagacagcaaaggaacatgctttaaaataataaaagccacttatgacaaatccacacctaatatcatactgaatgggaaaaagctggaagcattccccttgagaactggaacaagacaaggatgcccactctctgcactcatat

SEQ ID NO: 432930 - DNA, 548 bp, Homo sapiens
tgaatatgtaatacaaaatgttaattcatcttgatattagagacttctgtaagtgggtctacatgtacactgggactagaaaatagcaatgtgataatagaggaattttcttgctccagttacatgatacttcttaagtgaaagtgtagttagtaatgtgtgtgtcctgttggccataacacaatagtattgtttaaagaatgttaattgagtcacagaagatgtactgatcattttatccatgctcaatatatgataggcagatacattattatagcccaacttttggagatcaaagtgaattattgatgggaagactgtctttcaaagtgatactttcccttaataaagtagacagcaaaggarcatgctttaaaataataaaagccacttatgacaaatccacacctaatatcatactgaatgggaaaaagctggaagcattccccttgagaactggaacaagacaaggatgcccactctctgcactcatattcaagatattactaattgtcctagtctgagaaatcaggcaagagaaagaaata

SEQ ID NO: 432931 - DNA, 572 bp, Homo sapiens
aatctcacctacaatagccacacatacagtatccctaggaatacatctaaccaaggaggtgaaagatctctacaaggagaactaaaaaatattgcagaaagaaatcacagataacacagacaaagggagaaasattacatgctcatagatttgaataaatagtattttcaaatactgcccaaacaatctacagattcaactctattcctatgaaactaccaatgacatttttgacagaattagaacaaaactatgcaaaaattcatatggaaccaaaaagtagcccaaatagccaaagcaaccctcagcaaaaagaacaaagttggaaacatcacattacttgacttcaaacatagtatacggctacagtaaacaaaacagcatggtactggtacaagaacagacacatagacctatacaacagactagagaactcagaaataaagccacatacctacaaccatctaattgttgacagagttgacagaaataagcaaggggagaaggactgttcaataaatggtactgggacaactggctaggcatatgcagaagaatgaaactggacctct

SEQ ID NO: 432932 - DNA, 572 bp, Homo sapiens
aatctcacctacaatagccacacatacagtatccctaggaatacatctaaccaaggaggtgaaagatctctacaaggagaactaaaaaatattgcagaaagaaatcacagataacacagacaaagggagaaacattacatgctcatagatttgaataaatagtattttyaaatactgcccaaacaatctacagattcaactctattcctatgaaactaccaatgacatttttgacagaattagaacaaaactatgcaaaaattcatatggaaccaaaaagtagcccaaatagccaaagcaaccctcagcaaaaagaacaaagttggaaacatcacattacttgacttcaaacatagtatacggctacagtaaacaaaacagcatggtactggtacaagaacagacacatagacctatacaacagactagagaactcagaaataaagccacatacctacaaccatctaattgttgacagagttgacagaaataagcaaggggagaaggactgttcaataaatggtactgggacaactggctaggcatatgcagaagaatgaaactggacctct

SEQ ID NO: 432933 - DNA, 536 bp, Homo sapiens
atctttttgtatatttttagtggttactctagagatgatgcaatacatctgaaacttatcaaagtctactaatatcaatattttggcacttcaaatgaaatgtatgactcttactrtcatttaagatgttttagccatctcacattgtcctaaatgtcttctttacatacattgagaactacattacaatatataattttgctttcaattatcagatttaattttaaaaaatcatgagaaaatgagtagtgtattttacccatagattttcctgctctattgttcttcctttgcactgatgttccaagttccttttgttgtaattttctctctctgaagaacttcctttaacagttcttttaatcaggtcactaagtcgtttcttccatcttgaggtccctagaaactctgtcttctccgtctctaccttttggaatcttctgctgcttggttcatttgatttatccaaggttttaggtatgataagagggtggactaaggcaaaatatgcttgccccatccttctggaactggaa

SEQ ID NO: 432934 - DNA, 536 bp, Homo sapiens
atctttttgtatatttttagtggttactctagagatgatgcaatacatctgaaacttatcaaagtctactaatatcaatattttggcacttcaaatgaaatgtatgactcttactgtcatttaagatgttttagccatctcacattgtcctaaatgtcttctttacatacattgagaactacattacaatatataattttgctttcaattatcagatttaattttaaaaaatcatgagaaaatgagtagtgtattttacccatagattttcctgctctattgttcttcctttgcactgatgttccaagttccttttgttgtaattttctctctctgaagaacttcctttaacagttcttttaatcaggtcactaagtcgtttcttccatcttgaggtccctagaaactctgtcttctcygtctctaccttttggaatcttctgctgcttggttcatttgatttatccaaggttttaggtatgataagagggtggactaaggcaaaatatgcttgccccatccttctggaactggaa

SEQ ID NO: 432935 - DNA, 573 bp, Homo sapiens
ttaagcacatatgttcagtctgaatttcaataactgtccttttaagtttaggctgtttgtattttctcacattagtaagaaagggattcagacaatatgggtctcttagagayctttaattctccaaaagtccatgatatgtgtcaatagctgagtaaactttttagtgggtatttaaaacctactcatctgaatgcattacgataaaataaattaaatgcctatattctgcttcagctgcctgtgaataactcataaactgggggactggacaacaaagaaaacacacaatcatgatcagtttttcctcatgttaaggcagtgaacctatttgcaaagttcacagcacacactctcctggtgagttatgccaaaagaacccactgtatttctcctcgggtttgaatgaactactggaatatttttaccctttctatgctggtgtcccatcactgcattcagcagttttggactgagatctaagttcccacactccatttcagccattggataatttgtgtatggtagccctatagatactatcttcttgccagaagagctgagcaggtcaga

SEQ ID NO: 432936 - DNA, 518 bp, Homo sapiens
acatattaaagaaaagtaaaatattaacacaggcagtactttcccatactttaatatcgagactcttgacgaacataagtagsttgattatggaagattttcttacctcaaacaacaaataaactttcttaaaaggacatggatgagaatggcttccctttcggtatcaagtaatagattgctaagcatttctcaatcgttaagaagttatttcatcatgtatggagtgcaagttgagttgcagggcatataagcatgactgtattaagtataaatctgcattcctgcatctgaggatcctgtgaggtctgtctcccaggaaacaatctggatagttaatgacacatgggatgggtcagggcagattgtgagaagcgcagtgttgattatgtaaacttggattttgtacaattgtaaatatagggtatttcctgtattgcactgtggctataaactagggagaaatgtaaatacagggtctaactctgtaaatagcgtctgattattcctaatagtgt

SEQ ID NO: 432937 - DNA, 533 bp, Homo sapiens
aataagaccccaagtttgttccctttgtcgcatttgtgcaaaacattacaaagaaatccttactttctcttagggatcatcctgctttcctctccaagactatgtgagtctcaccagaaattacctttatcttgttccttcaagagaatgtccaaacccccatagagtgcttttataaaacaacatcaaaggataagctcayaatgacttattaaaggctttaatgaccattgcattattgcatattcctccataatgaatcctaaattatatttgcacttgttttctaaccaataacgtaaggcgagctggcagtggcgggggagtgggtggtgggggagttaaaaaaaattaaaaagataataataactaacaaagctatagctatggttctagcattgttattacgttaaataagataaaaataaaacacttcagataattaaatacaaataaatactattcaatatattaaatattaattaaatgtttaaatgtaacattaaaagtaatataataactaaccacattgt

SEQ ID NO: 432938 - DNA, 552 bp, Homo sapiens
acactagtagtggtctctacctactgactgggtaattatgtaactaaatatgaatttaaaaataagggtcatattttttgtttcaatggcatagagttaacattttcttttcaagctaattttatagagtcagaaaatgaataaactacattacattttgatcaggtgcagacattgcaagacattggttgctatttccgagaatgtgccaatagtttgctaaacgttggcagaactcctgggcacatggactcccttattttaatgcacatgaagatgactagactaagcttccaaatctcatataaaactacctattaagctaaatattgagaagaaatggtcacaaagaagggaatgacagacactggagactattgagggtggmgggtgggaggagagagaggatcaaaaaaactacctatcgggtattatgcctattacctcggtgacaaaataatctctacacaaattccccgtgaaacacaatctgtctatgtaacaaacctccacatgtacccccaaacccaaaataaaggttaaaaaagagct

SEQ ID NO: 432939 - DNA, 496 bp, Homo sapiens
ttacagaaatctgttacacaactgtgaaaaccaactttatgcttactactacattaatggtttgttctttctaaattttccatttttaaggtctcagttctttatgaagcttccaaagatgatcaagggctgaaacagaaagtaacaaccttcaattagaactttcacaggaatattcagatgcttggaggtactttcgacgtttttttactacccattataccctgagaggctaaatggcagagaagtagcaaagtagatgataatgacgtaggaaagacataaaaacacaaarccaaagaggctatctttgcatccattcataccagtaatgagagggcagaacctcgagtacagtaaagctttttcactgtttgcaaaatgaagcacagcccaactctaccattgtcatgtagaaaaatacatttctgaaaaataacaaagagccaagttttttccatcagtgttctgaactcttaagctcaatatgaaagca

SEQ ID NO: 432940 - DNA, 496 bp, Homo sapiens
ttacagaaatctgttacacaactgtgaaaaccaactttatgcttactactacattaatggtttgttctttctaaattttccatttttaaggtctcagttctttatgaagcttccaaagatgatcaagggctgaaacagaaagtaacaaccttcaattagaactttcacaggaatattcagatgcttggaggtactttcgacgtttttttactacccattataccctgagaggctaaatggcagagaagtagcaaagtagatgataatgacgtaggaaagacataaaaacacaaaaccaaagaggctatctttgcrtccattcataccagtaatgagagggcagaacctcgagtacagtaaagctttttcactgtttgcaaaatgaagcacagcccaactctaccattgtcatgtagaaaaatacatttctgaaaaataacaaagagccaagttttttccatcagtgttctgaactcttaagctcaatatgaaagca

SEQ ID NO: 432941 - DNA, 528 bp, Homo sapiens
gcatcaattacggctatacatataattcataatttttaattattatattcttttgatatataacttgccactataagttctaccaaaaaagtagatgttaagaacatctttccttatctcctatgtgaagaattgtttawctttaaatatcaccattcaacatatctcctatatttagagtttaggaaaatgagctggcttttccctaggtggttgaaatcaatcctacttgttaatcaatgtgagtagcccacaaataacaccttctccgagtgaaagaccaggatcttgatgtagctgcaggttactaaggaagagttccagccatcaacttcagagtccaatggagatattagcatgaagccaattatcttagcattcagagggttataaaagatgtgctccaactctagctgaggtggagctagaggtcagaggagctgcagaaaaggtcaaaaagactggacatttgaattgaggtttgaaagatgagaaagaaattgcaaggcaaagaatcagggtcagaag

SEQ ID NO: 432942 - DNA, 528 bp, Homo sapiens
gcatcaattacggctatacatataattcataatttttaattattatattcttttgatatataacttgccactataagttctaccaaaaaagtagatgttaagaacatctttccttatctcctatgtgaagaattgtttatctttaaatatcaccattcaacatatctcctatatttagagtttaggaaaatgagctggcttttccctaggtggttgaaatcaatcctacttgttaatcaatgtgagtagcccacaaataacaccttctccgagtgaaagaccaggatcttgatgtagctgcaggttactaaggaagagttccagccatcaacttcagagtccaatggagatattagcatgaagccaattatcttagcattcagagggttataaaagatgtgctccaactctagctgaggtggagctagaggtcagaggagctgcagaaaaggtcaaaaagaytggacatttgaattgaggtttgaaagatgagaaagaaattgcaaggcaaagaatcagggtcagaag

SEQ ID NO: 432943 - DNA, 523 bp, Homo sapiens
aacaacaatgacaacagttatttcttcttttggtacttttggtaagtattttgaatgtattttagccatttccctccaatgcttcaggtggttccctccctcacctaacctggatttgtattcgcatggaagaggttttacaaacatccttaagattcaagaaccctcactggatgcctcctgcgtcaagaaacctgctggggaactggtagaagtcaccaacagatagagtccctctcttttaagaatttgcaatgcatctgcagggagtagaggtaagagacacacacagtgaaaaccaccaaactgcagaaacagatgacaacaaaaactgaggcaaagtgtctaaagaaaggatccattccataaggaaaagcagagaacgcttccagaaataggtacgtcttgtgtctcattttcatagcggccatcttctaggtgaaatggcttgcactgaaaaagccagggaacacaaytgtttcttttttttaattaaaaagaaattttatagagatggggtctc

SEQ ID NO: 432944 - DNA, 523 bp, Homo sapiens
aacaacaatgacaacagttatttcttcttttggtacttttggtaagtattttgaatgtattttagccatttccctccaatgcttcaggtggttccctccctcacctaacctggatttgtattcgcatggaagaggttttacaaacatccttaagattcaagaaccctcactggatgcctcctgcgtcaagaaacctgctggggaactggtagaagtcaccaacagatagagtccctctcttttaagaatttgcaatgcatctgcagggagtagaggtaagagacacacacagtgaaaaccaccaaactgcagaaacagatgacaacaaaaactgaggcaaagtgtctaaagaaaggatccattccataaggaaaagcagagaacgcttccagaaataggtacgtcttgtgtctcattttcatagcggccatcttctaggtgaaatggcttgcactgaaaaagccagggaacacaactgtttcttttttttaattaaaaaraaattttatagagatggggtctc

SEQ ID NO: 432945 - DNA, 528 bp, Homo sapiens
caaacttgcataagcttgatatttcacttcatttcttttttttacttcaacctggtgaggaatgtcttgctgggtaacatgttacaggtgattacaatcagcccttttagtcctcaaacaatcttataaaacaactgttgataaaaaaaaaaccttcaattcacctcgcaagcaatacttggagaaaataaataatgtctcttttataagactttacagtttcttagtgagaagagagttccaaaaatttcttgaaaggcaattttgaacttattccctgattccttaaacacaaataaaggctaraaagtccctatttcacaaatgcttactgagtacctaatatgtgcaagggactattttaatcaccacaaaaattcatcttcgcaagagccataaaattaattacagtgaggaaaaacaacattctttcttctatttattattgtaattcccgatctccttattggcgaaagaacaatggagtcaggattgcctttctttcagggtgtaaaattgactttaaaa

SEQ ID NO: 432946 - DNA, 587 bp, Homo sapiens
gacctttgtgggctattcaataagtcagtcaacaatttttaaattaagagcctactacrtgctaggtgctatgtctgaagcatagttatactatttttgttttgtttttaaattttttaaattctggagaaccccaataaacaaaagtattaaataaacaacatcaataagcattggctatggagcacttatgaataaatgaaaaataataaatgaataaacgaaaaacccatttgtttgatgggtttttgcctcttatttctgggtgcagattattggactaacaaaaactatgatatgtcatccatgaaagagttaaagctctgggtgtatatgcagtaaagggattgctgggtcaaaaacataaatcattctaccataaagacacatgcatgcagacatgcattgcagtactatttacaatagcaaagatgtggaatcaacctaaatgtacatcagtgatggactgaatgaagaaaatatgatacctatacactagggaatattatgcagccacaaaaaagaatgagatcatatcctttgcaggaaaagggatggaggacattatccttagcaaagtaatgcac

SEQ ID NO: 432947 - DNA, 570 bp, Homo sapiens
ctagaatccaaacaaaaggatgaaaccaagtaattgtcagattattttgaaaataaaagtcagacctcattaatttgtaagcttatatttatttcatatttatttcatgctggacagcaaagagacaccagtgtataggaacgggttaaataatacatgaaattgtcttcgtgtaaatgggcgaaactaccttgtagcttacaagccagtcttcattcattgcctgacccatttaataagtaagaccctcaggagtcatccctgcacttttgttcatctgtgccgttctcaccttgaaatctcgtcagggtctaaaggatgacagtgatgggcacttayagaaatggatgggaaggcaaggagatcaaatcacaaaggcattttaaagtcatctgcagggactggccttgctgacccagctcatcctgctactccaggaggaaaaaatgagatttaatcattgctcctcgtctctcatttcagtaggtcagcaggggaaagcatgccacaagtattggaaattcagtttctgaacaagaacagccttcttctacccaactattagtaaaa

SEQ ID NO: 432948 - DNA, 604 bp, Homo sapiens
acctaatttgtccaaagtcattcagctagtaagaagttgacttgggattcaaacccaagcagcctggcttccaagatccgctcttaaccactatgccacactacccgcccagtgctgataaataaataacttgcttgtggatcacatgccaaaaatgcttgttgaaataattctatgcaggaagacttcagatgtaaagttacgactaggactccagctgaaattgcttaatgctatgtacatagtcatgtctaggcatattgattgctgtaaattcttaactcagatagttcctatgagttcatatttggctataaaagcccaatcctatagtagaattgtatttaaaggaaagatagcttttataaataaaggtagacttcttatagtttsggatttcttctgctttctcctgcaaaccattcccgtatttgatggtcactttctgcagcaatatgttttgatgttctctgctgggccggcacaacaataagtctcaataaggattttgtttatctataaataaaacccttagtatacagtacgagctaagacccaatcagacagcaggaggagcctggctttcttactgttggcctagttg

SEQ ID NO: 432949 - DNA, 596 bp, Homo sapiens
tgaagctgcagaatgacacagtggatgagacaagagcattagattcagatgaacccaggggagagatgatctgtgtctcttactgtagctgtgtgatacaggcatgtttgygtgttagggaagtgtgaaagcaagcctcaaggcaaaagaatcacctagaccaagacctagaggatgtggacaaattagccaagggaggaaaaagtagaagttgcgggcaaaaggcacaacacagttgaagacctgaaagtaagaaagatcatagcatgtttgagacaccgagattagctcagcagggcaggaatgcacagagggaggaaagtgagaacaaaggaagctgggggagagtcagagctaagaaaattgggcttcatcccgttaaaagaaaaacttcaggccaggtgcagtggctcatgcctgtaaccccaacaatttgggaggtcgaggcaggcagattgcttgagctcaggagttcaagaccaccctgggcaacatggtgaaaccccatctctactaaaatacaaaaaattagccaggtgtggtggcaggcacctgtaatcccagatactcgataggctgaggcaggagaattgctt

SEQ ID NO: 432950 - DNA, 612 bp, Homo sapiens
tctttacacataatgtttcatttaatacttgtgagaatcttcagaggtagatatcgttgtccccattttacagatgagaaaatggagatttagagacattaagtaactcatccagggtcatccacgcaacgtgtgcccaagaaacattttaaccaatgtctgactccaaattcctttcctagtatatgctactgatataggagttaagaataaagtatttaggcagatagtgagggtaaggaagtccttcgtaagactttccttttaataaaaagcagccccraagtctttttcttttctaacaaagagcagcctgtaaaatcgagctgcagacatacacaagtgagctgtaagcttgcacgtgtgaatgttgacagttgtgacaataggaaaaggctgcctgggagtagacatgttcaaaatggcagctccatcttcccttttcctttccaaccatgtgtgcagtagggagcagacaacatggaaaccgccaggcaaagaccccatttgcataatataattagggcggagcaaacagcttccttgcagtctatgtagaaagtcacgcctggtccaaccaatctgtgggccctatgtaaatcagaaaccgac

SEQ ID NO: 432951 - DNA, 568 bp, Homo sapiens
attcagcatttatatgcattaccattatttaatcttattataaatgttacagctgagggatggagccmagccaggttccataaccttcccaaggttactggggagtcaacccaggcaggttgactttggaggatgtgccagaccactaccctcctgcccaggactgacttccgttagaaaacaaacgtgcaaaacattctgatcattttgcttattatcaacaacagaaacaaccagtattgtgctcatctctctaaatgaagacacaggcacatattcactttacaggagttaccctttctctggaccagcaatcctcttagaaccgctaatgaggatcatctaaattctcatccctggtgagcaacatttttccttgtacttcttgaattctagcttacatatttaacataaaattatatgttcaatcattcaataattctgggattcccttaaagtgtaatatcaaccaatcccagttactaaaaaatgtcacaacaaaaataccccttgcactaatatccttgcactaatatcagggttcttagcaagcaggtcagtaatcaac

SEQ ID NO: 432952 - DNA, 570 bp, Homo sapiens
tacgcatgtcttacaattagtcatatagtaggtacaattagactatggcttaatgtcttcatcagatttggataattatttctaaactgtgtactttgggtgtgttgcaaggataaaatgaaataaaagatgtgaacaagtacttatttatcttaaactctgcctcactgtagattccagccattactttttactactacttaaccaatacaagatagatcttagcttctcacccctctctggcattcctacttttgcactgttggcatttctatcttcctacagtcttctgcagcaaatggaaaactcctttcccacctaaaaacctcagcttggtattatactttaacagtagaaatatcggtggattttcaagtacagtcaaaaagtatagaagtagcattactaacgttttaaagatgtaaattccactmagcaaagaacaccctaaaattttgaccttgcaaatatgaatatccactagcagcttcttcgaggccctcaagggcaggatgttctctgagattttgaagaacccagatgccattctgaactgtttgtgtttatctg

SEQ ID NO: 432953 - DNA, 556 bp, Homo sapiens
gacagttaagatgagtgaagaagagtgtataatctgaagatacatttttaatggatttactcagtatagtcattgtacttataggtggcctagacatgtggattaaaataaatgaggctaatctatgaattttagaaaaaatacattcctttcactaattgaggggagtgaaaaagcatgtcttcawttattgacaaacttctattcaactaaaagcatttactttaatagaaaaagtgtcattggtccacaaccaaaaccaaaaatttctctttatgctgtagcatagccaacctcttagtggcctagaacaagtcattatctctaacagttctgtgggttacctggattcgggtgtttcttgtgtgggatctttcctgtggtttcagtcagatggcaactaggcatagagttacctggatacttagacagaaagcagaagctgccaggccagcaccatttccattgtattctattggtcaaagccgttgtagtgcctgagcagatttaaggatgttgagaagtacctcttgaaggggacattgtttaagagcat

SEQ ID NO: 432954 - DNA, 497 bp, Homo sapiens
gtagctgttatacccaatttttccacttctcctagtcatagggaacyctagtctaccatctgtctatactgcagatttagctagtctagacattttatataaatggaattatattgctctggctaggactttgggactatattgaatagaagtagtacaagtggggatccttgtcttttttcagttctcagggggaatgctttcaacttttccccattcagtgtggtgttggctgtgcgtttgtcatagatggcttttattaccttgaggtatgtccctttctatgctgattatgttgaaggttttaatcataaaggaatggcagttctgtcaaatgctttttctgtgtctgttgagatgatcatatgatttttgtttttaattctgcttatgtgatataatacatttattgacttgcgtatgtgaaaccatcactgcatccctggtataaaacccacttgatcatggtggattatctttttcatatgctgttggat

SEQ ID NO: 432955 - DNA, 566 bp, Homo sapiens
aaaattcgaagtttcatctgagacaaagcaaatccctttcatgtatgtatgcattcccatacatcctctgaaatctaggcagaggttcccaaacctcaatccttgacttctgtgcatccacagactcaacaccacatggaagctgccaaggcttggggcttgcaccctctgaagccacagcccaagctctaccttggcctctttagccatggcttcagcagctgagatgcagggcaccaagtccctaggctgcacatagcagagggtccttgggccyagcccatgaaaccattttttcctcatgggcctccaggcctgtgatgggaggagctacctcaaaggtctctgacatgccctgtagatattttccccattgttttggtgattaacatttggctcctcattacttattcaaatttctgcggccagcttgaatttctcctcaaaaaatgggtttttctttcctatcgcatagtcagggtgcaaattttctgctctttttcccttttaaaactgaatgcttttaacagcacctaagtcacttcttgaatgctttgctgcttata

SEQ ID NO: 432956 - DNA, 566 bp, Homo sapiens
aaaattcgaagtttcatctgagacaaagcaaatccctttcatgtatgtatgcattcccatacatcctctgaaatctaggcagaggttcccaaacctcaatccttgacttctgtgcatccacagactcaacaccacatggaagctgccaaggcttggggcttgcaccctctgaagccacagcccaagctctaccttggcctctttagccatggcttcagcagctgagatgcagggcaccaagtccctaggctgcacatagcagagggtccttgggcctagcccatgaaaccattttttcctcatgggcctccaggcctgtgatgggaggakctacctcaaaggtctctgacatgccctgtagatattttccccattgttttggtgattaacatttggctcctcattacttattcaaatttctgcggccagcttgaatttctcctcaaaaaatgggtttttctttcctatcgcatagtcagggtgcaaattttctgctctttttcccttttaaaactgaatgcttttaacagcacctaagtcacttcttgaatgctttgctgcttata

SEQ ID NO: 432957 - DNA, 566 bp, Homo sapiens
aaaattcgaagtttcatctgagacaaagcaaatccctttcatgtatgtatgcattcccatacatcctctgaaatctaggcagaggttcccaaacctcaatccttgacttctgtgcatccacagactcaacaccacatggaagctgccaaggcttggggcttgcaccctctgaagccacagcccaagctctaccttggcctctttagccatggcttcagcagctgagatgcagggcaccaagtccctaggctgcacatagcagagggtccttgggcctagcccatgaaaccattttttcctcatgggcctccaggcctgtgatgggaggagctacctcaaaggtctctgacatgccctgtagatattttccccattgttttggtgattaacatttggctcctcattacttattcaaatttctgcrgccagcttgaatttctcctcaaaaaatgggtttttctttcctatcgcatagtcagggtgcaaattttctgctctttttcccttttaaaactgaatgcttttaacagcacctaagtcacttcttgaatgctttgctgcttata

SEQ ID NO: 432958 - DNA, 566 bp, Homo sapiens
aaaattcgaagtttcatctgagacaaagcaaatccctttcatgtatgtatgcattcccatacatcctctgaaatctaggcagaggttcccaaacctcaatccttgacttctgtgcatccacagactcaacaccacatggaagctgccaaggcttggggcttgcaccctctgaagccacagcccaagctctaccttggcctctttagccatggcttcagcagctgagatgcagggcaccaagtccctaggctgcacatagcagagggtccttgggcctagcccatgaaaccattttttcctcatgggcctccaggcctgtgatgggaggagctacctcaaaggtctctgacatgccctgtagatattttccccattgttttggtgattaacatttggctcctcattacttattcaaatttctgcggccagcttgaatttctcctcaaaaaatgggtttttctttcctatygcatagtcagggtgcaaattttctgctctttttcccttttaaaactgaatgcttttaacagcacctaagtcacttcttgaatgctttgctgcttata

SEQ ID NO: 432959 - DNA, 609 bp, Homo sapiens
attccatttggataactagtgcttttgagcaccctgtaagaattatttctatgatgatrtcaaagaaaagtgacctctttgaattagaagcttggttctaactaaaatattctaacaacatgatggtcttagaaactatggatacaaaaaggtttagaaaaaaaacctaatacatatatatgtgtaatgagaaaccactaagcaagatacatagccaactaggagtaaaacaaactaaaatagggccgtttctcacaggctttattcaatgtccaaagaatgattttcaaacatccagattaatactgtgaagagttaacacatcatctagggggcaagagttcagatccagagagactttatctattcagatttgaaagcaatcttaaactgacaactgataaggcaaggacacactgctattctttaattcaagaacaaaattgcatctcacagtggggtcatccttttccttcttatagtggcttaagaaagacatatataaatgactaacaagaagtacaggtttaagggagatatctaagtttatagtctgtccctgggaattggatggcttttccccgtaggttgccccatggcagcctcatc

SEQ ID NO: 432960 - DNA, 651 bp, Homo sapiens
tctgtttcaatcaaagttttattgagcacctactatctccaagcccccacgtgagactcaccacttaaggcagacttcctctactagttaaccctagagtgctaagaatgtgccctgtaaacatgttctttaatttgactcaacaaaaaattgctttttaaatctgaattgttatgcctgagtattttttgctttgtacagaaagtcacagkcagctttttccttcttagaaatacttgtgttgctgctgttgttgttctgttaagtacgtccagattctatctggcaatatttcttctttcttttaaagatagagataattagcactgattagcaaagagatatatgtactaataatcttaactaggtagttgcaaaatccaaaacattgaatactagggaaatttgagcttcaggctgttccaggttgttaaggaatagggccagaagtttttttcaacaaatagaaaatctaatacaagccttttgctcaacattttaaatgaagttgagtttcttaatactgaggtaccttttgggccatattagtaaatgccaattaccttttatttttattttttaataaagagtatgcagtgtcctggttatcctctttacattcttggttaactgtagttacattgataagta

SEQ ID NO: 432961 - DNA, 608 bp, Homo sapiens
tctatctggcaatatttcttctttcttttaaagatagagataattagcactgattagcaaagagatatatgtactaataatcttaactaggtagttgcaaaatccaaaacattgaatactagggaaatttgagcttcaggctgttccaggttgttaaggaatagggccagaagtttttttcaacaaatagaaaatctaatacaagccttttgctcaacattttaaatgaagttgagtttcttaatactgaggtaccttttrggccatattagtaaatgccaattaccttttatttttattttttaataaagagtatgcagtgtcctggttatcctctttacattcttggttaactgtagttacattgataagtatctgaatcaattcctttggagttccaattattgggaagaaactacttggaattcttcacaggataagtgattatcaagcaaggttcctaccttgaacattttcttgttttgaataacaaatcttccgcggagggtggttagacagaactcatttgcagtaagtgtctgtgtacccagtcttggaaataattagatagctttgtagcatagtttcacaagcctcactcagtatat

SEQ ID NO: 432962 - DNA, 502 bp, Homo sapiens
ctatgtggcattaaaaatttaaacacacacacacatcatctagacaaactagataataaaactatttaactgggagccccgcatagggcttttggtagcttagatctagactggctctctgcgtccacctyttctcttgttatcccagggattcaggctgcattcttcctctactattcatccgtttcaggttttctctctgatatgtcaagagtggactacaatctcttgtttccatctcagacaacaagcacacaggccctcttcttctaggatatttctactaatcactaaaggaaagtgggatactaaaacaaaacaaaacaaaaaaactgccgttggcaggatgtcaaggtattagagtcattctgctaactctgtagttagcaacatacattgaaaaattatttgaatgtctttctaggcattttgctaggcattgaatatacagagataagaaacagctagccttcaaagacttcaccatagaatgtaaataaca

SEQ ID NO: 432963 - DNA, 502 bp, Homo sapiens
ctatgtggcattaaaaatttaaacacacacacacatcatctagacaaactagataataaaactatttaactgggagccccgcatagggcttttggtagcttagatctagactggctctctgcgtccacctcttctcttgttatcccagggattcaggctgcattcttcctctactattcatccgtttcaggttttctctctgatatgtcaagagtggactacaatstcttgtttccatctcagacaacaagcacacaggccctcttcttctaggatatttctactaatcactaaaggaaagtgggatactaaaacaaaacaaaacaaaaaaactgccgttggcaggatgtcaaggtattagagtcattctgctaactctgtagttagcaacatacattgaaaaattatttgaatgtctttctaggcattttgctaggcattgaatatacagagataagaaacagctagccttcaaagacttcaccatagaatgtaaataaca

SEQ ID NO: 432964 - DNA, 548 bp, Homo sapiens
aactatttaactgggagccccgcatagggcttttggtagcttagatctagactggctctctgcgtccacctcttctcttgttatcccagggattcaggctgcattcttcctctactattcatccgtttcaggttttctctctgatatgtcaagagtggactacaatctcttgtttccatctcagacaacaagcacacaggccctcttcttctaggatatttctactaatcactaaaggaaagtgggatactaaaacaaracaaaacaaaaaaactgccgttggcaggatgtcaaggtattagagtcattctgctaactctgtagttagcaacatacattgaaaaattatttgaatgtctttctaggcattttgctaggcattgaatatacagagataagaaacagctagccttcaaagacttcaccatagaatgtaaataacacagcaattacagcccaatgtgataagggtacaatagaaaagaagaaaatatatgctatcacaggaacacagaaggtgggaaatgattaatctgtaggcagacggg

SEQ ID NO: 432965 - DNA, 548 bp, Homo sapiens
aactatttaactgggagccccgcatagggcttttggtagcttagatctagactggctctctgcgtccacctcttctcttgttatcccagggattcaggctgcattcttcctctactattcatccgtttcaggttttctctctgatatgtcaagagtggactacaatctcttgtttccatctcagacaacaagcacacaggccctcttcttctaggatatttctactaatcactaaaggaaagtgggatactaaaacaaaacaaaacaaaaaaactgccgttggcaggatgtcaaggtattagagtcattctgctaactctgtagttagcaacatacattgaaaaattatttgaatgtctttctaggcattttgctaggcattgaatatacagagataagaaacagctagccttcaaagacttcaccatagaatgtaaataacacagcaattacagcccaatgtgataagggtacaatagaaaagaagaaaatataygctatcacaggaacacagaaggtgggaaatgattaatctgtaggcagacggg

SEQ ID NO: 432966 - DNA, 604 bp, Homo sapiens
ctagattatgtcacagctatagactgaagttcttattttaaagccaatagattttaaacaggaaaatgacatgtgttggatttgatatttttatatcaaaagagctgtctgaaagcaatgtggagaataaattagtgcacatgtgatgagaggtgagggaatgggatggagggtagggaacaaaattggatgatgcttaataggctgttgcagtaattcaggtgaaaataataggacatgaactgaagagctgtgatgaataaggatttgaaaaatattcaatagctagtcattttcagattattaagaatgttctatgacctgtttactatagttcaactgaatgtggactcacttatcatcactacccctcttcctatcttttggccccacttttagggatggccactggaaacttttctttgaagaacacttaaaatgtaagtgttcctcccatacaagtgatcagtttcatttctaaacaagatgaaacagttgtttaggtrtttgtctctggtatccagacacaattatatcagagtatttcctctggtcttgaatcagaattccctttacagctctgactgatttgaacaaagttaca

SEQ ID NO: 432967 - DNA, 532 bp, Homo sapiens
aaatccattgttctattttctcttgaaaggacacatttttctgcacagtgtattctaaatagttgatgatgcaaaagaaaaagaaaaaggagctcattttaaaaaatgggtaactattgccagtatctgttaactactggtaaaattgtctttcaacagagaaaactgaaagtagtataaatgatagtagggaagttttaggaaaayttaatgtagatgtgaaatgtgtctgtttgcctcttactgctatggtgagaatggagttgcagagaactgtaattaactgtccagaacaaatggagatagcaaacattgccaggcaggcaaaaatggtaattacaaactataacttactcactagttaattggaataagaacctacatttgaatcatcttgcatgatttagttctagtctaatgtgtttgctttgtaaagtctaaaaccaggatagtttcagtagacttcaaaacaatgtgtgctctctgtatttttctattaatggtgtttgtgacttcgaaaatttacaggttt

SEQ ID NO: 432968 - DNA, 577 bp, Homo sapiens
gacaaattgccaaattcatctagaacaaggcaagaaggcgtggtgaatggagctaaacacttagcttctacgtatttaaatagacatccccctcctwcatgctttacctgtcaattttagaatgttcaaatcttagttaatagtcatgtcctctgtttctgcccttaaagttgagtcttccctggttgaactctcactacgctcacatgtgcatgtgctcacaaacaaacacacacacttccaggttccgcggaatgcttttagtgtttgcttcttgtcatcttgttcttcacaacaataaagtgacaggtattagactatggaagagtaagcttgttttccggagttcccaatcacattccacacattcaaagcactgctaccctcaggtatatttgctaaatgtattaatctctcaataaagcgatctgtttatgcttttagcaatacgttagaggcaggagagggattagattaagcactcctgggattctgatctgatccgtgcatgctgcctcagttacagaaaggaaaacaatgaagattttctgtgaatacttggtggctaattagactt

SEQ ID NO: 432969 - DNA, 666 bp, Homo sapiens
tttatttctgtgtattttctgttgccagatgtgactcatatttatttgctatctgcccttgtatgtcaataatgggttataagggtcataatacacttaatatgtgcatcattcaaacctaataaaaaaattgtagacaatctactcgaaaaataaatgtcatcctccccttcccccaatgcctrcaatcagccctcatatataaagatcaaattcaacaattttcttcaaactaaactctacctacatttgaaaggagtttcttttattctctagtgcagttatgccatgtgttactataccttggcctggtattagtaatgaatttgtcctcatgggaatttgtgacttactggcaactgtgtgagtgctcttcactgctttgttaataaccagctcttttcctatagagcacgttttccttggtggatggaaagcatcccttcctggggcatacacttaatcagaatatgtagacaatttctatctcttagagaagtagggacaacaagcttaaaaataacttacacagaagaacagcagcaaagtaattcgtttgaatccttttattatgttgttgccagaataaatatctgtataacaagttccatcatagaaaattatattaaaggaattgtgattaggcttgtcatttccccagtgtat

SEQ ID NO: 432970 - DNA, 570 bp, Homo sapiens
atctctataaagaatgactattgtactcattttacacataagtaaaaggaggcttatagaaatgaggtcatctgcttaattcttgttatttttttggtgctgctcactattctgttgccttatttggtatctttgctgtttctgrtgcttctgttggggaggctcccaaaattaagccaccatcatgtatatctctttgctcatttggtcttagttatattgactttttctcctcctaagtactaatatacattcccctgaggtgaaagggctctctacagacaggacttgtaattattttataagattgctcatacaggcagaaaaggattattgatcacaatttatctaatagccagttcttgaaacatttgaaagaaagcccgaggaagttacatcagaaggcacatgagtggcaccagccaaggagaaacaaaaaaatccttcccgacacaagctacaaaaccaaaattatcccaagaaagactgcccaccgctttattagtcccaattgcattttcgagacctcatgatccaggccctatgtccattttaatattttccttagta

SEQ ID NO: 432971 - DNA, 570 bp, Homo sapiens
atctctataaagaatgactattgtactcattttacacataagtaaaaggaggcttatagaaatgaggtcatctgcttaattcttgttatttttttggtgctgctcactattctgttgccttatttggtatctttgctgtttctgatgcttctgttggggaggctcccaaaattaagccaccatcatgtatatctctttgctcatttggtcttagttatattgacttkttctcctcctaagtactaatatacattcccctgaggtgaaagggctctctacagacaggacttgtaattattttataagattgctcatacaggcagaaaaggattattgatcacaatttatctaatagccagttcttgaaacatttgaaagaaagcccgaggaagttacatcagaaggcacatgagtggcaccagccaaggagaaacaaaaaaatccttcccgacacaagctacaaaaccaaaattatcccaagaaagactgcccaccgctttattagtcccaattgcattttcgagacctcatgatccaggccctatgtccattttaatattttccttagta

SEQ ID NO: 432972 - DNA, 642 bp, Homo sapiens
acttaactttttcagaacacaaagaataaatgctcttattatgctgttgctgtcaattgatctatggacttccatattaaatgcttcctgcatctcagtcttatcatctcagtgagatgagaaattccttaaaagcaggttctaggtctcccacccaacttcaaccccaataacactcaccacagtgcatcatcttgaacaaactccagaagcatcttgttatatttcaaaggatatccacacttggactttaatcctaacactaggatttcacattgttcagtcatgtgcacctgttttgcctttggtttactcatgtataaaatggagatgaagccacctccctaatgagatgatacagcatatacaaaaccccaacatygtgtgtggaccatattaggtattcagaagatattactgctggctaggctcctgcctgtaatccagccttttgggaggctgaggcaggaggattgcttaagccccaaagtttgagaccagcttgctcaacagagtgagaccccatctctacacatgaatgaaaaaataaaaaagaaaagagatattagtgctattttataacctctgctaccaaccttaaatttgtcctgtttttatccttaccactacctctacagatac

SEQ ID NO: 432973 - DNA, 621 bp, Homo sapiens
agttacatgtaggcaaaggcccagaatttgatgattcaaaggctggctaaggatacagacctsgcttaggccaatgttctgttatagagaaggtcaatgcaatttgaagaggttaagttcctacagctccattgcaataagacagggatgacagtgcagctctcctgaggacattctacaaacaaaccagcattttacacaaaacacccaaacaatgctcttcaatggggttttctttgaagagttgtcacctaggatttcattgaactcttacagatatgtgggctacaggggaggtattttgtctttaatttataagaaaatgtttccttcatcttctttgttttacatataaaaggaaagaactgaaagaaataaaaaaaggagggttctatgggaacaaacattggaaagagatgatggtggcagagtgaggatgtagtgagagcactcaggaaaagtgctgagcatattacaggacttggtacgttcaagatggctaacaatgcgcactttccctcctcctttaaagaaggatagagtatgacctacatgatgatttgttagaagttagggacttcagaaattgagattaaaatttaaaaatgaagtgaaatgtga

SEQ ID NO: 432974 - DNA, 582 bp, Homo sapiens
gtccagttctctttggaccattctagagtatcattcattttatttatatatacatggatatctatattaatgttatattttttccacatatatttcataaattttatcttatgaattacagatctttcaaatatgatacctttcyaatattttctaaagcagtaatttgaaagaaaaattctttcaagaactttttagattttttttaaaaaaggaaaggcaactatggcgttataatcttaataggtacctgtgttaaaatgatttgaactgttgcctaaaattaactgtcttcttgcaagactgctttggagggtagcgttgattatatccatgtgatcatgtttacaacatattcctatataggtacttcttgtcatcttccatgaaacatttaaataagaataactgtggaacagttacatgacccctactaagatttgttgttattaataggtgatgaaagacccccatgtttctctaaattgatctatcttagtgtttatatttcaagggtgctttaagatgacaccatattgctttttttcctgatgcattagactagccacagtagcaaataga

SEQ ID NO: 432975 - DNA, 518 bp, Homo sapiens
gatgatacgaaaccttatatcatgagccaaaatctaggaactggcctcatgtcgttgaatttttgaacatcattgaccatgttatgtcaggctttttctgtaacttgtgcaaaatctaacaatggataatgttctccctcctctcccaactaatatggtttacattagctgttcatttgtttaacctagggataggagtcatctacagtgtgaattccmgttgcttagtagtggctgcctgaaatgcatgtctgaaaatttgaagccatgtttttgcttagtcagtgtgtagtggtcatgtgttgatctctgccattggtacagaaagtagaaatgtcatagcatatgccatctgtcacttatggggaccttaaattttcctatttacatttggttcagaccttttgctttgctcagctagtgtaatttataagtcatctcacaatctcatattcttattctgcattatattgctctagccatggacagggaccccttttccttgacatacacacaag

SEQ ID NO: 432976 - DNA, 518 bp, Homo sapiens
gatgatacgaaaccttatatcatgagccaaaatctaggaactggcctcatgtcgttgaatttttgaacatcattgaccatgttatgtcaggctttttctgtaacttgtgcaaaatctaacaatggataatgttctccctcctctcccaactaatatggtttacattagctgttcatttgtttaacctagggataggagtcatctacagtgtgaattcccgttgcttagtagtggctgcctgaaatgcatgtctgaaaatttgaagccatgtttttgcttagtcagtgtgtagtggtcatgtgttgatmtctgccattggtacagaaagtagaaatgtcatagcatatgccatctgtcacttatggggaccttaaattttcctatttacatttggttcagaccttttgctttgctcagctagtgtaatttataagtcatctcacaatctcatattcttattctgcattatattgctctagccatggacagggaccccttttccttgacatacacacaag

SEQ ID NO: 432977 - DNA, 518 bp, Homo sapiens
gatgatacgaaaccttatatcatgagccaaaatctaggaactggcctcatgtcgttgaatttttgaacatcattgaccatgttatgtcaggctttttctgtaacttgtgcaaaatctaacaatggataatgttctccctcctctcccaactaatatggtttacattagctgttcatttgtttaacctagggataggagtcatctacagtgtgaattcccgttgcttagtagtggctgcctgaaatgcatgtctgaaaatttgaagccatgtttttgcttagtcagtgtgtagtggtcatgtgttgatctctgccattggtacagaaagtagaaatgkcatagcatatgccatctgtcacttatggggaccttaaattttcctatttacatttggttcagaccttttgctttgctcagctagtgtaatttataagtcatctcacaatctcatattcttattctgcattatattgctctagccatggacagggaccccttttccttgacatacacacaag

SEQ ID NO: 432978 - DNA, 645 bp, Homo sapiens
agttcagtagtgttaagcatatacacatcattgtagaacagatctccagaactttttcatcttgcaaatccattatacccatgaaataataagtctccacttccacttctccacctaccagccacttccctggctggcctctggtaataaccattctactttctgcttctgtgagtgtacttcatataaatggactcacaatgattgtcttcttaaatcacttagcttaattcacttagcaaaattacctctggactcatccatgttgtagcacatgacaagatttccttctgttttataatattccattgtgtgtatcttccacatttttctatccattcacctgttktacagttgggctgcttccacctcttcactgtcatgaataatgctgttatgaacatgagtgtggaaatatctctgaaattctgcttttaattattttggatatatattcggagatggaattacccaatcatatggtggtttatttttaattttttgaggaaactacctactgtttcccacagtggtataacccttttttaaaaagagagatatcaaaggaataattctgctggtagagggttctgttggaccaacactccagattgacagaggtgggaattcacttcctcagcttcc

SEQ ID NO: 432979 - DNA, 527 bp, Homo sapiens
ttgttttatgattgtaacagaagtagctactcccttagtaagatgattctgttgtggaaagaataccacccaagagagtcattactgggagccaagccagtaatggctgtttttagcttttccagcgattttactcacccaatttcccatattgattcattttatgctaaaacgagttaaagtggtgagatatagtgatataagaaatgtgtatttggtttattctcccagttcctgacacagagctcctaatcctttggaatttcccgagtgataggagtgtcttttgttctaatggagcgagtcttggtggactcctggatggagactggtcaccagaaagactaagccataattagaaactttgaactttccaactcaccccccatcctttggggaaagctggagattgggttaattgatcatgtctacctgatgaagtttggygagcttccaggttgctgaacatgtggagatgtctagatggtggtaaacctgaagagatcataggagctttgctttccttc

SEQ ID NO: 432980 - DNA, 541 bp, Homo sapiens
tacaaaatatcctgggttgcaagttacactgcatgttcattttttgcaaaataccttgagctttataagatatgcatacttttctgtatgtatgttagttttaatacaaatttaaaaaggaaaaattccctaggttattcttacataacactgatgctggagaatcactgacttttctctctctactgaattgtaagccctttgagggcagtgaagccatctattttgtctttgtattcccagcatgctttagtgcctacaacatagtacacacaataaatgattattaaataaatgaataagacccaagggagtgcactggtttgtgggttcccttctccctcactctcttccaaacatttgttgcatgcccctcctggaggacatgacagctcacgcctcaaagttacacctcctacacacacccctgaataaacctgtgagatgccacctggcttcttccctaccataygctgggtgtaactgatccaagcacccagcctgacaagggtaggagaaaggaagcaggtggaggacgttc

SEQ ID NO: 432981 - DNA, 568 bp, Homo sapiens
ccaggctacttatgtaactgatgcaaatgaccacggaggagggatccttgagttttttcgggtactgatatagaagaagacaccttacagtgtcaaaggaagttgatggattcaccttggctggtaaacagctccagaacctggctgtgctgttattgtctttgtgcattatatgccttcattcaggggaaatgggcccttacactaagataatgttttccatatttaaatattggcatatatgaaccttagagattctgaagtttaaatcatttgttttggcaattacaaaactgagacttgctaacttgattagaaagtcaagcaatttgtagaacaccactcagctaattaatagcagtaaaaagactagatcctagatctttgatttttagttctaccattcactmtatcactactagtgaatttttctgatgctttcttgagagtatggtctttatagtatgtcaacaattgtaaacttgcagctaaaatagctgatcatatccgtctacagggaggcactacacatttgcgtgaatacttcctcttctatttgaaaagtgta

SEQ ID NO: 432982 - DNA, 543 bp, Homo sapiens
tgaaccttagagattctgaagtttaaatcatttgttttggcaattacaaaactgagacttgctaacttgattagaaagtcaagcaatttgtagaacaccactcagctaattaatagcagtaaaaagactagatcctagatctttgatttttagttctaccattcactatatcactactagtgaatttttctgatgctttcttgagartatggtctttatagtatgtcaacaattgtaaacttgcagctaaaatagctgatcatatccgtctacagggaggcactacacatttgcgtgaatacttcctcttctatttgaaaagtgtagatttacttacattcttttaaatatatcagcacagactatcaggccgaggatcactgtcttccaacacagtaaacatggacctggttcttgtgctccagagaaacaaatgaaagagcaggcctcaaggaattttgttcattgggatcagtgggatcacaagtatagatctaaagaatggagttccttcagagctcacttcaggtggccaagatgaaa

SEQ ID NO: 432983 - DNA, 568 bp, Homo sapiens
ccaggctacttatgtaactgatgcaaatgaccacggaggagggatccttgagttttttcgggtactgatatagaagaagacaccttacagtgtcaaaggaagttgatggattcaccttggctggtaaacagctccagaacctggctgtgctgttattgtctttgtgcattatatgccttcattcaggggaaatgggcccttacactaagataatgttttccatatttaaatattggcatatatgaaccttagagattctgaagtttaaatcatttgttttggcaattacaaaactgagacttgctaacttgattagaaagtcaagcaatttgtagaacaccactcagctaattaatagcagtaaaaagactagatcctagatctttgatttttagttctaccattcactatatcactactagtgaatttttctgatgctttcttgagagtrtggtctttatagtatgtcaacaattgtaaacttgcagctaaaatagctgatcatatccgtctacagggaggcactacacatttgcgtgaatacttcctcttctatttgaaaagtgta

SEQ ID NO: 432984 - DNA, 543 bp, Homo sapiens
tgaaccttagagattctgaagtttaaatcatttgttttggcaattacaaaactgagacttgctaacttgattagaaagtcaagcaatttgtagaacaccactcagctaattaatagcagtaaaaagactagatcctagatctttgatttttagttctaccattcactatatcactactagtgaatttttctgatgctttcttgagagtatggtctytatagtatgtcaacaattgtaaacttgcagctaaaatagctgatcatatccgtctacagggaggcactacacatttgcgtgaatacttcctcttctatttgaaaagtgtagatttacttacattcttttaaatatatcagcacagactatcaggccgaggatcactgtcttccaacacagtaaacatggacctggttcttgtgctccagagaaacaaatgaaagagcaggcctcaaggaattttgttcattgggatcagtgggatcacaagtatagatctaaagaatggagttccttcagagctcacttcaggtggccaagatgaaa

SEQ ID NO: 432985 - DNA, 569 bp, Homo sapiens
accaggctacttatgtaactgatgcaaatgaccacggaggagggatccttgagttttttcgggtactgatatagaagaagacaccttacagtgtcaaaggaagttgatggattcaccttggctggtaaacagctccagaacctggctgtgctgttattgtctttgtgcattatatgccttcattcaggggaaatgggcccttacactaagataatgttttccatatttaaatattggcatatatgaaccttagagattctgaagtttaaatcatttgttttggcaattacaaaactgagacttgctaacttgattagaaagtcaagcaatttgtagaacaccactcagctaattaatagcagtaaaaagactagatcctagatctttgatttttagttctaccattcactatatcactactagtgaatttttctgatgctttcttgagagtatggtctttatagtatgtcaacaattgtaaacttgcagctaaaatagctgatcatatccgtctacagggaggcactacacatttgygtgaatacttcctcttctatttgaaaagtgta

SEQ ID NO: 432986 - DNA, 597 bp, Homo sapiens
atcatccggaacagtggtccccgacctttttggcactggggaccggtttcatggaagacaattttttcatgggctgggtcaggggatagttttcagatgaaactaccccacctcagatcatcaggcattagttagattctcataaggggcatgcaacatagttccctttcctgtgcagttcagaatagggtttgcactccttagtgaatctaatgccaccgctgatctgacaggaggtggrgctcaagcagtaatgcgcaatggcttgcaactcacctcctgctgtgtggcctggttcctaataggccacagatggataccagtccacagccctggggttggagaccccttatctagaggacaggcttgtgttcttggcagggagttggatatgaacatacagatatatcccagaatttggagaaaacaaacaaggttctgagaaagaaagtaacttagagaggcttcttttatgtaggatggtcagggaaactccattgaggaagtgacatttatgctgttaccagaaggaagttatgtagagtggttggtgggggtgaaccagaaaagcatcttgggaagaatgaagagctaaag

SEQ ID NO: 432987 - DNA, 552 bp, Homo sapiens
tgaataaaaattcaactcattctattacaggatgtttttttaaccataagacacatctttgaatttataattgaaataatatgatggggtctagaaacctttatatcaactttgctgaatgatttataccatagcaaataaatggatatacataaatttattttgaaaactcaastttatcttcagttgctcacataaatattgagagcaaacatttttctaaaagacatttgtagactccctgagatatatgcttatttgtggaaaaacatatacagatataatcatttgtatctgcaaatattgtttataatcctttcaagttgcaagaaacattttgtgatttaatgtataatttggaaaattcttaatgctttaaattatttatttttcttttttagcaacaaatgagttggattctatgtttcattttaacgtgttaaaattagtttagtgcctacaggaaataataaacttttggggaacaaaatttatattgtatgctgtaaaggcataaagaaatagagccaaatgtagagagccatcaatggt

SEQ ID NO: 432988 - DNA, 572 bp, Homo sapiens
tctaggaatgactactataagcagagaattatatgttcaggaatcacaacaaaaaacaagaacaaatagagaaacaaaagctttcctactctttcatctaggacaagaataaatacacataaagtcaatattagtgaagtaaacaagcatcttctatatccattcatagtaccttcaattgattgatttcttaacagacaatcagcaaaattatcagtttttattagagattttagtagagaccgagcttaaacaaatawattctatggtgcttaactctatagtatttaaagattcaatatttatttcctctaaaaatgagtcaagtgtctgaaaggaaaaagccacctaactgaaacttcagtttctactatacagggtatttattataaaactgtaattacaatgcaattatattgaagtataaatgatcatcattcatttatttaagaatataatcaaaatttgcatacctggaagaaaccatccaccctccaaaatagggatttgctaatgtaggagtagaaggcaaaagttgagggtaactcaggtaacacactcatacgtattag

SEQ ID NO: 432989 - DNA, 564 bp, Homo sapiens
ggaagtaaggcaaagcctggaagcagttatgaggagactgaatgggaggatggagaaaggggatggtgatctggaccaagtgttggcagtgcaggtggaaagaaaggaaagactgacatagaattaagagaagtggctgcatggaaaagacaaagacattttagagaatgactttttttccccatgagcactgggatgggaaagagccaaattagggggtcrgaaatccagagttatgtttgggctgttattgatgtctgattttcattaggtggtagagaggtcaagaaatccgttggagataagaggctgaggcccattcagtaggtctcaactggagacataaacataggagtcattgcattcagatggagcttaaagctaagggactgcatgtgacagtgtaaataaacatgtagagagtagcagatgactggtttctgagccttgggaaacttcatatttggaagagacacaaggaggagctaggaaaagatagtgagaagaggtagccagtgaaaaaaagtagaactatactttgctttgaatgttgaaaagggttgg

SEQ ID NO: 432990 - DNA, 564 bp, Homo sapiens
ggaagtaaggcaaagcctggaagcagttatgaggagactgaatgggaggatggagaaaggggatggtgatctggaccaagtgttggcagtgcaggtggaaagaaaggaaagactgacatagaattaagagaagtggctgcatggaaaagacaaagacattttagagaatgactttttttccccatgagcactgggatgggaaagagccaaattagggggtcagaaatccagagttatgtttgggctgttattgatgtctgattttcattaggtggtagagaggtcaagaaatccrttggagataagaggctgaggcccattcagtaggtctcaactggagacataaacataggagtcattgcattcagatggagcttaaagctaagggactgcatgtgacagtgtaaataaacatgtagagagtagcagatgactggtttctgagccttgggaaacttcatatttggaagagacacaaggaggagctaggaaaagatagtgagaagaggtagccagtgaaaaaaagtagaactatactttgctttgaatgttgaaaagggttgg

SEQ ID NO: 432991 - DNA, 564 bp, Homo sapiens
ggaagtaaggcaaagcctggaagcagttatgaggagactgaatgggaggatggagaaaggggatggtgatctggaccaagtgttggcagtgcaggtggaaagaaaggaaagactgacatagaattaagagaagtggctgcatggaaaagacaaagacattttagagaatgactttttttccccatgagcactgggatgggaaagagccaaattagggggtcagaaatccagagttatgtttgggctgttattgatgtctgattttcattaggtggtagagaggtcaagaaatccgttggagataagaggctgaggcccattcagtaggtctcaactggagacataaacataggagtcattgcattcagatggagcttaaagctaagggactgcatgtgacagtgtaaataaacatgtagagagkagcagatgactggtttctgagccttgggaaacttcatatttggaagagacacaaggaggagctaggaaaagatagtgagaagaggtagccagtgaaaaaaagtagaactatactttgctttgaatgttgaaaagggttgg

SEQ ID NO: 432992 - DNA, 575 bp, Homo sapiens
tttatctcaggaaatatatcagtggactgaaaatgtcaaatcaattcaattaaatcagtaataacactttgctgtttatgtggctgttttttcttctatttttattgtcttagattgcatggatacaatcaaaataagttaatttgtatacaggatataaatggaccagagaatgtgtcttctattaaataataacaaataagaataccttttattttgtgatggtctttactatttactgagagacaagtattgttcaagttgccgkttttttttaattagctgacatatttcctgcttttatttgagttagaattcctgtaccaaacattttaaaaagagaaaaaaaattaaagaaagagaaaaggaatttggaaactactataatgtaaagtagcattatttatacaacaattaattttagagaagcaagagaccttagaaataatctatttcaacgcatctattttacaaaaaagaaaattgaaactcatagatatttagtgacttgtcctttgttacaccaaaaatgagggaacttggtctagaattcctccagcatattatgaggtatt

SEQ ID NO: 432993 - DNA, 558 bp, Homo sapiens
ggttagaactcagaggccattatgacaattaatgggctagtggagacacctggtctctaagaaggagacaccagcttcttcatgttttgatttctgccttgttctcttgtctgtcaccactagacacatactattttatagtaattacttgcatattttgtagaaaaggcagctgtgttttctacaaatatttcacaaatgttagtattgctctatgccaaggaacagaagacaaatttgtggaaaagatacatgtggcccctccccaggtgggatttcttgtgtaggccccatgcagtggagggacagagggggccagtgctcattttgaggacacgatagttcggactgtctgaggaaatcsacagtgtgtgtttaatgaccaaaccaacatggctttgaagaatacatatatatttttttttttgctttttttttttcattgcccaggctggagttcaatggcatgatctcagctcactgcaacctacgcttcccaggttcaaagaattctcctgcctcggacttctgagtagctgggattacaggcatgcacca

SEQ ID NO: 432994 - DNA, 558 bp, Homo sapiens
ggttagaactcagaggccattatgacaattaatgggctagtggagacacctggtctctaagaaggagacaccagcttcttcatgttttgatttctgccttgttctcttgtctgtcaccactagacacatactattttatagtaattacttgcatattttgtagaaaaggcagctgtgttttctacaaatatttcacaaatgttagtattgctctatgccaaggaacagaagacaaatttgtggaaaagatacatgtggcccctccccaggtgggatttcttgtgtaggccccatgcagtggagggacagagggggccagtgctcattttgaggacacgatagttcggactgtctgaggaaatcgacagtgtgtgtttaatgaccaaaccaacatggctttgaagaatayatatatatttttttttttgctttttttttttcattgcccaggctggagttcaatggcatgatctcagctcactgcaacctacgcttcccaggttcaaagaattctcctgcctcggacttctgagtagctgggattacaggcatgcacca

SEQ ID NO: 432995 - DNA, 558 bp, Homo sapiens
ggttagaactcagaggccattatgacaattaatgggctagtggagacacctggtctctaagaaggagacaccagcttcttcatgttttgatttctgccttgttctcttgtctgtcaccactagacacatactattttatagtaattacttgcatattttgtagaaaaggcagctgtgttttctacaaatatttcacaaatgttagtattgctctatgccaaggaacagaagacaaatttgtggaaaagatacatgtggcccctccccaggtgggatttcttgtgtaggccccatgcagtggagggacagagggggccagtgctcattttgaggacacgatagttcggactgtctgaggaaatcgacagtgtgtgtttaatgaccaaaccaacatggctttgaagaatacatatatatttttttttttgctttttttttttcrttgcccaggctggagttcaatggcatgatctcagctcactgcaacctacgcttcccaggttcaaagaattctcctgcctcggacttctgagtagctgggattacaggcatgcacca

SEQ ID NO: 432996 - DNA, 569 bp, Homo sapiens
ccatgatgtattgatgtattggctattttattaatagtaatatcaataaaaataatcattaagataactgataatattcaggacttcatatgtgctagatgctatgtttaatgcatacatttattcactcttctaattcttaacaactttataatgtatatgtatttcttattcttattttatagataaagaatctgaggcatggaaaatgtaggcaatttatttgagattacagagctaataagaggcagagccaatgtttgatctgaacaacttgattctaggatcattttggctgggaattttctgagagctgtgtgtgtgtgtgtgtgtgtgtgtgtgtgtgtgwgagtgtgtgtgtataaacatgagaccatattagtatatacacaaatgtcaatatatattttaaactggaatgttttaatagagtggcttatatgatagaaataagagaaatagaggaggatggaaagggacaaaaaaagggaaaagtaattaggaatattgaaaaacctaaaatgtagttctctccatattctggatactcctgcctttttcttccactt

SEQ ID NO: 432997 - DNA, 625 bp, Homo sapiens
cttttagtgatcatagtggctccaaaacagatgctttggtatatgtaatacccatttatcttataaagaaaataaagaaataataaaagcatttgctaaccatgttagatgctatagtaaatgtaaaaataaagggtctgttaatmtattaactgagcttaatatatgatgtgatataacagcagccttcaaatatgcggagggctataacagagatcatgatgaacagacttttattctggcttagaaagactagacacagaaattaaaggcataaattactctacaagcaaagcaatcttaacataacactcctttcaaggtagactatgaatatttccaccaataatatatttattaaaatagattccttttcatttgtctttttaagttaaacataatcttgcttgaatgaggatgagtataagatacctcagtcatgaccttgtagatcactgcatcagccagctttgtattcagctatcaaacaaaataaaatgtgatcactagtggttcaaatacattggagttctacaactaaagatctaaaggaatgaaatccatgactagtacaaagacataataatgccctaagcaacttacgatattttgatgtttcttttct

SEQ ID NO: 432998 - DNA, 627 bp, Homo sapiens
atcaaatagtaggtattcggtaaatgttccttctttactaaagatagagaaaccattttctgatgtacaaagggatgaagagctggcccaatatgaattttcccaaagaagttaaatgaaaaggatctcatgatccttttcaggatttattatttacgaatgttaatatattattttaatattttctatcttatgaaataattatttggtcaaaacataagacaattgataggaatatacagcatggaaaatggttaccaactagagctgcagggtatcagggaatgtgacaaggcagcaaaatgtttctacacatgtctgttttttcaggcattatctttcwtgagactatcaagtgtgtatttaaggagccattcaacttacttcagtgcatttgcttgcaaagggtgcaatgtgatgtttcctactggtagggtcgtatttcatatgtggtgatagtgttgctgaacaaataggaaatatccttgcctagactatattttatcatttcattatctagtggtaaaggaatgtgagttctatttacaaataaacattttgtcttacttttttctttgtgatctattttctccaagttgcataatgtaatgaattaataaagcttag

SEQ ID NO: 432999 - DNA, 635 bp, Homo sapiens
cattttgctacaagttctttatttagccttgcatacacgtttttatgattttgagctttcatctgtgaaaagaagagaataccatctactttgtaggatttctataatgattagataaaataatatgtaacagtatttaggacagtgccattcacatagtacccgcttattaaatagtaaacactgttgatagcaccaaatacactaataaaagatttcaccacttatgcaaacatcttttgatgattctttgttctttaatgatgatcgtaacctatcctagaggaagcaaagagctacaaaaacatacacttactaagggattaatataattaaatggtttttgctatctgaagtatattgcataaatcaggtatatatccctggatttaggtaaatgaaaacagacattttcataagaagcaaaaagataattaatatgggaacaaacctattctggaaaatgtttaaaaagagaatatgggtaaggaagcatctttctcagttgttcttaacccttgtttccatcataatcaccatcagagctttaagaaaataccagtrcacagatcacgttaccccacaaacctactaaatcagattttccagcgctggagcccagaaatagtcacctt

SEQ ID NO: 433000 - DNA, 575 bp, Homo sapiens
attaaacaatctccaaatattaaatatttattgtgcactggttataaaatactttatgcaaaaattttgtttgcttttcccagatctatttgactccactaagaatatattgttgcttttaagtaatacaggaaatagggtagagtacaaggctgtctacatacataaaacaacttaggtaactacatcagttcatttgttttgcattggacaagcacagtaatatttaaccatatactccagtctaaatggataggtcatgaagtagttaaatatgttatacaaccaatcttttgttgttgttgttgttgttgttgtttttgagtcagggtctcaccctgtcacccaggctggagtacagtggcaccatcacatctcactacagcctcaacacacactcatgggcgtagcctcccaagtagctgggactataggtgtgcaccaccytacccggataatttttgtattttaagtagagacgaggttttgcatgtttcccagactggattgcttggttcaagcgatccagctgcctctccctcccaaagttctgggattacaggtgtgaaccattg

SEQ ID NO: 433001 - DNA, 594 bp, Homo sapiens
gaaatttttattgagccagtgagtcacaaagctctctgcttagagactgcataggcatagtatactccctgatcttagaattgcttccactcattcaaagctttccagccccagaaatgactaaaatccagaacattctaaatatttgcttgtccttcttggtcttagtttaaatctttgtgctccaaagcctagagacagaaaacctctggatgacaacactcatttctgtcttgcaagtattatgtaagtgatttgactcactttgaactcatcattcagcctcctaaacaaaccaacaaacaagcaaaccccttgtaaaacttgtttcagctaataatacagacaaaatgttgggtgaataaaaatgaacatgggcccatgtagccgctggggccagtttggtgtaatcttgggagcatagttctaagtttagaattagacttctgyagaagtaatgcaattaaaaaaaaaaagaagaagaaagaaatgtgctatgactagttcactcatgaaatgttcaaatgagatgctatttaagagaacaaatatcttctggacaatttaaagtatctaaattgtttgtagaaagta

SEQ ID NO: 433002 - DNA, 572 bp, Homo sapiens
atttaatcagcttataaagtacttaatttgtattgcgtaattaaatacctggtgtaactgggataaaccgattttcgaacaagcacaactcttgtatgatccctccagacaaaaagatacaaggtggcttaacaggaagaagtcctagagaggaaaaagcctttgggaataacccaaaatggagacttagaatgaatttcatcctctcctgaccctcaaaaaattactctctcagtgaaaaggagggatagaaaaatctacccagaagcagagaaagatgacaaagaagaagcttctcatctcaatctggactctggatggaaaaaaaaaaaaaakaagtaatcacagtcccaaacttatgtgggtttgaactgccacagcctctgcagagataaaaccatactgaacacacttttacaatctaaattgcaaaacaaatgagaaagtaaagttgaggagaggtagatagtgtagcagtagatagaggtaaaagcctggctggagaatttgaactttattatatatccaatggattattatcatacaaatggtttacttgctataagagttat

SEQ ID NO: 433003 - DNA, 460 bp, Homo sapiens
tatttaacattttcacaaacagttcacaamtattccagttgctccacaatcttgccaacacttattttccagttttgttgtcactgtttttagaaatcatggcttgttaattaggtaaacttgtattgtgggggtttgttgtacagattatttcattatccaggtatgaagcttagtgcctattagttatttttcctagtcctctccctccttccaccttccattctccaccctccaataggccccagtgtgtgttgttcccctctatgtgtccatgtgttctcatcattagttcccacatataagtgaaaacatgcagtatttggttttctgttcctgtgttagtttgctaaggataatgacctctagctctacccatgtacctgcaaaggacattatctcatactttttttatggctgcatagtgttccattgtgtatatataccacattttccttac

SEQ ID NO: 433004 - DNA, 460 bp, Homo sapiens
tatttaacattttcacaaacagttcacaaatattccagttgctccacaatcttgccaacacttattttccagttttgttgtcactgtttttagaaatcatggcttgttaattaggtaaacttgtattgtgggggtttgttgtacagattatttcattatccaggtatgaagcttagtgcctattagttatttttcctagtcctctccctccttccaccttccattctccaccctccaataggccccagtgtgtgttgttcccctytatgtgtccatgtgttctcatcattagttcccacatataagtgaaaacatgcagtatttggttttctgttcctgtgttagtttgctaaggataatgacctctagctctacccatgtacctgcaaaggacattatctcatactttttttatggctgcatagtgttccattgtgtatatataccacattttccttac

SEQ ID NO: 433005 - DNA, 549 bp, Homo sapiens
agctactcagtaggctgaggcaggcgaatcgtttgaacccaagaggtcacaccactgcactcgagcctgactccgtctcaaagaaaagaaaaacatcagtaggattgaagtatgaaaagagccagggttttaaatgatagcttctctcacacaagagtgaagggaatrggttaagaacctctcccctactttaacactctattttaagcatcttaaaaaatattactttctttgctatccttgactttaataaatcataaaatgagactaaaacatgacccattctattgggccttcaaaaaacccatattttgttattggacattttgtattcaattagagaatctttactgaacatctccaggatggctagtcctgatctagatccccaagttctttaaatagtggagaggagctcaggctctgctttaatgagggtttttgtcaagaaaagtaggttatacaatggaaaacaacaaccaacatctcagagacttaacagaacaaaagttaatttcttgcttgtactacctgtccacaaggtttggc

SEQ ID NO: 433006 - DNA, 549 bp, Homo sapiens
agctactcagtaggctgaggcaggcgaatcgtttgaacccaagaggtcacaccactgcactcgagcctgactccgtctcaaagaaaagaaaaacatcagtaggattgaagtatgaaaagagccagggttttaaatgatagcttctctcacacaagagtgaagggaataggttaagaacctctcccctactttaacactctattttaagcatcttaaaaaatattactttctttgctatccttgactttaataaatcataaaatgagactaaaacatgacccattctattgggccttcaaaaaacccatattttgttattggacattttgtattcaattagagaatctttactgaacatctccaggatggctagtcctgatctagatccccaagttctttaaatagtggagaggagctcaggctctgctttaatgagggtttttgtcaagaaaagtaggttatacartggaaaacaacaaccaacatctcagagacttaacagaacaaaagttaatttcttgcttgtactacctgtccacaaggtttggc

SEQ ID NO: 433007 - DNA, 599 bp, Homo sapiens
ccacatcaatatttattgccttcttaacaagatgtctggagtaggatatttcagttttgatttatcagaattctgggtgaatatttagtgatttataggacttcttaacactgctacccagaaatgacacctcacttgcattcccattttattggtccaagcaactatgatgacaagactattcaggcatgaggagagacagccaaatcacattattaaaccaagttgtggctcatggctcacatgtcagagaacacaaggagaaagtgaagcgacatctacagtagagcaagggaaagactagggagaacaggataagggagagagtgaggaaagagcgagacaagaggtggtatatctgactctcttcttttatcagataagaaacatctttctaggaacacatgcagcagaagcatgctttcactcacttcttrttggcaataacaagtctacctggcactccctagctataagggaagttgaaaaaggaagtatctgactttttaaaaatttgttgtgaaaagagagaggagttagggaacccccattagataatttagtcaactatgacttccatattcctcccactcaatggt

SEQ ID NO: 433008 - DNA, 559 bp, Homo sapiens
ttcacttcattacccagcttcatcatcaaaactatactttaattcaaaattcaaaatattatgtcatccagtttatcaagaagcccatatagttttgatattttcttttgatttctgtatgaatttgtcatgaaacttttaatttctttacaaacaggtttctgattttgaacctttccaccttcaaatttcaccctcaccctcatcaccctcttcaaattcaaagcctcaagtcttgtcaatcttacctcaaaactatatctggatcctgttgatttttctccatctctttctttccattcttttttccaagcatcaagcatcattaattttcrttttgaccaatgcgctagctccctggctgatatccttacatcagttcttggatctccatagtacatgcatcatattatgcaaagtttttaaaggagagcttttaaaaatgtaagtcagattaatttttttttgaaaaatagcaaaaaaaaaggaataaaaatgtaagttagattttgtaactccttgcttaaaacttttgataatcttcccattgtgcaactcc

SEQ ID NO: 433009 - DNA, 559 bp, Homo sapiens
ttcacttcattacccagcttcatcatcaaaactatactttaattcaaaattcaaaatattatgtcatccagtttatcaagaagcccatatagttttgatattttcttttgatttctgtatgaatttgtcatgaaacttttaatttctttacaaacaggtttctgattttgaacctttccaccttcaaatttcaccctcaccctcatcaccctcttcaaattcaaagcctcaagtcttgtcaatcttacctcaaaactatatctggatcctgttgatttttctccatctctttctttccattcttttttccaagcatcaagcatcattaattttcattttgaccaatgcrctagctccctggctgatatccttacatcagttcttggatctccatagtacatgcatcatattatgcaaagtttttaaaggagagcttttaaaaatgtaagtcagattaatttttttttgaaaaatagcaaaaaaaaaggaataaaaatgtaagttagattttgtaactccttgcttaaaacttttgataatcttcccattgtgcaactcc

SEQ ID NO: 433010 - DNA, 528 bp, Homo sapiens
gtaaatgaggtccccaaaaggagccaggagcagagatgctacacttaaacaagggaattaggtaaaagtctacatactgaattgtraaaggatcttagcccttcttccactcaccttcaagaacattaccagccaggtttattacatctccaataggagattggaagattcctttctgggaaaattgaccatctcagtaaggcctccatgaaacaactcagccagattacactggaatgaagatcacgggtagacaaatcttgtccttttagacagagcttcttgataatttttaatgcctcattcttaaaaggaacagataggctgtgtgcagtggcatgtgccactcagctactcaggagtctgaggtgggaggaatagccattgcattccagcctgggcaacatagtgagaccccatctctataattaaaaaaagaaacatttaaaaatggagcagataagccaagaatcaccagatatttaaggaagaccttatataggagagacaaagaactcccccgaccat

SEQ ID NO: 433011 - DNA, 536 bp, Homo sapiens
gaccagtctgacctcaaatttaccagggagcagtttttccccatcctaataagcctgagggtactgcaggagaccagggcttatttcagtccttatctcaactgcataagacagacactcccagagtggccgtttatagacctccccccaggaatgcattccttccccagggtattaattattaatattccttgctgggaatagaatttagtgatatcttccctacttgcaggtccgtttataggctctctgcaagaagaaaaatatggctctttttgtccratcccacaggcagtcagaccttacggttatcttcccttgttccctaaaatcgctgttattctgttcttttcaaggtgcactgatttcatattgttcaatcaatatttacatgttttatgattaatttgtacagttaacacaattatcatagtggccctgaggtgacatacatcctcagcttacgaagctaacaggattaagagattaaagtaagacagatgtaagaaattatgacagtattatttgggaactgg

SEQ ID NO: 433012 - DNA, 536 bp, Homo sapiens
gaccagtctgacctcaaatttaccagggagcagtttttccccatcctaataagcctgagggtactgcaggagaccagggcttatttcagtccttatctcaactgcataagacagacactcccagagtggccgtttatagacctccccccaggaatgcattccttccccagggtattaattattaatattccttgctgggaatagaatttagtgatatcttccctacttgcaggtccgtttataggctctctgcaagaagaaaaatatggctctttttgtccaaycccacaggcagtcagaccttacggttatcttcccttgttccctaaaatcgctgttattctgttcttttcaaggtgcactgatttcatattgttcaatcaatatttacatgttttatgattaatttgtacagttaacacaattatcatagtggccctgaggtgacatacatcctcagcttacgaagctaacaggattaagagattaaagtaagacagatgtaagaaattatgacagtattatttgggaactgg

SEQ ID NO: 433013 - DNA, 622 bp, Homo sapiens
tgtataaaagcccatgtgtaaatatccagggaaagtacatttttgtggttggtgaagtggtatttgtgttgtattttcagaagcacagattataatgatttggtggatatgctaaaaagaagtatttgcaattagcaaaagcagaatgcatccagagactcaccagtataattcaagtcaattctctaggtatataaactaatcatttacttaatcaccccaaactcttatctagscttgctcacgtatacctgataatactgttgaacacactgaggccctttactgtaaacagagtccacaaataatgaaattacttttccaaggctagcagacactgccctgattttaccttctcttatacatggtctctaataacaaaagggaggaaatatttttggtgggaggaaagggggcaagaaatggatataatttctccttttctcatgatccatagtgaactaaaccttttctaattaaaaaaaaaattacatccctcttgggggaagatttacacacaagaaattctattgtcaaagcatgtttttttcttatattaccaaaaataaaaactagaagtagtttgatttattcttactactttattttatatgctcaaact

SEQ ID NO: 433014 - DNA, 622 bp, Homo sapiens
tgtataaaagcccatgtgtaaatatccagggaaagtacatttttgtggttggtgaagtggtatttgtgttgtattttcagaagcacagattataatgatttggtggatatgctaaaaagaagtatttgcaattagcaaaagcagaatgcatccagagactcaccagtataattcaagtcaattctctaggtatataaactaatcatttacttaatcaccccaaactcttatctaggcttgctcacgtatacctgataatactgttgaacacactgaggccctttactgtaaacagagtccacaaataatgaaattacttttccaaggctagcagacactgccctgattttaccttctcttatacatggtctctaataacaaaagggaggaaatatttttggtgggaggaaagggggcaagaaatggatataatttctccttttctcatgatccatagtgaactaaaccttttctaattaaaaaaaaaattacatycctcttgggggaagatttacacacaagaaattctattgtcaaagcatgtttttttcttatattaccaaaaataaaaactagaagtagtttgatttattcttactactttattttatatgctcaaact

SEQ ID NO: 433015 - DNA, 634 bp, Homo sapiens
aagtctgtctggctacctccaaaggtatactcttgccaacagggaatatatattaaaaaatattagatgcaaggcatccaggttcatgaattgaaaacktaatacttttaaaatgtcaatgctatgcaaagcaagccacagattcaatgtaatccctatcaaaatcccaataaggttttgttgaaatagaaaaaaaaactatcctaaaattcatatgaaacctcaagggaccccaaatagccaaaacaatcttgaaaaaaaagaatagagctggaagtctcacattttctgaatataaaacttattacaaatctacagtaatcaaaacactgtggcatcaacatgaagacaaacataaagaccaatggaatagaagagagatcccagaagtaagccctcacatgtattgtcaaatgattttcagcaagggtgccaaaccattcaatggggaaaggacagtcttttcaacaaatggtgctgggaaaactggctatctatatacaaaagcatgatgttggaccttcagctaacggcatatacaaaaattaactaaaaatggatcaaaggcctaagcataattactaaaactataaaactcatagaagaaaacactggaagaacgcttcaccatata

SEQ ID NO: 433016 - DNA, 526 bp, Homo sapiens
gggaatcctcctaccaccacctattaactcctaggtggccccagacaaactaccgtgcgtttctatgtctgttttctcatctgtaaagagttaatgaagcaaacagtagggctggtrggaagattagatgagatagcagaatgcatgtgtttgggacctaataggcactccaaaaccaaaaaacaaaaaccacaaaacactggtgtagtcccttctgtcatgtccccctaaaatcagttgtttttattatatgacccagaaccagctctttctccatctgtaagagaaaaggggtagacctgaaatactacctaagagaggagccctcacaacttcaacatccagtatctaaggaacattggctgccagcagatttactgctccatgctcactggggaggcctaataacaaactagtttaacaacaagctaactgaggatgagccacgagaatttgaaaaatttttaaaaaatgaaggacaatatgtcaaactgacaaagcagtagtactcccaagaagagcggtg

SEQ ID NO: 433017 - DNA, 563 bp, Homo sapiens
gtctaaataacactttgttacagtcatcctctataattttatgagtttacctattaaatacattgggatagcctttttaaaaggraaaaatgggattttagaactgcagacgtgaaattatgtagataaagtagcaaaacgtcttgtttaataattactttcctgaaaattctccacagtgtttgactcttccttctcaaaacatctaaccaaactgaaggaacagaaggaatgatctaaacacccacagtatctcctacttctgaaaagtgtcttgtacagagtacatatactcagtggttacatgacaaaccaggatggactgcaaactacaaaagagcggaaactaacaatatatgtaattaggttacacacacacacacacacacacacacacacacacacgcacacatatttttttgagacagagtctcactctgtcgcccaggctggagtgcagtggtgcgatcttggctcactgcaacctctgcctcccggttcaagtgattctcctgcctcagcctccctagtagctgagattacaggtgcccaccatcacacct

SEQ ID NO: 433018 - DNA, 512 bp, Homo sapiens
caaaaccaaacactgacatcaggactgcagcaacagaaacccaggcatttatggcagaacaccacgcaaggagaatcaggcagctcaggcttgagaccaaagctgcccttgcagttaagtgtttttaaaggmggggaggcagaggtcacaggccaagtcatcaatcaatgaccaaaaaaggcagaacatctccaagtgggggtccacaggttgtaggtagagttaaagattttctgatttgcgataggttaaggaaggaacatttgtctagactgggggtcagcagaaaagagtgttagctctggcctgtgggcatgacctccaggctcctcaagaagaaactgagagcaaggaaaggcaggcagacctcactcctcagtcccccttatatggggtccacgtaccagcaggtccatttgttggggggtgtggttttctgaaaaacaactcagggtcatatgttaacatggtatcccctgtgactttaacttccttggctattgttttaagct

SEQ ID NO: 433019 - DNA, 604 bp, Homo sapiens
aaaaacctccaccttgatggtattagtagttctcagaagggcaaagtcaggggaccctatgcattggtttcagggcctgagctcagtgattgttaaggcaagtcttgaaaagtgaggaattgattggaactggcagagtctgacaacagagtttaggattaaagggcacagcaaagggagggtcttaaatgaggtgttggtgagaagactsttgagttgagccttacgttccaagaagagggactctgtggagcactctcccaacttcctgctctgcttgcttcttgggaggtttgtttctgcttggtcccaatactgcttaacacgtgaacaggaagtcctgttggtttctgctctcagtattaatcagaaggaaagcttagaagcaagtttgaatccatgcaaacagaagtatattcagaaagagtaaatgaaaatccatatggtcaagaggaaagaaaaaatcaagcactatgcagttgcctccacaatcaatggggaagcagagtctgaaagttttcaggtttctctaaattagctactaatttttattttaacataaaactattgcatgattaataatataacccaatctattaagcac

SEQ ID NO: 433020 - DNA, 604 bp, Homo sapiens
aaaaacctccaccttgatggtattagtagttctcagaagggcaaagtcaggggaccctatgcattggtttcagggcctgagctcagtgattgttaaggcaagtcttgaaaagtgaggaattgattggaactggcagagtctgacaacagagtttaggattaaagggcacagcaaagggagggtcttaaatgaggtgttggtgagaagactgttgagttgagccttacgttccaagaagagggactctgtggagcactctcccaacttcctgctctgyttgcttcttgggaggtttgtttctgcttggtcccaatactgcttaacacgtgaacaggaagtcctgttggtttctgctctcagtattaatcagaaggaaagcttagaagcaagtttgaatccatgcaaacagaagtatattcagaaagagtaaatgaaaatccatatggtcaagaggaaagaaaaaatcaagcactatgcagttgcctccacaatcaatggggaagcagagtctgaaagttttcaggtttctctaaattagctactaatttttattttaacataaaactattgcatgattaataatataacccaatctattaagcac

SEQ ID NO: 433021 - DNA, 540 bp, Homo sapiens
tgtggcttagtgtctgatatgttctggggaatatgccatgtgaacaaggaaagaatgagtgttctgtcctgcaaagtgttttatacagattygcaaggtcgtgtgagttaattcctgttcgtgtctcctgttctttctgtttgtctgcctagttgtcacaattaggagtggagtatcagaaatatttacttttagggaattgtctatttctttcttttattttgtcagtgtttacttcatgtgttttggggctccgttgttaagagtgtgtacatttataattgttatatcttgctgaactgttggccattttattataaagcttctgtcactgaaacaccaggggttccatctagaacctgctgctccacacacagaaagccaatcactgagacgattattgccaaggaagagggcttttttaaaaaattattattatactttaagttttagggtacatgtgcacaatgtgcaggttagttacatatgtatacatgtgccatgctggtgtgctgcacccattaactcgtcatttagcat

SEQ ID NO: 433022 - DNA, 540 bp, Homo sapiens
tgtggcttagtgtctgatatgttctggggaatatgccatgtgaacaaggaaagaatgagtgttctgtcctgcaaagtgttttatacagattcgcaaggtcgtgtgagttaattcctgttcgtgtctcctgttctttctgtttgtctgcctagttgtcacaattaggagtggagtatcagaaatatttacttttagggaattgtctatttctttcttttattttgtcagtgtttacttcatgtgttttggggctccgttgttaagwgtgtgtacatttataattgttatatcttgctgaactgttggccattttattataaagcttctgtcactgaaacaccaggggttccatctagaacctgctgctccacacacagaaagccaatcactgagacgattattgccaaggaagagggcttttttaaaaaattattattatactttaagttttagggtacatgtgcacaatgtgcaggttagttacatatgtatacatgtgccatgctggtgtgctgcacccattaactcgtcatttagcat

SEQ ID NO: 433023 - DNA, 512 bp, Homo sapiens
caaaaccaaacactgacatcaggactgcagcaacagaaacccaggcatttatggcagaacaccacgcaaggagaatcaggcagctcaggcttgagaccaaagctgcccttgcagttaagtgtttttaaaggaggggaggcagaggtcacaggccaagtcatcaatcaatgaccaaaaaaggcagaacatctccaagtgggggtccacaggttgtaggtagagttaaagattttctgatttgcrataggttaaggaaggaacatttgtctagactgggggtcagcagaaaagagtgttagctctggcctgtgggcatgacctccaggctcctcaagaagaaactgagagcaaggaaaggcaggcagacctcactcctcagtcccccttatatggggtccacgtaccagcaggtccatttgttggggggtgtggttttctgaaaaacaactcagggtcatatgttaacatggtatcccctgtgactttaacttccttggctattgttttaagct

SEQ ID NO: 433024 - DNA, 609 bp, Homo sapiens
catgccaccatgcacggctaatttttgtattttttagtagagacagggttccactatgttggccaggctggactctcctctccttttcaaaatcccatagcaaatacrttgttatgctcaatattcctccacagatatttgaggttctgttccttttcctttaacatttttctttctgttcttcagcttggataattgatctttcaaatgtgtagttccctctgtcataacaaatctgctgttgagcccctcttgtgaattttcatttcatattgtatgttcatttccatccagttacttcttatgggttctatgccttttcttacattgagtcattgtcatcatgttttccttttattattaaatacggttttctttagtctgtgaacatatttgtcactgttgcattgaagtcttttttttactgaatccaacaactgtgcccctgccctgcccccgagacagtttctgttgactactttttttttttttttttttttaaactaggtatgggtcatgctttcctgtttctatacctggctagtattttttgttgtggttgaaaactaaactagacaacttgaatgatatagcatagcaatacaggat

SEQ ID NO: 433025 - DNA, 609 bp, Homo sapiens
catgccaccatgcacggctaatttttgtattttttagtagagacagggttccactatgttggccaggctggactctcctctccttttcaaaatcccatagcaaatacattgttatgctcaatattcctccacagatatttgaggttctgttccttttcctttaacatttttctttctgttcttcagcttggataattgatctttcaaatgtgtagttccctctgtcataacaaatctgctgttgagcccctcttgtgaattttcatttcatattgtatgttcatttccatccagttacttcttatgggttctatgccttttcttacattgagtcattgtcatcatgttttccttttattattaaatacggttttctttagtctgtgaacatatttgtcactgttgcattgaagtcttttttttactgaatccaacaactgtgcccctgccctgcccccgagacagtttctgttgactrctttttttttttttttttttttaaactaggtatgggtcatgctttcctgtttctatacctggctagtattttttgttgtggttgaaaactaaactagacaacttgaatgatatagcatagcaatacaggat

SEQ ID NO: 433026 - DNA, 468 bp, Homo sapiens
gccttagactaggagagctggaagcacctccaccagtagctgggcgtggttttccaacctctgctctcaagcaattcaaccccttccagcagtgaagttcctggtttccatggctaaccccattctagtagaagcacttcatggaccaagctgatggatggcttggagcagcccagggcaagaacaccacagactcccactgttactactcagaatttagcaatttttcataaataacacattttgatatattgctggctgytggtcagtttgagagcctggctatggctgtgtttgtcagttttgtccagttgtttcctgggcatgagatcggcctgcctcctgactgccctagcagaagccgtgccaggatactatctaagcgctgggcgtgcatttcccaacatgcagtaaatatggacaaagaatgtgttgatgcccacacatggcttgtggttaggttgagaa

SEQ ID NO: 433027 - DNA, 517 bp, Homo sapiens
tttggttcaggcactcgcctgagtaagttcctttgtttaaaggcattcttttcttaaaatatgaatgataaacagagaatcacaaaaatgaaattgcttacctttgtgtttccttcctccagtttcacatgctgcagaattacacaagtggttatttttgcaaaagaayttttttcgctcgcagaaaaaaagcaaatgcagcaagaaatatgtcttcttgagccaaaaaatgggttcttaggccttttagaaagtgccagcaaccatgctaataattaatgacgtttaaatgcttagttctgcaccagcaatattttcaagaatcccaacctcttagtttttcttgatgctagagctacacttgtacagcaaaaaaaaaaaaatacagtcttcctttatcttagtaaagaggtgcattgcactgttcgcttggtgcctagattgaagtcgatgtctgtatccatttttggaagctcgagtttttgagcatatgctacaaattctggcctcacaggtc

SEQ ID NO: 433028 - DNA, 517 bp, Homo sapiens
tttggttcaggcactcgcctgagtaagttcctttgtttaaaggcattcttttcttaaaatatgaatgataaacagagaatcacaaaaatgaaattgcttacctttgtgtttccttcctccagtttcacatgctgcagaattacacaagtggttatttttgcaaaagaatttttttcgctcrcagaaaaaaagcaaatgcagcaagaaatatgtcttcttgagccaaaaaatgggttcttaggccttttagaaagtgccagcaaccatgctaataattaatgacgtttaaatgcttagttctgcaccagcaatattttcaagaatcccaacctcttagtttttcttgatgctagagctacacttgtacagcaaaaaaaaaaaaatacagtcttcctttatcttagtaaagaggtgcattgcactgttcgcttggtgcctagattgaagtcgatgtctgtatccatttttggaagctcgagtttttgagcatatgctacaaattctggcctcacaggtc

SEQ ID NO: 433029 - DNA, 536 bp, Homo sapiens
tgttccctcttctggaaatgggggtagttatagaatgtccatgtcacagggggttattacgtatttcatggtaagcttagtccctgtgcttccgatattattcatctgtcatgcactagmctctgtcttacagagttaaagaagcacccacttgtggtgtctcatccaggagagttttatgcatcagagcaagtaaggccggtgccccaggtgtacccactgggcactcacctctgcaggccccgagctgcttctggctgacacctgtggcctttttcctggggattcttttccagcaaggggagactgctctgcccatgccagggcaagctaagggccgagaacgaatggcccacgagcagcccttggccagtggcgggcaggacgttgctgggaagatgcccctgtcctgatagctgtgagtgaatgtcctatacagtcccctagacgttcccacagggctgagccccagccactggcagcagcaactggcttaaccacacatacccctcaccttctttctgttccctaccttt

SEQ ID NO: 433030 - DNA, 572 bp, Homo sapiens
ctgcctgggggctgggacctgaggctgtattgtccctgtggtggagcatggatgttcttagttttcagttttcttcagaatgaatccggatccaaactttaaaatctgtagctcatgaagaacagcttctacttcaaagaaggccagtcacgagggaacatagagagttgggagatgtcagagttgagacggagactaaacgggggttggcatatgctggctctcatgagctacgcaaaagcctttggtctgtgccccgggagctgggtcactgaagaattcctgcagagctgtcacagaatcagttccccatctgaaagaccctgtgactgctgcamtagcccagtaaggatgtggggaagcaactaggaaatcgttgaagtggcctgggtgagaggatggtagcttggtccagggtgacaagggggaagaatcagtaggacttgttgatgctttgattttcatggaggaggtggtgaacagatcccaggtgtggggcaaggccaggtgagccgcggcagggctgttcacagacgtggtgggtgaggagccagcagagggtctgtgcgtgt

SEQ ID NO: 433031 - DNA, 585 bp, Homo sapiens
ccgtgaatgtggcctgcagaagagtccccttgcctgcacctgcttagtaggaaggtggcagcttcctcctttggctgctgaaggtctgtgggtgtgggggagccttccctgctagagataagaaactgagcagtatcrggtgtgagcaaggcatctgagctaggccgaggctcctcctccatttaaccagaagagaagcaggcagcaggggcctcctgcggccatctgtttcctcctgtccaggacatgctaatgggtaccatttgcccagaatccatggtcccactcaaggagctcatctccgagaagtgctggtgggacagccaggaggtgcgctgttccacaacccaggaacctgcgcagggaagctgccttcctgcagggaagcaccctcagtggatacaacagtgacctctcagaagagcctggggcccaagaggaccactgcaggccaaactacgaagaagtgttctggatctccccaggtacctaatgtggtcttaaaagcataaaccaataaaaaaagaaatgaaaagtaaattcctgaggaaaagagaagataaaacatagataagaaaggtgaga

SEQ ID NO: 433032 - DNA, 328 bp, Homo sapiens
caaatgaaaacaaagatagcacaagagcatgagttaagcaagcccctcctgtgcctcttagtaactgtaggactttattttataagaataaaakctgttgaatgttgcctgtgtccctgtactaaatgtgcactatccaacattcctgtgagttagacatatagtgccctttctacagaagacactgcctttagcaaggtgaagaggtctgccctgtatcacatagcccttgagaggcagagccaggtttggacatcaggtcctcttaggtctacccagagcctgccctcctgcagcaatgtggagcatgccctcaaaggcctgcttg

SEQ ID NO: 433033 - DNA, 560 bp, Homo sapiens
aggtgcaatatgagacgctctaagctccttgttctgagttacaaaacatgacttctgctttataaagctgctttagtccttccaataaaggtgactatatcatcaagggaagccaaggagtgcatgccacaaagagttaaatgctggacaaacaaaagttaatagtgtttgcagaatatgatgcatgttggcatttactgggaagtgcagctaaaagcagaagaatttgccaaatagctcaggaaagtaccacagaattctcaaagtcaggggagttcaagaagagcaaactgcaycatgaagaattctcagtctagtacttccagctggcttttcagagaaactgtttagtctcagcaacacttaagtcaagagagtgaaacacaaattataaccttaacctaacagaaaatgtgcataaaacctcagtattctttaatatgtctcaaaattgtattttcaagcccagagctgccacagagtcaagatcaggtgttcttgagatgtcaccatgatactcagagtaactgctcaagtttatcaatgattcagagcctcct

SEQ ID NO: 433034 - DNA, 571 bp, Homo sapiens
ccaaatagtgaaagcaatcttgagcaaaaagaacaaaactggatgcatcacactatctgacttmaaaatctattacaaagttgtagtaatcaaaacagcatggtaccagcataaaaagagatacattggctaatggaacaaaataaacatcctagaaatttacccaccaatttatagtcaattgttttttttgatgaagatgccaagagcacgcaatggagaaaggcaatcttttcaataaatgctgttgggaaaactggttctccacatgcagaagaatgaaattggacccttatctcacatcatatacaaaaatcaattcaatttggattaaagactaaagagaaaggcctgaaactataaaattactagaagaaaacataaaggcaaagttctacgacatttgtctgggcaaagatttcttggatatgaccctaaaagcacaggtaataaaagcaaaaaataaataagattgcatcaatatggcctctgcacagcaaggtaaacaatcagtagaatgaagtggcaatgcacagactgggagaaaatatttgcaaaccatttgtgggat

SEQ ID NO: 433035 - DNA, 584 bp, Homo sapiens
ggactgattggtgaatccatggcttaacactggctaacctgacagataagtgagtgtcagcagcacctcaaaaaggctgacccattgtggttgcagctggtcttctgcctggcaggatttctaggtcttcagcaagacttggttcctggtttcaaagagtagagaggcatgtccgtaaggaagtggagtctgttggaaacaaactcagacggactagtcaatatacttagtgtatttcctaactgttttatatgtgacttagcttctgtttcaagggaggaaaaatcctcaagtgacagggagtctsggagtcagggaaatggtctcccatataatatttcaaaggagctaagagccaatccacttctggcagggctagccatatcctcagcagggcaaggggaaagttcttttcccagggaagatttgtctcttggcaaattttagaggcgtctttaatgtcctattcattagagttcttaggagtccatatcaaggaattattttctctattagagcttttacaacttcagtagatttctcaggcctggcggcataagcctcaacccagcctgtgtaaagat

SEQ ID NO: 433036 - DNA, 586 bp, Homo sapiens
tgtctcttggcaaattttagaggcgtctttaatgtcctattcattagagttcttaggagtccatatcaaggaattattttctctattagagcttttacaacttcagtagatttctcaggcctggyggcataagcctcaacccagcctgtgtaaagatatcaaccaaaaccaacaaatatcaaaaacaatccaggggccaggggcattatggtgaaatctgattatgagacttatctaggattagtacttctccattgagttccttgtttaaaaggagctttcgtgccttccaggagctttgggttatttttcacgcagatagggcaactttggactatggtttgtattgttcattgcaagtcaggcccaaaaagataagactgtatccagtgtagagtagccttgcacccataatgagtgttttgatggattttctcaagaatcagtctaatcaaagtttttggaaggggaatttttatttctttaagccactgatggttggcatgtttagaaaacccccattcctcatctctcttaagatcagcctccaaatatcttgggcaatgggtctccaaacagagtggga

SEQ ID NO: 433037 - DNA, 462 bp, Homo sapiens
agagttttcagtacctagggggtatttagaaggacacgttttgctaatacatgaagaaaaggagatttctccaggttactacgtactttcttgcttcagatttatgactaaggaagactactcaagttttttttyttaataatgataattgttcagttcccacctatgagtgagaacatgtggtgtttggttttctgtccttgcgatagtttgctcagaatgatggtttccagcttcatccagaacaatgagaacacttggacacagggtggggaacatcacacactggggcctgtcatggggtggggggagggatagcattaggagatatacctaacgtaaatgaggagttaatgggtgcagcacaccaacatggcacatgtatacatatgtaacaaatctggacgttgtgcacatgtaccctagaacttaaagtataataataataataaaaaataataa

SEQ ID NO: 433038 - DNA, 462 bp, Homo sapiens
agagttttcagtacctagggggtatttagaaggacacgttttgctaatacatgaagaaaaggagatttctccaggttactacgtactttcttgcttcagatttatgactaaggaagactactcaagttttttttcttaataatgataattgttcagttcccacctatgagtgagaacatgtggtgtttggttttctgtccttgcgatagtttgctcagaatgatggtttccagcttcatccagaacaatgagaacacttggacacagggtggggaacatcacacactggggcctgtcatggggtsgggggagggatagcattaggagatatacctaacgtaaatgaggagttaatgggtgcagcacaccaacatggcacatgtatacatatgtaacaaatctggacgttgtgcacatgtaccctagaacttaaagtataataataataataaaaaataataa

SEQ ID NO: 433039 - DNA, 570 bp, Homo sapiens
tttcagagtgaacatgaagatttgaaccttctgatttgcatgattttgtggggttttcttggtcaagcgaatagtggaccatttttacagatcacttcaggccactcaggaaagagcccatcatcctttacacagttctcacyttctaatttgaagtgataccatatatacatgtaatgtgtgtgtgtataaatacacaatgtatatatatatgctatatcaacaaaaaagcttttttgatttgttttggttttatatttgtgtgttataaactaaattgtatcccaccttcaaaatttgtatgttgaagctctaactcccaaagttagggcctttgggagattattatgtttatatgagataatgagattagggacctcatgatgggattagtgcccttataagaggaggcaacagagagcttggtctctccctctctctgcaatgtcaggaccaagtaagaaggcagccacgagcaggccaggaagagattccttattaggaacaaaattggccagcaccatgacctcagacttcccaagaagcctccagaactatgagaaatacatt

SEQ ID NO: 433040 - DNA, 572 bp, Homo sapiens
gctggaaaagactacatgaagatgagctcttagtagatgactgcacagtaaaaaccatcttcttgaccacgagggctgttaggctgcaggtttgaaaaagggcttgtggtatattctgtccttagggataaagaggggtgggcatgggggtgatgtaagaaccagaattgatgcccagatcttggaggaggatgtgaaggygcctaggtctgtctgaagctatggatagggctctcacattgtgggtaccagtcttgtccagagagtcacagtggactctggagcttcagaaattcagaggacaaaagaagactgatctcataattggctaggtttccctagtttgcctgaattcatgtgacgaaaaagaaaaatataggagaaaaaaagataaaagaaaatgaaagtgggtagaagacaatacttttttctgaaattcctgaaacaatattttaaggatgaaaataaaattgagctccatttttaagggtttagggaatgtctctcttgaccaaatggcttttgttttgttctgtttcatttggtttttaatataatggacttcattccac

SEQ ID NO: 433041 - DNA, 574 bp, Homo sapiens
aagtgaatgactgatatcctaataaacataataaagatgtccatgtaacctaaaatgtggccaacctgatacttatgctctttcctaagttaattttccttaatgattggttcaaatgaacaggagctgctggtggcttgacttgtgtccatggttctgttcctttgttcaaggtttctgggctktcagggctctgctatcacaggtggcagtgatgtcttattttacttgggaagtgctttgcacaaaacttgtgaacattctcagaaagtaacagtgagcagtgccttgcatgggctatacaacaaaacagagtttggggtgggagtgaattgatgaggaaacctttcttttgtgaacacaccgatgaatttcaggagacttcaatcaacagcaaatgtctcaagccaaggtgctgcattgcctgcccagcacactgtcacggagcatgcccttctgggccactcccacagccttctctgtcagtcactgttgctgtgtcttgtcaagagcagagagcccttgcctggtcacttaacatgctttgatttggcagtcacagaataggttgcaa

SEQ ID NO: 433042 - DNA, 574 bp, Homo sapiens
aagtgaatgactgatatcctaataaacataataaagatgtccatgtaacctaaaatgtggccaacctgatacttatgctctttcctaagttaattttccttaatgattggttcaaatgaacaggagctgctggtggcttgacttgtgtccatggttctgttcctttgttcaaggtttctgggctttcaggkctctgctatcacaggtggcagtgatgtcttattttacttgggaagtgctttgcacaaaacttgtgaacattctcagaaagtaacagtgagcagtgccttgcatgggctatacaacaaaacagagtttggggtgggagtgaattgatgaggaaacctttcttttgtgaacacaccgatgaatttcaggagacttcaatcaacagcaaatgtctcaagccaaggtgctgcattgcctgcccagcacactgtcacggagcatgcccttctgggccactcccacagccttctctgtcagtcactgttgctgtgtcttgtcaagagcagagagcccttgcctggtcacttaacatgctttgatttggcagtcacagaataggttgcaa

SEQ ID NO: 433043 - DNA, 574 bp, Homo sapiens
aagtgaatgactgatatcctaataaacataataaagatgtccatgtaacctaaaatgtggccaacctgatacttatgctctttcctaagttaattttccttaatgattggttcaaatgaacaggagctgctggtggcttgacttgtgtccatggttctgttcctttgttcaaggtttctgggctttcagggctctrctatcacaggtggcagtgatgtcttattttacttgggaagtgctttgcacaaaacttgtgaacattctcagaaagtaacagtgagcagtgccttgcatgggctatacaacaaaacagagtttggggtgggagtgaattgatgaggaaacctttcttttgtgaacacaccgatgaatttcaggagacttcaatcaacagcaaatgtctcaagccaaggtgctgcattgcctgcccagcacactgtcacggagcatgcccttctgggccactcccacagccttctctgtcagtcactgttgctgtgtcttgtcaagagcagagagcccttgcctggtcacttaacatgctttgatttggcagtcacagaataggttgcaa

SEQ ID NO: 433044 - DNA, 574 bp, Homo sapiens
aagtgaatgactgatatcctaataaacataataaagatgtccatgtaacctaaaatgtggccaacctgatacttatgctctttcctaagttaattttccttaatgattggttcaaatgaacaggagctgctggtggcttgacttgtgtccatggttctgttcctttgttcaaggtttctgggctttcagggctctgctatcacaggtggcagtgatgtcttattttacttgggaagtgctttgcacaaaacttgtgaacattctcagaaagtaacagtgagcagtgccttgcatgggctatacaacaaaacagagtttggggtgggagtgaattgatgaggaaacctttcttttgtgaacacaccgatgaatttcaggagacttcaatcaacagcaaatgtctcaagccaaggtgctgcattgcctgcccagcacactgtcacggagcrtgcccttctgggccactcccacagccttctctgtcagtcactgttgctgtgtcttgtcaagagcagagagcccttgcctggtcacttaacatgctttgatttggcagtcacagaataggttgcaa

SEQ ID NO: 433045 - DNA, 504 bp, Homo sapiens
tttaatgttgcattttgctgatgcagcacttcctcaggattaactgggctgccctctcatagtcaacctgcacaagagccaccacccaatctttgtagccgtcactcaacattgagaacatcctgaatagccagacttgtcaattctccaagggaaaccaagaagcaacactggcatatgataaatagacctttatgctattggaagaaaaaaaaaacacctttctctgtattttcaatttcagrggaaagaggtaaagccatgattctcctgggcatttaatcaacaaacctatatttaatcgacaactaatatgcaagctccagggcctctatcaaatttcttaagagtagcatgaagctcctgatgtcttcctgccttctcatcagtcacattaatggtctccactggaaacacagctcctgactatagactaagctgtggcccagttagttgccagggtaccattagagcaggagaaactctctttcccagggcttctct

SEQ ID NO: 433046 - DNA, 569 bp, Homo sapiens
acatcagaacccaaacacagtgtatactgtcagtgcaccttgaaacttaaaaaaaaaaaaaagccttaaaatgaatgctatamtcttcgactgaagaaagccttcgatcccaaacttttacattgtcttggggtgaccttttctcatgttctctctcagcattcctcagtctttcaaaacatggctagaaaacacaagccttcctagttacggtaagttcatcctactgagaaatccaacttttttcaaagcgaaaataagccatgaattcaaccattcagccagacttggagattatgaagattcctggctcttgggctactacttacttgccagaaatatcaaaagacatcagggtttgttatccttaacatacaacctatttgattcaaagacactttgagaagtagtcatgcacacaatgatcatatcctaaatcctatctatgttctggacagacgctggacagcattgcagcaagagcctatgacagagtctttttccatcctgaagtcaggatccactggataaagtttatcaagaggacttcgtcttcttagtatgtgatt

SEQ ID NO: 433047 - DNA, 458 bp, Homo sapiens
tttgtgtggtgagagtggcaggttactgaagtgaagttggccagtgtgctctagatcttatttctaccagtcctgttttcaagtgagtgtgaactaatcctcacatcttttcagatgaacttggtwtttaacaaaaaaattcctgatggcctaaaaaggagccactgagatgcaaatgcatgttgggcccctggctggcaggtggggaagagaatttgggcagtgaggctatcctagaaatcctcagataatgaggcacaaccatgctcgtttccctcaataggccacccaagttgagaactttttgtgtctaattgcttatacttttgaataccttttggcccctatctgcctttaacacacattaccaacaacagcttacaaagggcagtgtattagtctgggttctctaaagtaagactatccgtgagttggtcataaaaatgcctgcaactgca

SEQ ID NO: 433048 - DNA, 542 bp, Homo sapiens
tctagaacagatgggggaaaggggtatktttccagatgctttagaaatgtttaatatgtatttcctcttactcaaaaagcacagctacacattatcttatgcagagaaatgccttatttggagaaaaataaatataaacattatggttatgtataaactatgccaattcttggacttatcccttattgttatttttgaaaaccacctgcctggattaaatctttgccacctgtatttcaggaacatcttctggttagtgtctctgtctctaggtgctagcgattctaaacagatatctattccaaaacgtatttgccaaaacagtctccttaacttaaggagattaagaccttaaaaatcatttaccgtattctcctgcttctttgcttcaagccatttgctcaaaacaaaattctggaaagtggcatcagcaacatgaagaaatagtttctcatggctatccctcctcccacagatgcaccaaataaacacctatacatggatcagttccctccaagagaaagccagaaactagttgaaag

SEQ ID NO: 433049 - DNA, 514 bp, Homo sapiens
tcagcaatcctgggcagcacttgagcactacacttggacaggggcattttaaacagcaaagtcaccaacaaaaagcacaaaaaatgctaaaaacgtgacactaaagagaccacaaagatgacacttgcttatagtataagagctgaratgggaaggcagactgtggccttgttcaacctcagctgggaacatgcacctggatgactgaaaataatacatagtttgttatacacgtggaaaaaggacattgtatccaggccagagcggagaaaccttagaagtcatgacctctgacccagaggtcagcctccctgctgcagacaaacggcctcttaactgtcacagaactttgggaaacctcttaactgccactgacacagtgtccagccacatctcttgatgaacctgaaggagaaggagctccacagggatgtttgaaaccaatgatattcagatatttctgctggactgagtgtcccagaaagaaaccagactgaaggggaaaagtagagca

SEQ ID NO: 433050 - DNA, 477 bp, Homo sapiens
ctaaagcctgatgacctgaggtggagctgagacactgatgctagcactggggagcagctgcaaacgtagattaatatcagcagagaggtttgactgcacagagatataatcaatcaattgcttgcagactcatatcaaaacccatcagtgagtggcaagtgacaattaagctgcatctggtgggagtctttaagtcagaatctgacatttattttagtccatgagtggcctgaccattattttatttaccactttcatccgtgcctctttcccacaccatatacttgtctcagtcacagttttggtaggcccacaagctaatcctagccaaaatgagtaataaacaaatgtcwctgtagagcttatttgaaagggggaataaactcaaatgatgagacagcagaagactctaaggctgccaacaaaaagaaagttgcattttaaagaaaataccaagacttctacttaaattacagg

SEQ ID NO: 433051 - DNA, 571 bp, Homo sapiens
tgcaccatcatgcatggctaatttttgtatttttagtagagatgggatttcactatgttggccagggtggtattgaactcctgacctcaggtaatccaccagccttggctttccaaaatactggggttacagacatgagacacagcaccctgcattcatttctttaatcacattttttgaagagaaaaagtcttwaattttgaatagtttctaatcattaatttttatgtgtggtgcttccggcactttaatttttaagagaaatatttgcttaaatagacatttaagacaaatatttattttaaagtatttgcttatctcaggttgcaaagatgttctcttgatttttcagtattcttaaactgttagcttttatatataataaatttcttaaactatgtgtactattaacatggacaggaggcagggaaatattgggtaaaagagggcagtcctggtgagggtcacaccattaagcctggacccatggcccaaagtgagaacatgtaatcctgttttcctgcccagatgttgccttttccaaaaccaacctggcccaacccatccccca

SEQ ID NO: 433052 - DNA, 533 bp, Homo sapiens
tggctcatcactgaccagcagctgtgtaagcctgggcaagttacttgatctctttgtgcctcaktttcctcttctataaaatggagataatacaaatatctccctcctggggttactgtgaagattaaatggctggtgggtggtacgactcagatgttagctgttattttattcttatggctatggttatctcagttgccacactggaaaggacactgagatatccacataaatggcacttagagtcttccctgcacaatttcacacctagaaatctaaaacgctccagcaggacctaagtatgcctgtcccacctgcccaaaaaggcaaatacataaaatgtggacctgtgcaggtgtcactaacattgcagaaaagggacagaagtgatgaaaaacaacccaagagggtgcctcctctctgaggtccccttttctttcaaggaccactggaacggccaagaaatcccctccccccaggcaactaagcatcaatccttgcagctccgaccccacacctcaggcttccagctc

SEQ ID NO: 433053 - DNA, 533 bp, Homo sapiens
tggctcatcactgaccagcagctgtgtaagcctgggcaagttacttgatctctttgtgcctcagtttcctcttctataaaatggagataatacaaatakctccctcctggggttactgtgaagattaaatggctggtgggtggtacgactcagatgttagctgttattttattcttatggctatggttatctcagttgccacactggaaaggacactgagatatccacataaatggcacttagagtcttccctgcacaatttcacacctagaaatctaaaacgctccagcaggacctaagtatgcctgtcccacctgcccaaaaaggcaaatacataaaatgtggacctgtgcaggtgtcactaacattgcagaaaagggacagaagtgatgaaaaacaacccaagagggtgcctcctctctgaggtccccttttctttcaaggaccactggaacggccaagaaatcccctccccccaggcaactaagcatcaatccttgcagctccgaccccacacctcaggcttccagctc

SEQ ID NO: 433054 - DNA, 453 bp, Homo sapiens
attcattgtgatgctgtatcattcattgtgatgtgtatcattcattgtaatattggaccccctcgtttatccagtagagtgttttgagtatagaaactctttttagtgtttggtgaatggtgaatgaatgaatgagtgggtgaattcatgaataccrttccctgaatatagccactgacttcccagaatgggtactgtcatggcataactgagacaaccacatgtgaatagccctggggttccagggaaattattattgttgcattatcattgcttctgttttataagacttttaaacatttatttgcttaacttcattttctttaaggaaaaaaaaaagatactcacctagctaatcaaaagtcttgcggctgggcgcagtggctcacgcctgtaatcccagcacttcgggaggccaaggtgggtggatcacccaaggtcaggagttcaaga

SEQ ID NO: 433055 - DNA, 567 bp, Homo sapiens
ttacaggcatgagccaccacatccagtctaatgttattttaacttgatgattttcaaagaccctatttccaaataaggtcatattcacaggtactgggggtggggcacagaacttcaacatcttttgcggagggacacaattgcgcccatagcaactgtgtcttaaggcccttcgtaggctgagcccgcactctccaccctggaacaatccctgtgccttcacaattctggctccaacatcatcaggcatcgttatttatgtttgagttcaaatttctcttccgcaacctattaggtcacttacctgctctgtgcctcaatttcttcatctttaaaatgggaataaaaataatacccaccccagggcaattatttggagggttaaacgaatttatgcaaacaaaaccctctgaatagtatctggctcaaaattgttcagtgaagattckttactattatttttatgttttttgaagttctccttcttttcttcccatccaatgagtctcactcttttgctgtccccagataggaggctggggcatccccaggtcacaccgcaagtcc

SEQ ID NO: 433056 - DNA, 660 bp, Homo sapiens
tgctcctcaactgaccaagttccactacgaaggcttcctctgagcctgggccctgccctggaggccctccaatgtccctgtatgtatgtcagggcagaagatacaactgttctgaaccctgggggctgtctccagatgatgcagccaaatgtatgttaccccaatcccctcccacaaggtttcttgtggcctgtgtcctggggtctacagattggccatagagttggtggctcctggagaaggaggctcttgatgggaagggcaagatttaaattgataaagagaagaaataaaagaacaaagaacaaagtgagcaatggatctatgtgggccaacaatcagtcatttattcaatcaacaaacacttcttgagtacctactgaagccagamaattttacaggaaggaaagcatgtcagcttggctccaagcggtggcaaaataatgctagagctatcttgcaggacctctcttccccaggtccaaaactgacctcatgctgttcatctcctccttttggattccctgtctctgtcaatgacaccaccagacacctaactgcttaagctggaaaactgggcaatatctctgatttctctctccctcacggcccacgttcagtcatcgatgcctcccattgagctgccctctgatggctctc

SEQ ID NO: 433057 - DNA, 599 bp, Homo sapiens
ctcattgaacataatttcaatagatgatttaaagtctttgtctattggtggctgaggcgggaggattgcttgagcctaaggagttcgagaccagcctgagcaacatggcaagaccctgtctctaccaagaaaaaaaaaaaattagccaggcatggtggtttgcacttgtggtcctagctactcaggaggttgaagcagaaggattgtttgggtctgggaggtagaggctacagtgaatcatgtttctgccattacactccagccagcacaacagagcgagaccctgtttcacacacaaaagaagaatgaatgaatraataaataaataaataaataaaaataaagtccttgtctagtaagaccagtgtctgctgttcctcaggaacagtttttattgacggcttttcttcctgtatatgggccataatttcttgtttctttattattattaattattttctcttaagtccccctgaaaatgaaatactttgtttctttaaatgtctcttaatattttgtggaaaattggaaattttaaatttggcaactctggaaataagattatccaggatttgttgttactgtttgttgcttttgtt

SEQ ID NO: 433058 - DNA, 599 bp, Homo sapiens
ctcattgaacataatttcaatagatgatttaaagtctttgtctattggtggctgaggcgggaggattgcttgagcctaaggagttcgagaccagcctgagcaacatggcaagaccctgtctctaccaagaaaaaaaaaaaattagccaggcatggtggtttgcacttgtggtcctagctactcaggaggttgaagcagaaggattgtttgggtctgggaggtagaggctacagtgaatcatgtttctgccattacactccagccagcacaacagagcgagaccctgtttcacacacaaaagaagaatgaatgaatgaataaataaataaataaataaaaataaagtccttgtctagtaagaccagtgtctgctgttcctcaggaacagtttttattgackgcttttcttcctgtatatgggccataatttcttgtttctttattattattaattattttctcttaagtccccctgaaaatgaaatactttgtttctttaaatgtctcttaatattttgtggaaaattggaaattttaaatttggcaactctggaaataagattatccaggatttgttgttactgtttgttgcttttgtt

SEQ ID NO: 433059 - DNA, 575 bp, Homo sapiens
cttgctctcctgtggtaggaactgtttcttggatcccaggcttcttgtttttttgttttgttttgttttgttgttgtttttttaaaattaccagtcggttttgctgaattcccgtaaaacttcagtaactttaataactctcccacaaaagggaaatatactatttaagtcyttgcatattagaaaatgtcttctgtcttcatgcttgattgatagtttggctggttatataattataggttgattagctttttctgtgtactttcattgcatttcttcattgtcttctggcatccaggttttagtatctgttttaaaatttgaattcttcagcctgggcaatgtggcgaaaccctgtctctacaaaaaatacaaaaaatcagccgggtgtggtggcacacacctgtagtcccagctacttgggaggctaaggtgggaggatcgcttgagcccaggaagtctaggctgcagtgagccatgattgcatcactgcactccagcctgggcaacagagcaagaccttgtctcaaaaacaaaacaaaacaaaacaaaacaaaacctgaattctaagaaac

SEQ ID NO: 433060 - DNA, 601 bp, Homo sapiens
tccttcttctccctcttcctccttttgccccatccccctctgctctcctgtgctcccctttacttctccctgcatcaggakcctcagctctccccaaaatattctttcattagggtaattgcctgtgctctctggccctctgggtgggggatcattggtacaattgtttcagaaatcttcagttattttccctgttttccatcccgtttctcatttttatcctcattcatacctgcaactctggacttctaatgcacagctggctccaagctctactgtactacttctctgttagcatataacgggcagtggctttcttttctctgtttcatctgctttctgtcttgcagaaagcacccgttcatgaattcccacatacaccttcatttttttctgctgttgaaaacattttattcttttttgaagttctatactttttattttactcgtatctcaggatacgagtaaacattaacttagtctgccatcttgattctgaacaacttgcttccttctcctagaagattagatcatctctaaagtccctgtatataatattgtatgtttgtaagcatcattctttcagacaaatgtaacgttt

SEQ ID NO: 433061 - DNA, 524 bp, Homo sapiens
catagtgtctcttttataagatggaaaataagtaaatagatgaaatgtgaaaatacatagtctattataaacctttttcagtttaaataactagttccttaaaatctaaaaacttttgaaatataagcatcataagtatcatattatgatctccctctaaacgtttatactgaatagagaaggtctgttgtgaatctaaccaaccaaaattttaaacttattataagtctggcagattaaaagaaacattatcaatttcttatttcttagtttttaatcatatgactctggtttgttgttgtcggtgttttgttttgtttgtrtgtttccaccctcagtcctattgcactgatcctgatcttgttctggagctgaagaatcttactgtaatatttgcagatactttacaggtgggtgataacctaacaattaatggttattctgatcacttaaaaacatacaaaatataggctatactcatttatgttattgtagattagtggcagtaaattagtagtaataaa

SEQ ID NO: 433062 - DNA, 524 bp, Homo sapiens
catagtgtctcttttataagatggaaaataagtaaatagatgaaatgtgaaaatacatagtctattataaacctttttcagtttaaataactagttccttaaaatctaaaaacttttgaaatataagcatcataagtatcatattatgatctccctctaaacgtttatactgaatagagaaggtctgttgtgaatctaaccaaccaaaattttaaacttattataagtctggcagattaaaagaaacattatcaatttcttatttcttagtttttaatcatatgactctggtttgttgttgtcggtgttttgttttgtttgtgtgtttccaccctcagtcctattgcactgatcctgatcttgttctggagctgaagaatcttaytgtaatatttgcagatactttacaggtgggtgataacctaacaattaatggttattctgatcacttaaaaacatacaaaatataggctatactcatttatgttattgtagattagtggcagtaaattagtagtaataaa

SEQ ID NO: 433063 - DNA, 555 bp, Homo sapiens
ccagtttttgtggggatttgcttccgggaaccggtgtggatacctaaatccatggatgttgaaatctcttatataaaatggtgtagtatttacatataacctatgcacatmctcccatgtactttgtcatctctagattacgtataatacctaataacaatgtaaatgccatgtaaatagtggtttactgtattggatagggaataatggcaagaacaaaagtccatgcatgtttagtatagacgcaaccacccattttttttttccttgaatattttccatctgtggctggttgaatccagggatacggaacccccagatacagagggccgactgtacttggatttctagaggttactttttggtaaagggtgccctctagtgagcctgttctttttattaagatttgtaatttatatcctcacagcacttgtgaattgaatgtagaaatagaagacaccttcagttctcaaggaacttagaagataaaatatacaccaagtagtgggagagtaaatttgatgtacatattaataaaagatagtgtaatataaa

SEQ ID NO: 433064 - DNA, 580 bp, Homo sapiens
tctctttaactacttttgttatattatcaatcacccccaagattttattgtagtaacttgcattgtaaaaaatgaatgtacttgtgttttaaaataactaatttagtgttaacatttaaccatatgttgmaagtgtgaagtccacaaacaaccctgggatcctagaattacctgcttggcccccaaatattatgctcctctggtgactcttgatctcatgtagtcatttcaatacataagacacaaatgcagaatgatatctgaatcagcagacttataaaattagctattaaaacttagaagcctaaaaaagcaggcattcatttattcagataatatagtacagtgattaaattcatatactctgaagttagattgctctgtgaccttgggcaagttctttaatgtaaatgattccaggtttctttatctataaaattagagtaacagtacagtacctacctcatatgattattatgaggagtaaggaagatacttagcccagagccattcactgtatgtaagtcaggctctgagcactctgtttagactctgagaatacaaaaatgtatccctgccc

SEQ ID NO: 433065 - DNA, 570 bp, Homo sapiens
ctgcacttcattttcagtttctattgcttgtgcacttacacaatgcttaatattggtagaaggaatcttcctttttcttgacctacgtattatttccttggagctgttgtgtttctgatttgcttctggattgcagagtatcagcgatatggtttggctgtgtccccactcaaatctcttcttaaattatagttcccataatccccaatagtcatgagatggaccaggtggagatattgaatcatgggggtggtttctcccatcctgttctcctgatagtaagttctcacgagatctgatggttttataaggggcattcctctttgcttggctctcattcttcttctccctgctgccatgtgaagaagaacaygttggcctcttcttccaccatgattgtaagttctctgaggcctcccaagacatgtggaactgtgagtccattaaacctctttttctttatcaattacccagtctcgagtacgtctttattagcagcatgaggacagactaacacaatcagagaatgttatgggaaggttgttattcatgtctgctgtatttgataaa

SEQ ID NO: 433066 - DNA, 559 bp, Homo sapiens
ttaacgtaattttctaaagtatttgattaagggagaaaaattatatgattatttcaatagatatagacaaatatttaataaaattcaatatcacatgtgatttttaataaaatccttctcaaactaattcacttaacataacttatacctaaaaaataaacaaaacaaaacaaatcataaattctgccacagttgtcattcttaatggtgaaaargtgaaaatatttctttttagatgaataatgatggaagggtcctaacaatcttttttcttttctttttctttctttctttcttttttttttttttttttgagagtgggtctcactctgttgcccaggctggagtgtggtgatgtgatcttggctcattgcaatctctgggctcaagcaatcctcccacctcagcctccagagtagctgacaaccgggcgtgcaccaccacacctggctacttttgtcttttttgtggagatgggatttccccatgttgcctagacttgtcttgaactcctgggctcaagcagtcctctcaccttggcctcccaaactgctgggat

SEQ ID NO: 433067 - DNA, 530 bp, Homo sapiens
tttttttttttaagctcatcagctctcattrgtgttcactgattctatgtgtggcccaagacaattcttcttccagtgtggcccagggaagctaaaagattggacccccaggtttagattaccgacatcataaattgttttttttttttaattatccaggtatcaactagaaggtatcctaagtttaaagaccctattttagaagaaatagacatagcaagttactattgccaggcactatgtgctttgtgtcatttgatttacacactaaccctattacataggtacagtattattaattacccattatataagtaaggaaactgaggtttgggcagactaagcaactggcccagaacatcacagctagtgttaaaatgttaaatatgtcagtatattttttaaaagaaaaatcttgctctggattgatcagcgatgcgcttttcctagatccataagccatacttgagaacatgattagcatataacgacgtttgtatataacacactgtgtggcaggcaccatttta

SEQ ID NO: 433068 - DNA, 530 bp, Homo sapiens
tttttttttttaagctcatcagctctcattagtgttcactgattctatgtgtggcccaagacaattcttcttccagtgtggcccagggaagctaaaagattggacccccaggtttagattaccgacatcataaattgttttttttttttaattatccaggtatcaactagaaggtatcctaagtttaaagaccctattttagaagaaatagacatagcaagttactattgccaggcactatgtgctttgtgtcatttgatttacacactaaccctattacataggtacagtattattaattacccattatataagtaaggaaactgaggtttgggcagaytaagcaactggcccagaacatcacagctagtgttaaaatgttaaatatgtcagtatattttttaaaagaaaaatcttgctctggattgatcagcgatgcgcttttcctagatccataagccatacttgagaacatgattagcatataacgacgtttgtatataacacactgtgtggcaggcaccatttta

SEQ ID NO: 433069 - DNA, 579 bp, Homo sapiens
atcaaaaaaggaaagaaggaaaggtatgtatagttatgagccgcataacgacactgcagtcaaggacacagcctatacacgacggtggtgccataagattataggtgtggggcaggcaacaccacctagggtcatgtgagtacactctgtaatgttcacacaacaacgtaatcgcctaacaacacatttctcagaacatatccctatcattaagcaacacatgactatgcataaatgaaaaaaacaaaaacaaacaaacaaaaaacaacaaaactgtcagaagcaaaaaccaagctatgaaagaaagaaggaaaaggagcacttctccccactaagtcctctccacagagtcaagacagcaaaccctgtagggtaaygcagctgaggctatggacaccgggtttattgcgggcgtgcccactggagaggccatgcacactcagaggacaccacggatgcaggatacagacggtctgcgacttgccaagttccaggtgcaggcaatggggcagtggagcttggaagactttgtgcaatcacttttttaccaaccgttttttgctagcaaaaaatatgaat

SEQ ID NO: 433070 - DNA, 533 bp, Homo sapiens
gcacaacctttaagagtccactctgtgctgggcacagctcggacaccagtctttgtcctcttggggcttatggtccagaggggcagacacattaactgaagaactgccccaagtgttgaactctaacaatgacagagtcaggagggagaagcacaatgggctacgagcaagtatggaaaaggcccaggccagatgggggaggcatgtgaggcttccctgggcagcaatggctcgtggagaaaggagagggcaggtggacagggcttccaggaagaaggcgagtcctagagaggaggggacactgttaatgggaaaacagtgcagaaatagacaaggtgcgtggcatgaaagggatgaacarcaggcccaggagcaccgggaagcggctgctgtagaattgcaccagacagaggagagcagctcagcagagggcggaggcggcagcagaaacgaaagaagcagagagactccggcatgctgaagtgctgaaatctatggggcttgatgatgacagactagaaatgtagggaaag

SEQ ID NO: 433071 - DNA, 533 bp, Homo sapiens
gcacaacctttaagagtccactctgtgctgggcacagctcggacaccagtctttgtcctcttggggcttatggtccagaggggcagacacattaactgaagaactgccccaagtgttgaactctaacaatgacagagtcaggagggagaagcacaatgggctacgagcaagtatggaaaaggcccaggccagatgggggaggcatgtgaggcttccctgggcagcaatggctcgtggagaaaggagagggcaggtggacagggcttccaggaagaaggcgagtcctagagaggaggggacactgttaatgggaaaacagtgcagaaatagacaaggtgcgtggcatgaaagggatgaacaacaggcccaggagcaccgggaagcggctgctgtagaattgcaccagacagaggagagcagctcagcagagggcggaggmggcagcagaaacgaaagaagcagagagactccggcatgctgaagtgctgaaatctatggggcttgatgatgacagactagaaatgtagggaaag

SEQ ID NO: 433072 - DNA, 585 bp, Homo sapiens
aagaatcatacaccctttataggaataagcatatattgtgaaatccaaacagtttttaattcatgaagatgaaagtggtttttgagtttattaaaattttcttaggttagctgaacaaagtgaaagcaccagttatactatcacatacaggccacctttaaggttccttcaggttgcaaatattcaataaaattctcacagcaaaagagcaatatcactttacacttaatggttgtcaaatacttaatggttgtcaatcccctttggcaaacacagtatagttctctctgtactgctggtcacactcacaggcctgtaaaacaagtgtattagaaattccccgccccacacagagtggctggagcctggggccccagggcatcctgggagcgacttcttgttcctgtttatgccggacttcttgttcctgtttatgccrtgccagtcacccccaaattgcaggtgtgggtctgcactgccttgctgcccggccattgggcatcaaagctgcccatgctggggctccaaagatgacataaaataaagcagctttgttgtctgcatcaatagaaacagggtcaaacg

SEQ ID NO: 433073 - DNA, 536 bp, Homo sapiens
ttcaagcaattctcctgtctcagcctcccgagtagctgggactacaggtgggcgccaccacgtgtggctagtttttgtatttttagtagagatggggtttcaccatgttagccaggctggtctcgaactcctgacctcaggtgatccacccgcgttggcctcccaaagtgctgggattacaggcatgagccaacacgcccagctaatattcattttctaagaccatttctcaaaagttgatgtctatctgcagataagacaaaaatcaaagatccaagtataytttaattaacattttcttctgaaatctgagctaccttccaatatctagaaaagaaatgctttttttgacaagccaaataaagttattctgatatcaaaggtgagtaggaatgagaataaaagcacaaaggtcatcctttccagggtccacaaactcaaaagcctaaattaattcacttcagcagatttttcaattaaacaagaatcattaagtcaatcttttgattaatggctacttgactaaaattaaaatg

SEQ ID NO: 433074 - DNA, 536 bp, Homo sapiens
ttcaagcaattctcctgtctcagcctcccgagtagctgggactacaggtgggcgccaccacgtgtggctagtttttgtatttttagtagagatggggtttcaccatgttagccaggctggtctcgaactcctgacctcaggtgatccacccgcgttggcctcccaaagtgctgggattacaggcatgagccaacacgcccagctaatattcattttctaagaccatttctcaaaagttgatgtctatctgcagataagacaaaaatcaaagatccaagtatattttaattaacattttcttctgaaatctgagctaccttccaatatctagaaaagaaatgctttttttgacaagccaaataaagttattctgatatcaaaggtgagtaggaatgagaataaaagcacaaaggtcatcctttccagggtccayaaactcaaaagcctaaattaattcacttcagcagatttttcaattaaacaagaatcattaagtcaatcttttgattaatggctacttgactaaaattaaaatg

SEQ ID NO: 433075 - DNA, 513 bp, Homo sapiens
ggcagttctcactacattttaaacctggaaacctctaaaaattcttttgaatcatttgaggctaacagttttcatcaagataaaatgcasactgtgagtatttaactctcacagtctctcccaccaaaccacccagcatcacacacatattcctaggaacagcatagattgccctaagtgatctctcaaaggttattaggtgaataatacagatcttaaatagcgtattagtttctttaatattttctcccaaatatctcttttacataaactctaatacattgcctttccctgctcatcaagaatgtgaaagaaatactgaaaatagacctgcatttgtttaaccaaaagctaatatgtaaaaaaaaaaaaaaaaaaaaaaaaaaaaaaaaaaaagataaggaaagccactggctgtggctttgtacaaacctgctgggatacatgacacattgtgctttcattgctgccacctcaccatgcaagggctttgcctgtgtgcaaggtctttta

SEQ ID NO: 433076 - DNA, 624 bp, Homo sapiens
gataacctgtgattctttttgtcagaccttgggaaataggcatgcaagatgacaaatagatttggaggacagcaacagagaggtggtggggtttcatttgggacataatgagtgtgaggtccaccagggattgggaaattttggattgaaactaaggatggaggcagagatttaacataaagaggaaatgaatttacagggttaaagctttatcaactatcattctgaagggggttccacaaggraaggggaaaagaggatggatgaaaggaatgcacagggttagcacgcttaccacatcttcttgtgattcccgttgttgagatgagaaaactgatatgcagcaagattaaaatatccatgattacacacttggaaccttgaggcatcctctccaacccagttcattctagctgtatagcctatatttctcattccctattatgtggcctgtcctagagtgcacaaagaacagagaagcagcaaagaaggaagcagtgcttcccgctgggtgaaatcttgtggagttttatggaagagatagcatttaagctgggtgatattaggacatgtggcaaggagtggcagaattggctatcagtcaaaatgcaatatgaatagaga

SEQ ID NO: 433077 - DNA, 474 bp, Homo sapiens
tactatgcatgtagcaataagagctaccttcaaccaggatttaatctgttccaaacacttctttaagtgctcacaacaattcataatgtagaagctattttcatraaaacatcttattttataattataaaataatcttttataagagaagaaatgcaaatagtgcagaaggtttcttttatctaaatcaactttccagatgtaactactgttcatagcaagctacctattcttgcagatatgtttttatgactataaatgctctcagattgatctgtggccccaaatgtcagtaactccacattttaaagtgagtctatagaccaactgtagagaacttacaagagttgattaagagcaaagaaataaaatttctgctattggccacacatttccatcctttaagactcaggaaaccaaaaaagaagatgctgaagtttagataaaggatttatttggagagacttgttagtg

SEQ ID NO: 433078 - DNA, 528 bp, Homo sapiens
acaggtgaggcaactgatttaggcactctgccgttaggtcatacatttcatgagcagcagaggaaagatttgaacccagrcagtctttttgcacaaacagtactctgactcactacgatgtgctacccaaggaatagctttctccctgctccaaggacaaaacccaagacacagaacatggctctcttcctggagggtttcttccctttcatgctttcccatttttgtgtctacacatttaatttgagaaccttagcagccatgggatagtgtgatatttgtcattcaccttagggtgtagataaccatgtgagacattcttctcagaacagttatattctttgaatcagtgaactattttaagaaaataggcccatgacttcctagaattattttaaaattgcagggtaggagtgagacacagggaagggtgataaaaagcatatggagaaagaaactaaatattggctatatgttatgctaggtattttcatgtagtaatattaatagtagtagcaataatagaaa

SEQ ID NO: 433079 - DNA, 528 bp, Homo sapiens
acaggtgaggcaactgatttaggcactctgccgttaggtcatacatttcatgagcagcagaggaaagatttgaacccagacagtctttttgcacaaacagtactctgactcactacgatgtgctacccaaggaatagctttctccctgctccaaggacaaaacccaagacacagaacatggctctcttcctggagggtttcttccctttcatgctttcccatttttgtgtctacacatttaatttgagaaccwtagcagccatgggatagtgtgatatttgtcattcaccttagggtgtagataaccatgtgagacattcttctcagaacagttatattctttgaatcagtgaactattttaagaaaataggcccatgacttcctagaattattttaaaattgcagggtaggagtgagacacagggaagggtgataaaaagcatatggagaaagaaactaaatattggctatatgttatgctaggtattttcatgtagtaatattaatagtagtagcaataatagaaa

SEQ ID NO: 433080 - DNA, 528 bp, Homo sapiens
acaggtgaggcaactgatttaggcactctgccgttaggtcatacatttcatgagcagcagaggaaagatttgaacccagacagtctttttgcacaaacagtactctgactcactacgatgtgctacccaaggaatagctttctccctgctccaaggacaaaacccaagacacagaacatggctctcttcctggagggtttcttccctttcatgctttcccatttttgtgtctacacatttaatttgagaaccttagcagccatgggatagtgtgatatttgtcattcaccttaggrtgtagataaccatgtgagacattcttctcagaacagttatattctttgaatcagtgaactattttaagaaaataggcccatgacttcctagaattattttaaaattgcagggtaggagtgagacacagggaagggtgataaaaagcatatggagaaagaaactaaatattggctatatgttatgctaggtattttcatgtagtaatattaatagtagtagcaataatagaaa

SEQ ID NO: 433081 - DNA, 599 bp, Homo sapiens
atcaacacctactcaaaatatggggcttccttccctacccgctgtattttcaccatcactgcttaaggacttaaaaatacctaacttattgtcatggtagcccacacattattttggaacaagggattcttgtacagcaaaggagctacgaaaaagttgcatgataacagctgcattgttcttatcataaacccgatcacccagaagaagcagtagaatgcattgttaaaggattagctaaaaaggtagtgagggatcaacatcccrtgacactgaggcactgcccaccaaaatacagtctgtttgctggaccaagagtgctcataataactggtatatataagcctggcaaccaaggagtagaaatagtgctggcttttctcaccttaccccaatgatctgcttgtggaatttgtgatttctgtccccctgactgtaggctttgccaagtcagtggtcatagatcctgagaaaaagaatgtttctcttagagatactaatgtttctgttgaattttaggctttagctactttctggttgctttgggattcttaaaatagggaacaggcataaacaaaagagttactagattgttaggg

SEQ ID NO: 433082 - DNA, 509 bp, Homo sapiens
acatggataactcccaccttcttacttcactccaacccccatccactgccacagacctagctggtatgtgtacagacatccatccaaacatccacacttcatacccacagggcctagggccaacagcaattctccttaaagggttaatgtgccttcagcaggattgattttgggaaaagatcctcatagaccctgaaacaaacttaaaacaggttgagcagagaaccttctgggtcccagatacctaaaatatggtctggaagagaacataaatacatattccagttgtggacagatttcactggctycagtggaatccttgttctggagaaggggtgggcacagctgggaacagcaacagcagacccctgaaaagcatggcatccgggacaggggtcccaatagctcgtatataaggatattacgcatcccagatttctccagagtcagattagttggtaacaccaagaggcatctccaaaaccattaagccaagtttgtccaaccca

SEQ ID NO: 433083 - DNA, 503 bp, Homo sapiens
gtttcaaccaaataataattaagtyttccccttatccctgaaagtccattaatatcattaatatctagatgtatagtagtggaatgaacagaagaaatctgcaattttgtattaccatcctgccaaatgccacagccttggtgtgggttatagccaaaaaaaaaaaaaaaaaaaaaaaaaaaaaagccggggggcttcagtttagaatattgtacctgatggaattggaaaggaaaattattggttgctatcaacaaatcagtctcaaaggtaaaattctgcctggaagaaagtctaattatattttaattggtctttcaatcaattcaattatatgcatttaaagtcaatagatatcaaaagccaccaatgaatgaattttagtatgtttttcctctccagagtattttggttagaatgccattagaattttgaattgaatttgggattttactaaaggcaattgagggaatggttttaagtggaaatagggtgaaaaacaa

SEQ ID NO: 433084 - DNA, 503 bp, Homo sapiens
gtttcaaccaaataataattaagtcttccccttatccctgaaagtccattaatatcattaatatctagatgtatagtagtggaatgaacagaagaaatytgcaattttgtattaccatcctgccaaatgccacagccttggtgtgggttatagccaaaaaaaaaaaaaaaaaaaaaaaaaaaaaagccggggggcttcagtttagaatattgtacctgatggaattggaaaggaaaattattggttgctatcaacaaatcagtctcaaaggtaaaattctgcctggaagaaagtctaattatattttaattggtctttcaatcaattcaattatatgcatttaaagtcaatagatatcaaaagccaccaatgaatgaattttagtatgtttttcctctccagagtattttggttagaatgccattagaattttgaattgaatttgggattttactaaaggcaattgagggaatggttttaagtggaaatagggtgaaaaacaa

SEQ ID NO: 433085 - DNA, 503 bp, Homo sapiens
gtttcaaccaaataataattaagtcttccccttatccctgaaagtccattaatatcattaatatctagatgtatagtagtggaatgaacagaagaaatctgcaattttgtattaccatcctgccaaatgccacagccttggtgtgggttatagccaaaaaaaaaaaaaaaaaaaaaaaaaaaaaagcsggggggcttcagtttagaatattgtacctgatggaattggaaaggaaaattattggttgctatcaacaaatcagtctcaaaggtaaaattctgcctggaagaaagtctaattatattttaattggtctttcaatcaattcaattatatgcatttaaagtcaatagatatcaaaagccaccaatgaatgaattttagtatgtttttcctctccagagtattttggttagaatgccattagaattttgaattgaatttgggattttactaaaggcaattgagggaatggttttaagtggaaatagggtgaaaaacaa

SEQ ID NO: 433086 - DNA, 569 bp, Homo sapiens
aataaacagttttgcattttttaaaagcgctgctgacatttatgcactaatgatgacattcttaatttcttaaaatctggaaagagtggtactttaaacctttctatcctctgtgaggaaggttaggcttgtatatgcagtggagtggagagagaagacacagagacmataaaatggtactcattagagccattaggatgacagtagtaaaaaaaagtgactgtgagaggagaatagaagcataggatcagggcattggctgttttcattttcctaagacattcctgccttgggttttacctttttcaatcatcagatgtgattcttgctgtcctattatttcttcaaagctatggtctgctagggagctactgaatgggtaaagcaaacgtatccatgttattatgtatttctagaaaatattaacccggccgggtgtgtggtggctcatgcctgtaatcacactttgggaggcagaggtgggtggatcacctgaggtcgggagtttaagaccagcctggccaacatggtgaaaccccgtctctaccaaaaatacaaaaaaatagcct

SEQ ID NO: 433087 - DNA, 623 bp, Homo sapiens
cctaactccatctgcggttgaggaccggacatttttgcctagctatgctgccttccgaaagctatgctagttatcttcagttatgtccatacagtctccctttgccttttccctaactttctccaagaagaaaaggtattggaggagggtgctgtgcatttcagttacttttccctacacacattttatcttgaccctttaattcactatgatgtttatcatcacagacaagtgatttgcccatgtttctgtctcttgtcaacccaagcagaaaacttttgtgacaattaggacatttagccactgaactctcatcccctgtgaatcatacattaattagtgtcagattggatacagattgtcaaaatacccagatgcattgcacagatacccgcactaatcaacaccwtattttactttcagtctattgaactataaggttaaccactttccatgagaaatgtactaatttaatgtagccaatgaactcaccatcctgtgtaccaaagaaaggtatatttacctctattattttaaaaaaatatttacattcgtttcagccaaactagcaataggggtacttcctctctttcatatcagacacaattcatgcagttatcttt

SEQ ID NO: 433088 - DNA, 602 bp, Homo sapiens
tgtcatgattagcatttctccctaagacctagaagacctggaactcttctgataggataaacatagagtgttggatgcaaaatatatttaataatcagcagtttccaaatatactttgtaatctcctgggaaaaatttaaaaatgcatagtcccagaccagcccaggctgctttatcagaagctccagggagagggatcaggaaatctgtatttttatacaagcttcccaaacaatcactctaaagagcctgacatagatcagtgggctcactgtggaaataacagacatggacctgtgttctyactttacactgagtgaaattagggtctaaaggagtttaaaaagttttccgaaagtcacacgttccataaactggaaatcctccggctaaatacctcaagtgcaatcacttgaacatgacaatttggagtctgggaagacatgcagacacgtagaatatattctggccaatgaaaggttttatgcataaagcttctttctcctttgccccagacaattctggacttgtcattaaaacatggcaaaaactgaaatatgtcactcaaagacctgatgctaaatgcctgactagatttatgc

SEQ ID NO: 433089 - DNA, 564 bp, Homo sapiens
tctgcatatatccattttccttaggacagagttcatagcttccatcacattcacaaaagaatctaagaactgaaaagtgttaagaaatactgttcagtttaggccgactttatagacagcttttactaaattttgtaaattctttagattacatatgatattatttgataaaatagccatgtgacatggtttgcttggcagggtaataaatattcatcatttttagtgaatactacggtaagtaatctgatctcagytgggtgatataaatttacagcaatgataccttactctgtgcttttcaaatgagaaaacgtagacttctatgctgctttccagttggctagcaattccttgaggcatagaaaaaacggagcacacctttcaggagtactcaatttactcaggaattgtaaaacttgattttatagtagaacaaagttagattgattatgcaatatttaaacttatttttgagacaacatgtgagattttaaaaatggtgtgctccaaggacggatacagttcttggttatagactccatagtcctagaatttgcattt

SEQ ID NO: 433090 - DNA, 493 bp, Homo sapiens
ccaccctgacctattcaaaattgggctgatttgggggtatgctattgtagcatacaaatgcactaagtcacagatactcaaggaaacaaggaggcctttttcctcttaaacacagagatgagcaactacagtctgtaataccagccatagatgagggtgaaccagccttaccacactaaaagatcttggaactatcagcacatgttagtaagagggcaaaattattggtgcagaaatgatgaaggaaatagagtattgtttccattgcaactaataaggtggtatttttcttcattaaaaagccttgacttccttakcaatgaacttgtctcttaagctaaccctcaccaagtcattagtatacaaattaaaaatatgtcttggcagtaataatgattctaaactctattgtccaaggaaacttagccaaaacccattgtcctccaatcctcccacttctatagtaccaagtatccagattttctctgttcta

SEQ ID NO: 433091 - DNA, 580 bp, Homo sapiens
aaaaaaatccttcatttacttccaaatatcctgattactcttggggttgagttataatgatgtgccctcgggaccctggcttcaggaggttrtgcctccgtggggcactctgaactaagagaggaagggagagggacttgcctctctgttcaaatctttgggtgagaagtttataggaccaccaaggtctgctgtttccctttttactttgagttcttgaagctatttggggaatagagcttaattcaatagcaaaagaagttctatgaactttaaagagtaacttcccttaacatctaatattcctccttttgtaagagcttcctcttttatgcctaattttttttcgttgtacattcatacgtctcttattttattttcttatagaatacttaacccatgcttttaaagtcatgaatacaataccttgttgacaggaacactaagaaagccttgaagagctagatgacattagtttcatcaagattctttattcacattcaaaacatcatcagttattaaatatttgaggagtttacaatgttgagctgtaagcagtcctcttatttccattgcaaac

SEQ ID NO: 433092 - DNA, 565 bp, Homo sapiens
taatcatttatattaatacacacaggcctcaaaataaatacaagcatttgtgttatggcctgtgttgatttttaatttgctttttacaacagaaataatcaaaatgaatttttaaatagttattggcctttagcattgatgtgtacaattatttacaattttctggaccgtgtaggtgatcagcaagtgtgtgtttttaattattctgcaaaaggaatattaaattggaaggaaatggccagcttgacatgcatcatgcagtttatttcagcctcattacctgaactattagattgcaagtaaagaatagttaaatacctatttgttatctaattgctaaagaagcctgaaaaatttaagttgttggctcgctgaaaaaaataagataaattgagaagtaactgaatgattgattcatctcctccagggraaaaaaataaaacgtgtcaaatacagttatagaaaattgatgttttatgtaactccttttgaagtagaaattaaatttccttaaaaggttatattaaaaagaagatggcatgggaccatgaaccaacacacacca

SEQ ID NO: 433093 - DNA, 554 bp, Homo sapiens
caaacacatcttgtgccttcccggctttggtgatgttcttctatatgttggaagtgtttcaagggcagggattgtgtctcatttttctttggattgccagagccccatgtgcatgagagaaccttgacattctcagcacagctgctggctcatatccaataagctgaaccacgtgttgttcctaagggtgttctaccatgaaggatcctgtggtcattcagtattaaataaatatagccaaaatctggactcttcactgagccgtgaatgagaaacaagaactgggagagcaaaagaaataaataaagaaaaaaatgaagagcaatacgttgctgtttcaagtgcctgtttcattccatggacttgattattttgagagttgaatcattttatactattyagatggggatttctagctagagtacatgtttttcaaatgattaggacacatatactcataatagatgataatatgtgaaattggtgttgtccgaaaaatcaggaatgtcataaattgaggatccacaatctttttctgaaaaagaccatagtaa

SEQ ID NO: 433094 - DNA, 529 bp, Homo sapiens
tgtgtagtgtgaaaaacactggcatgagacagatttggttagcatttcagattgctctaattattctgtttattctttcagcaaatattaaatacatatgagccaagcatttcacagactttgaataatacaaaaataaatgggaagagggttcttcttctaaagaatgtgtaatgtatagatcagagtggattaggcaagaggacttgttctgggctaatattgtttgaatttgaattccaagtttagccagttactagttttgtaatcttggggacattatttaacttcccaacacctcagttttcttatctgtaacttgttgaaaacaacatcacttttagcgggtgctctaaataagatgatacatgggatgtgcttattacagagctcatcatagagtaagccytgaaacattcattctttatttccagacaattattattactattgttgttaagaaaaaacagtaacaatagaagcacctaacctagtttaaagcttggactggaaggtatttgggacagtg

SEQ ID NO: 433095 - DNA, 558 bp, Homo sapiens
tctttttcattagcattgcttgtccacataggtttccttaaaacccattgtaatatttttagccttcaagaatttaagatccacattggagagcacattattgagctggtggtatgtttcaggccatcttttaggtggacaatgttaaatttattatcacatgtatgattaaattttttgaggtaggcattcttatcttcattttacagaacaataaggtaatggagtgtgagtactacgcccagggtgaagtcattagttaactggaagtggttgaaatagtggagagtttggattcaaaacccagatgtagagaatcccaaagcacatcctctgtcccttagcaccattgattctacaakcccaagtatattaatgccagcagggaagggtttcttaaattctaaagcaaaatacttatagtgactgaaaatcactttttgatagtttaaaaactgccttcagcccttcttgcttattagaggcaattcattttggggaaaaagaatggtcaaccaattaactaaagtatcacaagatggtggcacagctgatgcc

SEQ ID NO: 433096 - DNA, 558 bp, Homo sapiens
tctttttcattagcattgcttgtccacataggtttccttaaaacccattgtaatatttttagccttcaagaatttaagatccacattggagagcacattattgagctggtggtatgtttcaggccatcttttaggtggacaatgttaaatttattatcacatgtatgattaaattttttgaggtaggcattcttatcttcattttacagaacaataaggtaatggagtgtgagtactacgcccagggtgaagtcattagttaactggaagtggttgaaatagtggagagtttggattcaaaacccagatgtagagaatcccaaagcacatcctctgtcccttagcaccattgattctacaatcccaagtatattaatgccagcagggaagggtttcttaaattctaaagcaaaayacttatagtgactgaaaatcactttttgatagtttaaaaactgccttcagcccttcttgcttattagaggcaattcattttggggaaaaagaatggtcaaccaattaactaaagtatcacaagatggtggcacagctgatgcc

SEQ ID NO: 433097 - DNA, 558 bp, Homo sapiens
tctttttcattagcattgcttgtccacataggtttccttaaaacccattgtaatatttttagccttcaagaatttaagatccacattggagagcacattattgagctggtggtatgtttcaggccatcttttaggtggacaatgttaaatttattatcacatgtatgattaaattttttgaggtaggcattcttatcttcattttacagaacaataaggtaatggagtgtgagtactacgcccagggtgaagtcattagttaactggaagtggttgaaatagtggagagtttggattcaaaacccagatgtagagaatcccaaagcacatcctctgtcccttagcaccattgattctacaatcccaagtatattaatgccagcagggaagggtttcttaaattctaaagcaaaatacttatagtgactgaaaatcactttttgatagtttaaaaactgccttcagcccwtcttgcttattagaggcaattcattttggggaaaaagaatggtcaaccaattaactaaagtatcacaagatggtggcacagctgatgcc

SEQ ID NO: 433098 - DNA, 579 bp, Homo sapiens
tctgagcaataaaagtggaagatcatatgaaagtgggtgaacaaaagacacagggttttagagacgtgtgtatgtaactgaagccattgtatcttggaatacaaggacagttgcacaaaagcagtatgygatatgtagtcccattcctagatatcattggccattttcctagccagacaccaaatagcatgtgatacataaaaataaattgatccaataatagctaggattccaagaaatagtaaatatatttatgaggttattaactgaaaaatatcattaccattgctgcaattcctagagatggtagtgagctcacacagggcacacagcagtactgaaaaactctcagttgttcattcttcttccccttctcttttctccaaaatcttttttgtttgattgcttcagggtgggtacagaaaaattctcccccttccaagttaacagagagaaaaagctgtaaatccacagatgtatagctaaagagggccgctgagagcctcccaaccctttcaaataacagaaaagagagccaaagttgagaaaagtaaaatgacttctcatggtcaaacaatg

SEQ ID NO: 433099 - DNA, 548 bp, Homo sapiens
taatggtttcttttgaaagaatctgggcatgacctgatagcctactagcctagggatcactgttgttcattgagaatttaacctttggttgtatcataatgtattaggttttgggatatcttaatgtaaaatattaatctctttcctttgagggtccaactttaattatgagtatccaactgcgtgccaagcgctatgcctaggaagtcacaatttcatctcctgtgtrcatgaagcattttttctgtatagctgaacttgatgcttttacatatgcttgatattttatccaattgctcagagtagcatggtctgcttcaagtttttttatatcatttcaagatggaaattaaaagttaatttcttttcctcttttgtggtagtaacattgctgttttaagagtggtactaagcaaaaatgaaaacaagagtattgtttttcagagtgacaaattcttagggatttagggattggtggtgcttcaaggctgacttgacaaatatatctgtttaggagtttcatactttatatacaaatggaattaact

SEQ ID NO: 433100 - DNA, 548 bp, Homo sapiens
taatggtttcttttgaaagaatctgggcatgacctgatagcctactagcctagggatcactgttgttcattgagaatttaacctttggttgtatcataatgtattaggttttgggatatcttaatgtaaaatattaatctctttcctttgagggtccaactttaattatgagtatccaactgcgtgccaagcgctatgcctaggaagtcacaatttcatctcctgtgtacatgaagcattttttctgtatagctgaacttgatgcttttacatatgcttgatattttatccaattgctcagagtagcatggtctgcttcaagtttttttatatcatttcaagatggaaattaaaagttaatttcttttcctcttttgtgrtagtaacattgctgttttaagagtggtactaagcaaaaatgaaaacaagagtattgtttttcagagtgacaaattcttagggatttagggattggtggtgcttcaaggctgacttgacaaatatatctgtttaggagtttcatactttatatacaaatggaattaact

SEQ ID NO: 433101 - DNA, 548 bp, Homo sapiens
taatggtttcttttgaaagaatctgggcatgacctgatagcctactagcctagggatcactgttgttcattgagaatttaacctttggttgtatcataatgtattaggttttgggatatcttaatgtaaaatattaatctctttcctttgagggtccaactttaattatgagtatccaactgcgtgccaagcgctatgcctaggaagtcacaatttcatctcctgtgtacatgaagcattttttctgtatagctgaacttgatgcttttacatatgcttgatattttatccaattgctcagagtagcatggtctgcttcaagtttttttatatcatttcaagatggaaattaaaagttaatttcttttcctcttttgtggtagtaacattgctgttttaagagtggtactaagcaaaaatgaaaacaagagtattgtttttcagagtgacaaattcttagggatttagggattggtggtgcttcaaggctgacttgacaaatatayctgtttaggagtttcatactttatatacaaatggaattaact

SEQ ID NO: 433102 - DNA, 522 bp, Homo sapiens
  misc_feature (1)...(522): n = A,T,C or G
ccatttttaaaaccattagatctcgtgagacccattcactatcatgagaacagcaggggaaagaacacccccatgattcaatcatctcccactgggtccctcccacaacacgtgggaattatgggagctacaagatgagatttgggtagggagacagagccaaaccatctcaagggggaagatgggagggagagaagtgttggaaagctaactatctggtattatgcccactacctggttgacggcatcatttgtacaacaattataagcaaacaaattccgctccccgtgtgcaatntactcttgtgacaaacctgcacatgtacccyctgaaactaaaagtcaaattttatatattatttgacttttagtattttatatctatatatacacatttgacttttagtttcagagggtataatatttataacaatataaatacttataactatattgctttatatatataaataaataaataatttcttgtttggatatgagtattctttcctgaactgcttt

SEQ ID NO: 433103 - DNA, 548 bp, Homo sapiens
tattctatttcaaaatggccttgttttgcctaaatatttaayttgtttagttttccatatggattttgataaatatgctatttcataggcattgtgcatttacttttaaaatttgttcccaattactttatattagtgattttgtaaatgacattttttcctgtgtgtgtgtgtgtgtgcgcgtgtgtgtgtgtgtgtgtgtgtgtgtgtgtgtatacatgtttttaacatatcgctgaaggtagatataagaactattagcatataattatcatataaatatactttatcactttaaagcactgttattgattctaagatgattttttttctaatctttttatttctgtgatacatttttattccaagttatcttttcctttggattttaagtgcttttttttgtttttgtttttctgctgtagcagatttcattcactccttcatatatttctgcctgcttatttatgattgatggagtaaaagtttatagagtcctttaatttgcagtgggtttttttatactctccttaatttccctattgttc

SEQ ID NO: 433104 - DNA, 548 bp, Homo sapiens
tattctatttcaaaatggccttgttttgcctaaatatttaacttgtttagttttccatatggattttgataaatatgctatttcataggcattgtgcatttacttttaaaatttgttcccaattactttatattagtgattttgtaaatgacattttttcctgtgtgtgtgtgtgtgtgygcgtgtgtgtgtgtgtgtgtgtgtgtgtgtgtgtatacatgtttttaacatatcgctgaaggtagatataagaactattagcatataattatcatataaatatactttatcactttaaagcactgttattgattctaagatgattttttttctaatctttttatttctgtgatacatttttattccaagttatcttttcctttggattttaagtgcttttttttgtttttgtttttctgctgtagcagatttcattcactccttcatatatttctgcctgcttatttatgattgatggagtaaaagtttatagagtcctttaatttgcagtgggtttttttatactctccttaatttccctattgttc

SEQ ID NO: 433105 - DNA, 546 bp, Homo sapiens
tattcattcttccttgaaaggatctttcagttcccttaacttcctcttatttgaatactcactgtaattttgttcatacagaacataaggatcttttcttcctttctgagaagttagagccacccttgttccagttataggaarttttaatgagggttttaggtgtgtgtatgtagggagataattttattatttttttttattcttggaggggtcaaaaatttgacaaccagctcttaatattattaaaacttagaaatttattatatatagctacaaattgtagcttgtctctagaactgtgaaggacaaaaccaagaatgtagtactcctgtagcagtgtatgggccctgaattcagaatacataccttctaacttctgtaaacataacccaaaattatactgttattcctttttgctactgtactttgaaaattcataacttcaaaggcatagtaaaattctgagtgagcagatgtgattcattaacttctccataatgagggaggcttcagctgggaaaacagaaatattctgttctggta

SEQ ID NO: 433106 - DNA, 605 bp, Homo sapiens
agcctagggaaatgaatcagtgaaggtaaaataaaaacttttatttttattactctttgttgatctaacagttaacagtttcttcaaataccaacagcaacaatgtattttagtttacatatatttcaaacatatatttatatgcttataggtaagcgaaataaatgacagcaatgacacaggcataaggggaaagaatgaaaactattttattatgataaaatactagtgatgaaacaggatagatctgttcaaaagtggacttcgattggttgtaaatgtatcaggtgtgtgccgttacttctaatggcagaaagcacaattatgtctgcactaacctaatttattgaaaactctagggcaagcactaaaatggtttttaaaaagtataattgatatgctaagaaaagagagaayatagaaacatttacaatgcttaattaaaatcacaagaagccaaaaaagtatgaagacaaaatagcaaaaatgaatgagagtggcaaatagaaaacagtaacaaatacagtcaatagtaatccaactacatcaataaacatcttaaacatcaatagtcgaaatacacaaattaaaagattatcaaagta

SEQ ID NO: 433107 - DNA, 549 bp, Homo sapiens
aacaaaaccaaaagctggttctttgaaaagactaattraattgataagcctttagccagacaaagaaaaaaattaacaaaattactaataatctcaagtgaaagagggaacaccactacagaccccatggaaattaaaatgataataaaagaatattacaaataactctatgttcactaattagataacttagatgaaatggaccaattccttgaaagacacaatctgccaaaaatcacatatgaaaaaataaacaatttgaataggactatatctattaagaaatctgatcaataattcaaaaccttccaaaaaatgaaaagcattaagcccagataggtttactgaggaattctacccggaagatagaagttgagggaatatttcctaattcgttatctcaggccagccttatcctaaaactaaaaccatacaaagacattgcatgaaaggaaaatcacagactaatatctctcacaaacatagatgcaaaaatcattagaaaaattagcaaattgaatccaataatgaataaaaagaatcagacac

SEQ ID NO: 433108 - DNA, 549 bp, Homo sapiens
aacaaaaccaaaagctggttctttgaaaagactaattgaattgataagcctttagccagacaaagaaaaaaattaacaaaattactaataatctcaagtgaaagagggaacaccactacagaccccatggaaattaaaatgataataaargaatattacaaataactctatgttcactaattagataacttagatgaaatggaccaattccttgaaagacacaatctgccaaaaatcacatatgaaaaaataaacaatttgaataggactatatctattaagaaatctgatcaataattcaaaaccttccaaaaaatgaaaagcattaagcccagataggtttactgaggaattctacccggaagatagaagttgagggaatatttcctaattcgttatctcaggccagccttatcctaaaactaaaaccatacaaagacattgcatgaaaggaaaatcacagactaatatctctcacaaacatagatgcaaaaatcattagaaaaattagcaaattgaatccaataatgaataaaaagaatcagacac

SEQ ID NO: 433109 - DNA, 539 bp, Homo sapiens
taaagctatgttcaaatcctagtcatctaccttaattaagctgacagctgagcaaattgcctacatgtcccaagcctgttttccacttttgtaaaatgaggaatatatatataaacttttctgggctgacattagagatagagaaataaaactgtctcttaatctaaaataatcacagtatggtgggaaacaaagacaatgaaataatggttttataataccatgttttaagagccacaatgaagggctaataatgaacatggaagtaataataaacatgsaattttattattaaagtaataatgaacatggaagtaaattgtcagagtggattttgtagaggagaagttggaactgggttttgaaatctattgtgagggtcaggtagagaaaagacatcctgggaataagcagcagcattgcacacaggctaagaagacagagacagtctgatttttcagagaaccacaggtagatactatgtaaaataaatgatggtcaacagtattggagaagaaactaaaaaacaggcatttatt

SEQ ID NO: 433110 - DNA, 472 bp, Homo sapiens
tagtggactttactgccatagcagtagaaagaagttagtacagtgtaaggtccctcccaatctgggcctatagagkgagaaagggaaagaagtacctttaccagcattaggtcccctgggttgaatagaggtggccctagttcatgggaatgggcctctgacagttgtttcagttcctattagaaatgagccaaataagttatatgtttattgaatcagaggtttcttggtctagcaagaaatcattggtgagaaaaggccattcatacatcatttcaaagggacttaaatctagctttgaaagggtgttttctaaatgtaatagggttatggaagaaaggggtagaccagggcaaatgagtctctgaagacagtttcttaaggtgcactactgtataatatcattggacttttctacctttcgtgaggattgaggagtccacgcacaatgaagatggtattgtgtgcctgg

SEQ ID NO: 433111 - DNA, 464 bp, Homo sapiens
tctttctaatctattcttcaaatatgcactcattcctctgacatcttcctgatttcttattttgccccttgacacaggcaaaaataattttctttctctttagataataaaccactttccatgctctccttttaagacttttttctttcttcttcttcttttgtcttaatgccttacttagtaattttaattgacctcttcctttcctaattaaattatattctcctagagtggagaaaggggcaggggcaggtcaattttttttctgtctttatgacctgtcctcaacccaatcatgccttggatacagtgggctctcttttagctacttgcatgtatcaatgaaagtgatgttgttgagctacrtagttttcagcccatagatttctcaggaagataatcaacttttttttagaatctaagaaaaaataatcagaagataaatgtctcattaaaactcaagt

SEQ ID NO: 433112 - DNA, 612 bp, Homo sapiens
acacacaccgagcatgaaggctgaaactgtaatgcataactcagttcagccttatttaatttcaagtgatgaacagcaatttgaagttttacattcaaatgagacttacttgactctttttaccaagtgagtgctgtgtgattagggccataaagttgtgcttgttggttaaatctagttagtccttttttgcacatagcaaatatatttagaacttagcttgaagagaatgatatgtgacagggacttctctagagagaatcttgtctcctttttttaggagagaaatatttgtgaaatagcatctgctttgtccacataactctgaataaaggccagacttgcacaggaatccagattgaatgggcagaggaaatacctttctggttgaagtccataactagaccctttctttaaatgtttgttcrtaagctgccttgttttagttacacataaagccatgctgatgaagtgaatttccaacgggatactctgactaggaagctaattcagctaatactttcactgggaacagtggcttttgagagccttgctttgaattatgcaatttgccataaaactcttaaagcaactattttccttttatttttt

SEQ ID NO: 433113 - DNA, 549 bp, Homo sapiens
ctctgcaatgggtttctgcaagttagaatattcttattactgttttgattctggtaaccacacccaccttgtctttggcaattaagtgtcaccgcatgacttctgtcaccctaggactcaattatccccatttcagtggcagaagttcccactgtaatttccagcttataaagaaaagtgaacacagagatcttcaaggatgctggacctttttcacaaattcaatcctcacaaatttggtgaaagatgtgtcctctagtcctcttgctcttrgtggatatgcaagtttgacataatgaacccaccctaacattctaatccagtatatataacctcatctgcaatatatcaaggcagttctagcatttcgatttcatttagtgtgggccaatttttggtccatgtttcagccaaccagccaatcaaactgttaaagccctttctaacgctttgagattcaacattgaatccagaatctctgtttagtaaatccatatcagtaaattcagcctgacccaactgtattttctttccaccattatctcacag

SEQ ID NO: 433114 - DNA, 562 bp, Homo sapiens
actcagctggctcataaactttggagtcagccatgtcatttttgttcacttgccacatccagttatctctaaatcttactggctctatatcaaaatatattcatgttttaccatttctcaccacctccattgctaccatctccatccaaaccaccatttctcttgccttgatgattaaaatggcccckaaaggggtcccactatttctatttttgataccctacttattcatacagaaaccagaataatgcttatgagaaaagataatttcaacattttgcttgaaaattcccaatacctccctataatgaatgcaataaggtgtcactcagatatcgtctgaagtaaaaaatacccattccctagtttctgggagtattggctgctaataactgggtctctttctaataattttctttggctgaaggaaattgcctcatccaagtttgtactttcttcctagaggcaggtctcacccaacaactggccagtgccatggtgcaaaggtccaggccactttagaaaatctctgaagggtcatctcaactctaaagcttcccac

SEQ ID NO: 433115 - DNA, 562 bp, Homo sapiens
actcagctggctcataaactttggagtcagccatgtcatttttgttcacttgccacatccagttatctctaaatcttactggctctatatcaaaatatattcatgttttaccatttctcaccacctccattgctaccatctccatccaaaccaccatttctcttgccttgatgattaaaatggcccctaaaggggtcccactatttctatttttgataccctacttattcatacagaaaccagaataatgcttatgagaaaagataatttcaacattttgcttgaaaattcccaatacctccctataatgaatgcaataaggtgtcactcagatatcgtctgaagtaaaaaatacccattccctagtttctgggagtattggctgctaataactgggtctctttctaataattttctttggctgaaggaaattgcctcatccaagtttgtactttcttcctagaggcaggtctcacccaacaactggccagtgccatggtgcaaaggtycaggccactttagaaaatctctgaagggtcatctcaactctaaagcttcccac

SEQ ID NO: 433116 - DNA, 560 bp, Homo sapiens
gatctcattcctttttatggctgcatagtattccatggtgtatatgttccacattttctttatccagtctatgattgatgagcatttgggttgattccacatgtattggtccgttttcatgcttctgataaagacatacccaagactgggcaatttacaaagaaagaagtttatttgacttaaagttccatatggctggggagtcctcacaatcatggcrgaaggcaaggaggaggaagtcacatcttacatggatggcgtcagacaaaaagagcatttgtgcagggaaactgctttttttttttttaaaccatcagatctcataaggctcattcactatcatgagaacagtgcaggaaagacccacccccatgactcaatcacctcccactggtttcttcccatgatacgtgagaattgtgggaggaacaatgtgatttgtgtggggacacagccaaacctcctaacactctactcctggaccctcccaaatctcacgtcctcacattttgaaaccaatcatgccttcccaacagtccccccaaagccttaactcattt

SEQ ID NO: 433117 - DNA, 481 bp, Homo sapiens
aaactgctttttttttttttaaaccatcagatctcataaggctcattcactatcatgagaacagtgcaggaaagacccacccccatgactcaatcacctcccactggtttcttcccatgatacgtgagaattgtgggaggaacaatgtgatttgtgtggggacacagccaaacctcctaacactctactcctggaccctcccaaawctcacgtcctcacattttgaaaccaatcatgccttcccaacagtccccccaaagccttaactcatttcagcattaacctgagacaaggcaagtcccttccacctatgagcctgtaaaatcaagatcaagttagttacttcctagatacaatgggggtacaggcattgggcaaatacagctgctccaaatgtgaaaaattggccaaaacaaaggggctacaggcctcatgcaagtctgaaattcatcaggacagtcaaatcttaaagcctgagaat

SEQ ID NO: 433118 - DNA, 616 bp, Homo sapiens
ctgggatagactgttcgtcaactcatataagttccataattcacagtcgatggattaaagttagtgtgcatgttgaaacctctttaccattcctgtctgaaaaatgcgttcctgatatagttagaaacagtgaaagaagctcctggctgggctggaaaggatgtgatgtcacgattcgtctgaggaatcctggcagttgttgcctccagagagctctctgttctgtgtattcctgtctcccgacttgttttctccctgatygtggttagctgtgtagccttaactttggtttcatcatgctggaaccctgagcagctgtttggtgaggtggccactgactcttctctgtgtctggctatttcagtgccaatgtcgccctactgactacagcatcttaggagctgtcaccagccctactgtggttttgacaattgatgtgtcagagaaacacggaagagagaattcaaaggacaatgaaccacggaatagataccctttgcaagagtggcactatgtaatgaagaaattattaaaaatcacttaaaattggacattcataattgtaaaaagtataaatattttctttcatttctgactagagctttgtgaaaactgt

SEQ ID NO: 433119 - DNA, 612 bp, Homo sapiens
aggtgcacaaaagaacactgtggggtgagggaagggtaggaattctattaatacctcactcatttatgggagatgtccatgcttttagggaaatccagcaaattctagtctccatcctgtcatggttattgctgctggctttattgttcaagtccatgtgtttcctggaagactggcgcctctggggttccatgacacgtgatggcatgtgattcttcactaaagcaagggaagccaggagtcaggggccaggcgctggcctccctaagcatgccaaacttcagcctcggcatgtttcaccagcacgctgaagtgatgtctggaattggataatgtgttcctactgcctgcaaaacccagagacctttaactcctactcatctggsgagggggggaaacatctcattttctcctcttataatctataaaggtagagactctctgatatggtttggctgtgcctacatttacatatcatcttgaattgtagctcccatagttcccacatgttgtttgagataactgaatcatgggggcggtttcccccatgctattcttgtggcttgagtaagtttcacgagatctaatggttttataaggggaagccccttt

SEQ ID NO: 433120 - DNA, 619 bp, Homo sapiens
gctccaaccccctccaacctactccaccttagtaggtgtgaaatggactgattcacagtgagtcccagctaagcttgggtgtcgcttgtactgtcttgtcaccatagtttattgataacagtgaaagtgatgattgttcaagttctcacctggtcttggtggcaacgcggaagggctcttgtactagaggctagtccatagacaggacatactgatgtggccagcaggatataaaaagcccaactgacacttcatttggagctccctgcttctgaggggttctgtgcacacaggctggcttctgatcggagagaaaaaatgcatcctggcactaccctgcagagaggaaagttggagctggggcccattccttcctgacccttcactgtgaggcggcctttggctgaggtgsttttaccactcctgatgcacgtcttcgacatctttgctgtatcaaatccttttcctaaaataaactgtacatttctaagctttgtcattttgggtcctgtgtgccctggtgtctagacacacagttgatttgtttatattgacctacatttagtaagcttttatactcatttagctattctgcaatttacctttagattattctagt

SEQ ID NO: 433121 - DNA, 608 bp, Homo sapiens
ctgtccccgccaaccgcatcacctggtgataacactggcgccatgcatgtaaagagtgtctttgtaaaggggaaggcagttattatacctgcttcatcataacaatgctttgcacttacaaagaacttcactacacaccatgttaggcagaattctacagacgtgccctccagactccagggagcacccacttagcattgccgctgcatctgcttcctagaactgccatcacgaactgccgcacgctggaggccygaaaacacagacacttattctctcccagttccaggggctagaagtcaagacagagctctgggcggggccacactccctctgaaggctaagcaatcaccccctaccctcttcccagcttctgcagctactggccatccgtgccttcctccatcattccagcctccacttccgccttcacgttgccactttctctgcatctctgtcttttcctcttcttatgagggtctcagtcattggatttaggacccaccctaatctagtaagatatcacttcttaactaatcatttctacagaaacctatgttcaaacaccaccccatgatgaggttctggatggccatcaatttggggga

SEQ ID NO: 433122 - DNA, 514 bp, Homo sapiens
agactaaattcaaaagtcttgcattcctgttccagtttgacactatgtggtcacaggcaaacaacttatgcctcagtttcttcatrtggaccctaatcacatagggttgtttcaaggatccaataagactctatttgcaaaaatcctcatcaaaatatcagcaaattgaatccagcaatatggataaaggattctttaccatgaccaagtgggatttatcccaggaatgcaaggttggtttaacatatgaatctcaatttgtgtaacatactatattaagagattgaagaacaaaaccatgatcatctcaatagatgtaaaaagagcgtctgacaaaatccaacacccttttacaataaaaaaattcagcaaactagaaatagaaatcctctacctgatgaacatcatctataaaaaagccaaagctatcatacttaatggtgaaaaactgaatgctttctccctaagatcaggaataaactgaggatggccactttcactacttctgtgcaac

SEQ ID NO: 433123 - DNA, 605 bp, Homo sapiens
gagggtggctttagtaagatagagttccctgaagttagttggccatttaagtaaactgcaagtctcaggttaaaaaacaaaatagattagattgtgtcctagacagactgggttgtaggaatctggaggcagctggtgatcaatggaaagagctagactagactaggagtccggagaactagataactttgtgaactgccawctgcagtttgtaaggatttaatatgaacaagcctgggctctgtaagctatagagtgctgggcaggaaaatcaggataaatcttagggagcgttaccttaaaacaaccttgtccaacctggggcctgcaggccacatgtggccgaggacaacttggaatgcagcccaacacaaattcataaactttcttaaaacattatgagattttttaaaagctcattagctatcgttagtgttagtgtattttacttgtggcccaagacaattcttcttccagtgtggcccagggaagccaaaagattagacacctctgccttaaatgaacatagtcctttgaacttttttcccacagaactctatcaatagatgaatccttttctctgcccaacatcctggggaataggt

SEQ ID NO: 433124 - DNA, 597 bp, Homo sapiens
agacacctctgccttaaatgaacatagtcctttgaacttttttcccacagaactctatcaatagatgaatccttttctctgcccaacatcctggggaataggtagggcactagttgttatgtctttacattaaggttaaggaaactatggcacagagaagttttaggtgatctgcatgaaatcccattaattgatagattgaggctagaattcatacctgattatctttaagtagtgagaagcaaagaaaaaggtgggtaggtgggtatggtcagcttttatttctgggagagattctagaaactcaatgcttgattgaatagctgacggagagcagtgatgaaaaaccttgaatggttcacgatgtgaattctagagaagcaacttctcatccatgagcagacatctccatccctgactggtgtttcttttaaagagatgaactccaggttrctgtcattctccttctagggtgctgttaagggacagacctggcaaattaaaatcaccactggagacatagtgccattgtttcattgacgatctttcactcctcttaaacctttatcagttgggaagatgatgtgagaggcttaa

SEQ ID NO: 433125 - DNA, 560 bp, Homo sapiens
taatatcaaccttattttcagatggggaaacagaggcccagagagggagaataacttgcccagagtcasagagctggaacccaggcagtctggctccagggtctgtggttggctttccttttattacctgtgctgtctccttgtcacaggcaccatgccaggccccggggggaaagtgataaaaccaaagaacaatgaatttggcagaaccttctcagaaagatgggagaggtgcagagctttttgaggagaaactggggagggtggagctagaagcagagtccattggtttatctcctcaaccccccagagacttctttttcccatggggcagtggaccagcaatttttctcttagttctttgccttccctctcaatgtcccttgagttttttcccccagagatttggccctcatctctcttgaggatctcagggaatttattggagaaggagcttctcacctttactcacagtgagaggtctgcattgtttgcagggtcaccttccaggtgtgcccttcagcgtccccagcttgctaccttcctgtctgtggttacct

SEQ ID NO: 433126 - DNA, 607 bp, Homo sapiens
ggtttttcttctttagcctgttgatatggtgaattttcagtgttgaaccaggcttgaatttttgggataaattctacctggtcatgatgtattaatcttattatacattgtcggatttgatttgctaaaaatttgttaaagattttgcatatgtgctcatgatactcatgatagatactggtctgtagcttttcttttcttttytttttttttttgagatggagtcttgcttttgttgcccaggctggagtgcaggggtgtgatctcagttcactgcaacctccgcctcctgggttcaagcaattctcctgccccagcctcccaagtagctgagattacaggtgcgtgcaaccatgcctggctaatttttgtatttttagtagagatggggtttcaccatgttggctagtctggtctcgaactcctgacctcaggtgatccaccaacctcggcctcccaaagtgttgggattacaggtgtgagccaccatgcccagctgcttttcttttcttataatgtttttgtctagtttcagaataatgctggcctcatagaatgagttgggaagaattatctcttcttccatgttctagaaggctttgtgtgg

SEQ ID NO: 433127 - DNA, 607 bp, Homo sapiens
ggtttttcttctttagcctgttgatatggtgaattttcagtgttgaaccaggcttgaatttttgggataaattctacctggtcatgatgtattaatcttattatacattgtcggatttgatttgctaaaaatttgttaaagattttgcatatgtgctcatgatactcatgatagatactggtctgtagcttttcttttcttttctttttttttttgagatggagtcttgcttttgttgcccaggctggagtgcaggggtgtgatctcagttcactgcaacctccgcctcctgggttcaagcaattctcctgccccagcctcccaagtagctgagatyacaggtgcgtgcaaccatgcctggctaatttttgtatttttagtagagatggggtttcaccatgttggctagtctggtctcgaactcctgacctcaggtgatccaccaacctcggcctcccaaagtgttgggattacaggtgtgagccaccatgcccagctgcttttcttttcttataatgtttttgtctagtttcagaataatgctggcctcatagaatgagttgggaagaattatctcttcttccatgttctagaaggctttgtgtgg

SEQ ID NO: 433128 - DNA, 576 bp, Homo sapiens
tggtcatgatgtattaatcttattatacattgtcggatttgatttgctaaaaatttgttaaagattttgcatatgtgctcatgatactcatgatagatactggtctgtagcttttcttttcttttctttttttttttgagatggagtcttgcttttgttgcccaggctggagtgcaggggtgtgatctcagttcactgcaacctccgcctcctgggttcaagcaattctcctgccccagcctcccaagtagctgagattacaggtgcgtgcaaccatgcctggctaatttttgtatttttagtagagatggggtttcaccatgttggctagtctggtctcgaactcctgacctcaggtgatccaccaacctcggcctcccaaagtgttgggattacaggtgtgagccaccatgcycagctgcttttcttttcttataatgtttttgtctagtttcagaataatgctggcctcatagaatgagttgggaagaattatctcttcttccatgttctagaaggctttgtgtggaattggcattattccttctttatatgtttcgtagaataccccagtga

SEQ ID NO: 433129 - DNA, 567 bp, Homo sapiens
aaaactccatctcaaaaaaagaaaaaaaaaaaaaagatggaacagaacacagctactgaatatgatatatttccttatttataaattttactatgggagggacattttaatcagcatttcaaataatcaaaggagtaaaatttttttctagaaatatcagtatttcactctccaggtagaagattaatgaaaacattaagtgactgccccagttagaagaagataaactaataccttaaaaatatataagaaaaggaagggtacttgctacttaaacatgaattttcacaaaattatccttgtgactaattcagacaatctatttgcttagaaaagctggcaaaaaaaaaaaaagcacattacatgaatatgccttcatttaagtacgygctttcaagctgatttaaaaagaaaagttgaattatggtttccagagctttaggagtccatcttcactgtaggtagcaatcaggttctgatgagggtgatgtgcaataccaatcacatccttctcgtgcactgtcaaagttctttccagtttgccagtggctgtactgaaacagtaga

SEQ ID NO: 433130 - DNA, 614 bp, Homo sapiens
tgcctaactctatttaaacctagccctattcagttctcagttgcccaagaaaatgtagagggaaacatttcatataactcraactcgaaaataatgcaaatctacatctcacagaattataaatgataaaggctagaaagaatctcaacactctcatttcacagacaaggaaactaaggactacagcctttgttatggactgaatgtttgtgtcccccaaaatccctatgttgaagctctaccctccaatgtgatggcatttggagatggggcctttggagggtaattagggttaggctaagtcatgagagtagggctctcatgatggggttggtgtccttctaagaagagacatcaggaagcttgcacgcacgcacacacacacacacacacacacacacgaaaggctatgtgagcacacggtgagaaggcagccgtctacaagccaggaagagggccctcaccagaatgtgaccatgctggcaccttgctcttagatttgtagcctccagaaactaccagaaataaatgtctgctgtttaagccacccagtctatggtgacccaagctgactaaaccagactttaattggattttcccccagtggcagagtg

SEQ ID NO: 433131 - DNA, 417 bp, Homo sapiens
cccagctcaccttaccagtcatggcacatgcttgcaagcctgccatgaaactggaagaactgggaggtcagcccagttttcaaactcagactcgccaaattggtgtccttcctgaggctctcaacctcagagttaaggaatgtgttactagcagtggttaatgtgtgaaagtttgtaaaggccttatttatatatgtgctttatttacttatataaattagaaccgagttgagtttgtctgagtgataactcctctcctactggtattccaatggtttytttgaattaaagagaaagagtgggaaaacagccagtggtctgggaattgcacataatctgaggattactcatgggtgtgacatgacattagggaacctaaccagttatagaaggaaatggtgggaaacaagtgctggg

SEQ ID NO: 433132 - DNA, 583 bp, Homo sapiens
ctgaggaagggaaggagttcattattattctctgaagtcatcagggagcaccaagagggtgggatttcaggaagtatttaaatgaaaggagacacatggcttggcacagtgagagggaggttttccaggcttcctgtgctgtcttggggacctgctcagaggctggaccgcgtcatgctcagaagggtgagttggactgtactctcttggcctggccatgggttcaattcctcatttagacaagaagagagacgtcttgtttctcatcagagggagatgcagaagatgttttctggcagttggaggccactcttaaccactgaggggagaatggctgaagatctaacattataaagaaggcgctgagaatttaaccacttcccctttgaagccaaattatttactggcttgtctttcttctctttttaaatctgccagcatgattaagatgtgtttagcaaggtagggctacagaaggtttgatggaactcctaaacgaatactgtctctaagaaatagtagaagaggagasaactgtgacagaagaaaaataagaggaaaagacattctttgaggttaagaa

SEQ ID NO: 433133 - DNA, 572 bp, Homo sapiens
  misc_feature (1)...(572): n = A,T,C or G
gagagcaaaagggggaaaagcctcttatggaaccatccaatctcgtgagaactcattcactgtcaygagaacagcagcatgagggtaaccaccncccgtgattcaattaccttccatgggtccctcccatgacacatggggattatgggaactacaattcaagatgaaatttgggtggcgacacagcccaaccatgtcataagctttcactcctgctttaaaacttgccttggtctctccttctgccttatgtcccttagttgaattctttcttctgaggaggcaaaaattgaggttgctgcttactcatacacatttgctgctggtaacaatatgtcttatattttgaacactaaaacatgttcctaaataaaaatttgcatatgtaactcatgcttttaatgaaaccttcgattgttcaccaagatatatggaataaatataaatactgacattcaaaaccctccataatatggttttggcccagttccacttcacttctctttccacaaattcttgacatgttacacccttgctgaatatgtactgttnccctgnnnnnnnnnnnnnnn

SEQ ID NO: 433134 - DNA, 428 bp, Homo sapiens
gcaggtccacataagtagttattgggatgaatgtcaatgccctttgcaaaactgtactttcatccccaaactacaatgtactttctgtctgtaactaccagattttactcgccttcctggactctgttcacaggaaagaaaggaaacaaacaaacctcatacattatgaagcatagggtatcaatggccytgctgattatagtgggtgggggtggcataaatacatgtacacccccactgctgccccatccccactcctctgagcactggggtcaaggaatatatattaagcagtttataattcactctctttgctcccttcaggtctgctcctgcgtctatgacagcacacagacagcactgaagtgcaatggatctgcataatgtggccacctctcccacaagattacccgggagcactgattatc

SEQ ID NO: 433135 - DNA, 576 bp, Homo sapiens
tcttgctggctgtaccatctctgtgacaactactcacaatatcctttgtagtgtgaaagcagccacaatcaatgggtaagctagtgcacacagatgtggctgcattccaataagcttgcagacctctaggggatcattctggagaagttttattatcattaccatttctgattgctcttcagttagcagtgatccccaacaccttagctccacactgctcttcctccagctttcccstcacagagctggattgactgtcaaagctacacagaagggcctgcagatcatcgagttcaacccctcggttacaagcaaggacactggggaaaggaggtatggcttgcccatgacctgtggctgtttgtggtcttcaaactgagtttccctgagtccccttggagccacctaggatggcaggaaggggagtagagggggctgaaccacagtgagtcctcctcccaccctttggtaaaatagctcaatgccaccaaccacatggggtaagggttaaccttccacagtgtgagggttaaataaaatcaagcctggaaaattgtaaacacataataaaagtta

SEQ ID NO: 433136 - DNA, 578 bp, Homo sapiens
taggttcaggtgactcaggaacaggcaccctgctgctgctggtccagccccaagtctcatggcccaggctgagacaaagtcttgatttgagcttctgcttttgttccttagggtctgaaaacccatgttcttaacttatctaataatacccaacttagtcagaatgtgacatagacttgtcctgtccctccaggattctccttgccccatttttrtatggattagagtcttagaagcagctacccaccttcccacattctatctatattcccgcctgcatctctatagtcatatttctagacagggtgcgttgtcctctaacaccacgtatgctgagccttcctgaagtccactgcttatctaggggaacacttgactgctttctggtattctactctcttagtatcctgtacctttcctcatctaccaaccatttgttttttgattgcttatggtgtgtcaaacttaaatgctaatggtacttcataaatgttctcatttcattttatgacagccctaggaatgttggttctattattatccttgtattcaagatgaggaaattaaagttcagagag

SEQ ID NO: 433137 - DNA, 578 bp, Homo sapiens
taggttcaggtgactcaggaacaggcaccctgctgctgctggtccagccccaagtctcatggcccaggctgagacaaagtcttgatttgagcttctgcttttgttccttagggtctgaaaacccatgttcttaacttatctaataatacccaacttagtcagaatgtgacatagacttgtcctgtccctccaggattctccttgccccatttttgtatggawtagagtcttagaagcagctacccaccttcccacattctatctatattcccgcctgcatctctatagtcatatttctagacagggtgcgttgtcctctaacaccacgtatgctgagccttcctgaagtccactgcttatctaggggaacacttgactgctttctggtattctactctcttagtatcctgtacctttcctcatctaccaaccatttgttttttgattgcttatggtgtgtcaaacttaaatgctaatggtacttcataaatgttctcatttcattttatgacagccctaggaatgttggttctattattatccttgtattcaagatgaggaaattaaagttcagagag

SEQ ID NO: 433138 - DNA, 578 bp, Homo sapiens
taggttcaggtgactcaggaacaggcaccctgctgctgctggtccagccccaagtctcatggcccaggctgagacaaagtcttgatttgagcttctgcttttgttccttagggtctgaaaacccatgttcttaacttatctaataatacccaacttagtcagaatgtgacatagacttgtcctgtccctccaggattctccttgccccatttttgtatggattagagtcttagaagcagctacccaccttcccacattctatctatattcccgcctgcatctctatagtcatatttctagacagggtgcrttgtcctctaacaccacgtatgctgagccttcctgaagtccactgcttatctaggggaacacttgactgctttctggtattctactctcttagtatcctgtacctttcctcatctaccaaccatttgttttttgattgcttatggtgtgtcaaacttaaatgctaatggtacttcataaatgttctcatttcattttatgacagccctaggaatgttggttctattattatccttgtattcaagatgaggaaattaaagttcagagag

SEQ ID NO: 433139 - DNA, 381 bp, Homo sapiens
tccactgcttatctaggggaacacttgactgctttctggtattctactctcttagtatcmtgtacctttcctcatctaccaaccatttgttttttgattgcttatggtgtgtcaaacttaaatgctaatggtacttcataaatgttctcatttcattttatgacagccctaggaatgttggttctattattatccttgtattcaagatgaggaaattaaagttcagagaggttaagtaacttatcttatatcctgcagatagtcagcatcagggctagaattataacccgtcaattttattacagaacctgagctcttaacactgggctctgctgcctgagggtgactgtccttcatctcttggaggacaagtggctgccc

SEQ ID NO: 433140 - DNA, 431 bp, Homo sapiens
actcagctgtctgggtacaagtgctaagggatatttaattttggcatgcttttattttctcaggagaaaaatagcagaaggaagtgcacatgccattttattccattgaaactgccaatgtgctcaacttaggacttacatggggttagcaacgtaggggcacacaagtcagtactttgttaaactgctccccaggcagggaatgttgtgggttcaggtctaaagamtgtaacagtctcaaggactttggtgtaggagccacttatggtatccagttcactccagacttttgacactgcctgggccctcttcagcaaactcatctctcagcaggtgtggggcttggggacaaaaagttcagcctgaaagtggaaaaagagttccaaaacatgccgggaaggctgaggcctaagggctgaatatgtgtgtat

SEQ ID NO: 433141 - DNA, 527 bp, Homo sapiens
aagtgcacatgccattttattccattgaaactgccaatgtgctcaacttaggacttacatggggttagcaacgtaggggcacacaagtcagtactttgttaaactgctccccaggcagggaatgttgtgggttcaggtctaaagaatgtaacagtctcaaggactttggtgtaggagccacttatggtatccagttcactccagacttttgacactgcctgggccctcttcagcaaactcatctctcagcaggtgtggggcttggggacaaaaagttcagcctgaaagtggaaaaagagttccaaaacatgccgggaaggctgaggcctaagggctgaatatgtgtgtatctgtctattcatgagccttggttctgtttgctgtgccagctggtagaaactatttttgtcttttcccttcaggctgccggagtctccactmgggagattggactctaacagagtaaaggccagagggccagaggaaatcactcccatttgttgcattccccagggatatctttgatt

SEQ ID NO: 433142 - DNA, 541 bp, Homo sapiens
ggtgagtgggtggaaatcatgtcaatagagaattcaggcacagaatgaacaggtttttgagaagagataatgatttcatttttgggcttattgactttgatcatcatagctcacttttattgattctcactgagtgccaggcactacactaagcattttgcatatattgtctcttagtaattctcacaacagttccttgcagtaaaggttatcaacccatgcaaacttcagtaaccagcccacagttattaacttgcccataacttgtccacagttataaaggtgtagagctgggatttgaacccaagacttttgtgtctccagaggcggcacactttaccactatatacactgcctcttgaatatctttactatgaatattaaattaatctctttttcatgtttttagtgctaagatggtctttgggggaacataatggtccacgctgcytcttgcctaggttgtgttttgtcctcttgtttgcagtccccttgtataaatttgacccccagactccaggatttcttttatgacatgtgc

SEQ ID NO: 433143 - DNA, 309 bp, Homo sapiens
tttcttcttcttctatgctcttctacaggtgatcttatacataagcatggcttcagttaagtactctctgttgattcttacttccacattctcagcacagaagcctcagagtcccagacccatataacttactgcctgctcgacatctctgctatgatttccacataaatgtcagtatagtaagacttaactctagtcaccrtaagtgtaccctcaaggacaaggccatccagccagttgttcttggcaaacacttagaatccattcttagtatctccttctcccttactctcctatccaatcaattta

SEQ ID NO: 433144 - DNA, 594 bp, Homo sapiens
tctgaaaaagagcattcttgtgtgtgggtgctaaggtggctcattctctcccccaaaccaccagtttttttgaacacctaatttgtgctaggaatgatattaaagtcctttatatgaagagtctctaacttttagaaccacaaggcgagtttaatccccattttaatttgagggaaaaggagaataacagagattataatgtgttcaaggctcrtgtcactcactaggaaatgtctaaccatgtcaataatacttatcattatattatatttctttttacttgtttattgggcagggtgaggagttaaggctagatcagcctaaggagattttcactggaaactggtaatccctgagaagctttcttagtaggagacttgagaggtttcagcgcttcagtgtaagttgttgcagtatgagtttcagtgagcctgtaattcaaagagctttatggagcccctaccatgtgtactgcatcatgccaagttaagtgcaggtaaagaagaactagaagccatgagtatgcgccagtcctgatccattttgctgaatgagaatgagcccagagtcacttaaatgagtgcgaggagtggc

SEQ ID NO: 433145 - DNA, 594 bp, Homo sapiens
tctgaaaaagagcattcttgtgtgtgggtgctaaggtggctcattctctcccccaaaccaccagtttttttgaacacctaatttgtgctaggaatgatattaaagtcctttatatgaagagtctctaacttttagaaccacaaggcgagtttaatccccattttaatttgagggaaaaggagaataacagagattataatgtgttcaaggctcgtgtcactcactaggaaatgtctaaccatgtcaataatacttatcattatattatatttctttttacttgtttattgggcagggtgaggagttaaggctagatcagcctaaggagattttcactggaaactggtaatccctgagaagctttcttagtaggagacttgagagrtttcagcgcttcagtgtaagttgttgcagtatgagtttcagtgagcctgtaattcaaagagctttatggagcccctaccatgtgtactgcatcatgccaagttaagtgcaggtaaagaagaactagaagccatgagtatgcgccagtcctgatccattttgctgaatgagaatgagcccagagtcacttaaatgagtgcgaggagtggc

SEQ ID NO: 433146 - DNA, 619 bp, Homo sapiens
caactggtaaggtttctgcatgaagcagtcaaagtctatgtatgttcaggaccctccatgtgaatgaggctgggacacagctgtgtggatacagacctgcagcattgccacacaaagcatacgtgatgcaggtaatctatctgcacacaatgctggattgyatgacactgtcatcccctgcactggataaaagctcttgacaatgaactttcttgggggtgttacaggaaggctactcttaaagcttcctcttgattctctcctatcagacctgtcattctcaaatcttgtggtgcattctgactaggacaggtgagtgtgtgtgagtgtgtaaccttggatgaataaattcattaaaaatgggatcttatgtccttggtgtctttttaaacattcctctttatgatcatgcattaccaaagagaagtgttgctttatttgatcatttgatctttgcttttacaattaccaacctccggctgggtgcgatggcctgtaattccagcactttgggaagctgaagcggttggaacccttgagctcaggagtttgagaccagccagggcaacatagggagaaccttgtctcaatacaaaaaaaaaaaaaaaagaaagaaatt

SEQ ID NO: 433147 - DNA, 619 bp, Homo sapiens
caactggtaaggtttctgcatgaagcagtcaaagtctatgtatgttcaggaccctccatgtgaatgaggctgggacacagctgtgtggatacagacctgcagcattgccacacaaagcatacgtgatgcaggtaatctatctgcacacaatgctggattgcatgacactgtcatcccctgcactggataaaagctcttgacaatgaactttcttgggggtgttacaggaaggctactcttaaagcttcctcttgattctctcctatcagacctgtcattctcaaatcttgtggtgcattctgactaggacaggtgagtgtgtgtgagtgtgtaaccttggatgaataaattcattaaaaatgggatcttatgtccttggygtctttttaaacattcctctttatgatcatgcattaccaaagagaagtgttgctttatttgatcatttgatctttgcttttacaattaccaacctccggctgggtgcgatggcctgtaattccagcactttgggaagctgaagcggttggaacccttgagctcaggagtttgagaccagccagggcaacatagggagaaccttgtctcaatacaaaaaaaaaaaaaaaagaaagaaatt

SEQ ID NO: 433148 - DNA, 350 bp, Homo sapiens
cacagaagccaacctgaaggagttcccaatggccagagctggaagaattaaaaaaaaagaaattttaaatgttatttcartagttttaggggtacaggtggtttttagttacatggataagttctttagtggtgatttctgagatgttagtgcactcatcatccaagcaatgtgtgcactgtctcttaccccctctcaaccttcccccacaagtcccccaaatccattatatcattcttaggcctttgcatcctcatagcttagctcccaattataagtgaggacatacgaaatttggtttttcattcttgagttacttcacttagaatagttgctgcaacacattactt

SEQ ID NO: 433149 - DNA, 554 bp, Homo sapiens
ctcacagccatatttcactccgttgccttttccttttcatcatgcacccacaataattatacatgttattacacttcatgttttacaaaaggctttcagatacaccccttctttcaatcctcacaatttccctgttaactaaaaattttatgctcattttaaagcctgaagaaactggaaactgacatttagagggccctaactactcaagatcatatagacactcaggagcaaagatggacccaaaaccagaccctgcactatctctacaaccacttctctaatcctagacaagcagacagatrgacagatagataggcagacagatagacagataaagaaccctatactttttgcataaagagtgcttagtaattatctgttgatttattggactaaatgtgttttcttttgaatcaaatgtgatgccactgactcaccatcacatgccttagattacttgcccattagaggaacaggtttaacaactatttgtttgagtacctactatggacaaggcactgttgaaagtgttgggggaatacaaagggcgt

SEQ ID NO: 433150 - DNA, 512 bp, Homo sapiens
tgtcatgtggcataccaagttcacacctgactttctgcagataccattctctaaggccgtgattctcacatcatgctcatgggtgggaatcatctgtggagcttgtcaaatggacatatgtctaggcacaatcaagccccagattctgattcagagggtgggagcaggccccttaagtctgtgtgtttagccaccttccaggtgagtctgatgtagatggtgccaggagacttggagccaccctgctgcaggtggaatgtctcagaccccatcttcctctacctcccatggatgctactccatggttgataccagccaaactgggtctagtccttcttcaaaggctaatataatacactaaatacagaggtttctcaaactctgatattgctacrcattctgactatgtccttctgtacctgcaccccccaccaaacttttccccaatcaactatttctctacctacagctatgtctattcattttcactactggacagagttatccaaatg

SEQ ID NO: 433151 - DNA, 591 bp, Homo sapiens
atattttctaatattcaaaggtatttctaatattcaaggaaatcaaagaaaatattttgaaaggatccagagagaaaaaaaaatcttacctatagagaaacaaaggtaagaattacatctgacttctcagaaatcatgcaaggaagaagagaatgaagtgaaatatttaaagcgttgagagaaaaaaaaaacccaccaacctagaattttgtaccctgtggaattatccttcagaagtaaagaagaaatactttctcagataaaaattgaagaaatttgtttccagtagacctgccttgcatgaaatgttaaaagaaattcttcagagagaaaggmaattatgcaagtcaaaaacttggctttacataaaggaagagcataagaaaaagagtaagtaagggtaaaaaaaaccttttattttcttatttttaagtaatttaacagataactgatccaataatagcaacaaagtttttaattatgtttccttatatatcatatgtattattcatgcatatatattatatacacttaagtaatgtttaaaattaacgacagcaatgatacaagggacaggattgagatattagt

SEQ ID NO: 433152 - DNA, 562 bp, Homo sapiens
tagggtgatgatgaggtactgttgttttgaggttttttacgtagtgctttggatttttttaaggtactgttctctgttacaaaatttatgcattttttgtttttaaaagaatgtcaaaaagtaaagaaatgtgcaaattatactcttcccttactcttacctaatggtgaaagtctgaatgaatgttcttccctataagatcaggaataaagcaagggtcactatttctctccaacattatcctggagtgtctagccaagtataatagctcaagaaaaagggataaatgttgttcataccagaagagaagaatcaaaactttcttgatttgcaattgacatagttttctattagaatatcctgtagaaactttaaatagctaccagaactactgagcaagtttagcaaggctgcagaatacaagaagagaatacaaaaatgaattatatttstaatactaacatcattgttctaacgaacaatcagaaataaaatttagaaaaaaataagtattattaaaaatatgaaatacatggggatgaacctgataaagatatgaaag

SEQ ID NO: 433153 - DNA, 596 bp, Homo sapiens
tggcttattctaacatttcattcccaaatagaagtctagactagggggaaaaactccatatctctattgattgtgcctaatggagggaggttaatttgtggtctttgcccttagctgttactaaagaaaatggagatggttctttttcatattttgtgatggatggcaaaataaaatgttgacttttttttcttaggaaatatgactgctgagtcttagaatggctgggtggaatgtgcgaggctaattagtgctcacttacgtatttagttcacaatcagaaacactaggctacaaacctctataggaaaaggaaaaaaaaaatgatctcaaggtgaaaaagaagactctgctctgaaaagcccttgagaattagattatagatgaaaaaaggcaaattgtccctcaggaaaggttctttaaaaattcaactcaccactgtgagcaagattttatcctaaagagtgtttcattctttagctgrtaagttgattaaagtaaacactggttaactaaaatgaatgaaagagctatgtggactcctggtttttgatgagttggtcactgtgattgagttgcaatgaaaacatcatgct

SEQ ID NO: 433154 - DNA, 538 bp, Homo sapiens
ctaacgcctttcctctgctggtcctgctggagaaccgggagaagaggctgtctccctggctccatgagtgactgaaccagcagccatttccccttctgagtttcctggctagagaaatggtgagctgctcttttttctgggagtcatctaggttggaaaacaagtcagtgggaaaaagaagtggtggggctgtgtcatggatttggtattcccagtgctatctgtaggagcaagccttattctgaaattcaaccgcctttacaccaggtccttataagggctctccgcccactcttcctatgctatctctctgttcccacaaaattcctgttctatccccaacacagacttgggygcatcttctcacatcgtcctttctagcttctttctcttccccgccttacccatgcattgcatcccggagcccaagctctgcccttcctgaaggaccatcaagcctccctcctcagaagcattcctctctgtcctgaggctgcgagagctcctctctgatgctcctgtaaataaaacattcacc

SEQ ID NO: 433155 - DNA, 617 bp, Homo sapiens
gaagggaattcctagcacagtcaggagacttgttcaagaggtccccaaggacaataaattggagagatctcagaggctgttcccgatgctttgatccytaatgagtaatgaaagcttaagaaagtgtttgtgtctgctgtacaaactaggcaaggtagaaatgctatcttcttgctgtcccaggattgagccagctaagcttagccctcaggctgcagccgatgtgaactgtcccatgatgttagtcctcacttaatagctggagaagtaaagaaaagtggctgttcataggaattcagtttattcattaactctacattgtgagctagaagcgggacttctccctgaggcgtggagcctcctcagagcggatctgctgacaaacaatcatcagtggatctcacctgttctattttctttccttcttacaaggcctgctgtactagagatattagtttagtactccaaaatgacacagagatctgtgcagttacaattactcaagtaatggtgacagactcaatgttctttgttggaattaccagggtttttgagaatgaggaacactagtcaagtggtgaagatattatcctttggaattgcacataactgcaaga

SEQ ID NO: 433156 - DNA, 553 bp, Homo sapiens
  misc_feature (1)...(553): n = A,T,C or G
aagaatgtgtttgcattgtaccagagctctacaactttggccagctaagaaggaagcatctctgggagctttgaatgtcaatataaarccttatttgcacagttgtgcacttttggctgacttgttcagtggaccatctaagttcatcactttgaacttttataaacattttccttaaagggatgctgctctcaaagttaggtttatgtgtatgtttaagcgcttaactctattaactactcctttatataaatatggaattttcccaaaacacttgtatatatattaactaagtttttaaaattgtaaaatgggatttaaaattaccttgtcctacttaatttcattgccgtataaattggcaccagaaaaacaacttgaaacttgacggtgtagggtttaaagagttaagaatttactgatgggttttaatacattaaaaaaaatttttttttttagagatagggtcttgctgtgttgcccaggctggcctcaaacttttgagatcaaagccatcctcnccccatcagcctcctgagtagctgggactaca

SEQ ID NO: 433157 - DNA, 553 bp, Homo sapiens
  misc_feature (1)...(553): n = A,T,C or G
aagaatgtgtttgcattgtaccagagctctacaactttggccagctaagaaggaagcatctctgggagctttgaatgtcaatataaaaccttatttgcacagttgtgcacttttggctgacttgttcagtggaccatctaagttcatcactttgaacttttataaacattttccttaaagggatgctgctctcaaagttaggtttatgtgtatgtttaagcgcttaactctattaactactcctttatataaatatrgaattttcccaaaacacttgtatatatattaactaagtttttaaaattgtaaaatgggatttaaaattaccttgtcctacttaatttcattgccgtataaattggcaccagaaaaacaacttgaaacttgacggtgtagggtttaaagagttaagaatttactgatgggttttaatacattaaaaaaaatttttttttttagagatagggtcttgctgtgttgcccaggctggcctcaaacttttgagatcaaagccatcctcnccccatcagcctcctgagtagctgggactaca

SEQ ID NO: 433158 - DNA, 582 bp, Homo sapiens
ctacagcctcaagctcctgggttcaagtgatcctcacacctcagcctctgcagtagctgggactacaagtatgcaaaaaaatgcccagctacacacacacacacacacacacacacacacacacacacatgcacacacacacgtagagacagggtctctctatgttgcccaggttggccttgaactgctaacatctcagcctcccaaagctctggggttacaggtgtgagccactgaacccagccccttctttcacttttttaatgttatgtgttcttttcctgtatcccattatgttcattttacttggtttactctcttatttggtggagcacattctcctcgttgcccaaggaaggatgcataagatggaaaaattctgagatctggaatatcggaaaatgcctttattctgcactcacrcttgattgagagcttgtttgggcatagaattctaagttggaaatgttttttctggtcttgtttcatgtttacagtatttcctacagtgtctctgagagcattaattgtatttttgaagtttttggctcctacacagttcctgtatctccaaggtttggt

SEQ ID NO: 433159 - DNA, 582 bp, Homo sapiens
ctacagcctcaagctcctgggttcaagtgatcctcacacctcagcctctgcagtagctgggactacaagtatgcaaaaaaatgcccagctacacacacacacacacacacacacacacacacacacacatgcacacacacacgtagagacagggtctctctatgttgcccaggttggccttgaactgctaacatctcagcctcccaaagctctggggttacaggtgtgagccactgaacccagccccttctttcacttttttaatgttatgtgttcttttcctgtatcccattatgttcattttacttggtttactctcttatttggtggagcacattctcctcgttgcccaaggaaggatgcataagatggaaaaattctgagatctggaatatcggaaaatgcctttattctgcactcacacttgattgagagcttgtttgggcatagaattctargttggaaatgttttttctggtcttgtttcatgtttacagtatttcctacagtgtctctgagagcattaattgtatttttgaagtttttggctcctacacagttcctgtatctccaaggtttggt

SEQ ID NO: 433160 - DNA, 543 bp, Homo sapiens
ttggaaaccagacttctttgatctaaaagctgtcttactctttactgtactagggttatatgaaaagttaaagttttgatagaatcataattgttttctttcttcttgckgaaaaggactttaaagatcattttagtttatgccacatagttggccaatgaagagataggttctaagagtaaatggccacagtcatattcttggactcataatgagatgatttttcaatagaaactcagtggaattgttttgttttaatgcagttgaatgattttgtagaaaccctggtttcagttttaaagggaaaagcctgttgcttgcattatctatctctgtccacctgtctgtcagcctgtctgccattcatctctctattaaacctagagaaaggaatagttacattctttatatactgcttcaacttcttcgttgtttaattttggttagtagtcttcaagcttacgtagtgaaatatttggaagggtaagggggttaaagagtaattggttctttgttgcagagactggacccggaaaaagcata

SEQ ID NO: 433161 - DNA, 649 bp, Homo sapiens
ttcttttttaacaaatatctttcaatttatattattgatctaaattgtaggttaagtgagccataaattgttggtattattaagtagtaagagataaacagaaagaaaagttagtattttgataccagtttcctaagcaacaatgcyaatatttgacagcataattatttcatgaggcactgaatgaaagtgtagtttaaatcatgtgacttcttgaaagtagaaaaaagtttaaagttatatataaaatttataatattgtaatttctcttaatgttgcactatatcttatgtacctcaattatttttgtgctgtatcttacaaatagatttaactcaaaagtaattaaaatattaattgatcacacataacacaatggctaaaattaaaaagacagcatcaaatgttgacaaagaatatggagcaaccaaagcttatacattcttgttagggaagtcaaatggtacaaccactttgggaaaggtatggtggttacttataaaactaagcatctaccttccctgggactcaacccttctactcttaggtatttacccaagagaaatgaaaacataggttcatagaagttcttgttgataatcaccaaaaactggaaacagcccagttgtccatcaataagggacacaa

SEQ ID NO: 433162 - DNA, 666 bp, Homo sapiens
cacagcaccatcttcttctgattttgctcttaactctctcttcacacattttcagtccttttttttttttttttaaataaactcttcatcttctatatgtctttaaaatgttagtcttccctattcttgggccttatctcttacaactccacatacctttattccactgctcctttatttaccatattcctggttttgataccttctgagcactagacctgcattcttcagctattttttggattttctattttaatatatcgaaaatgcctcatattgtatttcctaaaayatcttgctttgttttctccaccttgatcaatgatacctttctccacatttgtgcctaagctagatatctgggactcattgctgatttcattttctggcagtttccatgaacactttgtctttctacccatcctctaccccttattttctccatgtccttttgctcctctgcagtattactgccaccctttagtttagagcttctttcatcttgactaggctcttatctggttgctttgcctctggccttcccttcttccaacaccaataattgtctgccttctctttacaaatatatatctgattatgccattcccctgcttaaaactccattgttatctaaatgtatagcattcccttcctgaacaggcattt

SEQ ID NO: 433163 - DNA, 666 bp, Homo sapiens
cacagcaccatcttcttctgattttgctcttaactctctcttcacacattttcagtccttttttttttttttttaaataaactcttcatcttctatatgtctttaaaatgttagtcttccctattcttgggccttatctcttacaactccacatacctttattccactgctcctttatttaccatattcctggttttgataccttctgagcactagacctgcattcttcagctattttttggattttctattttaatatatcgaaaatgcctcatattgtatttcctaaaatatcttgctttgttttctccaccttgatcaatgatacctttctccacatttgtgcctaagctagatatctgggactcattgctgatttcattttctggcagtttccatgaacactttgtctttctacccatcctctaccccttattttctccatgtccttttgctcytctgcagtattactgccaccctttagtttagagcttctttcatcttgactaggctcttatctggttgctttgcctctggccttcccttcttccaacaccaataattgtctgccttctctttacaaatatatatctgattatgccattcccctgcttaaaactccattgttatctaaatgtatagcattcccttcctgaacaggcattt

SEQ ID NO: 433164 - DNA, 458 bp, Homo sapiens
tgttaaagctccaccaatgggttaagccaaactaaataaatcaatctctggaaattgcattgtgggggattttatatcccacaaattgtcttatggtgaaagsagatgaaacctgaagcaacaaaacttttgtctccgaatctccgtacagttgaggtggcaggcaatttagccttaatcttttctgtgtcccttctctccaaatcccataatctcaaatccataatctcaggtttgttgggtgctatcgtgtctatggagtgtgtgagaaaaggtgcctggtcatttgtccactacagtgattgctgaggacattattcaccatcctttacagcatggtcccttccggtctctcctaattccatgcctcatttctagaaaataaaatattgtgttaagcgaaatgtgcacccattttccttcatggaggcttgccacttccctgtagcactgctagc

SEQ ID NO: 433165 - DNA, 586 bp, Homo sapiens
gtagggccaccctggctggcccagaggacagagcatcagccaaagagaattattctcaaaccttaaaatttaatggaatttgctgccgggtgcagtggctcatgcctgtaatcccaacactttgggaggccaaggtgggaggattgcttgagcccaggaatttgagaccaacctgggcaacatagcaagaccctgtctctacaaacaataaaaaaaaaattagtggggtgtggtggctcatgcctgtagtcccaactactcgggaggctgaagtgggaggaccacctgagcccaggagagttcaagtttgcagtgagctatgatgacactactgcactcaagctgggatgactgagtgagactctgtctcaaaaaaaaaaaaaaaaaaaaaaaatcaaatgaaatttgttctgctagattttagatttgtttgggcctcataactccctctttttttctgatttcttccctttggaatggacacgcctatcctaaacctatcccactattayattttgaaagcaaacaacttgtctagtttcacaggttcacagctggagaacaattttactcagatgaatcatac

SEQ ID NO: 433166 - DNA, 490 bp, Homo sapiens
ttcacagctggagaacaattttactcagatgaatcatacctcacccatatctgcttttttttggagacagaatttcactcttgtcgcccaggctggagtgcaatgacactatctcagctcactgaaacctctacctcccaggttcaagcgattctcctgcctcagcctcccaagtagctaggattacaggtgcccaccaccaggcccagctaattttttgtatttttagtagagacagggttttgccatgttgggcaggctggtctcaaacycctgacctcaggtgatccgcccgccccagcctcccaaactgctgggattacaggcgtcagccactgtgcctggccccatatctgctttagatgatgtttagatgagattttgaacttagagttggtgcgggaatgagttgacttttgaggctcttgggatgggatgggtgtattctgaatgtgaaaaggacatgaatttgggggtaaaatgttacagg

SEQ ID NO: 433167 - DNA, 490 bp, Homo sapiens
ttcacagctggagaacaattttactcagatgaatcatacctcacccatatctgcttttttttggagacagaatttcactcttgtcgcccaggctggagtgcaatgacactatctcagctcactgaaacctctacctcccaggttcaagcgattctcctgcctcagcctcccaagtagctaggattacaggtgcccaccaccaggcccagctaattttttgtatttttagtagagacagggttttgccatgttgggcaggctggtctcaaacccctgacytcaggtgatccgcccgccccagcctcccaaactgctgggattacaggcgtcagccactgtgcctggccccatatctgctttagatgatgtttagatgagattttgaacttagagttggtgcgggaatgagttgacttttgaggctcttgggatgggatgggtgtattctgaatgtgaaaaggacatgaatttgggggtaaaatgttacagg

SEQ ID NO: 433168 - DNA, 497 bp, Homo sapiens
ggtagttgggaagtgggagaatgcttccascagggatcacatgaatggttccacagaactagaagatgagactgctaccaggccattttgggcatcttatgccactgaagcaacatgcgtaaaaggagggaggggtggtgttaccctacttgttgaagtgattgattccaattaccaaactgaaattggaggcaaggaggactatgtgtggaacccaggggactctctggggtgcctcttaagtggctataccattttgcatcccccccagcaatgaatgacagttcctggtgttccacaccctctcagcatttgatgttatcagtgttttggattttagccattctgataggtgtatagtgatatctcattgtattaatttgctattccctgatgacatatgatgttgaacatctttaaatatgcctactagccatgtgtatatcttctttggtgagtgtctaagtattttgcctattttataattgggctgtttg

SEQ ID NO: 433169 - DNA, 497 bp, Homo sapiens
ggtagttgggaagtgggagaatgcttccagcagggatcacatgaatggttccacagaaytagaagatgagactgctaccaggccattttgggcatcttatgccactgaagcaacatgcgtaaaaggagggaggggtggtgttaccctacttgttgaagtgattgattccaattaccaaactgaaattggaggcaaggaggactatgtgtggaacccaggggactctctggggtgcctcttaagtggctataccattttgcatcccccccagcaatgaatgacagttcctggtgttccacaccctctcagcatttgatgttatcagtgttttggattttagccattctgataggtgtatagtgatatctcattgtattaatttgctattccctgatgacatatgatgttgaacatctttaaatatgcctactagccatgtgtatatcttctttggtgagtgtctaagtattttgcctattttataattgggctgtttg

SEQ ID NO: 433170 - DNA, 491 bp, Homo sapiens
taaaacagcgtaagggaattgatttcatgatttttagataatttccccaagatttcagaaaggacctcaaaaactaatttaatcagccaggagctcaatagtaattaaggggaagaaaagctgagataatgaaagaggtggtgaggatttttgctgttgctggtgggaacctttcttaattgggaaaatctaaaaactaaatgatgttagtggagaccagcctaggcatggggagccagcagccggcaccaccatcagctgatgatggattgcccacgcggttcctcctctccaacrggccggaatgattggccacagaggtgccctacttggcatttccatgggtagttgcctgaatctggcaggtttggacttgttggggagtacaggcttcgtttctacacagtcctttccagtgaagggctcattcttatccaggtggtcatcacccttggatggcataggatttgggagtgcaggctctggggtca

SEQ ID NO: 433171 - DNA, 533 bp, Homo sapiens
taaaccttgggaaaggtaggatagatcattggaagcacaaactcaggactcttaatttttccttttctcatctcttctcctctctatgggccaaatttctacwcttcagataagatcatccataagttgggaggacaggcattgctgaaggaagcttttctgatctgagaggaaaaatattctctttctttaccttcagtttgaaaatgtctatagaaggaatctgattataataatataattataatcaattatacaattaattttaattaattaattaacaatataattataattaatcagattccttccataattaatcagattccaattaacaagggcaggattcctgcccttattagcatcttaaatcagggagacagggtcagctcgtctgatgcataaccatgatgggaaatgtaccttgtccctgagggaactgtgagcaggcatctctgtttatgtctaatccaatggcatacctagggaattataagtgatttgatgttactgaatctgagggaaggctaaaa

SEQ ID NO: 433172 - DNA, 533 bp, Homo sapiens
taaaccttgggaaaggtaggatagatcattggaagcacaaactcaggactcttaatttttccttttctcatctcttctcctctctatgggccaaatttctactcttcagataagatcatccataagttgggaggacaggcattgctgaaggaagcttttctgatctgagaggaaaaatattctctttctttaccttcagtttgaaaatgtctatagaaggaatctgattataataatataattataatcaattatacaattaattttaattaattaattaacaatataattataattaatcagattccttccataattaatcagattccaattaacaagggcaggattcctgcccttattascatcttaaatcagggagacagggtcagctcgtctgatgcataaccatgatgggaaatgtaccttgtccctgagggaactgtgagcaggcatctctgtttatgtctaatccaatggcatacctagggaattataagtgatttgatgttactgaatctgagggaaggctaaaa

SEQ ID NO: 433173 - DNA, 561 bp, Homo sapiens
ttttagaattctaagaaatctctgcatatcagaaagtcttaaatatgttttcctgttatttttcctagaagctttacagtttttttagtttagtcctgtcattcatttcacattaatatttatgtattacataacatagcagttaagattcatattttttccttacaaaaatcctgttgttacagcaacatttgtttaaagacttccccttctctattgaattgtctcggtaccttgtcaaaagtaattgacttttaaaagtgtatatgtttatttttggtctgtctatccagttttattgacctactgatctatattttattaacatcttactattatgattatatagctttttaatgagttaataagttatggagtcagtgtaactactacaattttattcttattttttaaggttatattccaggtcctttgcattttcatataaagtttaggtttagctatcagtttctaccacatttwaaaaaaaaaaaaaaaggctgggcatggtggctcttgcctgtaatcccagcactttgggaggccgaggcaggcagacca

SEQ ID NO: 433174 - DNA, 638 bp, Homo sapiens
ggaaactctcatttttaaaaccatcagatctcatgagacccattcactatcacgagaacagcacaggaaagacctgccmtcatgattcaattacctcccactgagtccctcccacaacatgtgggaattcaagatgagatttgggttgggatacagccaaaccatatcagtcagatcacatctttctccctttcaaagccttccaattatttcccaatgcattttgagtaaaatccaaattgtacatttaaggtcccaaatgatctagctcccgcttgactctcccacctctttcattctttccctgattactctacttcagccattcttgctctgtttaaaatgtgccaagcttgtttccaccttggatctttgcacttactcttccctctccttggaacatccttcctttgggtcatatcacggtttgtttcttccctgccttctaaattctgcttaaattgaacctccttgtgtgaggcctttctgatgcactccatcctaagcaggttctcacacaaccatatattgttaccctcatcctttatcctgccttgtttttcttcatagcacatattacttcctgaatttacactatgtatttcttatttacttattatatgctcccccactagaac

SEQ ID NO: 433175 - DNA, 579 bp, Homo sapiens
gtgatagtaaatttctgaggttgggtaatggattaacaggtgtttattttattattttactttttaagctagcacaagttatataatttcttttgcacatataaaatattacatcatgaagtatttttatattaaaataggaatgtttttaaaaagagcaagtggacagggcatggaacaagggagatagcccatgtaatttaaaatggccgagaaagtggctggcaagatggccgaataggaaaagctctggtctgcagctcacagtgtgatcaacgcagaaggtgggtgatttctgcatttccaactgaggtacctggctcatctcactgggactggttagacagtgggtgcagcacaaggagggccagccaaagcagggtggggtgyctcacccaggaagtgcaaggggttgggaaactccctcccctagccaagggaagccatgaaggaccatgctgtaagggatggtgctatccagcccagatactatgcttttcccatggtctttgcaacccacagaccaggaaattctcttgggtgcctatgccaccagggccctgggtttcaagcacaaaa

SEQ ID NO: 433176 - DNA, 572 bp, Homo sapiens
gtgtgtgggccgcactaacataggaactggaaaaatatctgtgtggagtggatctgaagaagagtcgctcttggtctatgaatcgcttttctcttcctcttccaaacatctgtgaagcaatgaaataatatgtgtgaagtctgaagattcccttccggatcaatctgagagtcttttttttacatcagtggccataaagaaacaggttaaagcatcaaatgggaatgaaattgcttccatataatatttcagaccctgtttttttcccaatgcattaagcagcctgccaactaacaagcgactcatttccatatttggaatattttctgtggtggttatatgtttgtgtacttgtgggggttagggtatctaggaaaaagataaaaagaaaaacaaaagaacaaccaacacttttagctgatcagcattctgtccttaaggcaaaataagggttgcaattcttttgaacacctttgtctayctacagcctcacaactcaaaatgtggtgcaaggactggtgtcacccacaccgcatcgcccatgaccttattagaaaggcagagactggagc

SEQ ID NO: 433177 - DNA, 566 bp, Homo sapiens
taacaccctttcctgcagcttttgtcacggctgctatgcctgttgtctgtgcattaatgcctgtgcccttcttggcattcagaaattcctctgtgccacaggaagtatgggcaaggggctgattagtggcagagattacctggatctgtgtgttgttgyaggatgctctaatgtgtgcagttgggatctcctcaaatttctttcctgcccacctcagagagcttttttcttttgtaatgggacggtaaatgctaaagctggtgtagctgggagctaccatcttctcttcaatgttctgcttggcctcaatgtcttggatcttctgggtgcctgtgtggatggtctgcaccagcatcctggccatgaccctgtcaggaggaaaagattaaggagggccacagcctaacagtccttggggtctgggtggctcatgtgacacaggcagtcctggaggtggtggtgagctcaaggggacaatcattgttacctggtggtcaaggataaagtccaggaccacagaagtgaaaactcacatttcttacaacctgcatgactcaaattgaccc

SEQ ID NO: 433178 - DNA, 620 bp, Homo sapiens
atatatatatatatataaaatctaactgtacacttacgatctgtgcatttcactgcatgtaccttaatacaaaggaaaaaaatgctgctcacttttacctaggactggtttataagtagctgctagtcagtatgagacagaataactacaccaggagtaactaagccaataattaagtcaagtcattrctgtttgctgactggatctttgaaatgtgctccaaaaaccagtgtaagacagggctctggaatggaagcgcagggacttcttggaggcatgtgccaagcagagagaagtgagcataggggaagagagaaagaaatgaaagacttcctacttgaaggaagacttcctactcaaaatgagcctgcagaccagagttccaaatcacagaagaattcaaataccaataaaggcagctaacaaaatcaatactcagaacatgaattcacccaaacataattaacctcataaagcagtgcaacactgactttaaaataagtatcctgaggattctcaatgagagatctaaaggaatcatatcgactaaaaaattgaaaaaaatcttaaatgatattttaaaatactggtataaaaacaaaatcagtaaacacgcaaaa

SEQ ID NO: 433179 - DNA, 375 bp, Homo sapiens
gggattaattctccagtcgtgtttgttaaaacttgagtttgtttcctttgagttctgaaaatatttgcattacaagtgttcctcaactttaatacctggctatttaggggttggttatttttcccattaataatatagtcttgtcctggtctgtatgtcctaatctcctcccacaaggacaccagtcagtctggattagtacmcaccctaagggcctcatgttaacttaatcacctctttaaaggccctatctccaaatacagtctctagggggttaaggcttcaattctagatgaatcccagttctagaattaactctgtttctgtttatgtgacattagataagccatttaacatttccataaaatgaaggaa

SEQ ID NO: 433180 - DNA, 549 bp, Homo sapiens
tgctggtaagttcgtgagaggttagatgtrtgcttctttttgtgtgaaataaagaaataatccacataaaaaaaaaatatgcactcaggaaaatcttgagggagtttttgctctgggtgtgtctccacacctcccggggaagattgccatccaactcacacccatttacctctaaatgaagcatgaagatacagcccaaatcattagttctctggtctcttctttgaaacttccacatgcagctctgacatgactgcataattgtggaggataaaaacagttttaaatcaaagagtcctggcttcaaacttcagtttcaattcacaccagctttgctaccttaactaatgtcacttagtatcaccagtgtttaaatttcccttgagaattttcaaagaaatgcagaacaatgcatatctcagagatttgctgaaactattaaatataagcactatataaatgaaagttattatcctgaagcttattgttactgtttttgctacttttggggtttctttgagcaggtttctggaaaagaacaagcagcca

SEQ ID NO: 433181 - DNA, 549 bp, Homo sapiens
tgctggtaagttcgtgagaggttagatgtgtgcttctttttgtgtgaaataaagaaataatccacataaaaaaaaaatatgcactcaggaaaatcttgagggagtttttgctcygggtgtgtctccacacctcccggggaagattgccatccaactcacacccatttacctctaaatgaagcatgaagatacagcccaaatcattagttctctggtctcttctttgaaacttccacatgcagctctgacatgactgcataattgtggaggataaaaacagttttaaatcaaagagtcctggcttcaaacttcagtttcaattcacaccagctttgctaccttaactaatgtcacttagtatcaccagtgtttaaatttcccttgagaattttcaaagaaatgcagaacaatgcatatctcagagatttgctgaaactattaaatataagcactatataaatgaaagttattatcctgaagcttattgttactgtttttgctacttttggggtttctttgagcaggtttctggaaaagaacaagcagcca

SEQ ID NO: 433182 - DNA, 594 bp, Homo sapiens
tagagtaggtcacggaaagtttattttaaaaaaatattatgggaaattgctatattttctgaaagcacagtaataaatccataaggctttttctctgcgtaaatgagtagtactcaggttttgatcaacattgaataaataaatcaaagctgagtaaagttaagttggaagacactgatgacattcatttaagggccgaagtctccaaattattcaattaaaaattaaccacatgatagaatttcgtattaaacttacaaatactctgggaagagtacatttttaacaaacttgatatgccaatgacagtttgggaggaaagtactcaaatccttgacatcaggttagtgtcctaggcttcaagaatgattcataattctaacatttttttggagaagggaaaatcatgaacttttctagaagggtatgggcactctccctcaccaaaacacatacacrggcaaagttttatacataactcaagaaacttgtagacccctaaaatccaccagtggacttcgggttagaagcacctgatacagaacgttggacaactgagacacaattattatctattatgagtaatggataatt

SEQ ID NO: 433183 - DNA, 600 bp, Homo sapiens
aatttcctcaatctccttttcactggagttaaattacctgttcaaggtcacaaaactaggtgatgccagaggcaggataagaaactggatgtcctgacatttcacttagtgttctttacaccccactatgctacctcctttagaaactaccagctgagaagcacctgctaggcactgttctcagggaatggaattctcccactgagactcctaactatgtactacaatggtcaggctattgtgctactttgctaaacaagaactgatgtagttttgtctcatacaagaaagcctctccttcctgaccacacagatcatcacctaggggaaaaatacaacgtcgcagcactgctgccatctggaggcactatgtaggacacacttcattttcatttttcaattccattttctgctttggtgccccttgttctttyctacattaagatatgcttaataatacttattgaaataatgaactctaaaaatagaatctgactagcatttgtcaaaaaggatttttatcatcccatgtgtttatatcaaaaaacaaatgaggtttccagtatcacagaatgtaaagtgaatgtgaatgcaaagcta

SEQ ID NO: 433184 - DNA, 632 bp, Homo sapiens
caatgtaaaccccccaaaaaaagctgtcagagaagcaggtggcrtcaatgtcccaagtggcttgaaatttcctggaggcagctcctacctcttttaaaaaactgtgggctgagcattgtgactttaatgaaaccataaaagtaataaggcattcaacaagcctcagactgaagagaccggaaaagtgagagtgcaggaacatttgatttgaatgaatcaaatccaactaatgatacatgcaatcactgtaaatcagttactccaggttttatgttctttcatgtccctaagaatttttcttacattctaaagagacgtttgagggtgggtgtggtagatcatgcctgtaatcccagcactctgggaggccgaggtgaaagagtcctttgaagccaagagtttgagatcagcctgggaaacaaagcaagacatcgtccatgaaaaaactttttttaaattagcctgctgcagtggcatgtgcctgtagtctcagctccttgggaggctgaggtgggaggattgcttgaacccttgagcccaggagtttggggctgcagtcagctatgatcatggcactgcactccagcctggacaacagaggaaggccctgtatctaaaataaaataaagaag

SEQ ID NO: 433185 - DNA, 632 bp, Homo sapiens
caatgtaaaccccccaaaaaaagctgtcagagaagcaggtggcatcaatgtcccaagtggcttgaaatttcctggaggcagctcctacctcttttaaaaaactgtgggctgagcattgtgactttaatgaaaccataaaagtaataaggcattcaacaagcctcagactgaagagaccggaaaagtgagagtgcaggaacatttgatttgaatgaatcaaatccaactaatgatacatgcaatcactgtaaatcagttactccaggttttatgttctttcatgtccctaagaatttttcttacattctaaagagacgtttgagggtgggtgtggtagatcatgcctgtaatcccagcactctgggaggccgaggtgaaagagtcctttgaagccaagagtttgagatcagcctgggaaacaaagcaagayatcgtccatgaaaaaactttttttaaattagcctgctgcagtggcatgtgcctgtagtctcagctccttgggaggctgaggtgggaggattgcttgaacccttgagcccaggagtttggggctgcagtcagctatgatcatggcactgcactccagcctggacaacagaggaaggccctgtatctaaaataaaataaagaag

SEQ ID NO: 433186 - DNA, 604 bp, Homo sapiens
tctcttgtatttggggtagagaggaagcttagtcagaaagtgtcagtatgttgtgggccattaataactcttgagttccgacaaaatgtgatatctggaagattaatgagtgtccaatttaagaaaacattcagtaagtttatcctgcattcctacacaaaaagtacaatagcaatattccacaacattaaagaaaaataagcaaaattatcataagtaaactaaataaaaaggctctccaggacctgggcaactgctggaaccaagctgctatggggtcgctggctgattccaatacatatccagaattagaatactgatccagatttttacattacctatccctcttgtttcttctgagctgcagccagagatcactggttggttcataggaacaagtttaaattgcagaaaaaaagaaaacttaaagacaactgagactagaatctaataacaagtgtaccatagttcctgaaatataatttttctcttgccagtttcccatttttactaaacagaaatcatggtaagacttatttgctttawtatacttggcctgattattcatataaagtgaagcaagaataattatttttcacatagg

SEQ ID NO: 433187 - DNA, 604 bp, Homo sapiens
tctcttgtatttggggtagagaggaagcttagtcagaaagtgtcagtatgttgtgggccattaataactcttgagttccgacaaaatgtgatatctggaagattaatgagtgtccaatttaagaaaacattcagtaagtttatcctgcattcctacacaaaaagtacaatagcaatattccacaacattaaagaaaaataagcaaaattatcataagtaaactaaataaaaaggctctccaggacctgggcaactgctggaaccaagctgctatggggtcgctggctgattccaatacatatccagaattagaatactgatccagatttttacattacctatccctcttgtttcttctgagctgcagccagagatcactggttggttcataggaacaagtttaaattgcagaaaaaaagaaaacttaaagacaactgagactagaatctaataacaagtgtaccatagttcctgaaatataatttttctcttgccagtttcccatttttactaaacagaaatcatggtaagacttatttgctttattatacttggcctgattattcrtataaagtgaagcaagaataattatttttcacatagg

SEQ ID NO: 433188 - DNA, 570 bp, Homo sapiens
atgtgagagaaaagagttaagctgactcaaagattcgtattcgagaaactagaagaacagatgtatcatttacaaacaaagactggtggaaggaacggacatgtgggaagaggctggttcagaatcaggagtttggtgactggagattcatttgcttcacaagttttgttttaagtgggctcccaactgaaagagaataaaggcctaagagtgctgtaggaggtagaactgacagaatttgtggactaattagatctaggcagtgaagaaaaaggcagagagtggagtcttagatgactctgactggrtcacgaggtagacaatgggaccattcactgtgatgggcattacaggcaggaaagggaagttacagtggggtgataacaagctccatttttttaacgttacatttaaaggcctgcgatacaccaagtggaaatgccatcagggtctctggagctagggagggaaaagtgctagaaatgtatcaccccctttagtggcagaaactgaagccatagggtaaatgagaaagcatataaagatgagatacaatgcaaagagaagcaa

SEQ ID NO: 433189 - DNA, 645 bp, Homo sapiens
cagggaaaaaggaccatcttggtgtaaaggaagccagaatctttccagctccaatattgtggccctttctgaagtcttgtgcaaaaaccaatgttctgttactatctatgccataaacaactccactggagttcttgtcatgtggacaggcaggtttgcaagggtggttgtatgcaggcctatagtacttcaactccaaagatccttcaacccatgggttgtcttctcctgtcctgtttacattgcaatcattataatcactatcttgtaaatactttcaacctgtgacttcactgtggtttcactaacactaattcagctaaactacaaacttagttaaacaagctctccacactccgtatctccaactgagcagctgaatgcatctcgagaaaaaaactgaaagcaatttsactgattctactttaaaataaaaagctcaatctcaaaggggctcttactactgttaaatatttatgtttccctcatccattcactctctcactctcctacaatttctagaatacttcaaactttgcaacacaaaaataaaatttatgctttgagtaaaaaggaaactttatgtaggaaggagtttgggcttgtttcatcattttctaaacatactggtttggatggcccaag

SEQ ID NO: 433190 - DNA, 645 bp, Homo sapiens
cagggaaaaaggaccatcttggtgtaaaggaagccagaatctttccagctccaatattgtggccctttctgaagtcttgtgcaaaaaccaatgttctgttactatctatgccataaacaactccactggagttcttgtcatgtggacaggcaggtttgcaagggtggttgtatgcaggcctatagtacttcaactccaaagatccttcaacccatgggttgtcttctcctgtcctgtttacattgcaatcattataatcactatcttgtaaatactttcaacctgtgacttcactgtggtttcactaacactaattcagctaaactacaaacttagttaaacaagctctccacactccgtatctccaactgagcagctgaatgcatctcgagaaaaaaactgaaagcaatttcactgattctactttaaaataaaaagctyaatctcaaaggggctcttactactgttaaatatttatgtttccctcatccattcactctctcactctcctacaatttctagaatacttcaaactttgcaacacaaaaataaaatttatgctttgagtaaaaaggaaactttatgtaggaaggagtttgggcttgtttcatcattttctaaacatactggtttggatggcccaag

SEQ ID NO: 433191 - DNA, 602 bp, Homo sapiens
cattcctcaatatattgtgttttttaaatcttgaataataagctagtctgttttaattgagaaagatggaattattactaatagttttaccatttttawatacatttagaaagggtagtaatttcatagcaacttctaccttgtacataatacatggtacatagtacttctacatagtaacttctacattgagaaaaaattctaatgtattttcttcaacacttaataacaacaataataatatctgacaaggatagagtgattaccacttgccaggcactcttttctgcatgttatatatgcttgcttatttaatcttcgcatttaagggagttaggatctaggcacagagaagtaacataacttgtcccaggttacacagctaatttttagacttggtttaaaccagccagtctggctccgcaccgggagcaaccaaaactcttcttgcatgctgtggaagaaatgcccctggccaggcttgagggtaagggaaagttgtacaatggcttctttctaaatacaggtgacatcttgtgtcagtggacaccagacaggagaaatgcccctggccaggtttgagggtaagggaaagttgtaca

SEQ ID NO: 433192 - DNA, 464 bp, Homo sapiens
taaaagtgcttttaaatttctcattttcacgtattatacaatatgaaacacttctaggcactcatagattgtgaatcgtttttgttctgctgtggctgtgagttgtttaaaacaggaagtagtttccacatagggctatagcaagggggtggagggtgagaagcaaagacttatttacctaagaagacaaagcaaggacactgcagtggcagcctctgcgtgtcaccctttggtgagcctcctgactggatctcggcggtgggccctcaccactctgccaagtttcatagtgtgctctgaagcttaacgcttagtaccagttaatctaattccttagccactcatcaaattaattttagaatagcygggttcagtaaagcttttgagttggggatacaaagatggtgaggacaaggtccccacttccaggcaatttgaactgagtccctcacttcaagtccgtc

SEQ ID NO: 433193 - DNA, 549 bp, Homo sapiens
atcctccctaaatcattctataaagccagtatcaccccaataccaaaaccaggagaggacataataaaaaaagaaaactacagaccagcatccctgatgaacatagatgcaaaaatccttaacaaattactagctaactgaatccaacagtatatcaaaaagataatccaccatgatcaaatgggtttcatacgagggatgaagggatggtttaacatacagaaatcaataaatgtaatacaccacataaacataattaaaaactcaaatcacatgattatctcagtagatgcagacaaagcatttgacaagatccagcatcactttataattaaaaccctcagtaaaattggcatagaagcgacataccttaatgtaataaaagccrtctatgacaaaccccagccaacatcatactgaatggggaaaagttgaaatcattccccctgagaactggaacaagacgaggatgctcactgtcaccacttctattcaacacagcactggaagtcctagccagaaaaatcagacaagagaaagaggaagtca

SEQ ID NO: 433194 - DNA, 549 bp, Homo sapiens
atcctccctaaatcattctataaagccagtatcaccccaataccaaaaccaggagaggacataataaaaaaagaaaactacagaccagcatccctgatgaacatagatgcaaaaatccttaacaaattactagctaactgaatccaacagtatatcaaaaagataatccaccatgatcaaatgggtttcatacgagggatgaagggatggtttaacatacagaaatcaataaatgtaatacaccacataaacataattaaaaactcaaatcacatgattatctcagtagatgcagacaaagcatttgacaagatccagcatcactttataattaaaaccctcagtaaaattggcatagaagcgacataccttaatgtaataaaagccgtctatgacaaaccccagccaacatcatactgaayggggaaaagttgaaatcattccccctgagaactggaacaagacgaggatgctcactgtcaccacttctattcaacacagcactggaagtcctagccagaaaaatcagacaagagaaagaggaagtca

SEQ ID NO: 433195 - DNA, 554 bp, Homo sapiens
caacgtacccacagctctgactgacccccgaaacatgcataggaagaataaactcaaagtatatcagctaaggacaaaatatctggactgagaccagaactgctgcccaagaaactgagttttcagttcataccagctaacaaaattttatataattactgaaatatataaatccacataccaraactgtagatgcttttgtatgtaactattacatgtatacaaaaagaaataatgaaggtatgaggatcatttaagttataatactaatttaagtataattgtaaaagccgtatcattttgtctttttagattttcattgctagttgttggtagatttaaaatttgtgaaaccatctttatttctctctgtatatgtattttttgatttatttatgattagcataattgtaaaaaacatttaagctttgctcactctcttagattttgaagagcgcttcagtattttgtattggcatatccaatcatttacttcatcacttaataaattaaacctttcctgagatagatatacatctgctggaaatgggcct

SEQ ID NO: 433196 - DNA, 564 bp, Homo sapiens
tactttaaaaaaacaacaccatttgaagaatattcattttcaattaggttttatgttgaacatcttactatcagttcaattccaataagccaaattgctttcactaaattgctttcagcctaatcatatgctatttcttaatccartgcttcttgtaactagcatcaattaattggagtaatcttaaagaattcattttcattattggagtaatcataaagagttctttttcactagagaggttgtattttaggataaattaatcatttgcttgggatttataagaaaagaaatttaggatttaagaacaattttcggattgcaggacattccctatattctgttgcttgtttaagaagtttaagcccttagcagcgcctgaacaaacaatgggcccttaggccaaacatcagtgacagtaaaatgttactgagcagaaatctaacttccagtattacaacattgtagcaaagataactttttctgagaagagggatggggtacaataaaagggaagtaattatttgtttaaactaattgtgagctctgatgacctttgacaat

SEQ ID NO: 433197 - DNA, 552 bp, Homo sapiens
ctcttccgactcctaagtagcccataatagaaagcttctttctcaggaactgcagtcatctcaaacactcatataatatattaattgtctctttaaaaagagaagatggtaatgtaattgtgattaagcctagcctcatgttctacctgttttgtgttttgggtagccctgggcggggtcrctgttccttccctttcctgacacacttgtttcttctaaggaactgaaggaaatcaccaggactttgaggtggttgatttcagtagagcaagagataatgtaagtgctgatgattttggaaaccaaggagtataggagggcatgtaatattggtatcttaatattttatcttaaaggccaaagaagggagacctgagctttcaaaactctctaagacgaagatcaatttcgatatcttgtccttgttacctaggagagaaaaggaaaaatggaagcatagaggaaggaactgagattttgtctgacaatgtagaaacaaaaactgactttgccttgcttttgctatgactaagaacttcctgggccgcaaca

SEQ ID NO: 433198 - DNA, 579 bp, Homo sapiens
tcaggcaatagggagccttgtagagcctggcttttactctgacatgggagtctcttgtggagtttttcacataggagggataaggtatgatgtatgctttaacaggttcatcctgactgctgtgttgagaatrtactacagagaagccatggtagaatcgggcagaaagttagagcaatacctaaggggagagctcatggtggctttgataaaggagttgaccatgaagataataagaaaacacaggatgatgtgctgctgtaaggaataaggaggtgagaggaagagaagactcaggaaaatagagttgctgttacttgagtttgggaagattgtgagatgagatcatgtgggtagggatatgtaaatttgctttagggcgtaagtttttggtgctagtatgattccaaatgtggggatcagtggacaggtggatatatattttctggagtttggggaaaaatctgagcttcagatataaatatgaaacttgtcaacaaacaggtaataattaaagatatgatactgagtgactagagaattagtaataatttttttttttaaagccccgtgggaaca

SEQ ID NO: 433199 - DNA, 579 bp, Homo sapiens
tcaggcaatagggagccttgtagagcctggcttttactctgacatgggagtctcttgtggagtttttcacataggagggataaggtatgatgtatgctttaacaggttcatcctgactgctgtgttgagaatatactacagagaagccatggtagaatcgggcagaaagttagagcaatacctaaggggagagctcatggtggctttgataaaggagttgaccatgaagataataagaaaacacaggatgatgtgctgctgtaaggaataaggaggtgagaggaagagaagactcaggaaaatagagttgctgttacttgagtttgggaagattgtgagatgagatcrtgtgggtagggatatgtaaatttgctttagggcgtaagtttttggtgctagtatgattccaaatgtggggatcagtggacaggtggatatatattttctggagtttggggaaaaatctgagcttcagatataaatatgaaacttgtcaacaaacaggtaataattaaagatatgatactgagtgactagagaattagtaataatttttttttttaaagccccgtgggaaca

SEQ ID NO: 433200 - DNA, 516 bp, Homo sapiens
ggcctgggtcctgagtccaggagttgtgctaggcactcacacatcataatctcattttaaccttttgtaggtgtagggaataatgctcacccaggacaaagtacttgccccaaatcacccattgattcttgtagattcacaatataaaattaaaagttaaaattgraaaatcaattcacaaggagtggaaactaacaaaggacaatggaggtgaaggaaatgtacatggggtggtctacaaatccatccacactatcaaaagactcccagggcataccctcccaacagtaggtcagaaatctcaccttcattccagaatggcagcacattaaaatgaaaagactgtgattttagaatcacaaatggactggcattactatttttaacctctaagtggaggtgacaatgacatcctctgtagcacattattcagaaactgtttttataactatgaaggtatattcttagcaggcatttcaacaacttaaaaaattaagaacaataacactctttaca

SEQ ID NO: 433201 - DNA, 584 bp, Homo sapiens
cacaatgtgcttgctgtcttcctcattctgmaattccccacgcagcctctatggcaagcctgctgagcccagaaagccacagtttagcgccttcattactcacacccagtgctgtagacctccctcctatagatgggctactgtgagtgatagctgctagctgtgtgctcactagctatgtgctaatacaatcctacagttagattagaaaatagtatggactaaatgacaatttgagacctaaggaaatgagataaaaagaattaatggcatgatattattaggacaaacaccaatacagaacacatttccccccaagatacagagtagctaaatacaaattatctaaataatgaaatatttccaaaccatggtagaaatagtcatttattcaattatacaggaacatctcaagttgaattgtttttaaataggagaagtgtttttaaatgatattcccaaattagagtggagatatttgtgataaattcaaatgtagaatttagaaacagatgtgaacttgctgattataattatgctcattctaaggtgaggaaattattctctggatggatatggcaagc

SEQ ID NO: 433202 - DNA, 584 bp, Homo sapiens
cacaatgtgcttgctgtcttcctcattctgaaattccccacgcagcctctatggcaagcctgctgagcccagaaagccacagtttagcgccttcattactcacacccagtgctgtagacctccctcctatagatgggctactgtgagtgatagctgctagctgtgtgctcactagctatgtgctaatacaatcctacagttagattagaaaatagtatggactaaatgacaatttgagacctaaggaaatgagataaaaagaattaatggcatgatattatkaggacaaacaccaatacagaacacatttccccccaagatacagagtagctaaatacaaattatctaaataatgaaatatttccaaaccatggtagaaatagtcatttattcaattatacaggaacatctcaagttgaattgtttttaaataggagaagtgtttttaaatgatattcccaaattagagtggagatatttgtgataaattcaaatgtagaatttagaaacagatgtgaacttgctgattataattatgctcattctaaggtgaggaaattattctctggatggatatggcaagc

SEQ ID NO: 433203 - DNA, 627 bp, Homo sapiens
acaacttcagcaaagtttcaggatacaaaatcaatatacaaaaatcactagcatttctatacaccaagaacagccaagcctagagccaaatcagaaacgcaatcccattcacaactgccacaaaaagaataaaatacctaagaatacagctaagtaggaagttgaaggatgtctacagtaggaattacaaaacactgcttaaagaaatcagagatgacacaaacaatagttgaaactattaatataaatcacgtcttaaatttactatgaattttagttatctgggtatcaacgtctattttagtaaattttttttggtttttgttttttgttgtttttttttttgagacagagtctcactctgtcaaccaggctagagtgcagtgacacaatgtcagctcactgcaacctctgcctccggggttcaagcgattctcccgtctcagcctcccaagtagctgggactacaggcatgagccaccacacttggctagtcttttgtattttyagtagagacggggtttcgccatgttgaccagactggtctcgtgtcaaattcctgacctcaggtgatccaccaaactcagcctcccaaagtgctgggattacaggcttgagccaccgcac

SEQ ID NO: 433204 - DNA, 557 bp, Homo sapiens
cctgctatactacataagtagtttgatcatctgatgcaatttaatatatggtgctcatcttgaggatttatggtcctaattggctggttgtagtcacctctagtgctccctacttactgtctctaaatttaagtccatgacgggtatacaataaacaatttgagactaaaaataagagccgtctagaactgtaaagctctcagaccaccttgctggctaacagtgttagctggatggtaagtcarctaagggcatgagtgatggccatgcttctctgatgtctactaatcatctcctgtgttcatataggatcacgaatggttccatttttaaggaaaaatatttcatttaaataactattttataaactgatgctttagaaaaagagatcaatattgaagtcatgcccactacgaatggtatgagtcctcagaatatcactgcaggctcccaggggagctgtgaaacccagcgtggaccactgaagcaggcctacagttgatttcccagcctcttccgtaagagatggtcatcagattccaatgcatcctagtata

SEQ ID NO: 433205 - DNA, 575 bp, Homo sapiens
tcacctagaatgttaatccagagaaatggtccttgaaataagagtttcagtgtcgtataagtttggaaacacagcatcttacatatttttctttgagtcacaaggcacattagcaagttattgaatctaagtagtcctactttaaaaaatgtttgtttaactttgtttcatccagtttttcacaaatttttgtgactatgctgctttatcatgtatcgacctctctctgaaagcaaatgggaattgatgctctataatagcatttgtttatataagataactagtgaacaaaaatgtactaaaaaagaaccattcgttcactcacacattcattgattcatttagtttacatttattaattaagaatatacaatattttaattactgtatgtttactgggtgtatcagtgactaaaatatgcacaaatgctccttggcttacaatggagttatgtcctgataaacccatcctaagctgaaaataacgggcmttgaaaaaagcagttaggacatctaacttaccaaatatcatagcttagtctagcctaccataaatgtgctcagaacacttacat

SEQ ID NO: 433206 - DNA, 556 bp, Homo sapiens
ttctctatcactttaataagattattgccagaaagagatgataaaatgcctaaataaaatgttaagagacagtaagaatagagacctactaagtatttgttttattttctaggctgacaatgcaccagtgacatttactaagaagtgggtctttaattttatacatataaatttaatgtaaaaaatctaacaaatcaatctaaattattataaaattttagtaaacaaatatctctagccagaatgtaaacaagtggttttagaaatttgtattttacttaaatttaagagaatatactacctctatgatggagggcatttcattascaagaatttcagtaacttggtattaaaatgcttttaaaaaaacaattgaatacctgtgattaatttttacagtacattgctattttgaattatattatgtttaaatttgaattcattaatttaataaatatttgctgcatgtctactgtgggtcagtcatgatgttaagccctgggaaaatgacagggaaccaaacataaatggccctttagctcagaaaatttagtat

SEQ ID NO: 433207 - DNA, 600 bp, Homo sapiens
ttttccaccatttgcgggatgaaactctgggttttgtcttcagtaatctcagctctgtagctataggagataaaacttttttacatggaagatatagaaattttcaagtcatttatgcagtgtttgaattgagaatttaaatccctgagctcattcttttctttcctcactttgtctagtgcaattaggaacaaccagccaatctcattatacttgttaatttgacagaaatgttcaaagctatcaaacacttagttacctgaactgtgcttcttaaaagcgtttgattaggaaaatccaaagrtgacatccaattgtgacatttagtgcaactccaatggtgacatccaatggtgacatttagtgcatctccattgccacatcatgccagagattataagtgctctctttactacttgaaagagaattaaagagaattattagtaactttaactctaatctaataacaaagttattagtaatattataccaactttagaaaccccaaaaccaattcacaaaacctcatccttaagattctgttctgtaggacctttcttggtaccaaaatttatatcagtcaaggttccccctagaggc

SEQ ID NO: 433208 - DNA, 640 bp, Homo sapiens
tcatttttctttagccaagtttctcaaataaagactttcagaaaaagtaggatgtttcctataaaggcaccttagttgtagtttttaccatacacattttcttctatatacatgtgcctgatagatagccactgtgggtaaagaatgctataaacagtagaatgtttataatttatcttcatttcttttttctgacccttacttttcactatgcctcctcataaactggcccctacacttttaagacattttcatatttgataaatrtctgcatgaatgaatgaatggaaggcatgaataatacatttgagaacatgaatactatttgattatatttctgaatatatttaaattacaatagggcaaaaatattaaggctaataaataaatggctaattctgcatatcagtcatcagatacagtgagaaaatataatagaaacaggagttttctgccttccccatattccttaaatcaaatgcataaacagccagtctattaagaggtgaggtcatatgtacaagaataggttttgtttccaaaatctccataattttgttgaactcacaattaaagcataagttagaatgtctacaattttctctcttacttttaattatgtttattttcaaattaagaa

SEQ ID NO: 433209 - DNA, 572 bp, Homo sapiens
attgatctatttatctatacatctatttatttgtttatctcacttattatctttcaaaccataatccatctattacaattccaacggccagaaaacttttacacaataatttctttttctaaccctatcttttgtcttttttataaggttttatatctttggaaatgagcactgttttttcttttgttaatggtgttccgtattgctgtgatttaaatatggttgattttcaccgaaactcatgatgaggcttgttccccaaggcagtggtgtttggagctggggtctttaacaggtgattatgtcattaaaacaagatgattgggtaattaaaaggaattagtgccttagccatggaaatgagttctcactcttgtgagactggattagtkagagtgagttataaagaaagactgcccttcatgtttggtctcttggcataggcccacttccccttctccttttccaccatgctattactttcaatggcaaaaaactgcaattacttttgcaccaacctaatgcaatgaaccataagattcttgccagaagatgaccagatgtagccacct

SEQ ID NO: 433210 - DNA, 391 bp, Homo sapiens
gtgagcttcttccctctagaatgtacccagtytcaggtattttgttatgacaatagaaaaagaaactatgacatgctatatttttcttttaaaaattatttttaattgacatataaaattgtatgtatttgtgtacaacaaaatttgaagtgtatctacattgtgaataaatgaatctagctaattaacatattacttgatatcattgtcagtttggggatgaaaacacttaacatccactctcttactatttttaaagaatacaatatacagtgattaactacagtcactatgttataaaatatattgcttaaatttatttctccaatctaactcaaattttgtatcctttatccaacatcactccaacatgtccccccacaccaaatac

SEQ ID NO: 433211 - DNA, 391 bp, Homo sapiens
gtgagcttcttccctctagaatgtacccagtttcaggtattttgttatgacaatagaaaaagaaactatgacatgctatatttttcttttaaaaattatttttaattgacatataaaattgtatgtatttgtgtacaacaaaatttgaagtgtatctacattgtgaataaatgaatctagctaattaacatattacttgatatcattgtcagtttggggatgaaaacacttaacatccactctcttactatttttaaagaatacaatatacagtgattaactayagtcactatgttataaaatatattgcttaaatttatttctccaatctaactcaaattttgtatcctttatccaacatcactccaacatgtccccccacaccaaatac

SEQ ID NO: 433212 - DNA, 559 bp, Homo sapiens
tgtggtcttaatggttgcgtctttctcaaaatgtatccaatgcaatctattargaagtaggaactttgggaggtcattagatgatgagggtggggccctcatgaatagaatagtgcccttataggccccagagagatgccttgctttttccaccaaaagaagacgcagctaaaaggcaatattatgaaccagaatgtaggcccctgctagttactgaaatcttttcatgccttgatcttggacttctcaatctccagaactgtgagaaataaatttttgttgttcataagttactcagtttatggcattttatcatagcagtccaaatggactaagacaaaagtggaggaaggtgccatcagacaagaaatgcagctatagaagctgcaaaaggcaaggaaacagattacctcctagagcctgaagaaagagtgaagccctgcaggtaccttgatttcagactaatagaacccactttggactttggcctctaaaataataagagaataaatgtgtgttactttcagtcatcaaattggtgaagtaattgttacagcag

SEQ ID NO: 433213 - DNA, 434 bp, Homo sapiens
gaccacttggcttagtcaaaaggagcatattccagaacaacgctgtttctgtttattcttagaaaaaggaggatgtgacaattaagagagttttctttcccctgatgaaaaaaaccattagcataaggcaagagtctgtttcctccaggcctcttccctcctttatattttaggatttttttgtttgttttcaccatatcaggagtcaacatatcttgtgaatacaaggagcttttctatgtgagggattcattttttctttttgagaagcatcttattagactaggtccccaattcccaagactccctttttttttccccttttttcaaggaggagctggttccacagcttcacyttagcattactccaatgtattttccaaggttcagtttggagccctaaaaggagaactaggtctgtggaacccagagcc

SEQ ID NO: 433214 - DNA, 363 bp, Homo sapiens
ctcttgctccatggttggaggtcacacttgcatccaagggtattgggcgaaattcacccccaatatttcamataggttcttttctattttccctaagtgtcagccagtctgagaagtaaagggagagagtacaaaagagagaaattttaaagctgggtgtccgggggagacatcccatgttggcaggttccatgatgccccccaagccacaaaaccagcaagtttttattagtgattttcaaaaggggagggagtgtatgaatagggtgtgggtcacagagatcacatgcttcacaaggtaataagatatcacaagacaaatggaggcagggcaagatcacaggactacaggaccggggcaaa

SEQ ID NO: 433215 - DNA, 490 bp, Homo sapiens
gaagtcttcaaattcagttttctagaggacaaataacatggaagtaaaaaatatgaatacgaatatccgaacatttaaaccacacagcataaaacgtcagtcctgttcccttcctcctttctttgtgtcttctcaaggacttactatctctctcygttgcatcatatgtttattttctctttcctataacacttcttagtattctccatgtgagatgagaaataaatttcccttgacctcatatttctgatctagagccacacctttctagaaaactcttctttttatattgaagcatgttgaaatctcttctatttcaatggtgtctccattccctgactatacattcctttttcatctactgtttacaaaaagggtatccctaatcttcaagttcaatcttcacttgtgttcttacttctttagcagtatttccagatattgtggccacactcccttcaaaacaaacaaacgaacaaacaaaaaacac

SEQ ID NO: 433216 - DNA, 476 bp, Homo sapiens
tcagataagcaagcacttttttwaatagtgtctaaaataagagtttgtaagacctgagggactcttctatgaagacagtgcttggcttttggctcacaatctatgccacatttatttttattgaggccactaagagacatgtgtttgttgattttcaggctcatgcctctgtgtgatctgattagttaagtttatcaaatttatagtgagtgcccactgaacagcagggactggacctgagctggatttacaattgtgaataaagcagtattcaccctcaaggctctttgcgttcagtaggtgagaaagtcactcacagaaaatgtgcatataccacaacaatttcaattaaaaagactcatacaaagtttatgagaacacagaactaggcacctaacccggactggtgggtatgcatgcttggagggatgttcagagaggagataaggaaaggaattaagatacaaataattatt

SEQ ID NO: 433217 - DNA, 476 bp, Homo sapiens
tcagataagcaagcacttttttaaatagtgtctaaaataagagtttgtaagacctgagggactcttctatgaagacagtgcttgrcttttggctcacaatctatgccacatttatttttattgaggccactaagagacatgtgtttgttgattttcaggctcatgcctctgtgtgatctgattagttaagtttatcaaatttatagtgagtgcccactgaacagcagggactggacctgagctggatttacaattgtgaataaagcagtattcaccctcaaggctctttgcgttcagtaggtgagaaagtcactcacagaaaatgtgcatataccacaacaatttcaattaaaaagactcatacaaagtttatgagaacacagaactaggcacctaacccggactggtgggtatgcatgcttggagggatgttcagagaggagataaggaaaggaattaagatacaaataattatt

SEQ ID NO: 433218 - DNA, 476 bp, Homo sapiens
tcagataagcaagcacttttttaaatagtgtctaaaataagagtttgtaagacctgagggactcttctatgaagacagtgcttggcttttggctcacaatctatgccacatttatttttattgaggccactaagagacatgtgtttgttgattttcaggctcatgcctctgtgtgatctgattagttaagtttatcaaatttatagtgagtgcccactgaacagcagggactggacctgagctggatttacaattgtgaataaagcagtattcaccctcaaggctctttgmgttcagtaggtgagaaagtcactcacagaaaatgtgcatataccacaacaatttcaattaaaaagactcatacaaagtttatgagaacacagaactaggcacctaacccggactggtgggtatgcatgcttggagggatgttcagagaggagataaggaaaggaattaagatacaaataattatt

SEQ ID NO: 433219 - DNA, 476 bp, Homo sapiens
tcagataagcaagcacttttttaaatagtgtctaaaataagagtttgtaagacctgagggactcttctatgaagacagtgcttggcttttggctcacaatctatgccacatttatttttattgaggccactaagagacatgtgtttgttgattttcaggctcatgcctctgtgtgatctgattagttaagtttatcaaatttatagtgagtgcccactgaacagcagggactggacctgagctggatttacaattgtgaataaagcagtattcaccctcaaggctctttgcgttcagtaggtgagaaagtcactcacagaaaatgtgcatataccacaacaatttcaattaaaaagactcatacaaagwttatgagaacacagaactaggcacctaacccggactggtgggtatgcatgcttggagggatgttcagagaggagataaggaaaggaattaagatacaaataattatt

SEQ ID NO: 433220 - DNA, 456 bp, Homo sapiens
agtgtgtgacagcgatatgagctattcattgttagtggtctcggactttccctactccctcccttccttcytcttgggcaattcagtttcccccagccttattgctggtgtgtttgcatcctcagtcttgtctacaagaactcctacacttcccacagtctctaaggtctctgttttctgctatttttttctttttttacattaaaaaaaggattatggctcctttcccttatacttttccagtttctgtgtagcaaaagactgggagaaactggatttactataaacagctagtagcttcagagataatttaaaagaattattaatttaactaaaaaagagattgagtgatttaaggtaagttattacaaaaatcaaaaattttttttttcagctatctcctaagatagcccccaaggaccagaacaattatactcatcattatacaaaaatgac

SEQ ID NO: 433221 - DNA, 570 bp, Homo sapiens
atgagctattcattgttagtggtctcggactttccctactccctcccttccttcttcttgggcaattcagtttcccccagccttattgctggtgtgtttgcatcctcagtcttgtctacaagaactcctacacttcccacagtctctaaggtctctgttttctgctatttttttctttttttacattaaaaaaaggattatggctcctttcccttatacttttccagtttctgtgtagcaaaagactgggagaaactggatttactataaacagctagtagcttcagagataatttaaaagaattattaatttaactaaaaaagagattgagtgatttaaggtaagttattacaaaaatcaaaaattttttttttcagctatctcctaagatagcycccaaggaccagaacaattatactcatcattatacaaaaatgactgaagaatgccttgtgattcacataatactgttgcaatcagcttagcccttagttcagctaggaccaagttcttgtcctatgaccaagaagaatgaggtacgtggatactggagagtgagtagagtagga

SEQ ID NO: 433222 - DNA, 570 bp, Homo sapiens
atgagctattcattgttagtggtctcggactttccctactccctcccttccttcttcttgggcaattcagtttcccccagccttattgctggtgtgtttgcatcctcagtcttgtctacaagaactcctacacttcccacagtctctaaggtctctgttttctgctatttttttctttttttacattaaaaaaaggattatggctcctttcccttatacttttccagtttctgtgtagcaaaagactgggagaaactggatttactataaacagctagtagcttcagagataatttaaaagaattattaatttaactaaaaaagagattgagtgatttaaggtaagttattacaaaaatcaaaaattttttttttcagctatctcctaagatagcccccaaggaccagaacaattatactcatcattatacaaaaatgactgaagaatgccttgtgaytcacataatactgttgcaatcagcttagcccttagttcagctaggaccaagttcttgtcctatgaccaagaagaatgaggtacgtggatactggagagtgagtagagtagga

SEQ ID NO: 433223 - DNA, 575 bp, Homo sapiens
gaatgataaaacctagtcactgccagtgattctttgttgcaaagaatgagccaaaggggagaaaaagggccctttcttacactggtctccttagcaagcaaatgcttaaattcataaataatggggaaatgaagaattgaactctgaagagtcaaatgaaaggaaagcgtgttggaaaagaagaagggaaagagacagtgctgttgtaccaaatgaagagttatgcagacttggaatgcacttggtagccacctacaaccacaggagaaacctgcattaggataaattttaaactctgattggcatttcagaagayggagattctggtttatttacaacactgctaatatgctggacgactttatcactaggtttattttgatataagcttatacatttcctatttgtttaaattataaccttcattaaaggcattctaactgatatattgtctttaagtaacctcaggtggcaaccagggtttcacagggatatagggatatcaaaatatgctattgcatctccaaggaaactagaacagaaaacagaaaattcactagcataaaaatgccacc

SEQ ID NO: 433224 - DNA, 575 bp, Homo sapiens
gaatgataaaacctagtcactgccagtgattctttgttgcaaagaatgagccaaaggggagaaaaagggccctttcttacactggtctccttagcaagcaaatgcttaaattcataaataatggggaaatgaagaattgaactctgaagagtcaaatgaaaggaaagcgtgttggaaaagaagaagggaaagagacagtgctgttgtaccaaatgaagagttatgcagacttggaatgcacttggtagccacctacaaccacaggagaaacctgcattaggataaattttaaactctgattggcatttcagaagatggagattctggtttatttacaacactgctaatatgctggacgactttatcactaggtttattttgatataagcttatacatttcctatttgtttaaattataaccttcattaaaggcattctaactkatatattgtctttaagtaacctcaggtggcaaccagggtttcacagggatatagggatatcaaaatatgctattgcatctccaaggaaactagaacagaaaacagaaaattcactagcataaaaatgccacc

SEQ ID NO: 433225 - DNA, 561 bp, Homo sapiens
atttaaaagtaggtattagaaatatcaggtttttattgtatataacatgaataacagatgctatacagaaaaataaatccaaagrgagtttaaaatatataatattaaaaaatatctaaaactggccaggtgcagtggctcatacctgcaatcccagcactttgggaagccaaggtgggcagatcatctgaggtcaggagtttgagaccagcctggccaacgtggttaaagcctgtctctactaaaaacacaaaaattcaccaggcttggtggtaggcacctgtaatcccagctacttgggagggtgaggcagggacaattgcttaaaacagggaggcagagattgcagtgagccgaggtagcaccactgcactccaaactgggcaacagagcaaaattccatctgcaaaaaaaaaaaaaaaaaaaaaaaaaaaaagaaaagaaaagaagaagaaaaaaatcaaatccttcaaagctcttgcaaacatgtatgtatgacaatatctttatgactttgggatgtggaaatgaaaaacattcttaaaacaaagaacactcaca

SEQ ID NO: 433226 - DNA, 594 bp, Homo sapiens
gtttataagtgactaatatttaatgttttaattatatttctatatcaaaatataaaacaaataatgcaaaaarcactcattatattattgttagtatgtaaactttgaagctgaactgtttaaaatgctgaccaagccatttactagctttgtaaatttgagcaagttcatttctaaagagagatactaatggagtgatcatactggagactaaagcagctattacatagttggaataaacttaacttttatttttttatgaaacaaaaaatgggaaaactgattggatatattataatataaaggaactatgttaatagactggtaataattttttaagttggtatttgacacaaaataatactaggacaaggaaataaaataaattgacctttgttgatgcttaagttgagagggatcaaagtcatattattttttttacctttgaatatgtttgaaatttttcataatgtaaagtttttaaaggacaaaaaattaagtttctttgtttcccaaccatcttacaccagaaatttatcattctgaatttctgattgtcctaggaaaaaaaattttctgacatccttgtaaaac

SEQ ID NO: 433227 - DNA, 545 bp, Homo sapiens
ataactttacataagctatagctttccttctttaaattaatttctattgatttctggtktatgcacttttttctagtaataagcaagattcttagaccaaatttagttggtttaaacatgctcaggagaccatccatgatttgtgggtatgaatatttggctcattttttcatgagatcacacctgttaaaaagaccctgataattttgtgttagaaaaattatttcattttatctgaactataaaaataagtaaattaaaataacacctttgtcttgagccttcaaatatgatttttatttcctttaccaattctcctttggaaccagttgtacctttgataattcaggagcaggtctaagaaaacatgactgtgataataaaacataacaataaataattggatttgattaaacaatcagcatattaacataataattttgtttaattcaaatcatggagtcaaaatgattgctctggcagcctcttgctcatgtaacccatacatgatacctgttctgcacttcttacaatgactttttcct

SEQ ID NO: 433228 - DNA, 545 bp, Homo sapiens
ataactttacataagctatagctttccttctttaaattaatttctattgatttctggtttatgcacttttttctartaataagcaagattcttagaccaaatttagttggtttaaacatgctcaggagaccatccatgatttgtgggtatgaatatttggctcattttttcatgagatcacacctgttaaaaagaccctgataattttgtgttagaaaaattatttcattttatctgaactataaaaataagtaaattaaaataacacctttgtcttgagccttcaaatatgatttttatttcctttaccaattctcctttggaaccagttgtacctttgataattcaggagcaggtctaagaaaacatgactgtgataataaaacataacaataaataattggatttgattaaacaatcagcatattaacataataattttgtttaattcaaatcatggagtcaaaatgattgctctggcagcctcttgctcatgtaacccatacatgatacctgttctgcacttcttacaatgactttttcct

SEQ ID NO: 433229 - DNA, 585 bp, Homo sapiens
caatatttaacaaaaactatataatctgaaagctatcatcagaaataayaaaggaagcaaaaaaagaaataataggtgaagcgtagtagcaggaaaaaaatagcaaatggcacatcattataaattttacaaatactgagtctctatttgagtatattataaaaatgcatgttaataactattttcatgtagatgaaatcaataaatctctagaaaaataaatttaaaaattgacatggaagaatttttaaaccaaatatctccatgtctctattttagtaagtaaaattttgatttatatttacttacagaaaaatcccatgctgccaaattttgtaaagttaccaaacataaaaaacactttctaaaaatgaaaaattacaggacaatcatttttatgaacatagatgaatatttctaaacaaaatcttaacatgttatgtctctaatgttattcaaatagacttatggtaacaattgttcagtcaagaagtgattttatatttgaaaaatcagttaaagtaatgcactacattaaagacaaaaactaagttatttcctacacagaaaagaattttgtaatat

SEQ ID NO: 433230 - DNA, 575 bp, Homo sapiens
gactaattttttgtattttaagtagagatggggtttcaatatgctggccaggctggtctccaactcctgacctcaggtgatccattcaccttgccctcccaaagtgctgagattacaggtgtgagacaccacacctggcctgtttaactttcagagtgtcacttaactgacttcccatacactcatctgtctagaatctctaattacattyttatattattttgctgaatgataaatagtatcaccgatacataagtttacattccgtcaggtttacaattcagaaaatagtaagttgctttctcaaaagccactgcttcataaataatctgatttctgtatggcaaagactgtgctaagtattaggaaaataaagatggctgagtaatacctgctcttcttaaatcattcaacctagaattcaaattagagtaaataagaaccctgtaccttttctattctctaattatcacattattttatcctacataatttagagtggtctttctctgaattgatctgaaaatattaagttgcacaagctctggcctcagtaatatctagtactgaagata

SEQ ID NO: 433231 - DNA, 607 bp, Homo sapiens
tcaaagaaatttcaaattccaaattgataatgttaaagacttgagtcctttctcagactccagacttacaccaacagaaagttttctcataaggatgcacgggaacagtagaagtggaaaactgtcatcctaaatacagcaagagatgacaatgttcaaggcagagtaacccagaaactgtcactgggtctttggggtgttgcttttctggcctgaaacctgtgtgattggtggcacctttgcccaagttttgccttggactattgggcttgttctgcccacttggcctggaagtctgcacttggcttatgctcccagcctggatcccatgcctgccaagggcaagccagatgtggaggagcatgaggtgtatgacagtgtgagcgtgggatctggccactgmccacagccaggcatgccagctgtggcaaggcaggcagctccaggcactggcatgagcaccggccctctgtgaggctgtggctggagcaggtgtaccacaagcaactttcatgactggtaatggggaacctggtggtatgcggaagcttggagacaccaagaactgcagagccccaaagaaggtgtcacagccctggttcaggga

SEQ ID NO: 433232 - DNA, 542 bp, Homo sapiens
cactggcatgagcaccggccctctgtgaggctgtggctggagcaggtgtaccacaagcaactttcatgactggtaatggggaacctggtggtatgcggaagcttggagacaccaagaactgcagagccccaaagaaggtgtcacagccctggttcagggagttcctaggtctaagtgccccaaagggctgcagctcttctttccttctctcctctctccttcttgtcaactgcaacgtggcaagcaagagacatgtttcagtcctgtttgtgttacagctctttcagccctgccatttggtgggtcctgagttcttgtcctgcatccaggaagaatgcggtacatggatatgtggagggtgagcaaggtgaagaggtgctttaatgagcgacagaacagctcagaagagacccacagtggtaactcctaaccacaggcaagtcattcacataactgtccagctctcagcagagaggagacccagagtggttagctcctctacacaaacaggtcrtccctttgtctgcctgagtctggctgag

SEQ ID NO: 433233 - DNA, 508 bp, Homo sapiens
tataacttcttattccaagataccatgtatagcatctagatttgacatcttaatcctcacattcatttatagttatttataacagcaatttttaaagacattttgaatttctgtatacaatattttaacgatcccacaatctatttcagatttgtttaatctttatatattttatgttgagcagaacttcttgcttagtyttaatcattgagtctgtattttatctctttttatacctctaacactgtgctaggctcataatacatagtataaaatttttagctgtgtgtggtggctcacatctgtaattccagcacttttggaggtggagacaggaagatcccttgaggccaggagttcaagatcagcctgagcaacatagtgaaaacctgcctctatgaaaaaaaaaaaaaataaccatgtatggtggtgcatgtctgtagtcccagatacttgggaggctgaggcagcaggatcacttgagcccaggaggtctaggctgtagtaa

SEQ ID NO: 433234 - DNA, 564 bp, Homo sapiens
attcattaaaatatttacataaattcaaacatacagtaaaatcatatttaacaaaactatagtatctgcaatttcattcacacgtttttctttttcccactttcagaatggaggaaatatctcctaatttctaaagctaatcatctgttctgaaatccatcttttcttccctcctctgacctcattttgtgctgctccttcatgtgctgttgtataaccttgggtcagtgttttctggttattgttatatgtgatctgatcactgagtccgtttgtctcaccrcatcatctgctttgctaaaatgtatgtccttcattctaatacaaataacctgttttggagaatcaaacactctgtaacctcacgtaatgcttctaaatgaggctctgttgaaaaggcaaccatacttggataatgtgtgcaaactagtcaagaagaatcactgcctttcatgaatcaactggctaacaattggatggcttattttctcaaggtatggtgcattatatgagtgatggacttgtggacttattgtgccaattctgatgaaggtttgttgacat

SEQ ID NO: 433235 - DNA, 654 bp, Homo sapiens
tatcttaaattcaatagagtaaaacgaatcaatcttaaataaatttaactgcagtcctttactagtaagaggtctattgagtcaaagatgactggatcrgtgtaatggctttggttctcttgagggtaatgcaaaagcttgagctttctcttttcttaggatcatttactaagaaagcttgcttaagcacaacctgacttgcgttggcagcgaatttctgaatcctgacacgacaggaatgagtatctttttttaaatcttctttcttctggcacgtctgaaaaatccagcattagcctgaggaataaagtcaccaaacattactgtactcccaacagaaagaagctgttctgagagaagtctgtaccatttaattggagcaaatttgacaagactcgcttcctcttgtcacaggctaatactctcaccatgttctgagtgatctttgaaaaacatattagtgctccaggccactccctgcccctccctatagataaggctgactagtttggaagttatctttgaagaactgagctgacagcttcagataaaagtgtttctaatttatagggctgaactgggaggggatgggctgattgtgaggccagaaaaagaaagcaaaagttgagggaaattagtccgaagttctgcaga

SEQ ID NO: 433236 - DNA, 432 bp, Homo sapiens
gacagatttttacgtatataaataaagatactgaataaaaacattgtatgttatcattaacacattcataatagcaatgtgttcttgttttggcattcaaaatgaatataaaaatagaaaaacatacatttttatgatctacatactttaycagagacacatatttattaatttcaaagccagtaggtcagtgaggaaataaaaggaaaaatttaaaagtttttttagtaaacaagaatggaaacataccaaaacttatgggatatattaaagcagttcaaagggaaaagtttataacaataaacaaccacatcaaaagacaagaaaaatctccaataaagaactcaaatgatggaactagaaaaacaagaataaattaattccaaattcagtagaaggagagaaataataaatatcagggcagaaagaagt

SEQ ID NO: 433237 - DNA, 559 bp, Homo sapiens
acttggtgccctgtgtcctagctgttgcaaccatggctaaaggactccaaggtacacctcaagctgtggcttcagagggtgcaagcctcaagcattggaagcttccacatggtgttgagcctgtgggtgcacagaagtcaagaattgtggtttgggaacctccacctagatttcaggggatgtatggaaatgcctggatgtccaggcaggattttgctgcagtggtggggctctcagggagaacctctgctaaggcagggcagaagagcaatgygtggttggagcccccacatagagccctactggggcactgtctagtggagctgtgagaagagggccactgtcctccagaccacagaatggtacatccactgccagcttgcaacctgcacctggaaaagccacagacacttaatgccagcttgtgaaagcagctgggaaggagagtgcaccctgcaaagccacaggggtggggctgcccaagaccatgggaacccacttcttacatcaccatgacctggatgcaagacatggagtcaaaggagataattttggagtt

SEQ ID NO: 433238 - DNA, 568 bp, Homo sapiens
ataatccatgtgtgagattggccaaaacaataacttgagctrgggtggaggctgatttcccctcagtttaccactgaacaagaaataaacaatgcaaacttcagattagggcagataagtgggtacagctttcaaatactttttagctgctcaaaaaaaaaaaaaaagtcctaaagtttgttgatcagttcagatacacagaaaaataaatctacagaaaagttcagatcaattgaaaagctctacttcttcccatcaggcttggagagggtcaacatgaagtaattacttgctactggtctcttggtaactaactccaaacttcgtattttgcttttctgtttgccatcacagctaagataagcttaataggggtatgccatactcctcatctgaaatatctgcaagtcaaaatattttgttgttgatattgatgaagtagaatgtcagaggatattccatgtgtacattcatctataagatacttaggagatagaatcaaaatgtctcattagttattagcttgtcagtgtaagaattaagtacaaatcatctgtcgaagaacagg

SEQ ID NO: 433239 - DNA, 568 bp, Homo sapiens
ataatccatgtgtgagattggccaaaacaataacttgagctggggtggaggctgatttcccytcagtttaccactgaacaagaaataaacaatgcaaacttcagattagggcagataagtgggtacagctttcaaatactttttagctgctcaaaaaaaaaaaaaaagtcctaaagtttgttgatcagttcagatacacagaaaaataaatctacagaaaagttcagatcaattgaaaagctctacttcttcccatcaggcttggagagggtcaacatgaagtaattacttgctactggtctcttggtaactaactccaaacttcgtattttgcttttctgtttgccatcacagctaagataagcttaataggggtatgccatactcctcatctgaaatatctgcaagtcaaaatattttgttgttgatattgatgaagtagaatgtcagaggatattccatgtgtacattcatctataagatacttaggagatagaatcaaaatgtctcattagttattagcttgtcagtgtaagaattaagtacaaatcatctgtcgaagaacagg

SEQ ID NO: 433240 - DNA, 601 bp, Homo sapiens
acaatggaagtgaaaaggccacaacaatactagctgtcttatatgggcctgtgggcctgttgtatacggcttttattgtttttaggtatgttccttctatacccaatatttttagtatttttagtttttatcatgaagagatgttgaagtttatcaaaagctttttcagcactaattgaaataattatatagttttttccttcattctattgctatgatgtatgacattatttgcatatgttgaaccatacttgcatccctaggataaatcccacttgatcatcatgaatgaccttttcaatgtactttgttagcattttcttgaggaattttgcatcaatatattcrtcagagatattgtcctgtagttctccttttttgaactatctttgtctagtgttggtaatagagtaattgtgacctcacagattgagtttgaatgtcttcttttctcctctacttgcagaatagtttgaataggatttgtatcagttctttatatggttggtagaattaaacagtgaagctatcagatcccagatttttctttattgagaggcattttaattacagttttgatcttgttacttgttatttgtct

SEQ ID NO: 433241 - DNA, 601 bp, Homo sapiens
acaatggaagtgaaaaggccacaacaatactagctgtcttatatgggcctgtgggcctgttgtatacggcttttattgtttttaggtatgttccttctatacccaatatttttagtatttttagtttttatcatgaagagatgttgaagtttatcaaaagctttttcagcactaattgaaataattatatagttttttccttcattctattgctatgatgtatgacattatttgcatatgttgaaccatacttgcatccctaggataaatcccacttgatcatcatgaatgaccttttcaatgtactttgttagcattttcttgaggaattttgcatcaatatattcatcagagatattgtcctgtagttctccttttttgaactatctttgtctagtgttggtaatagagtaattgtgacctcacagattgagtttgaatgtcttcttttctcctctacttgcagaatagtttgaataggayttgtatcagttctttatatggttggtagaattaaacagtgaagctatcagatcccagatttttctttattgagaggcattttaattacagttttgatcttgttacttgttatttgtct

SEQ ID NO: 433242 - DNA, 479 bp, Homo sapiens
ggaaagcactgatcatacattcaaaagaaamctgtgtgaagatttattacaattacatgatataaatctgatttacataatttttacagactatattatattataattacataatataaatcttagttgaattattgtcattattatgccagttttataatataattttgtaaaccaggtaataaaatatctggcttatagcacatatttggtaactgattatatttaacattaacctggagaagataaatgtataatgtatacattaatgccgcggtttgccacagttactatgggactgaacaaatgaggacaaacgcagaaatgaaaacttaaaacaaaagtaagtattttaaaggaagggtaacatggggaagaagaggtctcccttcttctaatgagcaaaggcagccccctggcctctacagcccttcgtatttattgggtagaaagagcaaggagcaggaggtaacgattgg

SEQ ID NO: 433243 - DNA, 479 bp, Homo sapiens
ggaaagcactgatcatacattcaaaagaaaactgtgtgaagatttattacaattacatgatataaatctgatttacataatttttacagactatattatattataattacataatataaatcttagttgaattattgtcattattatgccagttttataatataattttgtaaaccaggtaataaaatatctggcttatagcacatatttggtaactgattatatttaacattaacctggagaagataaatgtataatgtatacattaatgccgcggtttgccacagttactatgggactgaacaaatgaggacaaacgcagaaatgaaaacttaaaacaaaagtaagtattttaaaggaagggtaacatggggaagaagaggtctcccttcttctaatragcaaaggcagccccctggcctctacagcccttcgtatttattgggtagaaagagcaaggagcaggaggtaacgattgg

SEQ ID NO: 433244 - DNA, 533 bp, Homo sapiens
agttctaagttgatttgttataggtttccaactactttaatcacagtgtatgtgagtacaaaactgtatatgcacgggatattttgcagtatagaatgtgtgcctttttacctcccttgtatagtaagaataaaattttctcctaatagtcaaaatccatcacaaagacaacatagtgaaatattttttgcttgttgatatgttgctatagaaagcccagcatgtctatgtgccagtctcaacttccagttcagcaaaatctgttatatcctctggtggaagcattcctcactttggaactaagacctttagatcagtagagattaaaattctggggacaagatgccaacattttgctagtagataattaagaaagatagtgagtagarccattcttgtctcaacctcttaattgccacaccaataaatcctggttatgggtaaaacaaggcaatatattcatcgctaattgagaacacttactgtgccccagaagacatttgcctgcacgtataagtctaagtcttcaaaag

SEQ ID NO: 433245 - DNA, 436 bp, Homo sapiens
agtctttctttggataaaagatttaagttcctcatacattttgatggactagtgatattagcaaccaaagtagcactgctctagaaaatggataaatggatgactacagttggagcaaatgaaaatgattttgccagaggcaaaatacaacatgtttccaacaacagtcatagttccaccagggccattggtgaaactccatggtattattatataagttgtttttactacaatgacatatgttaagcacttacaaaatgcttacccttaattggaatgagtttagcctgaagacagaatataayttatttaatgttctttcacttgtcacaattaaataaatacattgactaaatatgtgataatttgtaatcccttccttttgagttctttgtaaggtacataatacttcagggttttgataatatagacatta

SEQ ID NO: 433246 - DNA, 589 bp, Homo sapiens
agaaaaggttggtgaagaatgagtcattgtggagttagaggaggttactgaaaatggtgactccaatggtgggatttgaagagggaagtctcgataattttgacatatggtttcttgccaggaatcggcaatgctaattgcctatgcttaattctttatcaacagactctttgaatcaatttagagatactcagtgaccccatggctagagttcctgacccctgctaygggaaacattgaatgcaaacaagcaaaaattgctcaaagccatgttatttttgaagtacaaaatggcttacaaagttaaaaataggcatccaaatacatatgtctgcacttacatggatggaaacactgagcctcttctttcaggcccagcacccctatttagagcagatactgtagagtaccacaatcacagtaaggtcacacaatcgccagtggggtccaagatgagacatcttttctaacacaggttatttttattttttaaaaaagtacctcttaccactgccttacaatttctatattaagaattacatggaagctatgctaatcataattttatccaattattaatctgaatgtt

SEQ ID NO: 433247 - DNA, 498 bp, Homo sapiens
cttgtgatttgggctcttaatctatttttatctatatctattttaataaagctcttttttaagacaagtgtatataamatatagtagacacattaaacacaagagattttttttttctttttcctttaacttttattttaagttccgggtacctgtgcaggatatgtgggtttgttacataggtaaacgtgtgccatggtggtttgtggcacagattatctcgttgtctagttattaagctcagcatccattagctatttttcctgctggtctccctccccctgccccaaagctgacatgccccagtgtgtgttgtttcccccttcatgtgtccacgtgttctcatcactcagctcccacttgtaagtaagaatatgtggtgtttggttttctgttcttgcattagtttgctgaggataatggcttccaactccatccatgatatttttaaaagtaaagggttgtgcaaatatatgccaggcaaaggaaagattggct

SEQ ID NO: 433248 - DNA, 498 bp, Homo sapiens
cttgtgatttgggctcttaatctatttttatctatatctattttaataaagctcttttttaagacaagtgtatataacatatagtrgacacattaaacacaagagattttttttttctttttcctttaacttttattttaagttccgggtacctgtgcaggatatgtgggtttgttacataggtaaacgtgtgccatggtggtttgtggcacagattatctcgttgtctagttattaagctcagcatccattagctatttttcctgctggtctccctccccctgccccaaagctgacatgccccagtgtgtgttgtttcccccttcatgtgtccacgtgttctcatcactcagctcccacttgtaagtaagaatatgtggtgtttggttttctgttcttgcattagtttgctgaggataatggcttccaactccatccatgatatttttaaaagtaaagggttgtgcaaatatatgccaggcaaaggaaagattggct

SEQ ID NO: 433249 - DNA, 562 bp, Homo sapiens
tggaagccattgtccttagcaaactaatgcaggaacagaaaaccaaacaccacatgttctcagttataagtgggagctgaatgatcagaacacacggacatatggaggggaacaacacacactggggcctgttggagagggaagtggggagggagagcatcaagaagaatagctaatggatgctgggcttaacacctaggtgatgcaatgatctaggcagcaaaccaccatggcatatgtttacttatgtaacaaatctgcacatcctacacatgtacccctgaacttaaaataaaagttgaagaaaaaaaaaataggrgaaaaaaacagacttaattctaacatgcagtttacaggaaaaaaaataaaattcccaaatcacctctctttaatcttccagaaaaaaaaaaaaagtttctttcttccttcaactactcaacaatactagtttctgaacatttagaataaataacaaatgcaatttgatttaatactagtgatcccgcttttgacatatatttgagtttattttcattggttttattaggcctctcagtgttgt

SEQ ID NO: 433250 - DNA, 554 bp, Homo sapiens
tcatgtctttttgttggtttgttttttatctagaattcaataaatgtttacacacttatctgggttgcttatctttagttccttttttaaaaattttttaatctcaacagcctctttagctcttctctctataataggggaagtttggatgattcctgttccagttttgttgttraatacacagcaatcatatgttgatgtgtttcctggagaccagctcatgttacacatttcatagtaacataccataagtcttgtggcaccgctcaccacatattgtcaggaggcattccatgtgttcacattttaggaggtaataaattgcatgaaggtggtcaccatcagattgtttcatagtaaaggaacctattttactttgaaattgatacttatattttggtggaacactttgagacaatttgagtactctgttctccaaccacctgtcacccaactgaagatcgttgcctgaagcaatttcacactgaaagttagttctaaaatgaagagattccaactgtatcatgtcttctttatttattacccagcatttt

SEQ ID NO: 433251 - DNA, 565 bp, Homo sapiens
ctcactcaatctctataaattacagagtggccactttgtgtctttattgatgaagatttttatctttaggtattaatgttagttcagatttaacatctactgatctctagattgtttatttctcctaccaaaatactgacaccttcatcaatggccaccacatccactaataatgttttactgaagattcagtgcgtacatatgtggctttgtttcctttttttttttttccaaaaagacaaactctccttcaatcaaggagctctgtgtctgtaaacaggcattgtctgacacctaggtaagaggctgagattccccactgtaattcttccgcttggatttctccccgtcaaacatggacctttttgcttgtataggcaggagttatcttagtaaactgcaatatgtttcattcctctgggttcattcataggggttatttagtcacaagtgatcactgaatttcacaatgctttyattatttctatgtctccattacttttcacagtaatagtgctctgtctttcactgttaggaatcaccatttgatctttattactcttct

SEQ ID NO: 433252 - DNA, 543 bp, Homo sapiens
acaagttttttaatcttttatttagaaactgatctgcggaaccttcaggagattggtctcaagagacgcatctgccttctcgatgggattgttggcctctcgtgttgaaaggatcgcatttcaggagccagcaggtcatttcatctcatcctctagtatcatcttacaggctcctaagccacatgaaagtcacacatgccaactgatggcttactttggttttgtcaaatggtggatacttagtcacagtttgaaatgaaaatacacctggtatgtgccaccttagaaggtttaatttttctcaggggttacagaaaaaaaaatatgtgataagccatggtcaaccgatgtgtatttaaagttcacattttaatgtactttaatttttgatgaagactactgagaggaaggagcagcgaagaatgaaacaacaaggtaggggcagaggaaagaaaacagggcaacagaatgagatggattgaaaagaaaacaacccgcatgraactaggatgggattagctgaagtacagcaggaggaggctg

SEQ ID NO: 433253 - DNA, 611 bp, Homo sapiens
tcttatgatcaagactttcccagactctcattgctgtttattaattttcttgtccttcttaaatgtatgttttattttctttttaaaaatattgattaaagttatgcactatcattaaattaataaatagtaccaaagggcttagagttaaatataagaatttttttgccattctccatcctgtcttgatccccagaggtaacaattttaagaactgtattagtttctttaggtactcrtgtatgtgtttataaatagtaacttatattattgatcctggaattctcattgttatgattttgggtcaagatagtattccacaaatttttttaaatatgttagcttgtgaaaaaaaatagagaaaaatgtaaaattatgagaccccagaaatacacaatgctgagaacccagaaatgtgtgattctagtataactatttatttatcaaattaatatttattaaaatccaattatgcgcaagctatatcttagcattttatatacaagtggatataattagaattttaaaatatcagtattattcttcactgagaaaatacatgaatattgtatagagattatatcatttaaaatataatgcaacaatgtaac

SEQ ID NO: 433254 - DNA, 619 bp, Homo sapiens
catgaaaaggaatttttttctaataaataagcaggtgtaatatgaagaggacctactcatattttcctcccttgattaccagacccttaaatcctggctatgggagaaatataaaggatgttcctttatgtctacaaaatgttataatccagttgtcactattatcaactgattgaaaggtcagccctccattccatcaagccagctgcttcaaggtaacatgaaacgttgggtccagtgaattccatatccccaaatccattgtcatgctttttatatgcagtaaagtgaattatccgatcagaagcaatgctatgataaataacatgacaatgaataatgctgttgtaaatctttgaatagtgatttcagcaggtgcattagaaacaggaagacaaatctgtatccagagtgtctattcccatgtgaacaaagtcttgcacttctcttgatgaaaatgatccaatgcaatcaacaagaccaatgcaatcaacctagctgcatatttcctcagagaatggtgctgtagcatagggtactccccagaatttttcgtcaccarttttccaattgtgtttcttctaagcacatattcatataaattgatagccactgccca

SEQ ID NO: 433255 - DNA, 557 bp, Homo sapiens
gctaaaaacaagcagaattccttatgaattctatgaattatgcagaataagtttctctctgttaaagtaaaatttgctttagcaaatatacttgtgctaaaatatcttttacttatgtcttattttctaagtatgatctgaaattttctctgtagatttgagaaattatcagctctaatttttytagtcatgcttattcaatggtcactctgtttttaaccattaccatacagtatttggcacataatctagtcatttctgaatttaatttccagagaggggatgcacatagtgtgaaggacatctttctttttatgaaggtgtatttaaggagcaaacagcaaactgtacttagagtctgataatactgggtttcaaccatagctttcacatttataatcctaagggatttacctaacctttctgaggttcagttttctcattcataaaatgaaacaaaatagataattcaaatatttaatttaaagattaaagtctttaaaatatcaacgggagtgactgatactcagtgagtgcagcagtgattatatctgagc

SEQ ID NO: 433256 - DNA, 588 bp, Homo sapiens
cttttctcaggaagatcctatttattctgttgatgactaaaatatctgataattttttctagacatatacttcattttagtaagttattcacataattgattaggattgattagatgatgattcatgaagtctcaatggattcaaaccattattgactgtaaaaaaacgtgattatttcatatactcctagaaagagttataaacatgggccattttcagggaaaaagccggcgatgttaaaatgcatttcacattcagaaatgttaaaaatgatggagacattcaacgatggacttattcctggaaaatccacctttttcttctaactaatcatatacatactttattaggggtttagagaaatataaactgatgctgtttatcagkaacaggagtgttcaattttgaccttttttgcataattatgacataaaattccaaggagaacaagaatatattaatattttttcttgccaacgattttctttcataaggttagtatgtcatatataagcaaagttaataatccaaggcaaattaaacattggcttggtatcaagacttgagccttttgtcttgacctaact

SEQ ID NO: 433257 - DNA, 551 bp, Homo sapiens
ggataaccttactatcttaaaatccacaacttaatcatctctgcaaaggctcttttaatgagaaaggtatcatattcagagtttctgaarttcagatagcaacatcttttagggggtgaagggataatttttaagcttaccacagtagtcaatcagaaaaaaaaaagatagtcaatgcaaagatgttttctgatttattgaatatggtaagaatttcatgtgtcatggaagggtacaacataggctagagcagaaggtcagagttgactttgtgcatggtattgaaattcattcaggggttcacaaagaatgagggatttctttctttaaaatcagcaataaaagaatcctcttcttagaaagtgtagatgctagccacttcgtagtctattgcttctcacactcattattattacaaataaacaacttaaggttagggagcacatactactaattttgataataataacaataaaagctgacatttgttctttatttactgtgagaaaagctctattgtcagcattttaaatgaatattttcattcactt

SEQ ID NO: 433258 - DNA, 551 bp, Homo sapiens
ggataaccttactatcttaaaatccacaacttaatcatctctgcaaaggctcttttaatgagaaaggtatcatattcagagtttctgaagttcagatagcaacatcttttagggggtgaagggataatttttaagcttaccacagtagtcaatcagaaaaaaaaaagatagtcaatgcaaagatgttttctgatttattgaatatggtaagaatttcatgtgtcatggaagggtacaacataggctagagcagaaggtcagagttgactttgtgcatggtattgaaattcattcaggggttcacaaagaatgagggatttctttctttaaaatcarcaataaaagaatcctcttcttagaaagtgtagatgctagccacttcgtagtctattgcttctcacactcattattattacaaataaacaacttaaggttagggagcacatactactaattttgataataataacaataaaagctgacatttgttctttatttactgtgagaaaagctctattgtcagcattttaaatgaatattttcattcactt

SEQ ID NO: 433259 - DNA, 632 bp, Homo sapiens
cttaactgaaacaatttttgcagactatattttagagaagaccccatgcatgcatcacctccccaactgtcaaaatatccatgtgggaatactgtgagtgctccaactgtgtgagtgggaaagggagactctcctctcccaaacacacaccgccactggagaagctgaaggtctgtttgtgggagaagcttccgactttacctggagctgagtcaatttagagagccaagcaaaatacagggctagaggaagcagcagaaaggccctgggagctcactgggtcccaagcagcccatttttgcctggtaccacagggatccattggaagggtgaccagaggagcagggggtaaaactccacagggagaaggaaatctctagttgaactttgtaacaatttgaacagggcaagaagcctcctggccagagctcaggtaagggtgcaaatcctgtgtgcagactccacagkcaggggaagaaccaagcccttttctttcccaactagaaggcaggtagcctggggcaagttttcaagcccacacaccctccacctggaaacagactcggggctgttggggagaggcagggtgggagtgagaccggccctttggtttgcatgggagctgggtgagg

SEQ ID NO: 433260 - DNA, 439 bp, Homo sapiens
ccaccaaagctaagaaacctcacagagtccacccctgccacctccactggaacaagtactggtatccacggctgagagacccrtacatggttcacatcacaggactctgtgcagacaacccccagtaccagcccagagccaagtagacacactaggtggctagacctagaagagagacaacaatcactacagtttggctcacagaaagccacatcaataggaaaagggggagagtactacatcaagggaacaccacatgggacaaaagaatctgaacaacagccttcagccctagaccttccctctgacagaggctacccaaatgagaaggaaccagaaaactaaccctttgttatgacaaaacaaagctcttcacaccccccaaaaatcacactaattcacccacagtggatccaaaccaagagaaatccctgattta

SEQ ID NO: 433261 - DNA, 439 bp, Homo sapiens
ccaccaaagctaagaaacctcacagagtccacccctgccacctccactggaacaagtactggtatccacggctgagagacccatacatggttcacatcacaggactctgtgcagacaacccccagtaccagcccagagccaagtagacacactaggyggctagacctagaagagagacaacaatcactacagtttggctcacagaaagccacatcaataggaaaagggggagagtactacatcaagggaacaccacatgggacaaaagaatctgaacaacagccttcagccctagaccttccctctgacagaggctacccaaatgagaaggaaccagaaaactaaccctttgttatgacaaaacaaagctcttcacaccccccaaaaatcacactaattcacccacagtggatccaaaccaagagaaatccctgattta

SEQ ID NO: 433262 - DNA, 439 bp, Homo sapiens
ccaccaaagctaagaaacctcacagagtccacccctgccacctccactggaacaagtactggtatccacggctgagagacccatacatggttcacatcacaggactctgtgcagacaacccccagtaccagcccagagccaagtagacacactaggtggctagacctagaagagagacaacaatcactacagtttggctcacagraagccacatcaataggaaaagggggagagtactacatcaagggaacaccacatgggacaaaagaatctgaacaacagccttcagccctagaccttccctctgacagaggctacccaaatgagaaggaaccagaaaactaaccctttgttatgacaaaacaaagctcttcacaccccccaaaaatcacactaattcacccacagtggatccaaaccaagagaaatccctgattta

SEQ ID NO: 433263 - DNA, 439 bp, Homo sapiens
ccaccaaagctaagaaacctcacagagtccacccctgccacctccactggaacaagtactggtatccacggctgagagacccatacatggttcacatcacaggactctgtgcagacaacccccagtaccagcccagagccaagtagacacactaggtggctagacctagaagagagacaacaatcactacagtttggctcacagaaagccacatcaataggaaaagggggagagtactacatcaagggaacaccacatgggacaaaagaatctgaacaacagccttcagccctagaccttccctctgacagaggctacccaaatgagaaggaaccagaaaactaaccctttgttatgacaaaacaaagctcttcacaccccccaaaaatcacactaattcacccrcagtggatccaaaccaagagaaatccctgattta

SEQ ID NO: 433264 - DNA, 543 bp, Homo sapiens
tctatctacttatctacctgtctacctatctattgatcaatctttctattgatctatcatccccccgtctcttcccctccctccccctctcctctccctctctctctccagtttctccagggagactatggggagtatgacagacttttctcagcaggagcccatcctgacagtgatacaaccccagattccccaccagggtcggggagcaagttatgcccttacttargtcatgactgaatacagcaaaggacacaaagatttgaggaggtctggaagttggtggatgctaccggagttgactcaggcagcagtcctagggttacccaaggaacctaactgcttccttgagggtcaaaaggaggactggtgtgggtggaacagtacagtcctctggtaagcagcatctgccacgtggggaggcaggggacgccttggctgccatgccacttgattagctttactctcagaccactgggtgtagggggtcagccctgtaggtggagactggctgatgttaaggactgaagtctattcaaggta

SEQ ID NO: 433265 - DNA, 543 bp, Homo sapiens
tctatctacttatctacctgtctacctatctattgatcaatctttctattgatctatcatccccccgtctcttcccctccctccccctctcctctccctctctctctccagtttctccagggagactatggggagtatgacagacttttctcagcaggagcccatcctgacagtgatacaaccccagattccccaccagggtcggggagcaagttatgcccttacttaggtcatgactgaatacagcaaaggacacaaagatttgaggaggtctggaagttggtggatgctaccggagttgactcargcagcagtcctagggttacccaaggaacctaactgcttccttgagggtcaaaaggaggactggtgtgggtggaacagtacagtcctctggtaagcagcatctgccacgtggggaggcaggggacgccttggctgccatgccacttgattagctttactctcagaccactgggtgtagggggtcagccctgtaggtggagactggctgatgttaaggactgaagtctattcaaggta

SEQ ID NO: 433266 - DNA, 543 bp, Homo sapiens
tctatctacttatctacctgtctacctatctattgatcaatctttctattgatctatcatccccccgtctcttcccctccctccccctctcctctccctctctctctccagtttctccagggagactatggggagtatgacagacttttctcagcaggagcccatcctgacagtgatacaaccccagattccccaccagggtcggggagcaagttatgcccttacttaggtcatgactgaatacagcaaaggacacaaagatttgaggaggtctggaagttggtggatgctaccggagttgactcaggcagcagtcctagggttacccaaggaacctaactgsttccttgagggtcaaaaggaggactggtgtgggtggaacagtacagtcctctggtaagcagcatctgccacgtggggaggcaggggacgccttggctgccatgccacttgattagctttactctcagaccactgggtgtagggggtcagccctgtaggtggagactggctgatgttaaggactgaagtctattcaaggta

SEQ ID NO: 433267 - DNA, 543 bp, Homo sapiens
tctatctacttatctacctgtctacctatctattgatcaatctttctattgatctatcatccccccgtctcttcccctccctccccctctcctctccctctctctctccagtttctccagggagactatggggagtatgacagacttttctcagcaggagcccatcctgacagtgatacaaccccagattccccaccagggtcggggagcaagttatgcccttacttaggtcatgactgaatacagcaaaggacacaaagatttgaggaggtctggaagttggtggatgctaccggagttgactcaggcagcagtcctagggttacccaaggaacctaactgcttccttgagggtcaaaaggaggactggtgtgggtggaacagtacagtcctctggtaagcagcatctgccacgtggggaggcaggggacgccttggctgccatgccacttgattagctttactctcagaccactgggtgtagggggtcagccctgtaggtggagactggctgatgttaargactgaagtctattcaaggta

SEQ ID NO: 433268 - DNA, 532 bp, Homo sapiens
cctgtggcattttgttcagaagatcttcaaaacaaagtcacaaatcctaaaagtctcctgtagaaaacagctttgtccctccacctgaggtgaaatcctacacagggactcagcctgtttcttcaaaggactgtggtcctggaggacagagttgggcagggaggcactccctgagaggcagggatccaagtgctgctgagccatggggactcatcccccaactccagccatttggacacaccaggggcaagagcagtgttttactcagctgatgctattagctggggctttgatgaactgatttgcttttgctgttgtttttcttaagaggaattgtgtaagtcagcaaaacrcagaaaataaaccttcttctctaagcctgatataaaacaaacataccctgatgaagagcacatcaattccacaggctgccatctaccagctagcacatgattctgccgtgctcctttattaaggagtttaagtttgtgcattctatttgttctaaggattgctattattcattaaaaga

SEQ ID NO: 433269 - DNA, 541 bp, Homo sapiens
tcaaaccaagagccaaatcaggaactcaatcacattcacaattgccataaaaagaaaatacctggaaatacagctaatcagcaaactgaaagatctctgcaatgataattactaaacactgctcaaagaaatcagagatgattcagacaaatggaaaaacattctatactcatggataggaagaatcaatgttaaaatgggcatattacccaaagcaatttatggattcaatgctatttttattaaactaccaatgacattyttcactgaactagaaaaaaactattttgaaatttatatggaaccaaaaaaagagcctgaatagccaaagcaatcctaagcaaaaacaatcagaaggcatcatgttacccaacttcaaaccatactgcagggctacagcaaccaaaacagtatggtattggtaaaaaaaaaaaaaaaaaaaaaaaaaaaaagtcagacacaaagaccaatggaacagaatagagagcccagaaataactctgcacacgtacaactgtctgatcttcgacaaagctgacaa

SEQ ID NO: 433270 - DNA, 550 bp, Homo sapiens
ttcacgcttcctggccaacaggcaatttccccggggtgatcctttgacaattgtgactgtgcaggcttcagtgtaacaatccattttcttctgttaggaggactgttcaggatatacacagcatcccactgctgttggagagtccaaagaaagaaatacatcttgcttagggattttctccacctgagtccttcattgtgaaaccctgaaaccaggctgactcactcagaagtctgttctatgctttaaatttagaggaaatatctttcagaccttttggccatacaaacaataggttccattgtcctgtccccagccttatatccagcagtacttcactcctagttttccttagactttccattgtaaatctgtgatgtctatcgggttttcaaggaaggctctgtctgacttctaatttctcatatcaaaaatttcttcttcagtggggactgccaygcagactcattgttatctcatatttcattctgccttctttctggaaacagggatttaccatttgtttgtcttaaggatttgatgtctgcct

SEQ ID NO: 433271 - DNA, 619 bp, Homo sapiens
agattttcattaattaaatggcagaattagattaaagacacttagcaaagttttctgaagttttctcaaagctttaattaatgttatatattttcccttttatacaccagagggcgttaatcacaagttcacctttgtgcatattggccatatgattcccagactctttaaccaaaatttctaattgtggagaagagaaacctgggctaaacaaatgcaatttatggacagaaggtaaaaatgagtttgacaaaaactgaggaataatagcagaaaaaagtaaaatgctaaaattaataagaatttgcactgcatggagaaaaggatcaaacactatgctttccaggcagaggtcaggaaacaggcmataacactgggtaggtttgcagaaactaagaatggtctttccctgaagtaagacatatggcagggataactggaagtgtctcactgatgatgtaatatatgtccacaaaatgtcatctgaaagtaaaactaaaagataatcaaactaaaaaccacttaccagtcttgaacttatctcttttcatgaaagtgggttgaaaaaagagaaggttgttgtaattctatgttttttcaaagtggagttcccagcctc

SEQ ID NO: 433272 - DNA, 619 bp, Homo sapiens
agattttcattaattaaatggcagaattagattaaagacacttagcaaagttttctgaagttttctcaaagctttaattaatgttatatattttcccttttatacaccagagggcgttaatcacaagttcacctttgtgcatattggccatatgattcccagactctttaaccaaaatttctaattgtggagaagagaaacctgggctaaacaaatgcaatttatggacagaaggtaaaaatgagtttgacaaaaactgaggaataatagcagaaaaaagtaaaatgctaaaattaataagaatttgcactgcatggagaaaaggatcaaacactatgctttccaggcagaggtcaggaaacaggcaataacactgggtaggtttgcagaaactaagaatggtctttccctgaagtaagacatatggcagggataactggaagtgtctcactgatgatgtaatatatgtccacaaaatgtcatctgaaagtaaaactaaaagataatcaaactaaaaaccacttaccagtcttgaacttatcwcttttcatgaaagtgggttgaaaaaagagaaggttgttgtaattctatgttttttcaaagtggagttcccagcctc

SEQ ID NO: 433273 - DNA, 607 bp, Homo sapiens
ggatagcttgctggaggatgagagaccatgtggagcasaggccaggtctcctggctaagaatctccaacactagcctgtcagtagctaagcacagacacacaaaaaatcccagctgagactgcaggaaacagaagagctgcctagttgagctcagcttaaatttctaacccatcaaatatgagttaaataaatggttgctgttttaaaccactacattttggagtgatttttgcaaaaaatgctaactgagacagcaaatcagggaacactttcaccaatgaggtaacacttgactagatattgaaggaagtggtttccatagacagaaaagaagggagaggaaaggatgttacaggcaaaggaggaagcatgaacaaaagcatagagggcagaacctcctgttcatggtgtgctggaacagccagtgctatagtttggggcatgaggagtttagattaaaacaaaatacatatggctgaggacaaaaccctgaggttcccctgtagtgaaggcatgggatgagagtctttataagaggtgatttaaaacacacaaaaaacaatctgtcgaaaatgttagagaagcagaagagggaggcttgtgaaa

SEQ ID NO: 433274 - DNA, 614 bp, Homo sapiens
tttggctggtgcaaaagtaattgccgtttgtaccattgaaagtaatggccaaacccgcaggtacttttgcaccaacttaatataacttggaatcgttttctaagtttcaggatgacttttatccaaggggccatatcagcttggaagccctgctcctatttggggatgtttctgtgggaaggggctgcagccatagaggccagcaagcccccgggaatgaagctacctccctttcagctacaatcacatgtgacttacagacattgccgctcacactccctgcagtctcagatctgagtagaaagtaaagagctttctccattcaaaagggtggaaagccttcatcttgtcacctcacccatgacattgggcataagttagataagcttaggaagccctagggttacacagtgtctatgtctgtccttgtgtctgtccaatgaagratgcattccagcagtagctccaaaaatgttattctctcagccaaaaggagtttaaatattttaccataatgtaacttagaacacacattgaagagctgaaagttcactgcaaacaggttaacacacacacacacctccaccattttctataattaaagcaggtggcca

SEQ ID NO: 433275 - DNA, 540 bp, Homo sapiens
aagatcattctaatgagattttagatggaaatgaggaatatcttattgaaaactggaagaaaggccatccttgttatgaagtggcaaagaatttggctgcattatgtccatgtcctaatgctctgtagaaggcagaacttaagagcaataaactaggatatttggcagaagaartctctaagcaaagtgttcagggtgccacatggcttttctcagctgcttatagtgaaatttgaaaagagagaaaataatgaaagacagaagttatagtcaaaagagaagcagaatttaaagagttgaaaaattcttagcctggccatataaagaatgacaaactgagtttgggagagaataccaagggtgtgacaaagctacacttgaaaagaagattagtataaataggtggaagtcaggtgctagtcattaagacaatggaagaatgactccagaggcattttggagttgttctaggctgccactcccattacaggcccagagtgcagaatgatttcaagagagggacctcagagctcactgctc

SEQ ID NO: 433276 - DNA, 582 bp, Homo sapiens
gaaaggccatccttgttatgaagtggcaaagaatttggctgcattatgtccatgtcctaatgctctgtagaaggcagaacttaagagcaataaactaggatatttggcagaagaaatctctaagcaaagtgttcagggtgccacatggcttttctcagctgcttatagtgaaatttgaaaagagagaaaataatkaaagacagaagttatagtcaaaagagaagcagaatttaaagagttgaaaaattcttagcctggccatataaagaatgacaaactgagtttgggagagaataccaagggtgtgacaaagctacacttgaaaagaagattagtataaataggtggaagtcaggtgctagtcattaagacaatggaagaatgactccagaggcattttggagttgttctaggctgccactcccattacaggcccagagtgcagaatgatttcaagagagggacctcagagctcactgctcagggccttctcaagtttctgctccctgaatttcaaagcagcattccttagtgtcactagctgtgcctcaaatgcgcctcagtggggcttgggtccctgct

SEQ ID NO: 433277 - DNA, 643 bp, Homo sapiens
taagatttaatgttattttccctgttgggttttggacctccttgagacctgttacccctttatgcttgcctagttttctcttgtggaatgggaatgcctatygtatgtttgtgccacgattatattttggaagtgcatacttgcttgatttcacaaacaagctgattttacagctggagagatatttgccttaggttgcattgtgccttgagtctcacccatatcagatttagatgatatttagatgagactttggactcaaacttgaaagttgatactggaatgagttaagaatatttcgagctattgggatggaatgaatgtattttgtatgtgagaagaacatgaattttaggagaccaggggcagaaagccatggtttggatgatagtattctctccaaaattcaaatagaaacttaatctccaatacaacagtattaagaggtgtggcctttgggaggtgattatgttgtgagggcaccacccttgatatagtttcaatgtatgtctccacccaaatctttttttttttttttattatacttcaagttctagggtacatgtgcacaatgtgcaggtttgttacatatgtatgcacgtgccatgttggtgtgctacacccattaactcgtcatttacat

SEQ ID NO: 433278 - DNA, 643 bp, Homo sapiens
taagatttaatgttattttccctgttgggttttggacctccttgagacctgttacccctttatgcttgcctagttttctcttgtggaatgggaatgcctatcgtatgtttgtgccacgattatattttggaagtgcatacttgcttgatttcacaaacaagctgattttacagctggagagatatttgccttaggttgcattgtgccttgagtctcacccatatcagatttagatgatatttagatgagactttggactcaracttgaaagttgatactggaatgagttaagaatatttcgagctattgggatggaatgaatgtattttgtatgtgagaagaacatgaattttaggagaccaggggcagaaagccatggtttggatgatagtattctctccaaaattcaaatagaaacttaatctccaatacaacagtattaagaggtgtggcctttgggaggtgattatgttgtgagggcaccacccttgatatagtttcaatgtatgtctccacccaaatctttttttttttttttattatacttcaagttctagggtacatgtgcacaatgtgcaggtttgttacatatgtatgcacgtgccatgttggtgtgctacacccattaactcgtcatttacat

SEQ ID NO: 433279 - DNA, 509 bp, Homo sapiens
taatctgattattaaaggaacttttctctctacccctagttgctcactggctcctgagggtggcatatctcattttcatggcgagaaggagctcagttcattctctgaatgtattttttcctcaaaagcaacaataatttctgggatactctatttcacctcctcattattttccctttacaacttgtgttttcacactttcctattcatattttctttaaactggacctcagatttaatatttccccctttttgatatgtgtctttctacttcaacaaaatatcttggacacatactccattyttcctctgctgggaatatgactgaacaagctgtggtctgtaccctgaggaagctcccacagcactaagttatcctttattttatttttttaagagacgaggctcactctttcatccaggctggagtgcagtggtgctttcatagcttactaaagccttgaactcctggcctcaagccatcctccttcctcagtctcccaaaatgc

SEQ ID NO: 433280 - DNA, 509 bp, Homo sapiens
taatctgattattaaaggaacttttctctctacccctagttgctcactggctcctgagggtggcatatctcattttcatggcgagaaggagctcagttcattctctgaatgtattttttcctcaaaagcaacaataatttctgggatactctatttcacctcctcattattttccctttacaacttgtgttttcacactttcctattcatattttctttaaactggacctcagatttaatatttccccctttttgatatgtgtctttctacttcaacaaaatatcttggacacatactccatttytcctctgctgggaatatgactgaacaagctgtggtctgtaccctgaggaagctcccacagcactaagttatcctttattttatttttttaagagacgaggctcactctttcatccaggctggagtgcagtggtgctttcatagcttactaaagccttgaactcctggcctcaagccatcctccttcctcagtctcccaaaatgc

SEQ ID NO: 433281 - DNA, 590 bp, Homo sapiens
atgtacttttttgtctgcttttttcactcrgcataattattctgagattcatccatgttgttgcatctattaatggttcattcttttttgttactgaatagtattccattgcatagatatgccaccttttccttttatccatttacttactgatggccatttgggtcatttccagtttttgactattacaaatatacctgcttttattgtagtaattttgtctgtagatctttgtataaaattatactttttttatcctcttggtaaatatctgaaagtgtagaggctagattatggatttgatgtatttttaacttttaagaatacatgaagaaaaatcgtttggctttttgaagagagattgtttgactttttcttttcctatttcgatgccttttatttcttttgcctgatttctctggctagcacttccagtactatgttgaataggagtggtaagagtgggaaaccttgtcttgtcaaaattctcaaggagaatgcttccattttttcctggttcagtatgatgttggctgtgggtttgtcatagatggctcttattattttgaggtatgttcccttgatgtcta

SEQ ID NO: 433282 - DNA, 512 bp, Homo sapiens
atattgaaaacacacctcaatttcaacatgtctagaagtgaatttgtgatcttccccaaacctgtttctcaaatcattcccatctcagtgatagtatcactgttgtcttgtgcatgtctcaaataatgagtttgcttttttacctgcctctcccttactcccaataactaatccatcaacaaattcagccgctttccctcctctatatctyctgaatctatcctcttctgtccatcaacagctagaagatcccctcccttgtcttctcttgcctcctttgatctatttctcctattatagtgacctttccaatacagaaatctgatcatgtcactcttcagatttaaatgctccaatggctttacattgtttttaagatagaaatctttaatatacattataggggctgcattaccttggctctttatttttttctatactatttttcaccacattagtcactattctgttttccagccacagtggtcacatttcaggtcttacaatgatcc

SEQ ID NO: 433283 - DNA, 578 bp, Homo sapiens
ttcccttttctcatcattttcttgctgtctaattagtatacatagtcctggtgtgattgtctctgcaaccctggcacctgcttcatgtcaaactgatttatgtttatcgactgtttcaaagaatttatgttytcttttttctcatctgcctcctccttctgactccctcctatttgcactttcgctcactctctctctccctgttcctgcccaacccacacacacacacacacacacacacacacactttggccctccctctctctctccactcccttttccttccctttctctctccttctccctgttactttctctctttctctctctctctctctctcacacacacacacacacacagttactcacatatacacagaattcatacatcaaatcgccatcacttttctttcccaagaatttactaatgttcacaaagtacacatttacatttaagatggctccagactctcaagacagatgcactttcaaacccaaacatacttttgggagaaagactattgccatcaagagaaatgcctaagagataaacacctctgagaactacttggtaagaa

SEQ ID NO: 433284 - DNA, 586 bp, Homo sapiens
tgaagtgatagaagcaaaagatttagattcacagtgggatgagatatctgtagcttaataaaagccagcagagcaattgcagagaaataatagagatgccagagggagatggatgtacaaagtactttcaaaaacagcttgactctgctcttgtaaatacgagtctagccatgtgcttggtcaatatatgctagatagaactcagtataactccttataattttaaaagatctttctcttatcctaagaatttctaacatagtatttcaccataccattcttacccaacttatcaccagattacattccaaatatatacactttttgktcgttttgttatattttccttcaatttccagaatttaaagtgcttataaaatttatttctgaatttctattataaatctcatctatattatatctacacacatgagcaaacacaattttgcaccaactcacccaattcaaaactaatgagaattaaacactgtatttttcctcttctcttcttttgaatctcaacttaaatgctaactcctcaagagactttgctagaaaagatcctctagttattctagagcacagt

SEQ ID NO: 433285 - DNA, 550 bp, Homo sapiens
tgggtgacagagtgagactacgtctcaaaaaaaaaaaaaaaaaaaaaaaaragagagagagaaagatgtggtatatatacaccatggaataatgtttaatgtttcatcataaagcagaatgaaatcatgtcttttgaagcaacatgaatgaaactggaggccattatcttaagtgaaataacttaaacagaaagccaagtaccatatgttctcatttataagtgagagctaaataatatgtacacacacacatagagagtagaataatagacattggagtctaggaagtgcaggaagggggttagggatgagaaattacttaatgggtacaagtacactgttcaggtgatgtctctaacaaaagcccagacttcaccaataagcaatatatccatgtaacaaaactgcacttatatcccctaaatctatttttttaaagaattcataaaataatttctgaaaaaatacaaaaaggagaattaccttgtatttaagctatttatgtctgtacctgtccctgccacactgtgactccagtttattaatttta

SEQ ID NO: 433286 - DNA, 505 bp, Homo sapiens
agaaatcaaggactcaccactgagccagggaatcccatcattagcctgattatgaggcattttatagccccttttattaaataacacagtggtttgtacagctgcagagcatcaraaccatttaggagcttttattttaaagtacagctatctggaccacacttcctgacacttaattcagttagcttatggttgggatctgtaagcccaggtctggaacaaggtagttacaataggagctggaacatcttgctattcgggaaagtaaggatatgttgctaaccacttctcgccatacacacacacacacacacacaacgtgagcatgtcaaaaagacataggagccagcttgaagaagaggggttcccacggccaaagctggaacaataaataagattagattataacccattgagtataataggaatctatgggtccatatggataacagaggtagatgtaaatagatgatggatgaatagaatatatagataatacatagat

SEQ ID NO: 433287 - DNA, 505 bp, Homo sapiens
agaaatcaaggactcaccactgagccagggaatcccatcattagcctgattatgaggcattttatagccccttttattaaataacacagtggtttgtacagctgcagagcatcagaaccatttaggagcttttattttaaagtacagctatctggaccacacttcctgacacttaattcagttagcttatggttgggatctgtaagcccaggtctggaacaaggtagttacaataggagctggaacatcttgctattcgggaaagtaaggatatgttgctaaccacttctcgccatacacacacacacacacacacaacgtgagcatgtcaaaaagacataggagccagcttgaagaagaggggttcccackgccaaagctggaacaataaataagattagattataacccattgagtataataggaatctatgggtccatatggataacagaggtagatgtaaatagatgatggatgaatagaatatatagataatacatagat

SEQ ID NO: 433288 - DNA, 589 bp, Homo sapiens
ttcttttcactctgcttataatgcccttgtcccactgcaaaaatatatttatctttccaggctctgaggctcgctacctacctcccctataaaattttactttggcagacactttattaggcacagccagatgccctgttttcctacttatcatactatttggctttttattgattttattatcaaaaaagatagagttgactttttattaacatgtgcttttattatattaaaagactacttattaaatgctgttatctcaaattctacttaaagaggatattataaccttggaaccaaggttttctcccagaaaaagattaatggaaacatcaattgcttttcakagttgatagctgctgcttcaaaagtattttattaaaataccagattaaacccaaaaaacccttaggacacaataaattgatttttggtttatattcaaatgtcagcacttagttgtcctgaaaaaaaaaaaaatcatgaaaggtggtgatttgtaaggaagtgaaaccagccaattgaggctctgctaggcatgctgagttctttcttagtccctggagagaaacttatggggcagaagcac

SEQ ID NO: 433289 - DNA, 589 bp, Homo sapiens
ttcttttcactctgcttataatgcccttgtcccactgcaaaaatatatttatctttccaggctctgaggctcgctacctacctcccctataaaattttactttggcagacactttattaggcacagccagatgccctgttttcctacttatcatactatttggctttttattgattttattatcaaaaaagatagagttgactttttattaacatgtgcttttattatattaaaagactacttattaaatgctgttatctcaaattctacttaaagaggatattataaccttggaaccaaggttttctcccagaaaaagattaatggaaacatcaattgcttttcatagttgatagctgctgcttcaaaagtattttattaaaataccarattaaacccaaaaaacccttaggacacaataaattgatttttggtttatattcaaatgtcagcacttagttgtcctgaaaaaaaaaaaaatcatgaaaggtggtgatttgtaaggaagtgaaaccagccaattgaggctctgctaggcatgctgagttctttcttagtccctggagagaaacttatggggcagaagcac

SEQ ID NO: 433290 - DNA, 615 bp, Homo sapiens
caggtttccagttgccccttcatagttgaatatcagggctatataagctaatagggctgggttccctatttatataaggcatgaattcctggtggctccctctcactcccccagtacatgcaggcccttagtctgctgcaggcatgtttaggcaagtcccctgtgtaagttcccttatctacacaaaacatccgatgtaagcacttgtggggtgggtcagaggttctctggggacccttcccttgctgtctgcctaaagcaaactagctaactcctttcacatctatgactttattctcagacatgttatgcttggaaatacgtattataggggcagggccaagatggtctactagaagcagcagcattcggaggctgtcatcaaaaaaaaccataataagaatatgaatccttcactgccaaccaargtatccaggttctctcatcaaaattgactagaaggctggcatgacccacagagagaaggaagaacagtgtggtgcggtgacccacctgagagccacaggggctggggaaccccctccctgacagccaagaaaggcggtaagtgagcatgctacccagtcggggaaactgtactttttccacagaact

SEQ ID NO: 433291 - DNA, 561 bp, Homo sapiens
cctaaggggagggatggccacagtctctgtaaccagcagacctagcctttcctcctggtagttctgaggaatcaggagagcccagaagagaggggtcccccagcaaagcacaccccctccaccaagggacaaagtactttgttaaacatgtcctccccatgccaccaaactgggtgagaacctccaacaggatttgtcagacaccctaaacaggagtgctcctacgggcatgaggttggtgccccttgggcttggaggtcccataagaaggagcaggcacccatctttgctgttctccaggctccttgagtgacatctcaaggcacaagagtgaatcagatgaatagggcctgaagtgaacccccaggaaactgcagcagccctacagaagagggacctgactattgaaagaaaatcaaacaagcagaaagcaacagcagcatcaataacaaaaagtccccacaaaaaccccatccaagagtcagcagcctcaaagacygaaactagacaaacttatgaagaagagaaagaatcaatgaaaaaatgctaaaaacccaaaag

SEQ ID NO: 433292 - DNA, 589 bp, Homo sapiens
tctcagttccttcacctaagattttctctctcctctctctgcaggcttctcctaagcatatctcatccattctcatggctttatatatcatgactaccataattgtatttctggatcagaattattttctgagctccagacacgaacgtgcagccagcctcttgaaaagtccacttagttgtcccaaaagcaatttaacactcatcttaaccaaaaccttgatttttctgcttcagaattaattgcttctcctcccgcctgcagattctcggtaaatggcactggcaactacctagtagcttcaaccccaaaaacctagaagtcacactcygcacagcccttcaccaagacttgtcaatacagtctctataactttacttcactttataaatttctgcattgcccctccaactccactgccagtgctttacatcaagccaccatcaccccatgcctgcattgcctccataggctgccacagttttcttcactctctatagtatgagcagcaatgagtgatctttgtaaaacacagattggttcacattactgtttgctcaaaatctttcaatagactgagagattgtgt

SEQ ID NO: 433293 - DNA, 604 bp, Homo sapiens
tatttgattattgttattttgatawaatattgaacacagacatgaattattaccttgtcagagtaaaaactgagtaaaggaaatagacaaaacaagtaggcaaattgaccgactgctgagaagagggagagagagacagagatgaacctgcatttggtgatcagggaagaaagtggcgtatgaatggaaatgtgaaggacaagaaaatgccagccatgataaaaactaggtggaaaaaattccaggcaaaatgtaccaaagtcctgtggtagataaaacagctcaatgagttggagagaatgaagccagaccagtgacactagaacacagtaactgagtgggattgtaacacaaaatggtgatggacaaaagttctggaattttgtctcctatttttcccttaaattctgagatagaaaattttgatgtgacagattagaggagaacaatggcagatggctcacaatcaatgataacagaaatactccagaggcttaaattctaaaacttggcttgaccatcctcatcaaaattccaaatctccatgtacattaagcctacaacattccaacattcttccactgacaaaatacaggaagataag

SEQ ID NO: 433294 - DNA, 604 bp, Homo sapiens
tatttgattattgttattttgatataatattgaacacagacatgaattattaccttgtcagagtaaaaaytgagtaaaggaaatagacaaaacaagtaggcaaattgaccgactgctgagaagagggagagagagacagagatgaacctgcatttggtgatcagggaagaaagtggcgtatgaatggaaatgtgaaggacaagaaaatgccagccatgataaaaactaggtggaaaaaattccaggcaaaatgtaccaaagtcctgtggtagataaaacagctcaatgagttggagagaatgaagccagaccagtgacactagaacacagtaactgagtgggattgtaacacaaaatggtgatggacaaaagttctggaattttgtctcctatttttcccttaaattctgagatagaaaattttgatgtgacagattagaggagaacaatggcagatggctcacaatcaatgataacagaaatactccagaggcttaaattctaaaacttggcttgaccatcctcatcaaaattccaaatctccatgtacattaagcctacaacattccaacattcttccactgacaaaatacaggaagataag

SEQ ID NO: 433295 - DNA, 604 bp, Homo sapiens
tatttgattattgttattttgatataatattgaacacagacatgaattattaccttgtcagagtaaaaactgagtaaaggaaatagacaaaacaagtaggcaaattgaccgactgctgagaagagggagagagagacagagatgaacctgcatttggtgatcagggaagaaagtggcgtatgaatggaaatgtgaaggacaagaaaatgccagccatgataaaaactaggtggaaaaaattccaggcaaaatgtaccaaagtcctgtggtagataaaacagctcaatgagttggagagaatgaagccagaccagtgacactagaacacagtaactgagtgggattgtaacacaaaatggtgatggacaaaagttctggaattttgtctcctatttttcccttaaattctgagatagaaaattttgatgtgacagattagaggagaamaatggcagatggctcacaatcaatgataacagaaatactccagaggcttaaattctaaaacttggcttgaccatcctcatcaaaattccaaatctccatgtacattaagcctacaacattccaacattcttccactgacaaaatacaggaagataag

SEQ ID NO: 433296 - DNA, 525 bp, Homo sapiens
tgggctctgccttaactagggtagaaaggaggaaaaacagaactgagatcttaagatgccactttctagttaatttcaaaaatattaggctccaaaatgacagattaaaagaataatttgaactcaatacacagtccctagattatttcacaaacatgaagggacctccttgtctatttataaacatcatctagttcaccctctgcctccaggattgtacatattaataccaataacttttccttaaaaaagtttctaaatattcaaagtggctgattccaatccttaatcttctcaggaaaggacttctaaacatgaatgtaggtgctttgccaatgcttcagaatgcagtgcggcagctctctctcacatcttggagaagttattttcatcctgttgtgctatctcacacatgatggtgcaaaacagttaayataaactggtttacacattctggagggaacaaatttaaaaagttaatgcaacttatttttaacttaaatatgaaattactttcacaaaaag

SEQ ID NO: 433297 - DNA, 606 bp, Homo sapiens
tcctaaaaagccagctttataaatggatcaatctccagaaatatgtcttaccaggatgggttctaagtgtgcaatgttcattgctaatctggaaatcctcatataaactcaatcctggagccaaataaaatggatttagtcctacaagtaactctgagcttctttgggacaatatatggacaaatatttggttccaaatctaaacttttttccagaatccttttattctctgtaatcacccataatatttggagatctgactcaggcaaaaacatgtggactaaggaggggagaaggtatcttagggctgaactagattgattagcaaaaaataattgccaattttctgaagaattttcaagtctaaattttygacgaatataaaccaggcaaacatgatgcttttatccaaccttggtggaaaccattaaatgtgcttccagtgtcacggggctccgattctgaaaaatatcaaagcccaggtccctcaggtcccccagtttactcctaccctgttccagagatcagcatattgtcaaaaggacctttctgattctcaggcaaaatattttctatctcttacatagagtagtaactaaaaagact

SEQ ID NO: 433298 - DNA, 606 bp, Homo sapiens
tcctaaaaagccagctttataaatggatcaatctccagaaatatgtcttaccaggatgggttctaagtgtgcaatgttcattgctaatctggaaatcctcatataaactcaatcctggagccaaataaaatggatttagtcctacaagtaactctgagcttctttgggacaatatatggacaaatatttggttccaaatctaaacttttttccagaatccttttattctctgtaatcacccataatatttggagatctgactcaggcaaaaacatgtggactaaggaggggagaaggtatcttagggctgaactagattgattagcaaaaaataattgccaattttctgaagaattttcaagtctaaattttcgacgaatataaaccaggcaaacatgatgcttttatccaaccttggtggaaaccattaaatgtgcttccagtgtcacggggctccgattctgaaaaatatcaaagcccaggtccctcaggtcccccagttyactcctaccctgttccagagatcagcatattgtcaaaaggacctttctgattctcaggcaaaatattttctatctcttacatagagtagtaactaaaaagact

SEQ ID NO: 433299 - DNA, 670 bp, Homo sapiens
gcaagtttcagaactagacatagcagggatgttgaaattactagatcaggaatttaaaactataatgaatatgctaagggttctcatggataaaaaagagaacatgtaagaacagacaggcaatggaagtagaaaaatgaaaatcttatgtaagaaccaatgaaaacactagagatgraaaacactgtaaaagaaataaagaatgcatttgataataggtgaggctagtttgcagattggacacagctaaggaaagaatctctgagcttgatgatatctcaatagaaatctccaaaacagaaaagtaaagatatcaaagactgaaaacaaccaaccaaaacagaaaaaacagagtatccaaggactgtgggacaactacaaaaggtgtaacatgtgcatactgggaataccagaaggagaagaaaggagaaaggaacagtagaaatgcctgaaatattaatgactgaaaattttcccaaataatttcagacaccaagccccaggtccagaaagctcagagactaccaagcaggataaatgccaaaacaaaactacaattgggcgtatcgtttccaaactacagaaaatcagataggcaaaaagtgtgaaagacgtcacaggaaaaaaaaaaagaccttacctatggaggaaagaagataagaattacatc

SEQ ID NO: 433300 - DNA, 670 bp, Homo sapiens
gcaagtttcagaactagacatagcagggatgttgaaattactagatcaggaatttaaaactataatgaatatgctaagggttctcatggataaaaaagagaacatgtaagaacagacaggcaatggaagtagaaaaatgaaaatcttatgtaagaaccaatgaaaacactagagatgaaaaacactgtaaaagaaataaagaatgcatttgataataggtgargctagtttgcagattggacacagctaaggaaagaatctctgagcttgatgatatctcaatagaaatctccaaaacagaaaagtaaagatatcaaagactgaaaacaaccaaccaaaacagaaaaaacagagtatccaaggactgtgggacaactacaaaaggtgtaacatgtgcatactgggaataccagaaggagaagaaaggagaaaggaacagtagaaatgcctgaaatattaatgactgaaaattttcccaaataatttcagacaccaagccccaggtccagaaagctcagagactaccaagcaggataaatgccaaaacaaaactacaattgggcgtatcgtttccaaactacagaaaatcagataggcaaaaagtgtgaaagacgtcacaggaaaaaaaaaaagaccttacctatggaggaaagaagataagaattacatc

SEQ ID NO: 433301 - DNA, 670 bp, Homo sapiens
gcaagtttcagaactagacatagcagggatgttgaaattactagatcaggaatttaaaactataatgaatatgctaagggttctcatggataaaaaagagaacatgtaagaacagacaggcaatggaagtagaaaaatgaaaatcttatgtaagaaccaatgaaaacactagagatgaaaaacactgtaaaagaaataaagaatgcatttgataataggtgaggctagtttgcagattggacacagctaaggaaagaatctctgagcttgatgatatctcaatagaaatctccaaaacagaaaagtaaagatatcaaagactgaaaacaaccaaccaaaacagaaaaaacaragtatccaaggactgtgggacaactacaaaaggtgtaacatgtgcatactgggaataccagaaggagaagaaaggagaaaggaacagtagaaatgcctgaaatattaatgactgaaaattttcccaaataatttcagacaccaagccccaggtccagaaagctcagagactaccaagcaggataaatgccaaaacaaaactacaattgggcgtatcgtttccaaactacagaaaatcagataggcaaaaagtgtgaaagacgtcacaggaaaaaaaaaaagaccttacctatggaggaaagaagataagaattacatc

SEQ ID NO: 433302 - DNA, 541 bp, Homo sapiens
gatagttgattattaagctactcaaggaggtaccagagaaaagtgcgtacaacttaatgaaattcaaaaaamaatacagtatatagttggaaaagtctccaaggaaatagatatcataaagaaaagacaattacaacatcttgaagtgaaaaacacacttagagaaatagaaaatacactggaaagtttcaacaatagactggaacaagtagaagaaagaacttcagagctcaaagataaggcttttgaattacccaatctgacaaagacaaaaaaaatttatgtccagcaggaaaatatcacaattctaaatatatatatatatatatatatgcctaacccaagagctcccaaatttataaaacaattataactacaacttagaaatgagatagacagcaacacattaatagtgggggacttcaatactccattgacagcactagacaggttatcaacacagaaagtcaacaaagaaacaatggatttaaactatactgtagaacaacaaatgaacagatatttacagaaaattctaccc

SEQ ID NO: 433303 - DNA, 548 bp, Homo sapiens
ggaacaatactcaaacataaaaactaatgaactattggcattctcagcaacctggatggagttggagaccattattctaagtgaagtaactctcgaatagaaaascaaacattgtatgttctcacttatgagtgggagctaagctataaggatgcaaaggcacaagaatgatatgatggactctggcaaatcagggagaagggtgggagggaggtaaggaataaaagactacacattgggtacagtgtactctgcttgggtgatgggtgcaccaaaatcttagaaatcatcactaagttacttatccatgcaaccaaacaccacctgtttccccagaaagctatttaatatttgaaaccatgttttaaaaaccattatttaaaaatcatttggtttttaattatttaaaaacaaaaaaaaagcagaaaaagaatagaagataaaaataggaaaaaaacaaagacaacaaatttaaaaacagtaacaaatatggcagctattaatccaactatactaataatgaccttgaatatcaatggtctaaaagc

SEQ ID NO: 433304 - DNA, 605 bp, Homo sapiens
aagtataataaataaaaaacagaaaaaaaaacacaacagcctgaatgcatatcaaccaacgagtagataaagaaaatgtggtatgttggggtgtgtgtgtgtgtatacacacacgtacattcataccatggaacaatactcaaacataaaaactaatgaactattggcattctcagcaacctggatggagttggagaccattattctaagtgaagtaactctcgaatagaaaaccaaacattgtatgttctcacttatgagtgggagctaagctataaggatgcaaaggcacaagaatgatatgatggactctggcaaatcagggagaagggtgggagggaggtaaggaataaaagactacacattgrgtacagtgtactctgcttgggtgatgggtgcaccaaaatcttagaaatcatcactaagttacttatccatgcaaccaaacaccacctgtttccccagaaagctatttaatatttgaaaccatgttttaaaaaccattatttaaaaatcatttggtttttaattatttaaaaacaaaaaaaaagcagaaaaagaatagaagataaaaataggaaaaaaacaaagacaacaaatttaaa

SEQ ID NO: 433305 - DNA, 605 bp, Homo sapiens
aagtataataaataaaaaacagaaaaaaaaacacaacagcctgaatgcatatcaaccaacgagtagataaagaaaatgtggtatgttggggtgtgtgtgtgtgtatacacacacgtacattcataccatggaacaatactcaaacataaaaactaatgaactattggcattctcagcaacctggatggagttggagaccattattctaagtgaagtaactctcgaatagaaaaccaaacattgtatgttctcacttatgagtgggagctaagctataaggatgcaaaggcacaagaatgatatgatggactctggcaaatcagggagaagggtgggagggaggtaaggaataaaagactacacattgggtacagtgtactctgcttgggtgatgggtgcaccaaaatcttagaaatcatcactaagttacttatccatgcaaccaaacaccacctgtttccccagaaagctatttaatatttgaaaccatrttttaaaaaccattatttaaaaatcatttggtttttaattatttaaaaacaaaaaaaaagcagaaaaagaatagaagataaaaataggaaaaaaacaaagacaacaaatttaaa

SEQ ID NO: 433306 - DNA, 554 bp, Homo sapiens
ggctaggagaaaatattagcagaaaatgtctgataaagaactgtagtgtccaaaatataaaatgaactcttaaaactcgataataaaaagacaaaaaacaagattaaaaaatgattcaaagaccttaacagatctcatcatagaagacatacagatggcaaataagtgtatgaaaaaatgctccatatcatatgtcatccaggaaatgcaaatttaaaaaacaatgaaataccactatacacatattagaatggcaaaaatccaaatactggtgacaatgtattgagcastgttttacattctcattccatgagagcaacaagaactctcattcattgctggtggaaatgaaagtttagaagacagtttggcggtttcttataaaactatacatacttttactgcatgatctagtaagcatgtctcctagtatttatccaaataagttggaaaatttagttcacacaaaaacctgcatgtggatgtttacagcagcttaacacatttatgcctagtgtttcactgttggaacgctaagcatttggaagttattt

SEQ ID NO: 433307 - DNA, 554 bp, Homo sapiens
ggctaggagaaaatattagcagaaaatgtctgataaagaactgtagtgtccaaaatataaaatgaactcttaaaactcgataataaaaagacaaaaaacaagattaaaaaatgattcaaagaccttaacagatctcatcatagaagacatacagatggcaaataagtgtatgaaaaaatgctccatatcatatgtcatccaggaaatgcaaatttaaaaaacaatgaaataccactatacacatattagaatggcaaaaatccaaatactggtgacaatgtattgagcactgttttacattctcattccatgagagcaacaagaactctcattcattgctggtggaaatgaaagtttagaagacagtttggcggtttcttataaaactatacatacttttactgcatgatctagtaagcatgtctcctagtatttatccaaataagttggaaaatttagttcacacaaaaacctgcatgtggatgtttacagcakcttaacacatttatgcctagtgtttcactgttggaacgctaagcatttggaagttattt

SEQ ID NO: 433308 - DNA, 592 bp, Homo sapiens
gaatattatttagtgctgaaaagaaatcagctatcaacctgaaaagacatggaggagccttaaatgcatatttctgagtgtaagaagccagtgaaaaggttacttattatatgatttccaactattagattatgggaaaggcaaaaccatggagacagtaaaaagatcaatggttgccagtggtttggcagggagcaggatataaatatgcagccacagaggatttttaggscagtgaaaacactgtgtatcatattacagtggtgcatacatttgtccaaaactccaggatgtaaaacaccaagagcgaaccctaatgtaaacaatgaactttgggtgaaaatgatgcatccctgtaggttcacaaattataacaaatcaaccagtttcgtgggagatgttgatagtgggggcgactatagtgcaggggcagggggcatatgggacatctctgtaccttcctctaaattttgtggtgagcctaagactgctctaaaaataaataaataagtattaaaaaaaatttcctcctttttcttaaggatttttttctgtaaacttgtaaattctttctctttgagatatacattgg

SEQ ID NO: 433309 - DNA, 664 bp, Homo sapiens
cgacttttatgagagcttattttcatacatctatctttttaattttctaacaaatatatgtgctcaaacgaggttctggcagtgcttaacacctagacaccacttcaagtctccaactttggaacagaaacattttcctaacaagtgatctttctctcatctgtaattcagaatttccatcccaggagaggtgttctaaattcgtgctcagtgttccaaagacacatatgtactcactagggagcaragcgatctcaaaggggatccaaaggccttggaggttagcactgtgcagtctgaagctgagccccatggctgctccccaggactagagctgcatctctaggcagcagggagcatgaccaccttcctcaactcttctgctatgatctctgctatgatctgccccaggattacaaaatagacttcccatagatctgacctaggatggatgcttaccaatcctatgtatcattcagcacataaatccaaaattttacaagatcaatttcaccttatttaatccaataaagagccataatataaatgattctgtctgagggattcttctcttctctagtccttgaggccaaggactttgtctcatacactgtgtctctacagattggcacacagatcataggagttcaggaaatatttgttc

SEQ ID NO: 433310 - DNA, 505 bp, Homo sapiens
accaacagattctcctgatgcagaaatgtgggattttgatagcacagaggaaccgcaggtgaccgaggcaggatctacaagcactttgcttttcaactccctgttmtaatttcaacacccaaacccttcttcccccaccccaaagttcaacctccctaccccaaagggcattgatgaatagcaatgcagaaggatctcacgctcacttataactaggtgggttcagggagagcccaagaaatcccttcctcaaacagacacttatgtaataccggaacacacagtgtttctctccccatccaccctcttctgactttttctaacctcccccatgattagaaaaagaatccaaattcatccctaatatgaaaaccaaccatagcagactcattctgaggaatggcacaaagatgactgtgttgttgaattctcacttggaatgagaatggggctattctgatgtcagtctgctcaacagggagttctcctgaaagtacagtaaagc

SEQ ID NO: 433311 - DNA, 505 bp, Homo sapiens
accaacagattctcctgatgcagaaatgtgggattttgatagcacagaggaaccgcaggtgaccgaggcaggatctacaagcactttgcttttcaactccctgttctaatttcaacacccaaacccttcttcccccaccccaaagttcaacctccctaccccaaagggcattgatgaatagcaatgcagaaggatctcacgctcacttataactaggtgggttcagggagagcccaagaaatcccttcytcaaacagacacttatgtaataccggaacacacagtgtttctctccccatccaccctcttctgactttttctaacctcccccatgattagaaaaagaatccaaattcatccctaatatgaaaaccaaccatagcagactcattctgaggaatggcacaaagatgactgtgttgttgaattctcacttggaatgagaatggggctattctgatgtcagtctgctcaacagggagttctcctgaaagtacagtaaagc

SEQ ID NO: 433312 - DNA, 621 bp, Homo sapiens
aagctgcgatgctgtcctctgcctgctagggtggatgataggagattctgttacagaaaaaaagggtagaatcaagactgtccttgctttccatcactctcaatatttcctttggagaatttttgtttgccagctccaaacctctggcgcctgtgaatttacatgctgactgccagagggtacatgcttccaccaggggacacagtaagggtcccattaaactctcagctatatctaccatatcatcaggaggaggtagaactgctactacacaatgggggcaggtgtttgacacactggtgacccactggggtatatcctagtacttccttgcccagcattgatagtgaacggacaagtacagcaaccatgaccagaggcaggcatgatggccaggagctcaggcctctcaggaataaaggtaagccacctagaccagaagaggtcctagccaaggatgaggggaatgggtaggagagscaagaggtgaagagtattggtgctgtcagaatctcactgcagaaatagggggttgggttcatctgatttgcctcctcagttttcccaggaaaagaaaccaacaagaatcataaaggagccattcccagacaggatgatagt

SEQ ID NO: 433313 - DNA, 309 bp, Homo sapiens
ttaatgttcagaacttgatatctagaggcagacaaacctttmtctctatctcgtcctaggcatttacctaataaattgaagacactggtgattatattgaagacattagcgattatagattatgacataatgccttttatctgctgaacactttattttagaatgaaagcctacatttaattagccatgggtttttatcatacatcatttgtgtgtatgtaaaagggaaaaatgtgtgaaagaaattggttaatgtatttctaaaacctgttcacacacacagtttgactcttctgaatcactggacaa

SEQ ID NO: 433314 - DNA, 309 bp, Homo sapiens
ttaatgttcagaacttgatatctagaggcagacaaacctttctctctatctcgtcctaggcatttacctaataaattgaagacactggtgattatattgaagacattagcgattatagattatgacataatgccttttatctgytgaacactttattttagaatgaaagcctacatttaattagccatgggtttttatcatacatcatttgtgtgtatgtaaaagggaaaaatgtgtgaaagaaattggttaatgtatttctaaaacctgttcacacacacagtttgactcttctgaatcactggacaa

SEQ ID NO: 433315 - DNA, 616 bp, Homo sapiens
gggttactctgacccatctgcctaggcgctgcatgcagctatctctgatgggttgttttggcataaggatgcttccatgagaaaagacagccttcagggaaagccacccaagggtggcattcacctccttttctcacggatctccaaacttaaaggggggcataagattccttcatctctttcccctgcccaagacttggyccataggaaaaaacaatgaggcacacagcttcccacatcagggcctaagtctcttgctttatgtccaggttctctgtctctctccccacctccacactccacaggttcctatctaattttgatcggcaaatgaggaaacatacttctctcattcactgtctttcacagattttttcctgtcttaaaagtaatttaaggctttgaggaatgttgacacctttgttgaccccttcctctttcatttacaagtatgaagtaaaatgagctctctcatagaatactaatgaaagtttggatggtacaaacttttggcattaggttttatgacatctaaacagtaaatctgttcttatcaatctggtttaagaagaaaatcataaacctgaaaataattttacacaaaaatgctaaacat

SEQ ID NO: 433316 - DNA, 616 bp, Homo sapiens
gggttactctgacccatctgcctaggcgctgcatgcagctatctctgatgggttgttttggcataaggatgcttccatgagaaaagacagccttcagggaaagccacccaagggtggcattcacctccttttctcacggatctccaaacttaaaggggggcataagattccttcatctctttcccctgcccaagacttggtccataggaaaaaacaatgaggcacacagcttcccacatcagggcctaagtctcttgctttatgtccaggttctctgtctctctccccacctccacactccacagkttcctatctaattttgatcggcaaatgaggaaacatacttctctcattcactgtctttcacagattttttcctgtcttaaaagtaatttaaggctttgaggaatgttgacacctttgttgaccccttcctctttcatttacaagtatgaagtaaaatgagctctctcatagaatactaatgaaagtttggatggtacaaacttttggcattaggttttatgacatctaaacagtaaatctgttcttatcaatctggtttaagaagaaaatcataaacctgaaaataattttacacaaaaatgctaaacat

SEQ ID NO: 433317 - DNA, 595 bp, Homo sapiens
tttgttttttcttttctctcaggacacctaagattgttagtttggttgttttacataattccatattttgtagagattttgttcatttctttaaatttgtttttctttatttgtgtctgattcagttaattcaaaagacttgtcttcgagctctgaaattctttcttctatttggactagtctatttttaaaactttccactgcattttatagttccctaaatgtgtctttcatttccaaaagttctgactggtttttgttttttgatctatctctttagagatttttttttactcataactgaaattaaaaaaaaaawttttcagaataaaaagaaatgaacaaagcaagaaatatgggactacgtgaaaagatcaaatctacgtttgattggtgtacctgaaagtgatggggagaatggaatcatgctggaaaaatttcttcaggatattatccagcagaacttccccagcctagcaagggaggccaacattcaaattcaggaaatacaaagaacaccacaaagatactccttgagaagagcaatcccaagacacataattgtcagattcaccaaggttgaaatgaaggaaaa

SEQ ID NO: 433318 - DNA, 595 bp, Homo sapiens
tttgttttttcttttctctcaggacacctaagattgttagtttggttgttttacataattccatattttgtagagattttgttcatttctttaaatttgtttttctttatttgtgtctgattcagttaattcaaaagacttgtcttcgagctctgaaattctttcttctatttggactagtctatttttaaaactttccactgcattttatagttccctaaatgtgtctttcatttccaaaagttctgactggtttttgttttttgatctatctctttagagatttttttttactcataactgaaattaaaaaaaaaatttttcagaataaaaagaaatgaacaaagcaagaaatatgggactacgtgaaaagatcaaatctacgtttgattggtgtacctgaaagtgatggggagaatggaatcatgctggaaaaatttcttcaggatattatccagsagaacttccccagcctagcaagggaggccaacattcaaattcaggaaatacaaagaacaccacaaagatactccttgagaagagcaatcccaagacacataattgtcagattcaccaaggttgaaatgaaggaaaa

SEQ ID NO: 433319 - DNA, 671 bp, Homo sapiens
tggtttctaaaacacccaagttcctgaaagtttattttcatagaatactacaaggataarttaactttcatactggccaaatactctccagagaaagatcagtgtctataaattcatgattaaccagtgaagcattcacgatcttcagcaatccacttcttgttagacttgaccacaacataatgtaacattacacataggtgtaatgttgacatttatagagatccgtatgtgggtttttatttttattttctcacttctatacggaatgtttttgtacataaaaacttgtgttttggtttaataatgaactatgcaaagatactactgtctatatgtagttgtatttacacaataaatgcctgcattttaatagttatgtatttatgatattctttatgatttatgacaatgatgagccttgaaattaaagtatttcacttgaatttatggaatccatgcttttaaatacagatataatttgatacattgatattaatattattgccctatatttcttctcccatgcatctgtactgacttctaatattttctttgaattgaatcacctttcattagaaccttgaaaaaaacccatacagttctgtagaacctatctcctaaaagatgcataacagggcatagttctaagtactgcccacagccagtgc

SEQ ID NO: 433320 - DNA, 671 bp, Homo sapiens
tggtttctaaaacacccaagttcctgaaagtttattttcatagaatactacaaggataagttaactttcatactggccaaatactctccagagaaagatcagtgtctataaattcatgattaaccagtgaagcattcacgatcttcagcaatccacttcttgttagacttgaccacaacataatgtaacattacacataggtgtaatgttgacatttatagagatccgtatgtgggtttttatttttattttctcacttctatacggaatgtttttgtacataaaaacttgtgttttggyttaataatgaactatgcaaagatactactgtctatatgtagttgtatttacacaataaatgcctgcattttaatagttatgtatttatgatattctttatgatttatgacaatgatgagccttgaaattaaagtatttcacttgaatttatggaatccatgcttttaaatacagatataatttgatacattgatattaatattattgccctatatttcttctcccatgcatctgtactgacttctaatattttctttgaattgaatcacctttcattagaaccttgaaaaaaacccatacagttctgtagaacctatctcctaaaagatgcataacagggcatagttctaagtactgcccacagccagtgc

SEQ ID NO: 433321 - DNA, 618 bp, Homo sapiens
atcctttttaacaatctccttctcccactttataaagaaaagacatgctcattsattctgaatcgattataatgtattacactggggtagaaatacttccaggggtaatgtgcaagggaaaattaaaaaattggtgacagaattgacaaattgaatgactacagtgattacgaggtaatcatttggcaagttacacagtttctaattctttactttcaacaaaaattgaagaaagacctaatgaattgtcgccgatagtcattacaaataacttttaatggtgtgtatttagggaagagttcagaacgtagagtgactttttaaaaaataaaactttttgattcatacctacttacttatgtgaacaggctccttgggacatctacttaaaaaacaggaaagatattgatgcctgatcttgactccttctattaataagctatatttattagcagatctatcaaatagtttttaaaaagttccaaccattcattaaaagatgtagttttatacaattttactttttgttactatcaaaaatcttaatatattgattttttcacttttaaaaattatttttaattgatatgtaataaatgaacatatttatggagtaca

SEQ ID NO: 433322 - DNA, 618 bp, Homo sapiens
atcctttttaacaatctccttctcccactttataaagaaaagacatgctcattcattctgaatcgattatratgtattacactggggtagaaatacttccaggggtaatgtgcaagggaaaattaaaaaattggtgacagaattgacaaattgaatgactacagtgattacgaggtaatcatttggcaagttacacagtttctaattctttactttcaacaaaaattgaagaaagacctaatgaattgtcgccgatagtcattacaaataacttttaatggtgtgtatttagggaagagttcagaacgtagagtgactttttaaaaaataaaactttttgattcatacctacttacttatgtgaacaggctccttgggacatctacttaaaaaacaggaaagatattgatgcctgatcttgactccttctattaataagctatatttattagcagatctatcaaatagtttttaaaaagttccaaccattcattaaaagatgtagttttatacaattttactttttgttactatcaaaaatcttaatatattgattttttcacttttaaaaattatttttaattgatatgtaataaatgaacatatttatggagtaca

SEQ ID NO: 433323 - DNA, 618 bp, Homo sapiens
atcctttttaacaatctccttctcccactttataaagaaaagacatgctcattcattctgaatcgattataatgtattacactggggtagaaatacttccaggggtaatgtgcaagggaaaattaaaaaattggtgacagaattgacaaattgaatgactacagtgattacgaggtaatcatttggcaagttacacagtttctaattctttactttcaacaaaaattgaagaaagacctaatgaattgtcgccgatagtcattacaaataacttttaatggtgtrtatttagggaagagttcagaacgtagagtgactttttaaaaaataaaactttttgattcatacctacttacttatgtgaacaggctccttgggacatctacttaaaaaacaggaaagatattgatgcctgatcttgactccttctattaataagctatatttattagcagatctatcaaatagtttttaaaaagttccaaccattcattaaaagatgtagttttatacaattttactttttgttactatcaaaaatcttaatatattgattttttcacttttaaaaattatttttaattgatatgtaataaatgaacatatttatggagtaca

SEQ ID NO: 433324 - DNA, 549 bp, Homo sapiens
tctctatgagtagcttagcttaactcttcctctactctgaccatgagctgcctctttattgttgggacctgggaattaccctttcttggtttctaactgagcttagtatttataaacacttactaggtaaactttcrtatttgcaagtgcttgcaacaggtgcaaatgtttccatccacacagtagtatatgtgtatcttccttagataagtaaatgaacagacgtggaaataataacttacttaattgacatcacatccttatggtgttacacagaattcaactcctcccttttctggggtatcatcccagattaccctgggaagattttatatttatttgcctatgcctccaacagaagttgtacttttatcatagcagttaaatatacttttctaacttgtttgcaagtttcttttctcaatagactgtaaactcattgaggtcaacgaccatgccttttatatctggcacataaacactttaatacacttttgctgactttttaaaaaagaatgaattacatcatgtgtgaatgcaaggttgctt

SEQ ID NO: 433325 - DNA, 549 bp, Homo sapiens
tctctatgagtagcttagcttaactcttcctctactctgaccatgagctgcctctttattgttgggacctgggaattaccctttcttggtttctaactgagcttagtatttataaacacttactaggtaaactttcatatttgcaagtgcttgcaacaggtgcaaatgtttccatccacacagtagtatatgtgtatcttccttagataagtaratgaacagacgtggaaataataacttacttaattgacatcacatccttatggtgttacacagaattcaactcctcccttttctggggtatcatcccagattaccctgggaagattttatatttatttgcctatgcctccaacagaagttgtacttttatcatagcagttaaatatacttttctaacttgtttgcaagtttcttttctcaatagactgtaaactcattgaggtcaacgaccatgccttttatatctggcacataaacactttaatacacttttgctgactttttaaaaaagaatgaattacatcatgtgtgaatgcaaggttgctt

SEQ ID NO: 433326 - DNA, 549 bp, Homo sapiens
tctctatgagtagcttagcttaactcttcctctactctgaccatgagctgcctctttattgttgggacctgggaattaccctttcttggtttctaactgagcttagtatttataaacacttactaggtaaactttcatatttgcaagtgcttgcaacaggtgcaaatgtttccatccacacagtagtatatgtgtatcttccttagataagtaaatgaacagacgtggaaataataacttacttaattgacatcacatccttatggtgttacacagaattcaactcctcccttttctggggtatcatcccagattaccctgggaagattttatatttatttgcctatgcctccaayagaagttgtacttttatcatagcagttaaatatacttttctaacttgtttgcaagtttcttttctcaatagactgtaaactcattgaggtcaacgaccatgccttttatatctggcacataaacactttaatacacttttgctgactttttaaaaaagaatgaattacatcatgtgtgaatgcaaggttgctt

SEQ ID NO: 433327 - DNA, 562 bp, Homo sapiens
ggggtgaccgggagcagggaatgaggacttgttaaatggatacagggtttcagttttgcgagataaaaagagttctggagatggatggtggtaatgaccacgaagtaatatgaatgtacttaagactactgaactgtacactaaaaatggttaagatggtgaattttatgttatgtgcatgttactacaaattaaaaaagagayacaccaaatgtttccaactattttgcaaatatggttttattgtgcacttggtttttataatgttattttcactactaatagtgcatatatcttttaaaaatttaaagtaaactgacattttcaagagtgccttttgcacatttcacggccacataaggcacctttgtcttccactaaaaagtgcaaaggttttgccttgtttgcagatagtgtagagatggataatgtaatatatacatgcacatgctttgtgttaagaattgtaaaaaacttcaggaaacgtatgctgacacttttcaggagaaaataataggtttgtaaaatatatgaatcataaacctgtagcatctcaattaac

SEQ ID NO: 433328 - DNA, 562 bp, Homo sapiens
ggggtgaccgggagcagggaatgaggacttgttaaatggatacagggtttcagttttgcgagataaaaagagttctggagatggatggtggtaatgaccacgaagtaatatgaatgtacttaagactactgaactgtacactaaaaatggttaagatggtgaattttatgttatgtgcatgttactacaaattaaaaaagagatacaccaaatgtttccaactattttgcaaatatggwtttattgtgcacttggtttttataatgttattttcactactaatagtgcatatatcttttaaaaatttaaagtaaactgacattttcaagagtgccttttgcacatttcacggccacataaggcacctttgtcttccactaaaaagtgcaaaggttttgccttgtttgcagatagtgtagagatggataatgtaatatatacatgcacatgctttgtgttaagaattgtaaaaaacttcaggaaacgtatgctgacacttttcaggagaaaataataggtttgtaaaatatatgaatcataaacctgtagcatctcaattaac

SEQ ID NO: 433329 - DNA, 562 bp, Homo sapiens
ggggtgaccgggagcagggaatgaggacttgttaaatggatacagggtttcagttttgcgagataaaaagagttctggagatggatggtggtaatgaccacgaagtaatatgaatgtacttaagactactgaactgtacactaaaaatggttaagatggtgaattttatgttatgtgcatgttactacaaattaaaaaagagatacaccaaatgtttccaactattttgcaaatatggttttattgtgcacttggtttttataatgttattttcactactaatagtgcatatatcttttaaaaatttaaagtaaactgacattttcaagagtgccttttgcacatttcacggccacataaggcacctttgtcttccactaaaaagtgcaaaggttttgccttgtttgcagatagtgtagagatggataatgtaatatatayatgcacatgctttgtgttaagaattgtaaaaaacttcaggaaacgtatgctgacacttttcaggagaaaataataggtttgtaaaatatatgaatcataaacctgtagcatctcaattaac

SEQ ID NO: 433330 - DNA, 626 bp, Homo sapiens
aattagtgatattatattgacatatgattatggtaatgtacttacagggagatataaaatctataaactgatatgtattatctttaaataagagcagcagtttctctacattgaaatgataaatgtccaaattatatgctcttgattatatcatcactattcagcctcaaagttaaatgctcctcagaacctatttgmgtataataaaatgaattttcctaaatgatttcataaaatgattctcaggaaatggttgttgatcttcaatttaattgcattttctttatgtttgcattcatttaaatattcacaatcaagatgatataagaaatataattggtataatacctcttctttgtggaaaatgaaacatattatttgaagtcatataatctaaaattttagacaggaaaaaagttctactataaactatcattatataaatcatgcattaaaatgaccctgtataatatgcattatttatataggaaagtataaataaaaaggaaaataaaagaaagcctagtctaataatgttaacttttttatttttagaatatgtcattgagattagacatggtaaatggtttgtccaattctactgtgaaggagtagtactcaaacaa

SEQ ID NO: 433331 - DNA, 626 bp, Homo sapiens
aattagtgatattatattgacatatgattatggtaatgtacttacagggagatataaaatctataaactgatatgtattatctttaaataagagcagcagtttctctacattgaaatgataaatgtccaaattatatgctcttgattatatcatcactattcagcctcaaagttaaatgctcctcagaacctatttgcgtataataaaatgaattttcctaaatgrtttcataaaatgattctcaggaaatggttgttgatcttcaatttaattgcattttctttatgtttgcattcatttaaatattcacaatcaagatgatataagaaatataattggtataatacctcttctttgtggaaaatgaaacatattatttgaagtcatataatctaaaattttagacaggaaaaaagttctactataaactatcattatataaatcatgcattaaaatgaccctgtataatatgcattatttatataggaaagtataaataaaaaggaaaataaaagaaagcctagtctaataatgttaacttttttatttttagaatatgtcattgagattagacatggtaaatggtttgtccaattctactgtgaaggagtagtactcaaacaa

SEQ ID NO: 433332 - DNA, 626 bp, Homo sapiens
aattagtgatattatattgacatatgattatggtaatgtacttacagggagatataaaatctataaactgatatgtattatctttaaataagagcagcagtttctctacattgaaatgataaatgtccaaattatatgctcttgattatatcatcactattcagcctcaaagttaaatgctcctcagaacctatttgcgtataataaaatgaattttcctaaatgatttcataaaatgattctcaggaaatggttgttgatcttcaatttaattgcattttctttatgtttgcattcatttaaatattcacaatcaagatgatataagaaatataattggtataatacctcttctttgtggaaaatgaaacatattatttgaagtcatataatctaaaattttagacaggaaaaaagttctactataaactatcattatataaatcatgcattaaaatgaccctgtataatatgcattatttatayaggaaagtataaataaaaaggaaaataaaagaaagcctagtctaataatgttaacttttttatttttagaatatgtcattgagattagacatggtaaatggtttgtccaattctactgtgaaggagtagtactcaaacaa

SEQ ID NO: 433333 - DNA, 593 bp, Homo sapiens
aagtacattccataaaagacacatcacagagtatgcttgacaatgtgaacagcaggacaamcccagaacttttcaggacaacatctcacttagaaaaagctcaggtaacagtttcacaaggaaaaggatgcttgcagaagttgaaaggtagtattaaaattagaaccatgttgactgttttcccaaaattactgtcttttcctaaaaggacacctatcagacacccatcactttaagacccccgcaagacccttttcctgcccctgttacagagttaattggatttgtccacacttcccagaagctgatcaagcctaatgcaaacccagcatcataactacataaaaccatggaggggcagtggtgtcagaaatagagcaaggacagggcaagtggaagacctgacctctcggcacttggctggtggtcttgatcttaacctttctctctcctcttctgtgaaatttaataatcactgtcattaccaaacaagctacaagttatgctgggaggctcaaatgaaaaaagaaatgggaaagcactggaaaactgtaaagcaccatgcaggtataagatgttgactacaccatcac

SEQ ID NO: 433334 - DNA, 593 bp, Homo sapiens
aagtacattccataaaagacacatcacagagtatgcttgacaatgtgaacagcaggacaaacccagaacttttcaggacaacatctcacttagaaaaagctcaggtaacagtttcacaaggaaaaggatgcttgcagragttgaaaggtagtattaaaattagaaccatgttgactgttttcccaaaattactgtcttttcctaaaaggacacctatcagacacccatcactttaagacccccgcaagacccttttcctgcccctgttacagagttaattggatttgtccacacttcccagaagctgatcaagcctaatgcaaacccagcatcataactacataaaaccatggaggggcagtggtgtcagaaatagagcaaggacagggcaagtggaagacctgacctctcggcacttggctggtggtcttgatcttaacctttctctctcctcttctgtgaaatttaataatcactgtcattaccaaacaagctacaagttatgctgggaggctcaaatgaaaaaagaaatgggaaagcactggaaaactgtaaagcaccatgcaggtataagatgttgactacaccatcac

SEQ ID NO: 433335 - DNA, 639 bp, Homo sapiens
gctatggcctgaatatttgtgcctccccccaaatttatatattgaagccattattcccagtagatgctgtttgtatgcagaacttttggaggtaattaggtcatggggtagagccctcatgagattagtgtccttataagaagggacataagagatgatttctctrtccatcatgtgaggacacagcaagaaggcagtcatgtgtaaaccagaaagggggtcctctccaggaaatgaattggctggcaccttgatcgtggacttctcagcctccagactgtgaggaataatttctgttgtttaagccctgcagtctattttatttgttttggcagctgatgaagctaatgctcaagataaaatcctggttacttaccttgctattatgcctcatgtctaaaccataagcaggctcttcagtcctacttaagcagcatacccagaatccactgaactcattttatctttactgtcattgtcctcatcacagacccatcatcctccattcctccagtggcagccacactgatttctttgccctctctagtgacccttccttctgcctatttccacatagaaaacaggcaatcttctaaaattgcaaattagatcatatcataggttagaacactttaattg

SEQ ID NO: 433336 - DNA, 639 bp, Homo sapiens
gctatggcctgaatatttgtgcctccccccaaatttatatattgaagccattattcccagtagatgctgtttgtatgcagaacttttggaggtaattaggtcatggggtagagccctcatgagattagtgtccttataagaagggacataagagatgatttctctatccatcatgtgaggacacagcaagaaggcagtcatgtgtaaaccagaaagggggtcctctccaggaaatgaattggctggcaccttgatcgtggacttctcagcctccagactgtgaggaataatttctgttgtttaagccctgcagtctattttayttgttttggcagctgatgaagctaatgctcaagataaaatcctggttacttaccttgctattatgcctcatgtctaaaccataagcaggctcttcagtcctacttaagcagcatacccagaatccactgaactcattttatctttactgtcattgtcctcatcacagacccatcatcctccattcctccagtggcagccacactgatttctttgccctctctagtgacccttccttctgcctatttccacatagaaaacaggcaatcttctaaaattgcaaattagatcatatcataggttagaacactttaattg

SEQ ID NO: 433337 - DNA, 621 bp, Homo sapiens
gctagtcattaaggacataaatgccttaaatgagataaatacatttgcttgactagacgttgaaaataagaaagaaatattgtaggatgtggcagaaacttagatacctcagaagaaattaaacaggtgtttggaaaaaattaatggcagaaattgtcttaactaattggcaaattctttcagcaatatttaagatacaggagtgtatggtaagatagaaatagataacattttaagagcctaaactctgaacatagacaacaaaagcaaatattttaatatttagaaaatcttagaaaatccattcatacatggatatcaaagttataggtactaaactattacatgcaatgggtactctgtaaaatagaacctcaataatttttaaaackaaaacattggaaattaatgctgcaagttgttatctatcttctaaaatgaagacacaattaattttggagcagattttcccattgttttataaaaaatataacattggaagtggacattttagaatgtgtatgtatccaagtaaccattcatgtccttagagaagagctgaatgcaaggaattaaatcaaacataatactacagacagatggctatttgtgtagtttagc

SEQ ID NO: 433338 - DNA, 614 bp, Homo sapiens
atggaactttcatcaagatagaccacattctgggccataataaacaacttaacaaatctaaaagaacaggaatcttacaatgtctgctctaagaccatagaattaaattataaattagtaacagaaagatagctggaaaagcttgaaagatgtggagattaagcacacacttataaataaaatataagtcaaagaagatatctcaagaaaattaaaaactatttgaactaaatggaaatgaaatataactgatcagaatttgtggaatgcagwgaaaacattgcttagagggagattcacagcattaaatacactattagaaaagaagaaaaatctaaaattaatcatctaagctgttacctcagtataatagaaagagaggaggatagtaaatttaaagtaaggagaaggaaaaaataataaaaattagagcagaaatcaatggagaatgtcaataaaatcaaaagctgctgttaaaatatttcaataaaattaataggtctctagtgaggctaacgaacaaaaaaggatacaaattactattataagatacaaaggaaagctattactgtagatactatggacaataaaaataataaagaaatattattaaa

SEQ ID NO: 433339 - DNA, 469 bp, Homo sapiens
gttccaacatatgaattttggaaggacatatacacacaagccatagcatatgtatatctatgtatatgtacacatattttctttgtatatagtttccttttaacccaacctcgtgagtttatagcagcagaaaaaatatataaattttatgattcctaaattactatctaaatttgagccatcttttaattcaggaaagacctaacatagttagtaccaataaggaatttggtccaacactcttttatgtgacaaaagaagaataattatttgtgaaatcatcatggccaatatgctcttcatttttctaactcaaagtacactcatcatctctaattatgggggataaagtgcattttatctaacttcaagcttgcaagcatttgcttagaaaatcatttttaygtgggaattctttaaagaacacttaataaataattaaatatattttgatgcctccaactatgtt

SEQ ID NO: 433340 - DNA, 549 bp, Homo sapiens
gttacttactgatggctttttgaaatgggatcttcaaatgaaaaggaagcatagaaactttatgtagaagatttagatgaatatrttttagagagaaatagaaaaaggtacatgggagaatgccaaagggaactgtttatttctttttgttgctggaaggaaggtattggaaatcatgcagtgatgagataaatgaagtgggtggctttttgcgatatccagaataatttaagaaatcatagctggatgtgggtacctgtagtcccatagtcccagcttctcaggaggctgaggcgggaagattgcatgagcccaggagtttgaggttgtggtgagctatgattgtgcagctgtactacagccttggtgacagagcgagaccctgtctctatttaaaaaaataaaaaatcacagtggtttgtgtgaggcttgtcatgttttgtttgggtgatgaataatgaaatatggacatgtttactggatctttaaacaccagattttgtggtagcaaataacttattgaaaaaaaaaaaaaacaatgcatgaata

SEQ ID NO: 433341 - DNA, 528 bp, Homo sapiens
agaaccttggtatccacaatcttttagcttaacctgaacatgccctttcctttgatcccaggtcttcagacaaactcaaccaattgtcaattggaaaatgtttaaatttacctatagcctgaaagccccacccmctgctttgaattgccccgcctttctgaaccaaaccaatgtatttcttaaatgtatttgattgatgtctcatgcctccctaaaatgtataaaaccaagctgtaccccaaccaccttgggcacatgttctcaggacctcctgagggctgtgtcatgtgccacggtcactcatatatggctcagaataagtctcttaaaatattttaccgagtttgactcttcatcaacacctgttctattgaatgaactggatttccactgttaatattaccctaatgtaaaaagtagtgaggtaacagactttttgtcagccttgtacttacagagtagatgactctgtgatctgagccctaattcctaacaggggatgctttggaatgaataaatgcagaggta

SEQ ID NO: 433342 - DNA, 489 bp, Homo sapiens
agaatgaagcccaaacccacagaggattattctcagattgaaacctagtggagtttgcctgtctggattatgagattgcttgacacctttaagtcttttattctttcctttgcaccttttttatttttagtgtttaaacttttattttaggttcagggatacatgtgcaggtttgttatatagggaaactcatgtcaccagggtttgttgtacagattattttgtcacccwggtactaagcctagtatgcaatagttattttttctgatcctctccctcacacactccaccctcttgtaggctccagtgtcccattggtcccctctatgcgtccatgtgttctcatcattcagctcccacttataagtgagagcatgcagtatttggttttctgttactgcgttagtttgttaaagataatggccttcagctccttccatattcctgcaaaatgcacgatcttgtttttgttatgacctttgcaccttt

SEQ ID NO: 433343 - DNA, 581 bp, Homo sapiens
tcctatttcagatcttctagtctccaactctgaagataaaaatcattaaaacctctgactctgatattgaatgcctgcataaaaatttccttccatcaccttgcaacagatgacttgctcatacacctttctgactcaccatcacgggttctctccttcctttgagactacagtaattctytttgtatttcatgttatgtgcaaactttactttcaaaggggtttttacctatattaatgtatttacatcattcacttaatatattttcctatctgtaaaattggtttagatatcttggattaggatagaacacaatttttctcacttttataagttttttttagttgggccgtttttcagttggtgacagtgtcagaaatgaattaaaattaagtgaagaataggtaaacagaaggatgcccttatgacttaccaactttgcttagttttttcaagttcaacaagacccttctctcccttcaaggaagatgattcctaggcatgtttgttatttttatcaaaacagctgagttttttttttcattcaaattggcagtatacctggtaaatacaaattatt

SEQ ID NO: 433344 - DNA, 652 bp, Homo sapiens
agaataaaactactttcaaaagaaatatatttgaaacagccatgtgacctcttctctcagaaacagaactcggatcattatcttaaaactcaagaacgtattggtagataagtgtgtttcattttgaaaaatactccccattaccctgctgtctactcaaccacttctaattcattaacctcaaggaaacctggttagcttatgtaggagaatatacatttatataagggcatactacattggytttatggaaggctatctttatatctatatagtctctatctctgtaaactgggagtgtatctgtgtggccaggtatacctaatcagggaatgggacagaaacggagggaggataaatttaattcttctgtaatgacatgtcagttctctctcatttatcacaatggattactcacagcattgtagggttttcccctttaatcttctgattactctaggagcaatttatttgccgccattcatctaattggtataaattccagtcgtggcttccctcttatcccgggaaaacactgtcaggcagagatgaataaggaaaggtagagtggaacagattaatgcttccactcttggtgtggaagtcagagccagggaaagaaaaagaaggtcctgtgaaggtctgaagtaac

SEQ ID NO: 433345 - DNA, 566 bp, Homo sapiens
tttgcttatctttctcctcacttcctctctcttgcctcctccaacatccacatggaagtgtttcaattaataatataaatyccctacttcttagtctctttcttggaattcatcctaacagattgagctctgacttgtatacaaattacactcaagtccttatctgtagcccttgtttttctctgtagttcacctctaagcagcaactggaagtgagatgaactctaccactttctgtcttaaaataaaactgctcatctccactattcgtgtgtcattacagtttatcttcccagctccctcattacaggggccattagtctttcctacccactaccaccatattattttcttaaaatcagtactttcaccgtgtcatttttcagccttactgctctctgtgattctttactgtcaaaaccactggttcccaacatgacatgtgtctagaggagagttatcaatccaaaaagagggtcacagaaagagtgataaaatgtggaaaaatgtttgagaaatgcataccatggccgcttcttaatttcctagaactaaaccctcatgag

SEQ ID NO: 433346 - DNA, 563 bp, Homo sapiens
aattggttttattgagaattatgctgattgttgtattcataggaattactttaattgttgttttcatgctctctgcataaaaaaaggattatttaaatcggtggtaaacacgtatttgaagaaacactcctctaggtatcttctctacctgatatgttctatctttgagtagtatgcatcatttattttgtcataattattgcaactcagttgcctctgagttttgttttgttttttttttttgagacggagtctcgctctgtcgcccaggctggagtgcaatggcgcgatcttggctcactgcaacctctgcctcccaggttcaagcaattctcctgcctcagcctcctgagtagctgggattacaggcgcccccccaccacgccyagctaatttttgtatttttagtagagatggggtttcaccatgttggtcaggctggtctcgaaaccctgcccttgtgatccacccgcttgggcctcccaaagtgctgggattacaggcgtgagccaccgcgccaggccgcctctgaggttttaaaatctctaagcttctcctgtttc

SEQ ID NO: 433347 - DNA, 542 bp, Homo sapiens
gtttcaaattacacattgtaaaaattgtttatgtgaaatgtcttattctttacagattatatggtaaaatagtttatctttgctcctgtcttcccactgctgtctccagacacattamtactctcattctgcctactggactcagggacttggcactgatctcaaacaaatctcaacatctttttgcatgttcagattcaagatttctccttcctgttgcctcttatcaaaatatgtgtctgtattacattcctccaaaagtagataatccccatataaccactcagtgaaagccaccctttgataggtaaggtctgaaattgtctggatatgctattccttattgctttttttaaaaaaaatatagagaagagctaggctttaaaatgtcttatcccaagacaaaacaaaacaaaattacatatgttgttacaattcaaatatgttttacctaaaacaatctctgaatatcatgaggatgaactctacttaatcattggaatgatgtaccatgtgctaagaaatcagaaagattgtaaata

SEQ ID NO: 433348 - DNA, 542 bp, Homo sapiens
gtttcaaattacacattgtaaaaattgtttatgtgaaatgtcttattctttacagattatatggtaaaatagtttatctttgctcctgtcttcccactgctgtctccagacacattaatactctcattctgcctactggactcagggacttggcactgatctcaaacaaatctcaacatctttttgcatgttcagattcaagatttctccttcctgttgcctcttatcaaaatawgtgtctgtattacattcctccaaaagtagataatccccatataaccactcagtgaaagccaccctttgataggtaaggtctgaaattgtctggatatgctattccttattgctttttttaaaaaaaatatagagaagagctaggctttaaaatgtcttatcccaagacaaaacaaaacaaaattacatatgttgttacaattcaaatatgttttacctaaaacaatctctgaatatcatgaggatgaactctacttaatcattggaatgatgtaccatgtgctaagaaatcagaaagattgtaaata

SEQ ID NO: 433349 - DNA, 484 bp, Homo sapiens
tgagaataacagcaaatgacagttttattcatttctggtataaaatgttcaagttcatttaatgaaccatgatattccttaatacacctagtgaacacaaatttgaccattactttttaagcaattttgtatatatagcattaatttttcttgacagatgaggaaaggtacatgtagtatgaacaaataaaaattttacttggaaaaattatttttaggatccttttgcttaacttctgtttgatttatgacgtcttccaattgttcatgatgtaatttgatttgagacaayataaaaaaaattgaccagatcctaactagaagtctcaagtaaatagaggaaactgagaaagaaatatatccatgtaatgtgcagacacatgaaaatttcttggaaaacttaacactgtcatcactttgtttattctaaaacatttctgagatgctgttaggtattataataggcactgagagagtttaaagt

SEQ ID NO: 433350 - DNA, 484 bp, Homo sapiens
tgagaataacagcaaatgacagttttattcatttctggtataaaatgttcaagttcatttaatgaaccatgatattccttaatacacctagtgaacacaaatttgaccattactttttaagcaattttgtatatatagcattaatttttcttgacagatgaggaaaggtacatgtagtatgaacaaataaaaattttacttggaaaaattatttttaggatccttttgcttaacttctgtttgatttatgacgtcttccaattgttcatgatgtaatttgatttgagacaatataaaaaaaattgaccagatcctaactagaagtctcaagtaaatagaggaaactgagaaagaaatatatccatgtaatgtgcagacacatgaaaatttcttggaaaacttaacactgtcatcactttgtttattctaaaacatttctgagatgctgttagrtattataataggcactgagagagtttaaagt

SEQ ID NO: 433351 - DNA, 493 bp, Homo sapiens
ttcaaattatatacacacacacattcacatacacctatgcaatattcaataatctgttacaatcacgtacataagctgtgtcttctatattaaagaccaatatttctggaacttatttatagacagataatagtaaaacgttcagaaatatggatataagtatgcttatatacttatgcatacttatatattaagctataatatatagagcttaatatatatakagagagagtatgtgtatgtaataacttgaaggaaatattaattggagagtataaggcaataataaataacaacacatatccttaaaaaggcacttgattttattagcatatatgtatattttagtaaaattaatgtgtttccaatgtaatgtgtttcttaattctctttcagtagaaacaatatcgaacatacaccaatattttattattgattaagtaccaaagaatctaacaatatttaggaagatactaatgaaaccgttagtgtg

SEQ ID NO: 433352 - DNA, 659 bp, Homo sapiens
ttttggtcttcaaggaagttcatggaaaggatgaaaagacttctgacaagtacaggtttctgataattttgagataccattgggcttgtaagaatttctaaaactaatgaaataattgatgggtttgtgaaactatcaaccaggatcaaacagaccaaaaattaattacatgagatagaataaactgataaaaaagaattacggtttttatagctttttatttgaaacatttctggttctttcaatgttttgtcttccagattttttwtaaaaaaaaaaaacaactttatttttctttaaagctatctacagtttacaagaatttggtgaagtatacattggtaaacaaaaattgagatatttgcttttcctccctacatgatccctccaaaatttggaaagtatacctgagtattcttatttttatggcaacatggttatttgcatgagttcattaagaattgctttctttatagcaggatacaattggaaacactggttatactactagggctttggttggaatgtcgtatttgagaagatgcatagaatgcctggtttcaagtgtttctagccttacagtgaaggagtaaaaagttgtcacttcctggcaggcccaggaacctcaagctattagatattacaggtaaaggatgatg

SEQ ID NO: 433353 - DNA, 659 bp, Homo sapiens
ttttggtcttcaaggaagttcatggaaaggatgaaaagacttctgacaagtacaggtttctgataattttgagataccattgggcttgtaagaatttctaaaactaatgaaataattgatgggtttgtgaaactatcaaccaggatcaaacagaccaaaaattaattacatgagatagaataaactgataaaaaagaattacggtttttatagctttttatttgaaacatttctggttctttcaatgttttgtcttccagatttttttwaaaaaaaaaaaacaactttatttttctttaaagctatctacagtttacaagaatttggtgaagtatacattggtaaacaaaaattgagatatttgcttttcctccctacatgatccctccaaaatttggaaagtatacctgagtattcttatttttatggcaacatggttatttgcatgagttcattaagaattgctttctttatagcaggatacaattggaaacactggttatactactagggctttggttggaatgtcgtatttgagaagatgcatagaatgcctggtttcaagtgtttctagccttacagtgaaggagtaaaaagttgtcacttcctggcaggcccaggaacctcaagctattagatattacaggtaaaggatgatg

SEQ ID NO: 433354 - DNA, 603 bp, Homo sapiens
cccttgttctctgattctgcttttgaaatttaaaattctgtggaataactggtgtgccatgaacactggccttcattcatttcacaatgcactgaacactgcactcrtggaggagcagcgtgatctgtttcttcacttattcagccattggcaaacatcttcactctacacggtagcaaagtgccaggtccttgggcttaccgcgaaggtgaggcacgactctcaccttcccagtgctttccacacaatgatgggaacttgtgaccaaggtttgagccctctcactgttgaaaacatggctgtcttttgttcagcacccacccactcccattttgtttgttttattaagagagtatgaaggttctcagcctgggaagcccatgaggcaaaaagaaccaagtcagactcttcagcacacctgaaggcatcttgtgaacacagaggctgtgtttccagtagaacctgtatttaatttattcccatgagggtccccaagtggaccacatctgtatgccctagtccagatttttaaatcctctgatgctgcagaaccactctgataacagcagaaacttaaatggatcagaaacttgagtaacacca

SEQ ID NO: 433355 - DNA, 603 bp, Homo sapiens
cccttgttctctgattctgcttttgaaatttaaaattctgtggaataactggtgtgccatgaacactggccttcattcatttcacaatgcactgaacactgcactcgtggaggagcagcgtgatctgtttcttcacttattcagccattggcaaacatcttcactctacayggtagcaaagtgccaggtccttgggcttaccgcgaaggtgaggcacgactctcaccttcccagtgctttccacacaatgatgggaacttgtgaccaaggtttgagccctctcactgttgaaaacatggctgtcttttgttcagcacccacccactcccattttgtttgttttattaagagagtatgaaggttctcagcctgggaagcccatgaggcaaaaagaaccaagtcagactcttcagcacacctgaaggcatcttgtgaacacagaggctgtgtttccagtagaacctgtatttaatttattcccatgagggtccccaagtggaccacatctgtatgccctagtccagatttttaaatcctctgatgctgcagaaccactctgataacagcagaaacttaaatggatcagaaacttgagtaacacca

SEQ ID NO: 433356 - DNA, 603 bp, Homo sapiens
cccttgttctctgattctgcttttgaaatttaaaattctgtggaataactggtgtgccatgaacactggccttcattcatttcacaatgcactgaacactgcactcgtggaggagcagcgtgatctgtttcttcacttattcagccattggcaaacatcttcactctacacggtagcaaagtgccaggtccttgggcttaccgcgaaggtgaggcacgactctcaccttcccagtgctttccacacaatgatgggaacttgtgaccaaggtttgagccctctcactgttgraaacatggctgtcttttgttcagcacccacccactcccattttgtttgttttattaagagagtatgaaggttctcagcctgggaagcccatgaggcaaaaagaaccaagtcagactcttcagcacacctgaaggcatcttgtgaacacagaggctgtgtttccagtagaacctgtatttaatttattcccatgagggtccccaagtggaccacatctgtatgccctagtccagatttttaaatcctctgatgctgcagaaccactctgataacagcagaaacttaaatggatcagaaacttgagtaacacca

SEQ ID NO: 433357 - DNA, 570 bp, Homo sapiens
gttctaatccacagtgtgactctctctggagattggggctctaggagataattaaggttaaacgaggtcacagggtggcaccctaatctgataggagtgtggctttataagaagaggaagagaactttctctttttctttttctctccctaccttgtgaggacacagcaagaaggttggctgcctgcaagtcaggaagagagccctcaccagaatacaaccatgctggctccctgatctcagacttccagcctccagaactctgaggagcaaatttctgttgtttaaacccacctactagcttatgtttatttgtcatcgcagcacaagytgattaacgcaccatctcactcagttacttggaggattaagtgagaaacacagctacctgcagcagcccatagtaggcactaggtaacagataaggtaacctcctgtgtccccttttgtttgctcccagccctcccctatctcatctggaagacccttcatcatttggccttgacacacctgttcggcttcaccttctgccactccactccatgcatgcttgtaataaatgaatgcagcc

SEQ ID NO: 433358 - DNA, 570 bp, Homo sapiens
gttctaatccacagtgtgactctctctggagattggggctctaggagataattaaggttaaacgaggtcacagggtggcaccctaatctgataggagtgtggctttataagaagaggaagagaactttctctttttctttttctctccctaccttgtgaggacacagcaagaaggttggctgcctgcaagtcaggaagagagccctcaccagaatacaaccatgctggctccctgatctcagacttccagcctccagaactctgaggagcaaatttctgttgtttaaacccacctactagcttatgtttatttgtcatcgcagcacaagttgattaacgcaccatctcactcagttacttggaggattaagtgagaaacacagctacctgcagcagcccatagtaggcactaggtaacagataaggtaacctyctgtgtccccttttgtttgctcccagccctcccctatctcatctggaagacccttcatcatttggccttgacacacctgttcggcttcaccttctgccactccactccatgcatgcttgtaataaatgaatgcagcc

SEQ ID NO: 433359 - DNA, 597 bp, Homo sapiens
ttataacaaagtaccataaactggatggcttacaaacaacataaatctatttcccacagtgctagagggtagaagtctgagatcagggcaccaacatggggctctcttctgggttgtagacagctgatatgatttggctgtgtccccacccaaatctcatcttgaattgtagttcccataatccccacatgtcatgggagggacactgtgggaggtaattgaatcatgggggcagttacccccatgctgttctcatgatagtgagtgagttctcatgagatctgatggctttataagaggcttttctgcctttkcttggcagttcttcttcctgccgccatgtgaagaaggatgtgtttgctttccctcccaccatgattgtaagtctcctaaggcctccccagccatgctgaacatgagtcaattaaacctctttcctttataaattaaccagtcttgggtatgtctttatcagcaacttgagaatggactaatacaacagccatcttctctttgtctcctcatatgacagaaagagggcaagagagttctctggggtcccttttataagggcattaaccccattcatgaaggctc

SEQ ID NO: 433360 - DNA, 597 bp, Homo sapiens
ttataacaaagtaccataaactggatggcttacaaacaacataaatctatttcccacagtgctagagggtagaagtctgagatcagggcaccaacatggggctctcttctgggttgtagacagctgatatgatttggctgtgtccccacccaaatctcatcttgaattgtagttcccataatccccacatgtcatgggagggacactgtgggaggtaattgaatcatgggggcagttacccccatgctgttctcatgatagtgagtgagttctcatgagatctgatggctttataagaggcttttctgccttttcttggcagttcttcttcctgccrccatgtgaagaaggatgtgtttgctttccctcccaccatgattgtaagtctcctaaggcctccccagccatgctgaacatgagtcaattaaacctctttcctttataaattaaccagtcttgggtatgtctttatcagcaacttgagaatggactaatacaacagccatcttctctttgtctcctcatatgacagaaagagggcaagagagttctctggggtcccttttataagggcattaaccccattcatgaaggctc

SEQ ID NO: 433361 - DNA, 521 bp, Homo sapiens
aatgaataaaaacatttatcaagtacctgacttatgccattcattwtgctggtaagtggaatcttttatgtgaaatgaatacctgttgaatgccactagttttaatcctcacaaccaataaggtaggtagtattaataattttcccattattattattattattattatttgagacagagtctccctctgtcatctaggttggagggcagtgacatgatcacaacacactgcagcctcaacctccggtgctcaagggatcctccttcctcagcttcttgagtagctgggaccacaggtgcatgccgcaacatctagctaggttttgttgttgttgctgttgttgtttcttgtttttttgtagagacagggtctcattatgttatccaggctggtctcaaactcctggcctcaatgaatcctcctgccttgacatcccaaagtgctgggattgcaggcttgagccactgcacccagccataaattttctcacttcagaaagaaggaaacggaggctcaaaga

SEQ ID NO: 433362 - DNA, 521 bp, Homo sapiens
aatgaataaaaacatttatcaagtacctgacttatgccattcattttgctggtaagtggaatcttttatgtgaaatgaatacctgttgaatgccactagttttaatcctcacaaccaataaggtaggtagtattaataattttcccattattattattattattattatttgagacagagtctccctctgtcatctaggttggagggcagtgacatgatcacaacacactgcagcctcaacctccggtgctcaagggatcctccttcctcagcttcttgagtagctgggaccacaggtgcatgccgcaacatctagctaggttttgttgttgttgytgttgttgtttcttgtttttttgtagagacagggtctcattatgttatccaggctggtctcaaactcctggcctcaatgaatcctcctgccttgacatcccaaagtgctgggattgcaggcttgagccactgcacccagccataaattttctcacttcagaaagaaggaaacggaggctcaaaga

SEQ ID NO: 433363 - DNA, 605 bp, Homo sapiens
aaatgaataggaatgagcttttaagagctagaatgagactcctctaaaaaatccaagaatcactgaaaagttatgcaaataaaatcagctcttattaagggaaactactatccaatggtgaaacggcagggttaactgcaattactggaaacatttgtttaatgtttgtaaccaacgaattataaaatctcaaaaaatggctacatgtgtaatcccattttcaagttaatgcttataattgaagaaatcttgactcaatataggtttaattgtgctaatttggaagaatgaaagaaaaagctcacttacataaaatatttgagaattcataacaaaaaggtcaagtaaacatggagcatcaaagttataattttatcttatatcctagaagaattttcattgaatcctttyatttagattgattgttcagaggcaagaaatgttcagattctcaatctgaatattaaataaagaagcaaacctgagaagtagatacatacaatgtaaatatttctgtagctcagatatgtgcaaaaggcaacgggaacagaagaagcaattctaaatataattgttatcaaagaaatgctctcaaatctacagtg

SEQ ID NO: 433364 - DNA, 564 bp, Homo sapiens
gaatatttttgttctaaagaatgtacagtctagtcatattgtattgtgtcttgtcatattgtatttttcataatatttattctgatgtgatttgctatttgaatgctgtttcactctctgaaatatgaaaaacttggatccttcttgaccaaattactgtaaacaatgacagacttattggaccttacataatgacattcaaacagaacaaaattcagtcctgtgtgaggaagatgaatacttccaacagaccaaacagaaaaacttaatttttcctcctgcctgagtcatacatccccagaagactcacactacgtatttcctctcttctgggctggaattggtcttactctgtgcttacttgctgctattatgatgtttaaacagcaagtcaytgaaggagatagaaaaatggtcaaatagtatccacatcacatctacttacagtagtgctggagtaacataatgcaattctgtagagttgtataatttttctattatttatttattagaaacagggtcttgctctgttgctcaggctgggagttcagtagcaccatcaca

SEQ ID NO: 433365 - DNA, 564 bp, Homo sapiens
gaatatttttgttctaaagaatgtacagtctagtcatattgtattgtgtcttgtcatattgtatttttcataatatttattctgatgtgatttgctatttgaatgctgtttcactctctgaaatatgaaaaacttggatccttcttgaccaaattactgtaaacaatgacagacttattggaccttacataatgacattcaaacagaacaaaattcagtcctgtgtgaggaagatgaatacttccaacagaccaaacagaaaaacttaatttttcctcctgcctgagtcatacatccccagaagactcacactacgtatttcctctcttctgggctggaattggtcttactctgtgcttacttgctgctattatgatgtttaaacagcaagtcattgaargagatagaaaaatggtcaaatagtatccacatcacatctacttacagtagtgctggagtaacataatgcaattctgtagagttgtataatttttctattatttatttattagaaacagggtcttgctctgttgctcaggctgggagttcagtagcaccatcaca

SEQ ID NO: 433366 - DNA, 589 bp, Homo sapiens
agtggggtattattataaagatacctgaaaatgtggcagcagctttggaactgagtaacaggcagaggttgtaagagtgtggagtgctcagaaaagacaggaagatgaggaaaaatttggaaattcctagagacttgctaagttgttatgaccraagtactgatagtgatatggacaacaaagtccaggctgagaaggtatcagatggaaatgaggtatttattgggaactggaacaaaggtcacttttgttacaccttggcaaagagctcggattgtgcctctgccgtaggggtctgtgaaactttaaacttgagagaaatgatatagggtatacggtggaagaaatgtctaagcaacaaagcttttagcaggtggactggctgcttctaacaacttatgctcgtgtgtgagcaaaaaaactagaacttacatttaaaagggaagcagagcataaaagcttggaaaatttgcagtcttaccatgtggtagaaaggaaaagctcattttgggggaagaattccagcaggctgcagaaatttgcataggtaaagaggagccaattgccgatagccaagacaatggttaaa

SEQ ID NO: 433367 - DNA, 520 bp, Homo sapiens
tctgtgccctaatattatcatttgtaaagcagtgattccaatggtacctacacttaaaggtggtcaaaactactgaataatgagaaatataaagcattcaaaatgggccctcatattagtcctcaataaatgatagctatttttattatattatagaattatttataggaggtgttagaatatatttggataatttgtatcaaaagactgaaacaggaaatagattctattcataaaatactaaataaattatattctgaggctgggaaatatttacttgatcatttcaagttagtgrgaaagtttcactgtattttattattaaataattgacattgagattaagtagcattccttactttattttaggtggttagcattgcagaatgcaagtcttgggttctttctagtgccagagatgattgtttctctttgcaaaaacattagaaaactctgtcacaagattgttatacagtgtatgctgaagaacataaaagtgtttctaagcactacttttctg

SEQ ID NO: 433368 - DNA, 520 bp, Homo sapiens
tctgtgccctaatattatcatttgtaaagcagtgattccaatggtacctacacttaaaggtggtcaaaactactgaataatgagaaatataaagcattcaaaatgggccctcatattagtcctcaataaatgatagctatttttattatattatagaattatttataggaggtgttagaatatatttggataatttgtatcaaaagactgaaacaggaaatagattctattcataaaatactaaataaattatattctgaggctgggaaatatttacttgatcatttcaagttagtgagaaagtttyactgtattttattattaaataattgacattgagattaagtagcattccttactttattttaggtggttagcattgcagaatgcaagtcttgggttctttctagtgccagagatgattgtttctctttgcaaaaacattagaaaactctgtcacaagattgttatacagtgtatgctgaagaacataaaagtgtttctaagcactacttttctg

SEQ ID NO: 433369 - DNA, 541 bp, Homo sapiens
ctttttatttaacttttattttaggttcggtaagtgggagttgagaaagagagtgaggtgatttcatcctaagttaaaatcaaaggggtgagttaaaaccacagggtcttggaattaatccctaactagttggagctagaagtcatgtrgttcagatttggacagtagtgttggagccaggtcagggtgatggtttaaactgggccaaagtatgctatatcatcctgtgaaaaggaaagagcacctggaagaaacctttgccaggctttgtaaattatattttagtaaagttgaggtaaggataataaaagactattgttatggtctgagtatttgagttcccccagctttcagatgttgaaattctaacctctaaagtgatggtattaagaggtagggtcttggggagacaattcagtctgagggtggggtcctcataaatggggttagtgcctttagaaaagaggcccagagcgctagctcaccctttctatcatgcaaagacacctcagtaaggcactgttttaggactcaggaaatg

SEQ ID NO: 433370 - DNA, 399 bp, Homo sapiens
gtctatgtttgaacagtattattttattttgagtaaaaatacacattttaaaagagagtctagggcaaacatataaaaatatttatagaatctaggtggttatacatgattaactttttttttcaaattggttacatgtttgaaatttttrcagtaaaattttggaggggaatctgatacagacacatggttagcaaactatataatattctagaacaacagtatacaactgatttttattggcttctgggatttttttttactgctgcatgtacacatttttgaaaattgctgctagcattagaatcattgataagtaatattttttcttaaagcaacactaattagcatttagtttagcatatagcaaataatacttataggaaatgtatatttatg

SEQ ID NO: 433371 - DNA, 565 bp, Homo sapiens
gtgaattgcttttttgactagtatgcaagcattaagttttagtgaggtgaatcatgttagaattaaatcccctatatattatttgtgatgcttaaaattgttttcaaaagcatttctatctggcttttctaatatgtagcacttttaacaatatatcctgacttaaattgatcacactgaaatttaaatcaatgcatctaattgtgtatatcaactactataggcaatgtggtgccttgtwtgttgtaaaaaaaaatgtaacaggaagaaaaaccaagcttctacttaggtcattgttattttagagataatggtaaagagatttttaaaaatgttaaattttgacctcagtgccagggatcttttataataattagaagaaagaaacagaaagaggtgggcattgcatgcctaccttactaatagtaaatgtctgtgtcctcagggttgaccctcacctccctactccactacatacacagttacttgttctacttttgtcgggttgtaaaacaaattaaaatctttagctgtgaatgctgtggttggcagagttagagcagta

SEQ ID NO: 433372 - DNA, 565 bp, Homo sapiens
gtgaattgcttttttgactagtatgcaagcattaagttttagtgaggtgaatcatgttagaattaaatcccctatatattatttgtgatgcttaaaattgttttcaaaagcatttctatctggcttttctaatatgtagcacttttaacaatatatcctgacttaaattgatcacactgaaatttaaatcaatgcatctaattgtgtatatcaactactataggcaatgtggtgccttgtatgttgtaaaaaaaaatgtaacaggaagaaaaaccaagcttctacttaggtcattgttattttagagataatggtaaagagatttttaaaaatgttaaattttgacctcagtgccagggatcttttataataattagaagaaagaaacagaaasaggtgggcattgcatgcctaccttactaatagtaaatgtctgtgtcctcagggttgaccctcacctccctactccactacatacacagttacttgttctacttttgtcgggttgtaaaacaaattaaaatctttagctgtgaatgctgtggttggcagagttagagcagta

SEQ ID NO: 433373 - DNA, 565 bp, Homo sapiens
gtgaattgcttttttgactagtatgcaagcattaagttttagtgaggtgaatcatgttagaattaaatcccctatatattatttgtgatgcttaaaattgttttcaaaagcatttctatctggcttttctaatatgtagcacttttaacaatatatcctgacttaaattgatcacactgaaatttaaatcaatgcatctaattgtgtatatcaactactataggcaatgtggtgccttgtatgttgtaaaaaaaaatgtaacaggaagaaaaaccaagcttctacttaggtcattgttattttagagataatggtaaagagatttttaaaaatgttaaattttgacctcagtgccagggatcttttataataattagaagaaagaaacagaaagaggtgggcattgcatgcctaccttactaatagtaaatgtctgtrtcctcagggttgaccctcacctccctactccactacatacacagttacttgttctacttttgtcgggttgtaaaacaaattaaaatctttagctgtgaatgctgtggttggcagagttagagcagta

SEQ ID NO: 433374 - DNA, 582 bp, Homo sapiens
acatagccgttacatgttctcttacatggctaggaaaaatgactttcttctcgacttcttttcttttccacctcttcccttacctcaccttattggctcatttgctcagtgggagaaagagtagctgttatgcaaagtccatgatgtagtgaggagaaaatcctgaggttatattgtattttgtaagatggttttatgtcaccaaatgatgcacaactggcaggataattcagtctgaaaaatgtatttccgttgttaagttacaagagttcaggagagtaatgatactttaacagcatatggtttaatatatttattttgtttcttggttttatacacttgctttgattcaggttttattttcattttaaagtattacgagattgtcaaaatayactttacatttttattcctgttatttctagcttaagtctgcagtgactattacaaaactgtaaagatatttaaagtcacaaaggcatttgttacacttcacatcatactccagtacctcagatcttcctcccagcagcacagtatggattaaaatcatggatcaattaaagttcagtttacttccac

SEQ ID NO: 433375 - DNA, 582 bp, Homo sapiens
acatagccgttacatgttctcttacatggctaggaaaaatgactttcttctcgacttcttttcttttccacctcttcccttacctcaccttattggctcatttgctcagtgggagaaagagtagctgttatgcaaagtccatgatgtagtgaggagaaaatcctgaggttatattgtattttgtaagatggttttatgtcaccaaatgatgcacaactggcaggataattcagtctgaaaaatgtatttccgttgttaagttacaagagttcaggagagtaatgatactttaacagcatatggtttaatatatttattttgtttcttggttttatacacttgctttgattcaggttttattttcattttaaagtattacgagattgtcaaaatacactttacatttttattcctgttatttctagcttaagtctgcagtgactattacaaaactgtaaagatatttaaagtcacaaaggcatttgttacacttcacatyatactccagtacctcagatcttcctcccagcagcacagtatggattaaaatcatggatcaattaaagttcagtttacttccac

SEQ ID NO: 433376 - DNA, 582 bp, Homo sapiens
acatagccgttacatgttctcttacatggctaggaaaaatgactttcttctcgacttcttttcttttccacctcttcccttacctcaccttattggctcatttgctcagtgggagaaagagtagctgttatgcaaagtccatgatgtagtgaggagaaaatcctgaggttatattgtattttgtaagatggttttatgtcaccaaatgatgcacaactggcaggataattcagtctgaaaaatgtatttccgttgttaagttacaagagttcaggagagtaatgatactttaacagcatatggtttaatatatttattttgtttcttggttttatacacttgctttgattcaggttttattttcattttaaagtattacgagattgtcaaaatacactttacatttttattcctgttatttctagcttaagtctgcagtgactattacaaaactgtaaagatatttaaagtcacaaaggcatttgttacacttcacatcatactccagtacctcagatcttcctcccagcascacagtatggattaaaatcatggatcaattaaagttcagtttacttccac

SEQ ID NO: 433377 - DNA, 552 bp, Homo sapiens
gtccctcccacaacacaaggcagctacaattcgagatttgggtggggacagagacaaaccatatcattccctccctggctcctcccaaatcccatgtcatcagatttcaaaaccaatcatgccttcaaacagtcccccaaagtcttaactcatttcagcattaactcaacatccacagtccaaagtccaaagtctcatctgagacaaggcaagtcccttctgcctataagccttgtattagtctgttttcatactgctgataaagacatacctgagactggcaagwcatacctgagacatacctgagactggacgaaagaaagaggtttattgggcttacatttccacatggctagggaggcctcactatcatggtgaaagttgaggaggagcaagttacatgttacatggatggcagcaggcaaagagagagcttgtgcagagaaactcccatttttaaaaccatcagatctcacaggactcattcgctattaggagaacagcacaggaaagaccacataatacaattacctttcacagggttcctcccac

SEQ ID NO: 433378 - DNA, 552 bp, Homo sapiens
gtccctcccacaacacaaggcagctacaattcgagatttgggtggggacagagacaaaccatatcattccctccctggctcctcccaaatcccatgtcatcagatttcaaaaccaatcatgccttcaaacagtcccccaaagtcttaactcatttcagcattaactcaacatccacagtccaaagtccaaagtctcatctgagacaaggcaagtcccttctgcctataagccttgtattagtctgttttcatactgctgataaagacatacctgagactggcaagacatacctgagacatacctgagactggacgaaagaaagaggtttattgggcttacatttccacatggctagggaggcctcactatcatggtgaaagtygaggaggagcaagttacatgttacatggatggcagcaggcaaagagagagcttgtgcagagaaactcccatttttaaaaccatcagatctcacaggactcattcgctattaggagaacagcacaggaaagaccacataatacaattacctttcacagggttcctcccac

SEQ ID NO: 433379 - DNA, 562 bp, Homo sapiens
aagggatgccttatatgatggcaggcaagagagagcatgtgcaggggaactcccttttataaaaccatcagctctcgtgagacttattcactatcacaagaacggcataggaaagacccacccccatgattcaattacctcccactgggtccctcccacaacacaggggaattatggagctacagtttgaaatttgggtggggacacaggtcaaatcatatcaatagttaatggaacctaaatsgttctctattattcaatgtttaatgagttgacaaattgttgtagcaggagggaccttgaattagaacctagtcaaatttgaaaaactacaaagatcttattacttactaattgtatgcctttggtcaagtcattttacctctttagacaccagtttcatcatatgaaatgtattattttaaatttctgtagaggaaagatagaacaattaaagtttcataataaagactttgaatgaaattccccgtgccatgtccaacagacacagaacacacacacacacacacacacacacacacacacaatactgctggtttaa

SEQ ID NO: 433380 - DNA, 587 bp, Homo sapiens
tgttaatcactcaaccttactgtctccaaaatatatgtcatatgctttgataagtaaatttatatagatagatagatattgttttagttacaatccaatactattttaatttgttccctgcattgttaaggagcttcagttttaccttttgttttacatgctccagatctgcaaccaaccacttcttcgaggagctctacttccatttgtcagggaatgatatatttattaatcaagatctagttgctggatgtgttcattgctactggagtgttgctacttctaggctctcttagggcacaaaaataggtgatatatgtatagatactagcccatgcatatacttgtttaagaatctatttgtccacaggcatatctaagaaaacaaacatgrgtttatactaatacctgggaattcaaaccaaaatgacagtgtttattctagctttcctctttgtcttgttttggtttgcttttttcaacttcagcctcattcagtgaaaaactatgttatgtgctttttaataccaagaattatttttggcatattaagttgtttaaataatgttaacaaaaattacctggat

SEQ ID NO: 433381 - DNA, 585 bp, Homo sapiens
tgagattagggaggggtcgggcgtggaatgatatggtttgactgtgtctccacccaaatttcatcttgaattyccacatgttgtgggagggacccagtaggaggtaattgaatcatgggttcaggtctttcccttgctgttatgatagtgaataagtctcacgagatctgatggttttaaaaaggggagtttccctgcacaagctctcttcccttgtctgtcaccagacaccagacatgtctcaccaggtgagatgtgcctttcaccttctgccatgattgtgaggcctccccagccacatggaactataagtccaataaacctctttctttggtaaattgcccagtctcggctatgtctttatcagcatcatgaaaacagacaaatacaccctatctctgcaaaaaattagccaagtgtggtggcatgtgcctatagtcccagctatccaggaggctgaggtgggagaatcacctgaacacacgaggtgaaaagcaatgaaaggctaaataaacatttaagggctaatatgtttcccacaaaattaggtatagacagttgatatacaatacgattgtattccca

SEQ ID NO: 433382 - DNA, 585 bp, Homo sapiens
tgagattagggaggggtcgggcgtggaatgatatggtttgactgtgtctccacccaaatttcatcttgaatttccacatgttgtgggagggacccagtaggaggtaattgaatcatgggttcaggtctttcccttgctgttatgatagtgaataagtctcacgagatctgatggttttaaaaaggggagtttccctgcacaagctctcttcccttgtctgtcaccagacaccagacatgtctcaccaggtgagatgtgcctttcaccttctgccatgattstgaggcctccccagccacatggaactataagtccaataaacctctttctttggtaaattgcccagtctcggctatgtctttatcagcatcatgaaaacagacaaatacaccctatctctgcaaaaaattagccaagtgtggtggcatgtgcctatagtcccagctatccaggaggctgaggtgggagaatcacctgaacacacgaggtgaaaagcaatgaaaggctaaataaacatttaagggctaatatgtttcccacaaaattaggtatagacagttgatatacaatacgattgtattccca

SEQ ID NO: 433383 - DNA, 543 bp, Homo sapiens
cattatgataaagagcttaatatattattttcattattatattcctttgaattcaatgaattttattggctaaccatcttttctatgctaactttcccctaaatcaatttttcctgaatctccaatattaccctcgattccagtaagaaattcctcctcattatttcccaataaatttgctagctttttatgcgctgtgccttttctctttttctgcctaaatcacatcaatactttaaaattcagttcatatctactctataagatgcacttgattwaatcatgctttactaatcttttttctctcataggagaaggcatctattcaattgctctcaaacagtttgatatagttagttagatattaatctacttgaggagagaatacttgaattcaattattttatattctccccagaacatgaaacaaagctccataaacattaaattctaaaacagttctattggtaggtagttcattttttccttgatgttaaattcgctaagatattttattttatgtaatattatacgtttactgta

SEQ ID NO: 433384 - DNA, 610 bp, Homo sapiens
aaaaattgacaagagaaagtgattcttaagggctatattgtaagaaagtattatggtttatttaaaatttcagttttttcttgtagatttctttggatttttacatataacagatattgggaagccattctaatcaaaagaaacaaaatgacaaaaataatttcttacaaaatactgactctggtttgatataaatacagtgaagatattagttcaaggtgtagaatgcattgtagagttgcaagacagaatgttaggaaattattttattcatttcttatttattcatctgttcattcctttgacaaatttgtatttagtctctattgtaagccaggcatgattttagcaccttggtattcattagtgaacaaaacacaaagatctctggtatgttggatcttgcattccattcccggggtagtggagactgagtgttgtatgaggatgctaagtgggcctctgctacggtaatgacataagcaatggatataaatgaaaatatagaaaagacaaattagcaacattgcatatgactaatyagttattcaggaaatgtgttactcccagtaagcatgtctggcagagttgtgctatcatttgtgtatga

SEQ ID NO: 433385 - DNA, 430 bp, Homo sapiens
caataaataaaaacatttatcttctgtggaaggtttaaggttggctttttaatgctccatttgttttagccttctctaggtattacctaggttatggctagagattagtatctttattcacatgatggttacctagagggtcttaaagttctcctcagcttgactatacttcagacagctttcttcctgagtataggtcccgattttctttgttagggcatttaatttagaaaacataccattayaaattctttctctgcctctttgagatgtccaccttctcccaacctcttgtcagttttacaacccagtgatgtctttctcaaggacctgagagccaacccgttgaaagtaatcatcagaaagatagtgtctctatctcagtctctgtgggaaggtagatgcctaacttcaataagtgccaggtcac

SEQ ID NO: 433386 - DNA, 584 bp, Homo sapiens
aagtgatactgtctatatagtactatatggcctttaaaataaaagaaaattctaccatttgcaacagtatgaataaacccaaaggacattacgctaagtgaagtaatcaaagcacagaaagaccaatactgcattattacacttatatatgacatcttwcaaagtttaacatgtaggctgggtgggtggctgatacctgtaatcccaggactttgggaggccaaggcgggctgatcacctgaggtcgggagtttaagaccagcctgaccaacacagagaaaccgcgtccctactaaaaatatcaaattagcagaacatggtggtgcatgcctgtaatcctaactactcaggaggctgaggcaggcgaatcacttgaacccaggacgcggaggctgcggtgagccgagatcgcaccattgtactccagcctgggcaacaagagcaaaactccacctcaaaaaaaaaaagtttaacatgtagaagaagcagagaattatattcgtggttaccagaggctgggaggtggggaagatgggaaaatagcacatgctagtcatggggtacaaagttccaaattgacgcca

SEQ ID NO: 433387 - DNA, 584 bp, Homo sapiens
aagtgatactgtctatatagtactatatggcctttaaaataaaagaaaattctaccatttgcaacagtatgaataaacccaaaggacattacgctaagtgaagtaatcaaagcacagaaagaccaatactgcattattacacttatatatgacatctttcaaagtttaacatgtaggctgggtgggtggctgatacctgtaatcccaggactttgggaggccaaggcgggctgatcacctgaggtcgggagtttaagaccagcctgaccaacacagagaaaccgcgtccctactaaaaatatcaaattagcagaacatggtggtgcatgcctgtaatcctaactactcaggaggctgaggcaggcgaatcacttgaacccaggacgcggaggctgcggtgagccgagatcgcaccattgtactccagcctsggcaacaagagcaaaactccacctcaaaaaaaaaaagtttaacatgtagaagaagcagagaattatattcgtggttaccagaggctgggaggtggggaagatgggaaaatagcacatgctagtcatggggtacaaagttccaaattgacgcca

SEQ ID NO: 433388 - DNA, 575 bp, Homo sapiens
atattttcaaaagtattgaaaccagaatcttgaagagatcattgttcactgcagataagctcattattttatctgtggtgatcattacacaggtgtatacatatatgaaaatgtataaaattgtacacattaaatgtgcagtttattgtgtataaattatatctcaagaaagtggatctaaaaataaccggattcagaagttattgctttttatctttgatctcatcttcattattttcttccttctacttgctttgagtatactttgctcttatttatctaggttcttaaggtaaaaaattaggttactgactcagggccttttacttatgtaagtatttaatgctataaatttatctttaagtatttcttcagctgctcctcaaacattttgtcatattgcattttaattttcttacaattcaaratattttctcaattattgcataatttttttcttcgggtcatgatttttagaagcgtagtttaatttctaagtatttggaatattttgcagttatctcagttattgacttctgttgagtagattgtattattttatgctgcccatactt

SEQ ID NO: 433389 - DNA, 548 bp, Homo sapiens
  misc_feature (1)...(548): n = A,T,C or G
agttataatccaggtaatattatcaaataataatgtatgcatttgtaattatgctggcatcccagttagtttagtagattaatttcatgattcttttttacctcaagagagaacttcacttagatttagnccatgatgcgcatgacactaatttatttgattgcatggcttgccaggtaataccccaaataatagatggaatatgtgaaaaagtttacaatttggcaatatatagagtatgtacaatattttatatcaatccaagaaaagtaatttcaatataactgaaaaaakcctagatataagaaacnaaagatagatagatagatagatttacagataaaagaatgtgtacttttctaataaatatgttataagtatacaattgtcctttgatattacttatttataacttaacaactgatttttaacatacttatataacctttttaaaaataacttattcaaaaaaattttctgggcttctcataactcaagctgagcaatacaaattctatcacttcttctattttctgctacaagttctt

SEQ ID NO: 433390 - DNA, 551 bp, Homo sapiens
aaccataagtgctgaggatagcctgagaatgttatatagatttaacacagtccagtcattctgtgtgtaactatgtcacagctgaagaggtaaaatttcaracagtagttgggaaaattggagagaacaggctcagacattctatatcctgcatatgaatgttaaagggtcatcatgagaggctctcagacagcaatgtttctattcaattctgaaatatctgcagtgattttttttttccagattgattgttttgcttttttgtagcttttatagagaggctttcagtagcacaatatcagccactgagcctgcatcatcatggcatttctcatatgccagaaagtttatattgccagtgtccatattgatccattttatctggtttacctttatagagcatttcacatctttgttgataacactaactgagttgctgcaggattgaaggattgttcacagtatattgcaataaagattgtaaagtgtattcagaatgtagcaaaattgacaggaagtagagcttatgattctgaatgcactgacaatgg

SEQ ID NO: 433391 - DNA, 551 bp, Homo sapiens
aaccataagtgctgaggatagcctgagaatgttatatagatttaacacagtccagtcattctgtgtgtaactatgtcacagctgaagaggtaaaatttcaaacagtagttgggaaaattggagagaacaggctcagacattctatatcctgcatatgaatgttaaagggtcatcatgagaggctctcagacagcaatgtttctattcaattctgaaatatctgcagtgattttttttttccagattgattgttttgcttttttgtagcttttatagagagsctttcagtagcacaatatcagccactgagcctgcatcatcatggcatttctcatatgccagaaagtttatattgccagtgtccatattgatccattttatctggtttacctttatagagcatttcacatctttgttgataacactaactgagttgctgcaggattgaaggattgttcacagtatattgcaataaagattgtaaagtgtattcagaatgtagcaaaattgacaggaagtagagcttatgattctgaatgcactgacaatgg

SEQ ID NO: 433392 - DNA, 232 bp, Homo sapiens
tcactgtgatcttactttttaggcaacttagtcagagtcttttcttgggaacatcctatatgttagtatgtacaagcttcttatcttttctgataccccatggaagcctcttccacacaactgactgctaggtatgccactagcacactggagatgagcagaaaaagaatacctragtcacagcatctggtacgagagcattgtccaatcctttgattttataaactactct

SEQ ID NO: 433393 - DNA, 626 bp, Homo sapiens
ggattgaaagcaaacattttattcaagacattttacttaataatattagtgatttccattggtgggaatgtcagaatctcatctataccatcataccatcagtattacactatgatgttcctttgactaaatttaataaaaaatacttaaatttttatttgattcatktatttaatatctaaatttatcatttaaaccattttaatccccatcatgtttgctggtttaaaataattagctgtgtcataaaggtaaatatggcattccaacccaataaaagtgaaaaaaagaaaaaagctctaaactctttttttattcatgtaataccaaggaactgacttaacagttcctcttgcttctgtggcccttagtgaagttatctttctaaaattaattatttcactaatcctcttggcgtttttctacacaatccttaccccagattttcacgctatcttgcatataatattagagaataacaattttatagtgttttatacttgcttgcatatctgctgtttgactctaagcagtttgtctttgagttatatatctttattgtctagcctatgactgacattaaaagtgaaaaaatcattggtaaataaatgttaattttatttatt

SEQ ID NO: 433394 - DNA, 626 bp, Homo sapiens
ggattgaaagcaaacattttattcaagacattttacttaataatattagtgatttccattggtgggaatgtcagaatctcatctataccatcataccatcagtattacactatgatgttcctttgactaaatttaataaaaaatacttaaatttttatttgattcatgtatttaatatctaaatttatcatttaaaccattttaatccccatcatgtttgctggtttaaaataattagctgtgtcataaaggtaaatatggcattccaacccaataaaagtgaaaaaaagaaaaaagctctaaactctttttttattcatgtaataccaaggaactgacttaacagttcctcttgcttctgtggcccttagtgaagttatctttctaaaattaattatttcactaatcctcttggcgtttttctacacaatccttaccccagattttcacrctatcttgcatataatattagagaataacaattttatagtgttttatacttgcttgcatatctgctgtttgactctaagcagtttgtctttgagttatatatctttattgtctagcctatgactgacattaaaagtgaaaaaatcattggtaaataaatgttaattttatttatt

SEQ ID NO: 433395 - DNA, 626 bp, Homo sapiens
ggattgaaagcaaacattttattcaagacattttacttaataatattagtgatttccattggtgggaatgtcagaatctcatctataccatcataccatcagtattacactatgatgttcctttgactaaatttaataaaaaatacttaaatttttatttgattcatgtatttaatatctaaatttatcatttaaaccattttaatccccatcatgtttgctggtttaaaataattagctgtgtcataaaggtaaatatggcattccaacccaataaaagtgaaaaaaagaaaaaagctctaaactctttttttattcatgtaataccaaggaactgacttaacagttcctcttgcttctgtggcccttagtgaagttatctttctaaaattaattatttcactaatcctcttggcgtttttctacacaatccttaccccagattttcacgctatcttgcatataatattagagaataacaattttatagtgttttatacttgcttgcatatctgctgtttgactctaagcagtttgtctttgagttatrtatctttattgtctagcctatgactgacattaaaagtgaaaaaatcattggtaaataaatgttaattttatttatt

SEQ ID NO: 433396 - DNA, 589 bp, Homo sapiens
gcatgtcatcaattatttcttattttcctttctaaacaaaaaagcagttatttcccatcctcaaaaattattctcaaacacaggacaaaatatctttattccataagactttatgccagagtaacgtgataaataagcattcctgtaagcactaataacagatcatcttttctcacaaaaaatataaaacatatgaagaaatgactatacttaatattgaaatatttttaaagcatctgaatttttcagtagacaagactaatagtgatataaatgaagcccttccctgatttattcattaatgtttcatatatcaattgtcttcaacaaccttaaaatctttttgtgtcattaagaaaaaaatagcaaccttacttgataaacacatgacttgaggaatcaaacatagttttgkttgttaaaagatttgaaaagcagccctaagaacagatttgaaaacaggaagccaaagtagtggggacttgtttttttttccaaatcctcaaaatgtttgcaaaatggcactaacaacttccaagtaagatttctggaactttatttttcattgggaaaaggcttagagtttaga

SEQ ID NO: 433397 - DNA, 597 bp, Homo sapiens
gcatgtgtgtgtacacattaaatggctatactacagtcaagctttcttaccatgggactcattgtcttcaataatagttggaagcattggatataagaatcaattatagaactggtttattcccttgttctatattcatgtaaaatgaaagcaacataacccaaatatcctattatatagagataggatagcctgatttatttagtttcttttcctaattctgaaatttgtgtgaaaaaatcagaaaaattatgcaaataattcacttcatgataaatcttttgaaaggatactctgatataggaacaaaattgactctatatacwgtttttacttacaaaaattgaaagcaaaataataaatacacaaatacatttcttatatctgtacaatgcatttctgcatttgtatacatgtaatatgtataaataaggaggaaatgctggatatattatctagtgcttcaagttttgttattttttaaattaatttctttaggctcattgtccacagtaattctagtgactaggtttgctcacatctattgctccatcatctatgacaagaataaataatcatataaaaccagaaacatgc

SEQ ID NO: 433398 - DNA, 597 bp, Homo sapiens
gcatgtgtgtgtacacattaaatggctatactacagtcaagctttcttaccatgggactcattgtcttcaataatagttggaagcattggatataagaatcaattatagaactggtttattcccttgttctatattcatgtaaaatgaaagcaacataacccaaatatcctattatatagagataggatagcctgatttatttagtttcttttcctaattctgaaatttgtgtgaaaaaatcagaaaaattatgcaaataattcacttcatgataaatcttttgaaaggatactctgatataggaacaaaattgactctatatacagtttttacttacaaaaattgaaagcaaaataataaatacacaaatacatttcttatatctgtacaatgcatttctgcatttgyatacatgtaatatgtataaataaggaggaaatgctggatatattatctagtgcttcaagttttgttattttttaaattaatttctttaggctcattgtccacagtaattctagtgactaggtttgctcacatctattgctccatcatctatgacaagaataaataatcatataaaaccagaaacatgc

SEQ ID NO: 433399 - DNA, 597 bp, Homo sapiens
gcatgtgtgtgtacacattaaatggctatactacagtcaagctttcttaccatgggactcattgtcttcaataatagttggaagcattggatataagaatcaattatagaactggtttattcccttgttctatattcatgtaaaatgaaagcaacataacccaaatatcctattatatagagataggatagcctgatttatttagtttcttttcctaattctgaaatttgtgtgaaaaaatcagaaaaattatgcaaataattcacttcatgataaatcttttgaaaggatactctgatataggaacaaaattgactctatatacagtttttacttacaaaaattgaaagcaaaataataaatacacaaatacatttcttatatctgtacaatgcatttctgcatttgtatacatgtaatatgtataaataaggaggaaatgctggatatattatctagtgcttcaagttttgttattttttaaattaatttctttaggctcattgtccacagtaattctagtgactaggtttgctcacatctattgctccatcayctatgacaagaataaataatcatataaaaccagaaacatgc

SEQ ID NO: 433400 - DNA, 474 bp, Homo sapiens
caagctttcttgcaagtcgtcaaagggaagtacaccactactgaagtaagtgaagtagggggaaaagtgaacagaacacatgcggttccactggaagtgcagaacttacgaagagataagaagttagaagtagtatgtaaatggatgcactgcttccttcatcaagaatatcttgttaagtaaagcgaaagaaagttctaataaactaaacaatgagctgagtgactaygttgctttacattttaccataagttctttaacgggtcatagactggtaacaaaatttgggatgagtaaccagtccaacaccatactttgagtagccttgcaaatatatttcaggttttaaatgattaaactgtaacactaaaacaaatattccttgcagttatagactggaattaaggtggaaaataaaatattcaactttaagggtataagtaaataaaattttaaataataaatgataatttt

SEQ ID NO: 433401 - DNA, 595 bp, Homo sapiens
cccaaaacagtcactaatttgaatgtggttaaaatcctttttgytttatacagtaagtcttccattagccttacaaaattactttaaaactattttttctactttactaagcagtttcttttttttttttccatctctctaatgatacataatagatgtacacagtttcagggcacatgtgataatttaatacattcatataatttgtaaagatcaaatcagtgtacttgggaaagaagttggtttagtgttccactgaagagatataaagcagggatttcggtggtgaattggcaaaattcatttcatgtgccacacactttatctgagctaacgattttttttaagtggagtagtgaaactgtacatgtcactgggaaaaagaaaacaatcctaagcttacactagatggaaaaattctatctacaagcaacaaaaatatttatcatctaccattaggaagcatttactggtatacatacagtgtttcagtggaaagaatatccctttggaaccatatcagagaaactatgcggtctttggcagaacaccctggtttaatattaaaccaagaaaaggcaatcaatactcttaa

SEQ ID NO: 433402 - DNA, 595 bp, Homo sapiens
cccaaaacagtcactaatttgaatgtggttaaaatcctttttgttttatacagtaagtcttccattagccttacaaaattactttaaaactattttttctactttactaagcagtttcttttttttttttccatctctctaatgatacataatagatgtacacagtttcagggcacatgtgataatttaatacattcatataatttgtaaagatcaaatcagtgtacttgggaaagaagttggtttagtgttccactgaagagatataaagcagggatttcggtggtgaattggcaaaattcatttcatgtgccacacactttatctgagctaacgattttttttaagtggagtagtgaaactgtacatgtcactgggaaaaagaaaacaatcctaagcttacactagatggaaaaattctatctacaagcaacaaaaatatttatcatctaccattaggaagcatttactrgtatacatacagtgtttcagtggaaagaatatccctttggaaccatatcagagaaactatgcggtctttggcagaacaccctggtttaatattaaaccaagaaaaggcaatcaatactcttaa

SEQ ID NO: 433403 - DNA, 536 bp, Homo sapiens
taaacacattcagaatggaaaaatctgattccagcattcaatttggattatacttagttttgaaaataaatagaccagagatatatgcacaagaagtgtgtgtgcacgctgcagctgtttcaggtgaaggaaggctgggttctgggtctttgcactgagagcagtcaggctggcggctcagagggatcttacatgggtccaggctctgcacggccctgtgcctctaargacgctgttttgaatcagctgaagtaatcacaactggataaaatttccttggacattaaataacaagcagcctctctcttttacttctgttagttaaggcaataaaataaatattagcttagagtcagacctagaaggggacttaatatcagcccttctttcaactgatgaaaaatctgagccaaaagaagtaaagggagttgcccaaaaacctgagtagtgacagagccaaaagccaactgcaggcttgtgtgtggccacctgatgggttccatgctcttccactctggtcctaagtgagcttggac

SEQ ID NO: 433404 - DNA, 550 bp, Homo sapiens
tattcatccatagagactggccagaaaggcacagtttgggttgaaagtgtgggcacatgagaccaaagcaagagggcttgaaaatggggtagacgcaggagactggagagaagcctcagcccctgggacaaagtggcaggtkctttatccagggtgctggtgtctggagcgctttgggaggaccctgtgaagggcatggtgtctccagcaatgttgggtgtaccctcccatagttcagtgttccagaaaaaggatgggaaaattacaagaataatagcaggcagaagttgtgccaaatttcatcctaacacaaaatgtggttataaacaagggtaaggagagggttttcatctcctgctttaatcctggaaagctctgctagactgtgattcagtctctctttttctagcagttctggggttgtgattcttagtctagggattttcagttgtttaaaccctacttggctttttctaatgagcactaatgccaagtttttatcactaagctcatagatttgccaaagaaatggtgataccaagaaattcat

SEQ ID NO: 433405 - DNA, 550 bp, Homo sapiens
tattcatccatagagactggccagaaaggcacagtttgggttgaaagtgtgggcacatgagaccaaagcaagagggcttgaaaatggggtagacgcaggagactggagagaagcctcagcccctgggacaaagtggcaggttctttatccagggtgctggtgtctggagcgctttgggaggaccctgtgaagggcatggtgtctccagcaatgttgggtgtaccctcccatagttcagtgttccagaaaaaggatgggaaaattacaagaataatagcaggcagaagttgtgccaaatttcatcctaacacaaaatgtggttataaacaagggtaaggagagggttttcatctcctgctttaatcctggaaagctctgctagactgtgattcagtctctctttttctagcagttctggggttgtgattcttagtctagggattttcrgttgtttaaaccctacttggctttttctaatgagcactaatgccaagtttttatcactaagctcatagatttgccaaagaaatggtgataccaagaaattcat

SEQ ID NO: 433406 - DNA, 558 bp, Homo sapiens
gtttcactttgatttatcttttatttggataatctgggagttttaaagtcaaatggagaatgatcattttaatacttttcctcttctagttatgtgaattcagagtcaatgcccggggcagtttggcaagctgtcagtaactgataacatgaccgaaaaacctgatacatcagctgttgttctactgtactagcttctttgggtactatgagctcatgaaatacaacaaagcactgttctgtctaaactcttctgaatatatggctcatgttcatsgaactcccattgtcttagtctgtgcctgtcaaaggggcaattctctgacatctttgttttcttttagagcgttctcccctaatttgatctatacttgacaacatgggtgtaaagagcaccatgtccctggtatagcagaagcacacacaggcactgcaaaaaccattcttcagtgttggactgttccagtgggcctactgtagagccaaaggcagggaatttcacaggcggaagaattataatagctaacatttattgagtgattcctatgcaccaaacact

SEQ ID NO: 433407 - DNA, 550 bp, Homo sapiens
tttacaaccactccccacacttcttgctcacaaggatcttcttttaattccagcccactactaactttatccaagtctccactcactcacaaaccacacagcacttactcgggtcctctccatctcttcatctaataggaaggactgatagcacagaagtcatttcccttggtcacatcagctgtcatgggtgacaggtgtcccctacatggcytatgaggtgtcttccttttccatctctaaactctcagattatctttggacctgctgcatggcaccactgcctcccacttcctggtaggctctgaatctggaaggagcctgttttttgcctctataggtcacctcatgagtccctcaagattagggagtgtctctgcaggtgtccccatctacccctgagatcaccctctgaagtctgaaacccaatcctattctcttacttgacttaaggagctctaatttcaacacagaaaaatgaagctccatatttattcctaagtgtaaagctcaaattctacatcacttttagtgatggccccagtttttc

SEQ ID NO: 433408 - DNA, 614 bp, Homo sapiens
ctaatttctatcaaaagtcagtgtattgtgaagagtacccaactagaagtgagtaaatgtgaattgccgcttactggtgttataacttctctrggtatcaggtttctcatatgtaaaatcagaataattatatcttccccgcccacctcacaggcttgtttcagaaatctatagtgcaaaatataaatgaatgtactttatataatataaagtgctgaacatacgtaaggtggcattattattatttttgatttactaagccaatggactaagttaataagcaagattaatttacttctatgttagggctatttccctataatattgagccatttcagttcctaataaaagatcaagtacctgcagaaattgctgactgcatgcttggcttgatttcttgcatcattctggtcttcaccaccggctacataaagaaatccatccatcacagccacacactgattaaaacttttggctggcatttccgtaagcttgctccatccattttcagggtctctatacaagatgtctctgctaagggacttctcagtaaggcctgggcgtcccccaacagtgacgaggactcggcagccacctcggattcttgttcgcct

SEQ ID NO: 433409 - DNA, 550 bp, Homo sapiens
tttacaaccactccccacacttcttgctcacaaggatcttcttttaattccagcccactactaactttatccaagtctccactcactcacaaaccacacagcacttactcgggtcctctccatctcttcatctaataggaaggactgatagcacagaagtcatttcccttggtcacatcagctgtcatgggtgacaggtgtcccctacatggcctatgaggtgtcttccttttccatctctaaactctcagattatctttggacctgctgcatggcaccactgcctcccacttcctggtaggctctgaatctggaaggagcctgttttttgcctctataggtcacctcatgagtccctcaagattagggagtgtctctgcaggtgtccccatctacccctgagatcaccctctgaagtctgaaacccaatcctattctcttacttgacttaaggagctctaatttcaacacagaaaaatgaagctccatatttattcytaagtgtaaagctcaaattctacatcacttttagtgatggccccagtttttc

SEQ ID NO: 433410 - DNA, 623 bp, Homo sapiens
ttaatgctcaaatgcattagcttatgtgttgagtgtctctttgttggattttctgggagaaacttttgaatatttgtcagcaagcagttatcagatatccatcttggtgtgggcakcccagtgctgggaatgatggagcagtacaagatgtaatttatattagagacacaagacatggcaaatgcaaaatatcaataaggagctaggttagcacagcagagaaaattttggggggaaagtcctgtctgtgttcctggaagaactcctgtggccatttttttttattcatgtagatacagggcttgcaaatgcttattgttttagaggaaatcctgagcctggggagtaatctgagtgcctcagactgaaattctaaatactctgttatccatcattaagatgttgtttcataagtagcatgtaagggtgatatttaaaatattaatttctgataaaacaggatatctactaaccagaatggattcaggccacagtgctggacctgggtcccagcagtccccctaaggtacactgtgtaattcttcagttactagataatagaccgaggagagggtggaagggtgggagggactcagagaagttcagggcagtagctatttgac

SEQ ID NO: 433411 - DNA, 623 bp, Homo sapiens
ttaatgctcaaatgcattagcttatgtgttgagtgtctctttgttggattttctgggagaaacttttgaatatttgtcagcaagcagttatcagatatccatcttggtgtgggcagcccagtgctgggaatgatggagcagtacaagatgtaatttatattagagacacaagacatggcaaatgcaaaatatcaataaggagstaggttagcacagcagagaaaattttggggggaaagtcctgtctgtgttcctggaagaactcctgtggccatttttttttattcatgtagatacagggcttgcaaatgcttattgttttagaggaaatcctgagcctggggagtaatctgagtgcctcagactgaaattctaaatactctgttatccatcattaagatgttgtttcataagtagcatgtaagggtgatatttaaaatattaatttctgataaaacaggatatctactaaccagaatggattcaggccacagtgctggacctgggtcccagcagtccccctaaggtacactgtgtaattcttcagttactagataatagaccgaggagagggtggaagggtgggagggactcagagaagttcagggcagtagctatttgac

SEQ ID NO: 433412 - DNA, 623 bp, Homo sapiens
ttaatgctcaaatgcattagcttatgtgttgagtgtctctttgttggattttctgggagaaacttttgaatatttgtcagcaagcagttatcagatatccatcttggtgtgggcagcccagtgctgggaatgatggagcagtacaagatgtaatttatattagagacacaagacatggcaaatgcaaaatatcaataaggagctaggttagcacagcagagaaaattttggggggaaagtcctgtctgtgttcctggaagaactcctgtggccatttttttttattcatgtagatacagggcttgyaaatgcttattgttttagaggaaatcctgagcctggggagtaatctgagtgcctcagactgaaattctaaatactctgttatccatcattaagatgttgtttcataagtagcatgtaagggtgatatttaaaatattaatttctgataaaacaggatatctactaaccagaatggattcaggccacagtgctggacctgggtcccagcagtccccctaaggtacactgtgtaattcttcagttactagataatagaccgaggagagggtggaagggtgggagggactcagagaagttcagggcagtagctatttgac

SEQ ID NO: 433413 - DNA, 526 bp, Homo sapiens
tgggtcccagcagtccccctaaggtacactgtgtaattcttcagttactagataatagaccgaggagagggtggaagggtgggagggactcagagaagttcagggcagtagctatttgactatttcaatttgtttgatatrcatataatatttagagagggatcttagtatttcagcatactttgtgatccgaatagaattaaattagaaattaataacaataagctatctaggaaagccatttaattttcaatacttgaaaattaaacagtttccttttcaattatccatgagtcaaaaaagaaatcacaggagaaatttttataatatttcaaataggatgacaatgaaaatataacataaataccaattttactacttatctaccgtgtgacttttggtagattacctagcctcttacagtctccatcaacttatttcttaagagaagataataatagtgcctgcctctaggtttgtcagtgaagtctaatgaggagcctgtaacagcattttgcagagcacc

SEQ ID NO: 433414 - DNA, 526 bp, Homo sapiens
tgggtcccagcagtccccctaaggtacactgtgtaattcttcagttactagataatagaccgaggagagggtggaagggtgggagggactcagagaagttcagggcagtagctatttgactatttcaatttgtttgatatacatataatatttagagagggatcttagtatttcagcatactttgtgatccgaatagaattaaattagaaattaataacaataagctatctaggaaarccatttaattttcaatacttgaaaattaaacagtttccttttcaattatccatgagtcaaaaaagaaatcacaggagaaatttttataatatttcaaataggatgacaatgaaaatataacataaataccaattttactacttatctaccgtgtgacttttggtagattacctagcctcttacagtctccatcaacttatttcttaagagaagataataatagtgcctgcctctaggtttgtcagtgaagtctaatgaggagcctgtaacagcattttgcagagcacc

SEQ ID NO: 433415 - DNA, 526 bp, Homo sapiens
tgggtcccagcagtccccctaaggtacactgtgtaattcttcagttactagataatagaccgaggagagggtggaagggtgggagggactcagagaagttcagggcagtagctatttgactatttcaatttgtttgatatacatataatatttagagagggatcttagtatttcagcatactttgtgatccgaatagaattaaattagaaattaataacaataagctatctaggaaagccatttaattttcaatacttgaaaattaaacagtttccttttcaattatccatgagtcaaaaaagaaatcacaggagaaatttttataatatttcaaataggatgacaatgaaaatataacataaataccaattttactacttatctaccgtgtgacttttggtagattacctagcctcttacagtctccatcaacttatttcttaagagaagataataatagtgcctgcctctaggtttgtcagtgaagyctaatgaggagcctgtaacagcattttgcagagcacc

SEQ ID NO: 433416 - DNA, 531 bp, Homo sapiens
caaatgaatccgagctaaccagttartgggcagatctactctttttcccggatatgcatggtttctgttttgtaaataagtgtccttctataattcacatacaaatttctatcagagtagcctttgtagaatacatatatttatatatatgtatatatatactgacttgctgaatataccatgtgcatttcagaagaatttgtattctgcagttgttgggtgtaatgttctataaatatcaattaaatcagggcaattgataatgttgttcaggtaatctataacattactgaaaacttatagatagatacacatgtgcaaacacttatgtatttatatatttttttaatgaaaagaaggcttttaaagcctgtgaaatcactctttagaggtaactggcttatttagctctctccaaaatgaggagaaggagaggaacaggcaggagaccatttaagaaacttgaagtcaggctgggtgccatggctcactcctgtaatcccagcactttgggaggccgaggcgggtgga

SEQ ID NO: 433417 - DNA, 525 bp, Homo sapiens
gaaattgagttttaagactgatgcctttttgattatcatagaactgaaaattgggtttcggtgttcattctgctctaaccacttgatagacctatagcagaacgtccaacctatcaggatttcagtataatcaactgtcaaacaaggagatgcattacttttgcttctataattttgcagacagttatgaatacrcagctgacttttgctgtcagaattgtcaaaatctgttcctacattaaatctccctgtaatatggccttccatatctttagaatctactcattatcagatagggatgaacgaactgagacaaggtttctttacatgggatctatatgtctgggtctgaacagctagatttagcaaataaaaatacaagatgtcaagttgcatttgcatttcagataaactatgaatcatactttagtataagtatgtcccaggcagtgttgaggacatacttatgctaaaagttgatttgtagcttacctgaaattcaaatgtagctggatgacctgactt

SEQ ID NO: 433418 - DNA, 525 bp, Homo sapiens
gaaattgagttttaagactgatgcctttttgattatcatagaactgaaaattgggtttcggtgttcattctgctctaaccacttgatagacctatagcagaacgtccaacctatcaggatttcagtataatcaactgtcaaacaaggagatgcattacttttgcttctataattttgcagacagttatgaatacacagctgacttttgctgtcagaattgtcaaaatctgttcctacattaaatctccctgtaatatggccttccatatctttagaatctactcattatcagatagggatgaacgaactgagacaaggtttctttacatgggatctatatgtctgggtctgaacagctagatttagcaaataaaaatacaagatgtcaagttgcatttgcatttcagataaactatgaatcatactttagtataagtwtgtcccaggcagtgttgaggacatacttatgctaaaagttgatttgtagcttacctgaaattcaaatgtagctggatgacctgactt

SEQ ID NO: 433419 - DNA, 513 bp, Homo sapiens
gaccttccttctttgtccatttttactgtgaaagaatgactttttcctaacggagcatcyagtgagagcagagcagatgctggaggaggggttgagggaggcagctccttgtcttcccctggggagaagctggtgtctgttagtcataggattagaatacagagatggtcggcttgaggacatgtattaaaaagtcaggtcaaaatgataaatgaagtcggattttttttcttacaaaatgtctgatttggtgagttgacctgacaaccactggttctctgtattagtttgctagggctgctgtaacaaagtcccacagactgggtggcaaacaacagaaacttatttctcacagtctgaaggctggaaatccaagctcaaggtgtcagcaggtttagtttcttctgaggcccctctccttggcttgcagatggccgcctctttgctgtgtcctcactcatacagccctttctctaggtgcgtgtatcctagtgtctttgtgttttctcttct

SEQ ID NO: 433420 - DNA, 530 bp, Homo sapiens
tcaatgctgaaacatacttattatcttgtttcttatagaaaaatttgctaaccctggagctacagagtaaaagtcaactggaagccaagacagtgatttcttttctttgttctttagcctagtaagccagatgtgtcaacaggttctttttgactggcattaacatcttgctcaataataaaaggccttaaatttttactaacttatatcagccccacctagtgaaattaaatacaaggaatagttagctgaaacactgtgtaccagaaccattaagtcaggacagtctgaggttgttgacctcaattttgatatgaactggattttttagacacgtaggaatagttatgrctatatttaactattttcatggctatggtgtatgtttttaagactttcccatagatattgtcattatctactggctggggcctttagaacagatgggagaaggggagaaagcagggaatggatacttggggttgtgatttagcaatttctaatcatatccctattcttttttttttttt

SEQ ID NO: 433421 - DNA, 611 bp, Homo sapiens
agggactctccaagcacagaaatgagttttagtgtttccygaacctctaaggggcaaaggttttacacttttgctcctggttaaatggagcaaatggttaaatggttaaataagtaacagcttcaaaagtcacatcccttttatgtcacctttttattttatcaaacaaccgttagtttgattagggaactgtgcatctaaataaactgaactaaccatctattttgcaggtatctatgtacacttatattatacacattgcatatgtgggtatttgtgtcattttctaatcatagttaaatctgaaggaggacatacttttttaactttgtatatttttttaaatgaacatcacatacaagattctctctggctgctcaatgggtctgactactgggtattgtggctttaagctggaggatatgttttaatctacgcttttctcaggtttgtctccttcttattacttaatcatccaatgagccttacagaactgtcagtttgaaaggcaataaactgtgtatggatttttcttcttctttaggattgagaaagtcccaatcatggaagcaatgaaagaaacttccatatacctagtacttcgtttcctg

SEQ ID NO: 433422 - DNA, 611 bp, Homo sapiens
agggactctccaagcacagaaatgagttttagtgtttcctgwacctctaaggggcaaaggttttacacttttgctcctggttaaatggagcaaatggttaaatggttaaataagtaacagcttcaaaagtcacatcccttttatgtcacctttttattttatcaaacaaccgttagtttgattagggaactgtgcatctaaataaactgaactaaccatctattttgcaggtatctatgtacacttatattatacacattgcatatgtgggtatttgtgtcattttctaatcatagttaaatctgaaggaggacatacttttttaactttgtatatttttttaaatgaacatcacatacaagattctctctggctgctcaatgggtctgactactgggtattgtggctttaagctggaggatatgttttaatctacgcttttctcaggtttgtctccttcttattacttaatcatccaatgagccttacagaactgtcagtttgaaaggcaataaactgtgtatggatttttcttcttctttaggattgagaaagtcccaatcatggaagcaatgaaagaaacttccatatacctagtacttcgtttcctg

SEQ ID NO: 433423 - DNA, 590 bp, Homo sapiens
taaagaatagataaatggtattgagtttatgaaaagttattgctcctgaagcagtaagtgttgcatttttatttgttttacatgaaaagtaataatttgtgtcaaaactrtatttatcagccattataaaaaacaaaaagctggaataagatggccaattttcttttctattttctttgccatttccactgtatctcatattactgactacttcctcttgtaaattgcctcttttgtttcaagatattattttcctgtcatttcattttctttccacctatataactgtttctttttcattcttttcctgaactcagcttcctctaccacccttcaaagacttgcgctcctcaaaatttctatccacaaaatctgtttggccagttttattcacacttttaatttcacatttgagctgatgatcctcaaatatgtacatttagcgcagacctctctcactggtttctttattcataaatctgcttgttctctagatattatcacttagatctttcactgaaatctaactttgaaatttatgagtctgggtacttaacaaaccaatgtataaagtttactgtatactcaac

SEQ ID NO: 433424 - DNA, 590 bp, Homo sapiens
taaagaatagataaatggtattgagtttatgaaaagttattgctcctgaagcagtaagtgttgcatttttatttgttttacatgaaaagtaataatttgtgtcaaaactgtatttatcagccattataaaaaacaaaaagctggaataagatggccaattttcttttctattttctttgccatttccactgtatctcatattactgactacttcctcttgtaaattgcctcttttgtttcaagatattattttcctgtcatttcattttctttccacctatataactgtttctttttcattcttttcctgaactcagcttcctctaccacccttcaaagacttgcgctcctcaaaatttctatccacaaaatctgtttggccagttttattcacacttttaatttcacatttgagctgatgatcctcaaatatgtacatttagcgcagacctctctcactggtttctttattcataaatctrcttgttctctagatattatcacttagatctttcactgaaatctaactttgaaatttatgagtctgggtacttaacaaaccaatgtataaagtttactgtatactcaac

SEQ ID NO: 433425 - DNA, 587 bp, Homo sapiens
aaaatataattccacaatgttgggacttggatcaaatggcatcagatagcaggcatactctggcagcactctgtgccaatgtccaaatctattaagtttgtttactaactagtcttattatctgtttcatgttgggatttctttaggrtgtggtaaaattggacagatgggttgaaagtcttccttcaggcacaatacacatagcattgggcagatgggttccaataacctacctttaggcctggaacacatggatgaaacaaagagaaaaagaatacaccactatccagtgatgggtagaaaatagaattgggaatggagaaatttttaaatgagacctgaaatatataaagtaaaactggaaagtggcacagtgtcacttaccttcaaaggtacaaatttttcagtcagcaagctatatattatagtaatgagtgaccttagaaatctaaatgtaacttactgaaaaaagagatcaatcttagcaataaaagatatcaactggaaataagttttgtagtaacaagaacagggctcaactgtatttaatatctctcaattaattggatgaggattttacagaatag

SEQ ID NO: 433426 - DNA, 587 bp, Homo sapiens
aaaatataattccacaatgttgggacttggatcaaatggcatcagatagcaggcatactctggcagcactctgtgccaatgtccaaatctattaagtttgtttactaactagtcttattatctgtttcatgttgggatttctttaggatgtggtaaaattggacagatgggttgaaagtcttccttcaggcacaatacacatagcattgggcagatgggttccaataaccwacctttaggcctggaacacatggatgaaacaaagagaaaaagaatacaccactatccagtgatgggtagaaaatagaattgggaatggagaaatttttaaatgagacctgaaatatataaagtaaaactggaaagtggcacagtgtcacttaccttcaaaggtacaaatttttcagtcagcaagctatatattatagtaatgagtgaccttagaaatctaaatgtaacttactgaaaaaagagatcaatcttagcaataaaagatatcaactggaaataagttttgtagtaacaagaacagggctcaactgtatttaatatctctcaattaattggatgaggattttacagaatag

SEQ ID NO: 433427 - DNA, 656 bp, Homo sapiens
ttatctgtttcatgttgggatttctttaggatgtggtaaaattggacagatgggttgaaagtcttccttcaggcacaatacacatagcattgggcagatgggttccaataacctacctttaggcctggaacacatggatgaaacaaagagaaaaagaatacaccactatccagtgatgggtagaaaatagaattgggaatggagaaatttttaaatgagacctgaaatatataaagtaaaactggaaagtggcacagtgtcacttaccttcaaaggtacaratttttcagtcagcaagctatatattatagtaatgagtgaccttagaaatctaaatgtaacttactgaaaaaagagatcaatcttagcaataaaagatatcaactggaaataagttttgtagtaacaagaacagggctcaactgtatttaatatctctcaattaattggatgaggattttacagaatagtaaacaaatgggcaaatggcagtaatctgtgaggaaaagaccagacttcaagagaatatctgcagtgtagaaagatgaactgaaataattaaatgaagggataggtaaaaagtattgcccttagattccctcaaaacccaagggaaagcaaaatcagcccaatacaactgtacaatgtagagatat

SEQ ID NO: 433428 - DNA, 587 bp, Homo sapiens
aaaatataattccacaatgttgggacttggatcaaatggcatcagatagcaggcatactctggcagcactctgtgccaatgtccaaatctattaagtttgtttactaactagtcttattatctgtttcatgttgggatttctttaggatgtggtaaaattggacagatgggttgaaagtcttccttcaggcacaatacacatagcattgggcagatgggttccaataacctacctttaggcctggaacacatggatgaaacaaagagaaaaagaatacaccactatccagtgatgggtagaaaatagaattgggaatggagaaatttttaaatgagacctgaaatatataaagtaaaactggaaagtggcacagtgtcacttaccttcaaaggtacaaatttttcagkcagcaagctatatattatagtaatgagtgaccttagaaatctaaatgtaacttactgaaaaaagagatcaatcttagcaataaaagatatcaactggaaataagttttgtagtaacaagaacagggctcaactgtatttaatatctctcaattaattggatgaggattttacagaatag

SEQ ID NO: 433429 - DNA, 422 bp, Homo sapiens
gacatctctaggcctgttccataaattctgtatgccttttccctccccttttctctcagttagatgtagagcagtggttctcaaagtatggtcctatcccatcaggatgcaaagcaagcattagttctgctagcaagctattctctctcctcactggctmcaccactctccctggggaaacaacctctctcttttacactccagtgacaccctgtacatacatctatcagagtactgagacacattattcaaattatatacatacattattgtacgtgaggaagtaactgtcactgggctggtcctcagtgtgattatgacttcctctcccactctgacttccttaagtgaagagatcattctttttctttttaaatccctagtgtttttgcaatactgaagataaagacactaaataaatg

SEQ ID NO: 433430 - DNA, 489 bp, Homo sapiens
aaattggtttatatctgttccaacctatagcacactcaaccaatattcagctattaaacctgattgyacaaaacaataaaattggttgaactaatgctttctctcatccacagagtactcacacatacacataaaagtatgatagtaggtgcttttagatgtatttctcagctaaaatatgacaagtacatgaagttttaattatacccctttcagaagaaattttccctttcaattgccctaccaactccaaatgtaccaacaaatttcccatgaatcacagacagactattataaccacttgagaacaggaacacagctgatgttctcacttttattttctcaggacctagaagaataatatttaacccataatagatggtcaaaattaacaccacacacacacacacaagcacacgtgtgtacacacacataaattccaatagttatctaaggaaaagtatagaatgaagacaataacagaaacat

SEQ ID NO: 433431 - DNA, 489 bp, Homo sapiens
aaattggtttatatctgttccaacctatagcacactcaaccaatattcagctattaaacctgattgtacaaaacaataaaattggttgaactaatgctttctctcatccacrgagtactcacacatacacataaaagtatgatagtaggtgcttttagatgtatttctcagctaaaatatgacaagtacatgaagttttaattatacccctttcagaagaaattttccctttcaattgccctaccaactccaaatgtaccaacaaatttcccatgaatcacagacagactattataaccacttgagaacaggaacacagctgatgttctcacttttattttctcaggacctagaagaataatatttaacccataatagatggtcaaaattaacaccacacacacacacacaagcacacgtgtgtacacacacataaattccaatagttatctaaggaaaagtatagaatgaagacaataacagaaacat

SEQ ID NO: 433432 - DNA, 489 bp, Homo sapiens
aaattggtttatatctgttccaacctatagcacactcaaccaatattcagctattaaacctgattgtacaaaacaataaaattggttgaactaatgctttctctcatccacagagtactcacacatacacataaaagtatgatagtaggtgcttttagatgtatttctcagctaaaatatgacaagtacatgaagttttaattatacccctttcagaagaaattttccctttcaattgccctaccaactccaaatgtaccaacaaatttcccatgaatcacagacagactattataaccacttgagaacaggaacacagctgatgttctcacttttattttctcaggacctagaagaataatatttaacccataatagatggtcaaaattaacaccacacacacacacacaagcacacgtgtgtrcacacacataaattccaatagttatctaaggaaaagtatagaatgaagacaataacagaaacat

SEQ ID NO: 433433 - DNA, 578 bp, Homo sapiens
tctttctttcctttcccataatgtgacaaattttgaggtggtaggaatttaaacatgagtaagtcatgtttcccaccatcagatgaaaacaggtatatatacaaataaataatgtgatatacttgaaatgatgacatactttttaattacatggaggttgactctgtttttattcccagctgcttcaaactggagtctatcaatgtgtctattayaagaaaattctgctaaaataaaataagcacatgccatatagagatttttataaaggcattctccttgtatcacaataataaatatttcagctagttacatgagcaaaagaattcaccctaacgtaccctccagagcagatcatctgcaggtctaaactgacaaatcctcagctacaatgacacttgcagaggatttctctcttttgaggagtggaaagctggcatctatgtgccacattctctagaattaacatcctttccataaaattactcaagatatttcagagcaatcactcagaaatagttatttatacaacttacttaataatataagtgatggaccacctctaatttaagtgtgtt

SEQ ID NO: 433434 - DNA, 473 bp, Homo sapiens
accagaaaacctgagccagactgaaagacagatgtctctgaaagagggctggggcttcttttgtatcaagaacaatttgactaccacagttacaaagcattccatrtaagttgaacgctagatttaaactcactttttttcccagcaaagtagggaatcaaggtcactattgtgtagcattccaagggtctgacacttgtctaaatcctgtagaaatgagatcaagggcaaagggcacagatcctgggaataatgatggggtcacatgaacaggcataatttagggcaggcagacccactgcttgtatggtatgcactgtatcaggccccataacttaggtggtaagacagtttctattacaaccctgctattgtcaggaaagcagcctgtactgactttggacacagctcagacttctgagggagagcaatggcatgccaggcagagcaggacatacaaggactatttgtgg

SEQ ID NO: 433435 - DNA, 473 bp, Homo sapiens
accagaaaacctgagccagactgaaagacagatgtctctgaaagagggctggggcttcttttgtatcaagaacaatttgactaccacagttacaaagcattccatgtaagttsaacgctagatttaaactcactttttttcccagcaaagtagggaatcaaggtcactattgtgtagcattccaagggtctgacacttgtctaaatcctgtagaaatgagatcaagggcaaagggcacagatcctgggaataatgatggggtcacatgaacaggcataatttagggcaggcagacccactgcttgtatggtatgcactgtatcaggccccataacttaggtggtaagacagtttctattacaaccctgctattgtcaggaaagcagcctgtactgactttggacacagctcagacttctgagggagagcaatggcatgccaggcagagcaggacatacaaggactatttgtgg

SEQ ID NO: 433436 - DNA, 473 bp, Homo sapiens
accagaaaacctgagccagactgaaagacagatgtctctgaaagagggctggggcttcttttgtatcaagaacaatttgactaccacagttacaaagcattccatgtaagttgaacgctagatttaaactcactttttttcccagcaaagtagggaatcaaggtcactattgtgtagcattccaagggtctgacacttgtctaaatcctgtagaaatgagatcaagggcaaagggcacagatcctgggaataatgatggggtcacatgaacaggcataatttagggcaggcagacccactgcttgtatggtatgcactgtatcaggccccataacttaggtggtaagacagtttctaytacaaccctgctattgtcaggaaagcagcctgtactgactttggacacagctcagacttctgagggagagcaatggcatgccaggcagagcaggacatacaaggactatttgtgg

SEQ ID NO: 433437 - DNA, 565 bp, Homo sapiens
tcactattgtgtagcattccaagggtctgacacttgtctaaatcctgtagaaatgagatcaagggcaaagggcacagatcctgggaataatgatggggtcacatgaacaggcataatttagggcaggcagacccactgcttgtatggtatgcactgtatcaggccccataacttaggtggtaagacagtttctattacaaccctgctattgtcaggaaagcagcctgtactgactttggacacagctcagacttctgagggagagcaatggcatgccaggcagagcaggacatacaaggactatttgtgggcttgttatwttcctgtaccttccataattaatgggttttttttctacattcagccttggctcctgtgttttctattaaatatgtgaaccaaaggaaaagtaaattttaaagctatttgaatcactattaaatgatctaatcttcctttgtagaaagaaaatatttttagctccaaagtgactgctttaaatatacattttacacaatgattggtgatattttctttcttttgtggtctcgtttaactttggagg

SEQ ID NO: 433438 - DNA, 565 bp, Homo sapiens
tcactattgtgtagcattccaagggtctgacacttgtctaaatcctgtagaaatgagatcaagggcaaagggcacagatcctgggaataatgatggggtcacatgaacaggcataatttagggcaggcagacccactgcttgtatggtatgcactgtatcaggccccataacttaggtggtaagacagtttctattacaaccctgctattgtcaggaaagcagcctgtactgactttggacacagctcagacttctgagggagagcaatggcatgccaggcagagcaggacatacaaggactatttgtgggcttgttattttcctgtaccttccataattaatgggttttttttctacattcagccttggctcctrtgttttctattaaatatgtgaaccaaaggaaaagtaaattttaaagctatttgaatcactattaaatgatctaatcttcctttgtagaaagaaaatatttttagctccaaagtgactgctttaaatatacattttacacaatgattggtgatattttctttcttttgtggtctcgtttaactttggagg

SEQ ID NO: 433439 - DNA, 565 bp, Homo sapiens
tcactattgtgtagcattccaagggtctgacacttgtctaaatcctgtagaaatgagatcaagggcaaagggcacagatcctgggaataatgatggggtcacatgaacaggcataatttagggcaggcagacccactgcttgtatggtatgcactgtatcaggccccataacttaggtggtaagacagtttctattacaaccctgctattgtcaggaaagcagcctgtactgactttggacacagctcagacttctgagggagagcaatggcatgccaggcagagcaggacatacaaggactatttgtgggcttgttattttcctgtaccttccataattaatgggttttttttctacattcagccttggctcctgtgttttctattaaatatgtgaaccaaaggaaaagtaaattttaaagctatttgaatcactattaaatgatctaatcttcctttgtagaaagaaaatatttttagctccaaagtgactrctttaaatatacattttacacaatgattggtgatattttctttcttttgtggtctcgtttaactttggagg

SEQ ID NO: 433440 - DNA, 557 bp, Homo sapiens
ggtctatagttgtcaccttgctcagatggctcaaggcaaaaacaacaacaacaacaatcaaacaaacaaaaaacctagaccttgcaatccccagaagacctaaaaaggaacaatatgcattttgataaattttaggtctgatgttaaactacagtttggctttatccacataattctattacctgtatacattgttaatgaattctaactaacatgaggtttggrgataaaatccctctccaatcctgtagtgaataatgcttaatatgtgaaaaggcataaactggcaactctcaggtgatccaattattaaatttttacatgttacagttggtgttaaagccaaactaagcgccaaacttattttcctatgtgggtttttgttttgatttgtttccttaagaataataacatgatcaacttttagtaaataaatatattttgtacttttaccctgaatagaaaaatatgaatatctatgaaataagtgattcactcctgaacggtgctgtttaggcaaaggtccagatatcaaatattgtatcaaataagtttat

SEQ ID NO: 433441 - DNA, 633 bp, Homo sapiens
tttaggtctgatgttaaactacagtttggctttatccacataattctattacctgtatacattgttaatgaattctaactaacatgaggtttggagataaaatccctctccaatcctgtagtgaataatgcttaatatgtgaaaaggcataaactggcaactctcaggtgatccaattattaaatttttacatgttacagttggtgttaaagccaaactaagcgccaaacttattttcctatgtgggtttttgttttgatttgtttccttaagaataataacatgatcaacttttagtaaataaatatattttgtacttttaccctgaatagaaaaatatgaatatctatgaaataagtgattcactcctgaamggtgctgtttaggcaaaggtccagatatcaaatattgtatcaaataagtttatttctccccatcaggtcttttttgaaaataaatcttctctttttgtctctgcttgacactagacagggcaatatatccaaaaaactatgagattctttaattttcctcggtattattgactttttttcttaagttctcaattgtttcttctgcaggaaaagaaacccaaaagattattaaaatcttaaaataagatgcttgtatcct

SEQ ID NO: 433442 - DNA, 590 bp, Homo sapiens
tcggtattattgactttttttcttaagttctcaattgtttcttctgcaggaaaagaaacccaaaagattattaaaatcttaaaataagatgcttgtatcctatttgtttgttaaatatacatatattatatcaattataattgatktttaagagagagtttaaaatgtagtatctgagtaacaaatatttagtaaataatctctactttctattttaatatgttgtaccaaaatttatattttctgagcaaaccaatctatatgttgtgctcctaaattaataaagtgcttatattttataaagtacaaaataacttctgtagaagttgtcattgttctcaatatttttatattttccatattttttggaaagtccccaaaaattaactcccttaaaagtcttcttgtaaattccagtaaattacatgtattcaaagcaaggagttcttgcttggggtttccaaaatatgttattttccacttgaattcgaatattgtcccagagatcatgaaggttcctagaatgtttattcacaattctaactattctaacaataatatctggattctacaacctctatcaaaagtcc

SEQ ID NO: 433443 - DNA, 590 bp, Homo sapiens
tcggtattattgactttttttcttaagttctcaattgtttcttctgcaggaaaagaaacccaaaagattattaaaatcttaaaataagatgcttgtatcctatttgtttgttaaatatacatatattatatcaattataattgatgtttaagagagagtttaaaatgtagtatctgagtarcaaatatttagtaaataatctctactttctattttaatatgttgtaccaaaatttatattttctgagcaaaccaatctatatgttgtgctcctaaattaataaagtgcttatattttataaagtacaaaataacttctgtagaagttgtcattgttctcaatatttttatattttccatattttttggaaagtccccaaaaattaactcccttaaaagtcttcttgtaaattccagtaaattacatgtattcaaagcaaggagttcttgcttggggtttccaaaatatgttattttccacttgaattcgaatattgtcccagagatcatgaaggttcctagaatgtttattcacaattctaactattctaacaataatatctggattctacaacctctatcaaaagtcc

SEQ ID NO: 433444 - DNA, 560 bp, Homo sapiens
gagaaatactaattcattggggggggggggggcggtaacaggagaaattaagcgaaatgccacataaaaaattattacagtggctggcacrtaaaaggcattcaattatcagctattgttttcatatgcccaacatgtagcttggagtacttgctctatacctgtcacttcgctattgtgtgaaccaaagagacacagttcttggcctcatgaaatctaaaattttgtggaggaaataagacattaatacacaattgcaaaacttcataagcacaaactctgcaaattggtaagaagaaaaatacataatactatgagagtaacagtgagggatcaagggtgagacctaaagagtgagcagcagttaactaggtgtagagttgctccagagaaaggaggcaggacagatgaaaagtcagaagcgggaaagagctccatacatccaaaagactgaaaagcgagaaatgcaaatcaaaatcacaatgagataccatctcacaccagtcagaatggctattattaaaaagtcaaaaaataatagatgctgacgaggctgtgaa

SEQ ID NO: 433445 - DNA, 624 bp, Homo sapiens
tgcccaacatgtagcttggagtacttgctctatacctgtcacttcgctattgtgtgaaccaaagagacacagttcttggcctcatgaaatctaaaattttgtggaggaaataagacattaatacacaattgcaaaacttcataagcacaaactctgcaaattggtaagaagaaaaatacataatactatgagagtaacagtgagggatcaagggtgagacctaaagagtgagcagcagttaactaggtgtagagttgctccagagaaaggaggcaggacagatgaaaagtcagaagygggaaagagctccatacatccaaaagactgaaaagcgagaaatgcaaatcaaaatcacaatgagataccatctcacaccagtcagaatggctattattaaaaagtcaaaaaataatagatgctgacgaggctgtgaagaaaaaggaatgcttatacactgttggtgggaatccaaattagttcagccactgtggaaaaaagtttggtgatttctcaaagaactaaaaatagaactaccattaaaaccagcaatcaccttactgggtatatatccaaaggaaaataaattattctaccaaaagacacatgcacttgtaggtttatcac

SEQ ID NO: 433446 - DNA, 560 bp, Homo sapiens
gagaaatactaattcattggggggggggggggcggtaacaggagaaattaagcgaaatgccacataaaaaattattacagtggctggcacataaaaggcattcaattatcagctattgttttcatatgcccaacatgtagcttggagtacttgctctatacctgtcacttcgctattgtgtgaaccaaagagacacagttcttggcctcatgaaatctaaaattttgtggaggaaataagacattaatacacaattgcaaaacttcataagcacaaactctgcaaattggtaagaagaaaaatacataatactatgagagtaacagtgagggatcaagggtgagacctaaagagtgagcagcagttaactaggtgtagagttgctccagagaaaggaggcaggacagatgaaaagtcagaagcgggaaagagctccatacatccaaaagactgaaaagcragaaatgcaaatcaaaatcacaatgagataccatctcacaccagtcagaatggctattattaaaaagtcaaaaaataatagatgctgacgaggctgtgaa

SEQ ID NO: 433447 - DNA, 488 bp, Homo sapiens
acatgtaccctaaaacttaaagtataataaaaaaaaaagaggcattctagtggttcacccaagaggccatgatgcatatattagggtggtgagagaggaaattaaaaaacacatatctgagtaacattcaagaagcagaatagccaggattggataaagtgtcaagarcaaccctgagcaattgagagtggaagatggtgccatgtgctggaatgggaaagctggaagaagagtaagttggccactggcaatggcaggcttggtagggagagagcaagaatagaggattctctctgagttattttagtttaagataactgtacatcatcccagtgcagatttcaagtggacaattacacatataggtctgatccttgggaaaagacaaaacatatttatgagttcaagaaccatcaatagcttcacaactagaaaatgtatgttctccaaaaatcaccaagacagaatgagaagaatcgttatctaaa

SEQ ID NO: 433448 - DNA, 488 bp, Homo sapiens
acatgtaccctaaaacttaaagtataataaaaaaaaaagaggcattctagtggttcacccaagaggccatgatgcatatattagggtggtgagagaggaaattaaaaaacacatatctgagtaacattcaagaagcagaatagccaggattggataaagtgtcaagaacaaccctgagcaattgrgagtggaagatggtgccatgtgctggaatgggaaagctggaagaagagtaagttggccactggcaatggcaggcttggtagggagagagcaagaatagaggattctctctgagttattttagtttaagataactgtacatcatcccagtgcagatttcaagtggacaattacacatataggtctgatccttgggaaaagacaaaacatatttatgagttcaagaaccatcaatagcttcacaactagaaaatgtatgttctccaaaaatcaccaagacagaatgagaagaatcgttatctaaa

SEQ ID NO: 433449 - DNA, 488 bp, Homo sapiens
acatgtaccctaaaacttaaagtataataaaaaaaaaagaggcattctagtggttcacccaagaggccatgatgcatatattagggtggtgagagaggaaattaaaaaacacatatctgagtaacattcaagaagcagaatagccaggattggataaagtgtcaagaacaaccctgagcaattgagagtggaagatggtgccatgtgctggaatgggaaagctggaagaagagtaagttggccactggcaatggcaggcttggtagggagagagcargaatagaggattctctctgagttattttagtttaagataactgtacatcatcccagtgcagatttcaagtggacaattacacatataggtctgatccttgggaaaagacaaaacatatttatgagttcaagaaccatcaatagcttcacaactagaaaatgtatgttctccaaaaatcaccaagacagaatgagaagaatcgttatctaaa

SEQ ID NO: 433450 - DNA, 488 bp, Homo sapiens
acatgtaccctaaaacttaaagtataataaaaaaaaaagaggcattctagtggttcacccaagaggccatgatgcatatattagggtggtgagagaggaaattaaaaaacacatatctgagtaacattcaagaagcagaatagccaggattggataaagtgtcaagaacaaccctgagcaattgagagtggaagatggtgccatgtgctggaatgggaaagctggaagaagagtaagttggccactggcaatggcaggcttggtagggagagagcaagaatagaggattctctctgagttattttagtttaagataactgtacatcawcccagtgcagatttcaagtggacaattacacatataggtctgatccttgggaaaagacaaaacatatttatgagttcaagaaccatcaatagcttcacaactagaaaatgtatgttctccaaaaatcaccaagacagaatgagaagaatcgttatctaaa

SEQ ID NO: 433451 - DNA, 499 bp, Homo sapiens
tgtaactgggagttttctaggaagtcatagcaaatcaggaacagagctaagactctaaattccttcattaaagttgcatcaattgatagtagtttttttgtcttctctatgactctttctccaaccttaggtacrtagatgtgaattaattataatatttcatttattagactcatgccattggcttgcaaatgattaggtttaatttatgtttccttttaggggcttaatactatatattaaacatctgtattattaatatgtactcccatggtattacacagaatactgtgtaatacacacccatacagtagactctttaaagatatgtgctaggcagaatttaagttatgtattttaatacaaatgacatatgttttatttatcgtatgtctctagcatctactctattgtctggtgcataagatttgctcggtcaataaaggttgcatgattgaatgccctgcacatggacactgttgtctgaatgaacattcac

SEQ ID NO: 433452 - DNA, 499 bp, Homo sapiens
tgtaactgggagttttctaggaagtcatagcaaatcaggaacagagctaagactctaaattccttcattaaagttgcatcaattgatagtagtttttttgtcttctctatgactctttctccaaccttaggtacgtagatgtgaattaattataatatttcatttattagactcatgccattggcttgcaaatkattaggtttaatttatgtttccttttaggggcttaatactatatattaaacatctgtattattaatatgtactcccatggtattacacagaatactgtgtaatacacacccatacagtagactctttaaagatatgtgctaggcagaatttaagttatgtattttaatacaaatgacatatgttttatttatcgtatgtctctagcatctactctattgtctggtgcataagatttgctcggtcaataaaggttgcatgattgaatgccctgcacatggacactgttgtctgaatgaacattcac

SEQ ID NO: 433453 - DNA, 589 bp, Homo sapiens
tttatcttcatatttgcaatttttacatttggatatttatggaatgtggatctacgcaaaatttgactctgccattggaattggagttcagtatgatgtttcaatttattctgacttcagtttttgcttgctaagttaatattaggacaagatcaaactccattaycttgcatagattactctctagaaagttctccctattgccactttgctggtccataatcactggagacaacttcctgaaatatggatttatgggaaggcaaacaaagaattataaacacaaagaaaatcagaaaactatgaaagagatatactgaataatcaataatcaattcaatatcccaagaactaatactcaaagatacaaaataaagcaaatggaaaatttagcttaagcatattcccaaacacactttaaaaacacagaatattttagaagcatacaaaaatagtttcttgtatttccttttgattcctttatatttaatataagactctagttcgtctggcatggcatgacttgggaacacaacagaattttttttagcatgtgggtagacaactattccaacataatttactgaaa

SEQ ID NO: 433454 - DNA, 589 bp, Homo sapiens
tttatcttcatatttgcaatttttacatttggatatttatggaatgtggatctacgcaaaatttgactctgccattggaattggagttcagtatgatgtttcaatttattctgacttcagtttttgcttgctaagttaatattaggacaagatcaaactccattaccttgcatagattactctctagaaagttctccctattgccactttgctggtccataatcactggagacaacttcctgaaatatggatttatgggaaggcaaacaaagaattataaacacaaagaaaatcagaaaactatgaaagagatatactgaataatcaataatcaattcaatatcccaagaactaatactcaaagatacaaaataaagcaaatggaaaatttagcttaagcatattcccaaacacactttaraaacacagaatattttagaagcatacaaaaatagtttcttgtatttccttttgattcctttatatttaatataagactctagttcgtctggcatggcatgacttgggaacacaacagaattttttttagcatgtgggtagacaactattccaacataatttactgaaa

SEQ ID NO: 433455 - DNA, 573 bp, Homo sapiens
ataaacacaaagaaaatcagaaaactatgaaagagatatactgaataatcaataatcaattcaatatcccaagaactaatactcaaagatacaaaataaagcaaatggaaaatttagcttaagcatattcccaaacacactttaaaaacacagaatattttagaagcatacaaaaatagtttcttgtatttccttttgattcctttatatttaatataagactctagttcgtctggcatggcatgacttgggaacacaacagaattttttttagcatgtgggtagacaactattccaacataatttactgaaacgtagtattttcccactgttttgaaatgccatcttaattactaagtacattctyttatatccatgggtctgtttctggactctattttgtctcattcactttcctctcctgcctcttcctatgacaatatcataccagctttatctagaccaatcctccccaaaataatgtttttaaaatccttgccagttgtatatttgcttttcctaaaaatattagaatcagcttctcacgttctaattttttttaatctaaatgca

SEQ ID NO: 433456 - DNA, 573 bp, Homo sapiens
ataaacacaaagaaaatcagaaaactatgaaagagatatactgaataatcaataatcaattcaatatcccaagaactaatactcaaagatacaaaataaagcaaatggaaaatttagcttaagcatattcccaaacacactttaaaaacacagaatattttagaagcatacaaaaatagtttcttgtatttccttttgattcctttatatttaatataagactctagttcgtctggcatggcatgacttgggaacacaacagaattttttttagcatgtgggtagacaactattccaacataatttactgaaacgtagtattttcccactgttttgaaatgccatcttaattactaagtacattcttttatatccatgggtctgtttctggactctattttgtctcattcactttcctytcctgcctcttcctatgacaatatcataccagctttatctagaccaatcctccccaaaataatgtttttaaaatccttgccagttgtatatttgcttttcctaaaaatattagaatcagcttctcacgttctaattttttttaatctaaatgca

SEQ ID NO: 433457 - DNA, 554 bp, Homo sapiens
aaaaacacagaatattttagaagcatacaaaaatagtttcttgtatttccttttgattcctttatatttaatataagactctagttcgtctggcatggcatgacttgggaacacaacagaattttttttagcatgtgggtagacaactattccaacataatttactgaaacgtagtattttcccactgttttgaaatgccatcttaattactaagtacattcttttatatccatgggtctgtttctggactctattttgtctcattcactttcctctcctgcctcttcctatgacaatatcataccagctttatctagaccaatcctccccaaaataatgtttttaaaatccttgccagttgtrtatttgcttttcctaaaaatattagaatcagcttctcacgttctaattttttttaatctaaatgcaattttaactaggcttacttgaatttataaatccatgtgggggagaatcttttcatcattgtgtcttcctgtatttgtacagcattccacctatttagcaaggttttcagggggtttttcttcac

SEQ ID NO: 433458 - DNA, 565 bp, Homo sapiens
ttatgttcatcagtaagatggtaattcaataaattataccacattcctactctgggtaactacactgtcatttaaaaggatgcaggacatttgtcattactgatatgatagtattttgaatatagacttaacttttttgaaagtcacatatgaatacttagaacatatgcttttcattgctgaattaaggaacatcttagcatggcatataagagttctagagtcaaactattgggtccaaatattgtccctctaccaatcacttttatgatctctatttctcagtttcccggctacctgataaagagagatggtaatagtgcttcacagggtgttgtgaggattccaaagtgaattcatccaaaacgctaaggatagaaactgatatgtagtaaaatactcaattaattaatatttttaaagttattcrttatataaataaatacacatatttaaaaaaatgtaatcccaactgagaatagcagttatccaggggagggcaaaaagaaagggctaaatggttcttgatattttgctttgtatatttttacattattttgaacag

SEQ ID NO: 433459 - DNA, 563 bp, Homo sapiens
cacttcaagttgtcctacctttccagagcaaaccaatgtatacctgacatgcattcattgatgtctyatgtctccctaaaacataaaaaaacaagctgtaacccaaccaccttgagcacaagttctcaggacctcctgaggctgtgtcacaggacatggtcctcatattcagctcaaaataaaactcttcaaatattttgaagagtttgacctttttattaacagaactgctctcaattttgatttcttagtgtgtcaaacatggtgccaatgtcacaccatatttataaagctttagtgagataaaataaatatttaatactgtgcctggaacattaaaaaactgaactcatgttattataataacgggtacattgttgctagtactaccactgttatcaccatactctgtaataactgttcctgtgtttaaatgaaggatctgatatttcctcaacatgccatagccttctatggccttatatttatataacttattactttttctggctcaaaaaataaatgtgaatatctctactatttcctacatttttttttactgg

SEQ ID NO: 433460 - DNA, 563 bp, Homo sapiens
cacttcaagttgtcctacctttccagagcaaaccaatgtatacctgacatgcattcattgatgtcttatgtctccctaaaacataaaaaaacaagctgtaacccaaccaccttgagcacaagttctcaggacctcctgaggctgtgtcacaggacatggtcctcatattcagctcaaaataaaactcttcaaatattttgaagagtttgacctttttatyaacagaactgctctcaattttgatttcttagtgtgtcaaacatggtgccaatgtcacaccatatttataaagctttagtgagataaaataaatatttaatactgtgcctggaacattaaaaaactgaactcatgttattataataacgggtacattgttgctagtactaccactgttatcaccatactctgtaataactgttcctgtgtttaaatgaaggatctgatatttcctcaacatgccatagccttctatggccttatatttatataacttattactttttctggctcaaaaaataaatgtgaatatctctactatttcctacatttttttttactgg

SEQ ID NO: 433461 - DNA, 518 bp, Homo sapiens
taactggaaaagaaatagtcgattccatccaagaagartgagtagataagtagaactggacaacaatgcatgcaggagaacagcagacgatgaggccagatcacaaagggctctgcagtccaaacaaatacgtttgaaatcgactctgaaagcttcaggaagcccccaagtatcatgcaacatcgatatccaagaccaaggcctcagaaaaattaaagcctgctgattttgaaaattgggtttctcaggtttctgtaaaggttaacttatttccaactaaataagaaaaaaacaagattatttcagattcatagtcagccttagctctggttcctgaagtaaaatttctcactttatattttgccacttggttgttaaatcttttgtgaaaccatatacatatatgatcatgtatagcatatatagcacatattttactaatatgtctttaaaaaaggatgcttgccatagtaaataaacagtaatatgatattaaaactcaagtaagtgccaaatat

SEQ ID NO: 433462 - DNA, 518 bp, Homo sapiens
taactggaaaagaaatagtcgattccatccaagaagaatgagtagataagtagaactggacaacaatgcatgcaggagaacagcagacgatgaggccagatcacaaagggctctgcagtccaaacaaatacgtttgaaatcgactctgaaagcttcaggaagcccccaagtatcatgcaacatcgatatccaagaccaaggcctcagaaaaattaaagcctgctgatwttgaaaattgggtttctcaggtttctgtaaaggttaacttatttccaactaaataagaaaaaaacaagattatttcagattcatagtcagccttagctctggttcctgaagtaaaatttctcactttatattttgccacttggttgttaaatcttttgtgaaaccatatacatatatgatcatgtatagcatatatagcacatattttactaatatgtctttaaaaaaggatgcttgccatagtaaataaacagtaatatgatattaaaactcaagtaagtgccaaatat

SEQ ID NO: 433463 - DNA, 568 bp, Homo sapiens
gccatttctgtacctcattcctattttctgtatatcactttcctttttctgtccataaatcctctgccacatggctgcacgagagcctctttgagcctactgtggctcaggaggctgcccaatttgcaaacggttctttgctcaattaaactctgttaaatttaatttgtcttaaggtttttctttgaaaatacccttccctccactccctggggtcaatgtgagggtgaaggaaaacataaattatgaaccaagctcttgaccctctttgtagtacatgaaaagcaacctggggtgaaggcagggatagatacaggacgttttatccgaggagcaagagagagtcatggggcttccaggatagccttggccccagaagttctttcccatattaccagaactctgggatcttagggacagayttgttttttgaggggttttttttcccatttttctctaggagcatttagaagtcagcaatttgggaaccactctacataaggtatgtgcctctatttccttactacaggtgatcttgctaaatgtaaaccctattcacaaaatgtgt

SEQ ID NO: 433464 - DNA, 598 bp, Homo sapiens
acttacttttttttccatgtgatgcttacagggagctagtttcagaggaaacactttgagaaatcctgggtaaatttcttaccagtaatagctaatatctaaattgttgcttttagccttcaaatatgaattgtaattgaatttacttctatgccagtccaggtccaggtcttacagtatatgctttcattactctctgaatgtttcctatagcacatttgttagtcgtattcatttttaactacatgcaattacatttctatctccccagctaggcagtatgttccaggtgggtctcagaactattttgctcatcattttatctccaacatgaggcaaagtggcacataataagttatgcacccagtaaatagttgctgaataaatgcatgatttctgaactctgttttcatatcacacattatgcaaacagcagtgatggaatamatgtaaatcaattttggctttgcgaggggttttaatctcttttagctctcttggatggcatttggaccattagctccaccagtgcctatgtatatactcttaatgaactgaacgttagaatgtcccttctaagtatcattatttagtaaac

SEQ ID NO: 433465 - DNA, 598 bp, Homo sapiens
acttacttttttttccatgtgatgcttacagggagctagtttcagaggaaacactttgagaaatcctgggtaaatttcttaccagtaatagctaatatctaaattgttgcttttagccttcaaatatgaattgtaattgaatttacttctatgccagtccaggtccaggtcttacagtatatgctttcattactctctgaatgtttcctatagcacatttgttagtcgtattcatttttaactacatgcaattacatttctatctccccagctaggcagtatgttccaggtgggtctcagaactattttgctcatcattttatctccaacatgaggcaaagtggcacataataagttatgcacccagtaaatagttgctgaataaatgcatgatttctgaactctgttttcatatcacacattatgcaaacagcagtgatggaatacatgtaaatcaattttggctttgcgaggggttttaatctcttttagctctcttggatggcatttggaccattagctccaccagtgcctatgtatatactcttaatgaactgaacrttagaatgtcccttctaagtatcattatttagtaaac

SEQ ID NO: 433466 - DNA, 608 bp, Homo sapiens
gagtttccagtttatttcctgacacattgaattataatcccttagaatattgtagttactgtaaataatgatttcattttccatacttagaaatgtgtccttcctgacatgaagtacattttatgtattaactactactattactattactgcaaaaaatgaaagaaaaaagcccagacctttttttaaataaaaaaggtaccaaatatttttatacacaatacacagttagaatgtactacatataaataataaatcacaataaccttcctgattcagtctaataaataaatctaatccaggagatatagctaatcagtaataaactgtggaaataaaggggatggagaatgtctttttgtctctgatacktgagaggcaaatccatggtttcaccaggaatatctaaagctctgtctaaatcaatgttcccaggagcatttcttttttagtaagtggcaaagaaaaaagaaatcttcagcaatgatttcagtaaaatgcaaggtgaaatgcaaatggtagacagtgaaacaaactagcaagacgcttagttcccactgctgtggaagctgttcaggccgtgatgagtggaagatccaccatgagag

SEQ ID NO: 433467 - DNA, 601 bp, Homo sapiens
atgcttactgaacgtctactttgcgccagagtcaggtggacaaatttatttgatttaaagaaggctaggaatgaaagaaacaaggggagcyaggaaaaggtggagagttcagagagagacaaaaccacaagcagaaaacaaaggtagattcaatccagagacccatcagaggtcaaaatatcagcctgtcaaaaatcagaagggaagagtaaggccaagcagctcctgcataagaccccaatccaaatggcacaatgaattcaatcgctcatcaatcacagatcattttttggagatagaagaggggttattagacaacaggagagggacaatgagcaaggattttattttttatatattacacacctgtttttcactcacctgtcttttcatgtgaaggctagaaataatgaaaaataactgtgtatgttttaaaattcttaacttttctgattatcacaataacactgaaaggccaactggaaagtcctttctacatccaatgcctgtgccccacctcctttcccccacccagcattgatttgtgctatttaagagcagcttcacggagaattcaggcccatcctatgatcttatgagc

SEQ ID NO: 433468 - DNA, 601 bp, Homo sapiens
atgcttactgaacgtctactttgcgccagagtcaggtggacaaatttatttgatttaaagaaggctaggaatgaaagaaacaaggggagccaggaaaaggtggagagttcagagagagacaaaaccacaagcagaaaacaaaggtagattcaatccagagacccatcagaggtcaaaatatcagcctgtcaaaaatcagaagggaagagtaaggccaagcagctcctgcataagaccccaatccaaatggcacaatgaattcaatygctcatcaatcacagatcattttttggagatagaagaggggttattagacaacaggagagggacaatgagcaaggattttattttttatatattacacacctgtttttcactcacctgtcttttcatgtgaaggctagaaataatgaaaaataactgtgtatgttttaaaattcttaacttttctgattatcacaataacactgaaaggccaactggaaagtcctttctacatccaatgcctgtgccccacctcctttcccccacccagcattgatttgtgctatttaagagcagcttcacggagaattcaggcccatcctatgatcttatgagc

SEQ ID NO: 433469 - DNA, 601 bp, Homo sapiens
atgcttactgaacgtctactttgcgccagagtcaggtggacaaatttatttgatttaaagaaggctaggaatgaaagaaacaaggggagccaggaaaaggtggagagttcagagagagacaaaaccacaagcagaaaacaaaggtagattcaatccagagacccatcagaggtcaaaatatcagcctgtcaaaaatcagaagggaagagtaaggccaagcagctcctgcataagaccccaatccaaatggcacaatgaattcaatcgctcatcaatcacagatcattttttggagayagaagaggggttattagacaacaggagagggacaatgagcaaggattttattttttatatattacacacctgtttttcactcacctgtcttttcatgtgaaggctagaaataatgaaaaataactgtgtatgttttaaaattcttaacttttctgattatcacaataacactgaaaggccaactggaaagtcctttctacatccaatgcctgtgccccacctcctttcccccacccagcattgatttgtgctatttaagagcagcttcacggagaattcaggcccatcctatgatcttatgagc

SEQ ID NO: 433470 - DNA, 595 bp, Homo sapiens
aaagaaataacatgtcacccttgcctccaaggagctgatagtgttatatcagtattaggaggataaaaactctacacaggcactgaggggagttctttttaatggtacctgatcacgaaaggaagcaagattttgccaggagaagcttcccgagggaagtagtaactcagctgcattttaaagccttagaagttattcaggtaaaggggaggttgtgatgagtgtatgacaagagggttgcactgcagacagaaggatgagcatgagccgaggcaaaaawtgggaagtcaagtggaggaatgataagaaatttggtgttgctgaaccacagagctagaagagaggtaagtgacaaggttggtaaaataaacagaggccagagtatgaaagataataaaggtggagggtccagagacttccagcacattaagacagaagtggatgaatagtttgtgccatagggcattcagggtatctctgtggtctccagatggagctatacagcaagcagtggaaaaatatgaattggaaagatgggaagagctctgagcccagagatgaatttggcatcatcggcctagaagctgtatttgaa

SEQ ID NO: 433471 - DNA, 533 bp, Homo sapiens
gttttgtttttaaatgggaggcactgaacagaagaagccagtaaggaaagaaaggttaactacacgagacaatgagttgttcgctgatgggggaaagtgtggaagatgcaggaagggatgagttaactttgaacaagactagggctgcctgattctcagagatcaaagaaagcgacaaaaacttaggtctgtgggaaaatttaggaaaagaatacccgatgatctggatgttcttatatgaccatggacaatatgtgcacttagtacgggtacatattacatactcatatcggttaacacatagatagatggttaactcattcaaacattggattgacccattcaaacaatggaatgaatgagttaacacagatagatgtgttaactcattcattcattcattcttagttttggcaaaaacgatattgcaataattttactgttttacrtagagctactcattaaacaaaatacattaccatatttaaattttggcactagcacagatactacatacatgagaatcaggcaat

SEQ ID NO: 433472 - DNA, 598 bp, Homo sapiens
ttggtagaacttctgaggggaaaggatgttttcatttctcaggtttgctgggtccccagctagtgatttttgaaacaggtttttaaagtttttttttcccmcaactcctattgccccaggaagtgtacatgtcacggaggatggccgacacattcgtttggctgctgaggttggactgttgacccgaaatatacaaattcagcctgacgtatcatgtagggggagactgtttgtggggtccttcaggaagtccagccgagaagaattttcaggtaaatgaaattttaagtaattggccattaccagttggagcctattcatctgggacacccagaaatcccaactgtgagaattttcatttataaaacaaaatgttcaaatgagatagttcctttgtgcttggagaagctatgaattttcagtcctaatctgtgcttaattatcagtgtgatgttaaaataatatactagtggtcagcacatatgcacattttacctcaaagaaaacatcttcagcagatgtgaaatttccactgctttgaaattatagatgatttaatgaccacttcaattttatctctttcctgaatttctgttac

SEQ ID NO: 433473 - DNA, 614 bp, Homo sapiens
ggctacattgtatagcacaaggaacactgggctgagttgagacatctgagttcctatctaggctcatatgactgactactgatatkactaagtttaatatctgggcttcacatccccatttgtaaaatgaggcaactggataggatagcctgcaaggtctccacctttgttaaaacccacaactctatgaagtatgggctttctatttctcagcagttgtaattgacagttgtaatgcaagcatctccagttaaactgaccccttctaaaaagctctgaatgttccttccagagaatccttagtacagaaatcatcatactacatgctgagtgacatgccaccctgactacagatggttgaaccaagaatggccattcatagatggtccagtatccacagaagggggcctggcatgagagcttccccaacaggtgtgtcctctacagaataggcactgacacagcaaatcaaatctctccttggagaatttgaacatagaaactttcaaagaagagaaaactatccttttccttataacagtaatttttaaacaactgtattaattgattacttagtagtttgactgacatccccaagagatcataagacccca

SEQ ID NO: 433474 - DNA, 598 bp, Homo sapiens
ttggtagaacttctgaggggaaaggatgttttcatttctcaggtttgctgggtccccagctagtgatttttgaaacaggtttttaaagtttttttttcccacaactcctattgccccaggaagtgtacatgtcacggaggatggccgacacattcgtttggctgctgaggttggactgttgacccgaaatatacaaattcagcctgacgtatcatgtagggggagactgtttgtggggtccttcaggaagtccagccgagaagaattttcaggtaaatgaaattttaagtaattggccattaccagttggagcctattcatctgggacacccagaaatcccaactgtgagaattttcatttataaaacaaaatgttcaaatgagatagttcctttgtgcttggagaagctatgaattttcagtcctaatctgtgcttaattatcagtgtgatgttaaaataatatactagyggtcagcacatatgcacattttacctcaaagaaaacatcttcagcagatgtgaaatttccactgctttgaaattatagatgatttaatgaccacttcaattttatctctttcctgaatttctgttac

SEQ ID NO: 433475 - DNA, 622 bp, Homo sapiens
agtactgtcattatggcatgttcatgattccaggtgccagtcaacaaggttcaagaaacatgcttttactttctactctttttacagctgtatctaatcatgatgagctgtagtattacagagttgtaagcaacttaaccagatctgctaaagtttgttaagtgtgttgactctacaaagaactgtaaatgtgaagtgtcatttccaatttgaataaatacraagagggatgaaaatcatttgagaatgaaggtattgacttgggaagagtttaaaagccttacacaagctgtgatattgtacatatgttttctcagtgcttatgatttctgattttgtatttgtaatatgagaatggttaatcttccgtgtttataaatggagccccattgtagttgatccttcccagattgtaagaagatctgatgctcaaaaagacaaaaaaaaagtctttgggccaattattgccaactttttctgacgagtgctatgtgatctaaacttgctataaacacagacatctagggtgaagaggaaatgtgctaagaaaatggctcctggtaagagaaaagagagttactaaagtagatgtgatacgaggtcctaccaggttaatgtgttg

SEQ ID NO: 433476 - DNA, 562 bp, Homo sapiens
acaagtaagtattttcttaaccttgctgtgtaaacaaagccactgaggcatggagcaattataatgcaatgccccaggtaaaataaccagccagccactgattaaaaccctaagccccaagcactggccatgagctttccaaaaaaactgcactccgtgaagatgtttgctgagcaaaggcaaaacttgccttggtagaaaagaaaaatgcaagggtcaaaacatattgtatgcgtatgatttttttctttgtcactgggaatccttgagaagggttctcccacaaccctgcctagcacccccgccatcctttctggtcagtgatccacaattatttagtgggcagcacactctagtggagagagccacagccaggagctagaatgcctgggttcaggttttttccactcagctgggtygaagatgagtcaggtatcttaaatcacacatgcagcagccaaacagaggaaatgaagataattgtgatttttctaaaacttcctatcctgggggaagtggtaaaacaatacaaaagatggcccacttagaagtggtcaaccag

SEQ ID NO: 433477 - DNA, 571 bp, Homo sapiens
tcaaacactggcataataggcgtctggtgaaggtttctccctccttccaagatggtgccttgttygtgcatcttccagaggggagaaacgctgtgttctcacataggagaagaaatggaagggcaagagagtactctcttcatcctcaagcccttttataagggtactatcttattcatgagaattgaatcctcatagctttatcacttcccaaaggccacacttcttaatactgtttcattaaggattaagtttcaacatgaaatttgaaaggaccatcattcaaatcatagtactatgtgatattaacagctgaatctttgtgctgataatactcaatacattgttggtatacaataaatatttaatattattactaatggtatttcaaagcattagattaggggaaataaaataagttctctgtaagtcaacattataattatctattaattgtttatatagcccacttgactctaaattctgaaagtgcagtgccatgtttggctttattaccatcatgttacccagcctgtcttttgtaggttttcaatagatatttgttgaatga

SEQ ID NO: 433478 - DNA, 638 bp, Homo sapiens
tatacacttaataatatcttcaaagtcccttgccatattcacataatcaggattagggcataagcatcctagggaggctattattcagcacaccatagttatttgtaagaccttagtsttagttgaaataaaaaaagtaagacattggaatactgatgccatctctgcaagattttttctctttcaagaaagaaattagaccttacttaccacattttagaggtactgtggaagtgtggagaattccatatccactctgtaggataaacatcagtttttgattgaaaaattatgaggaaatgttgacagttcatatggggctggcccaggaagctggagggggatgaagcggtaatgggaacttagagggaacagaggtcagttcatgtggggtataccaagagatgtaaaaggatggataggatggcagaaaagaggtgattaagaccagttcctgcggggccagtatagcctggtttgtctttgacatttttgtcccaagttgaagcaagaaaattttattttaatatgcactttattttaccatatgtattttaagtatgattgtttacaataaactctctttgatgtgtttatttactacacaactgcttcaaaatacggccaggattggcctc

SEQ ID NO: 433479 - DNA, 595 bp, Homo sapiens
aacataataggttgcatggtgagaaatccctttgaaggacaggctgaaacacatctcttccaaaacaggggcaaggtttcaatttctgagcatccacatgactctctgtttgccttggacatgaaaataccaacagcaacagaaaagtttttcaaaacaaggagcaattgttcagtcctgtttaraaaagatccagaggccttattccagatacgtaggttttacatggtcccacactggggatgccaatcatgtcacacagctaggcaccttcaccagcctggggcgagggtccttcccactgcagggacacagagggatcacaggaacccccctttgttttccagcagcctgactcattttgaacagcttctccttattgatggaccgacttgaacatttttattactaaaagctccaaccaagaagatctgagccacatggcataaaggtgcatttgtagtagttcctctctttgacccttttcttcctataccctcacagctaggggttgtcctaacttctttcactgcatgattaaaattttttgctatctagttcaccccttgctgttagcatggtcactgcatcactt

SEQ ID NO: 433480 - DNA, 514 bp, Homo sapiens
tgatgtttaggacatggccatcttagggtcattattcagactaacatacacagtgattccaagatttcaagatatagatagattagatagatggatagatagatagatagtaatagtagagtgcagagattttttcttcctcctctgaaggctccagtctactgaggtgagctgacaataaatagatcaacaggacaaacggcatgcaaatttattaatgtgtgtaagagtgggagccatagagaatatcagattcaaagaagggccagatgattatggcttaaataccttctttataggaaagagtggtatgaggggctataggcagtttagaggagtagtaaatgatttctagggggagtacgtggtctcaaagactagataatwgtttgcaaatcactccctttgaacactgaatgggacctaaggacaaacaatagtctttggacaagttataagaaggtgaggggagaaagtacactgtgaacataggttgtcttattatgcagataca

SEQ ID NO: 433481 - DNA, 526 bp, Homo sapiens
agtctgctggtgtgaggggtggaagatatggtggagccttggaaaactcactgtcaggaaaacacagctatacctcctatgcagacactttgctcaacagcacttaggcacaacttacctgctgtctaacccagaactccatccaaattccattccacttatccacgtctgacacttcttaagtttctataaagatttttctaacactctttctctgctgatcactggctgacaaaattcattctataattcactctgaaattgacagcattgtcctagatggatggcatgcttggatgacagcacctaaatcttacctagagattcaaggtgagaaggtttttgaacccttaaytcatgttcaccttgtaaagaaggatgatcatccttctactgtttatattaaaatgattagacttggtaatctttaaaaccacaacaaaagctggacttctttccaaagaaccagaacgctttacctctgactttgtcttctgctaattcccttcctggtcattctgctcaa

SEQ ID NO: 433482 - DNA, 606 bp, Homo sapiens
ctatcacaaatgctttatttccaaccttaattgagccttcagtactaatcaactcatcttccattcatctctagttaaaattcttttctgttcaaagtttgacctcttgctattcttctacctccatgacttagtcactgatttctcaaacaaatctgaggacacttttaccaaaaccttttaaaaatattcactcttccttacctccctccgacatggttattcttccttttccctaggtatagtttctacacaagtgaccttgtcccagtctactcctccttgaacatcacaagttagtctcgtccatttttttcccatttcttagatgttcaaaattcttcccatcaactgacagatgcataagttttctatataataaacatcacctatcttttttttccacttactgtcaaactctttgaaaagctaagttttcttatgrttttgttttatattagtatttattgtttaatttttctcatgtttttgataaatctcaatccactgacatctagattttgccccaatcactctgtcaacactattctcagtaatgttattagaggcctttattttctgatttaatcattttgacttaattat

SEQ ID NO: 433483 - DNA, 555 bp, Homo sapiens
agagaagaagaagaaaaatgaagaggagtaggaggagaagaggaagaagaggaggaagaagaagaggaaggagaggaggaagaagaagaaatctttaagtccatagtttattaaattggtaggaatcaggacataatttgtatctatgtaacatattcctaggattcatttctatagttattcagcttgaagcagtgttgtgtttacctgacwctcaaaaactgatactcttgacactcagagaaagttattttataggttatgaaaatgatgactgatggctgccttatatccttggtttaaaataataacaacatggatatatgtgaatatctctgaaaaatatattaacaataaatttctacgttttgtagaggctaaaaggtagaaaaaattctttatgtaacagggattctaaatgaaatttttaattccctctcttcccccctttactatcttgtgtctgttgtacatttgaatacgaagagcagaagaaaaatggcacaagcccaaagtgaaattttgaggtaagaaaagtttgcgttgatggtcctt

SEQ ID NO: 433484 - DNA, 617 bp, Homo sapiens
gttctagaggtataaaacccattagactagacagaataattgtattcccattcgtacagactcattgcagagyagaaaatcaaatccttgggaatcagatgaagtatatcatagcattcttaattatttgggatctaaccagaatcattaaaatggtaaaaacaaaattatattttaaaagtacaaaaagaatttagttatgattatcatcagcatgggtttctcatctacacttcaacaatgagattaacactacatgaaacactggtctaatgctttacaagaaagagttaaacgtccctcaaaagcttcagataattacctaagccagaagcaagatgttagactaggcagactaatgatctgatctaggatggtaattcccatggttcctaaggagcacaagcatcaatcatttaataaatacatggtttccagtggactccagagtgggtgaaaaaaaatctcagcagtaagaaaatagtccaaattttcctggtgtatcaatatgtatgtcgcttaaagcaagtctatttctaacataacacatttctaatctttctttcatatgctattatattaattaatgcaagaatcagtgccagagggggaagtcc

SEQ ID NO: 433485 - DNA, 544 bp, Homo sapiens
tattgaatgcagtcattcacaatttatgcatctgcaatctacatatggccctttatgcatgtaagaaactgaaaataatgcttccaacctgtctaagagatactgcagcccaagtaggcccttcctttctgctacaaattgaaaatcctttccccaccctgtcaaggataactttatatatatatcatctctaattctcccatggtaaaaaaaaaaaaagggtaacatgactaatgaaagagggaggtgaaagaggraaaggaggagcagcagaaggaggaggaacaagtggaagaggggtcagtaaatgccaaaactattttccatccattgaatcactgatactccacttccatccctaaactctgtcccattttgtcatctgtccattaacaccttttccctacagtcccatcccaagccaaattcttgtaatgaaatgtctagaaaagtgtgaatctgattctcctctgaaatattttgaattttactttaattctctggaaagccgacgaagtaccattagcttttatatgtgaggttg

SEQ ID NO: 433486 - DNA, 549 bp, Homo sapiens
gagataggggtctactttcattcttttgcttctagatgtccagttttcccagcatcatttattaaagagacactgtcttttccccagagtaagttcatggcacctttgtcgaaaatgagttcactgtaggtagtgaatttgtttctgagttctctcttctgttccattggtctgtgtgtctgtttttatgctrgaaccatgcttttttggttactatagctctctagtataatttgaagtcagataatgtgattccttcagttttttctttttgcttaggatagctttggctattctcagtcttgtgtagttccatataaattttgggatagttttttctatttctgtgaaaaatgtcattggtattctgataggaattgcattgaatatgtagattgctttggccatatggagattttaacaatattgattcttccaacccacaaacatggaatatctttccaatttttgtgtcctcttcaatttctttcattagtgttttatatttttcactggagaaatctttcacttatttacttaagttaattc

SEQ ID NO: 433487 - DNA, 621 bp, Homo sapiens
tctttaattgacagcatttctgttattacaacactgtatatcgtgtgtcacaaaaaacagattatattatacaaaatccataattttcactcaagatgctgagattttgaggcacttggcttgtcaatatcaattctgaagtgcatcacatatactttatcatatttgactaataaagtacttgagtttttaaataatttgccttttattttggccacatgtgtgttaaagcaaattcaagattactcctaatatggcatcactgtttttcacagtccttctgaattgttgtcttcagagagagagaaggagaggaaggtgatcatggagaaatgactattgagtcaataccgtgcayaatcaatgagaaacaaccattgtaaataccatcaattgcgtttaaatgggctcctgtgactacccatttcattcatgaggggatctcccacagtgttcccagccggtatattccaaaagcaagccagatgtggagctgttcttacagcccacccactctgaggaaaagttagacacgggccatgaaagccacctaccccagctgagcagataaaatggtgagacacccaccaggaagttggacagtgatccacataattgctg

SEQ ID NO: 433488 - DNA, 574 bp, Homo sapiens
ttcaggaccacttttcagcatgtgtccttcttgccacaacttccttgctttggcttatatgaccccatagttccattcatttattcgttaaaaatacatgttcctggaattgtgctaagccttagaggtaaaatagtgagagaaaactaacctgctccccaaccacagggarcttgcaattctacaggttttccctctctctggcttctctttctcagcctgcctcatttgtctccacccagcctgtaagtcctggatttcccccaggtccagtccccttctcatttagtctctccatgagggaggatcactgccctagcctgccccaccaatttgcatctaatacaccactgagctgtactccagaatggaatgtattcacttggatatcccacaggtgctgccaattcaagagtcaaagtgaattcatggtgtcactgcctcccccagcaagattccccatcattccctcgctcagcaaacaaatccctctgtagtccaccatgcctgccagaactctccaagtcattctccacacctttctcttccccacactcatgaccagccaacagtc

SEQ ID NO: 433489 - DNA, 482 bp, Homo sapiens
tttttagcttccttgtgatgggttagaacatgctcctttagctcagagaagtttgttattacccaacttctgaagcctacttctgtcaattcatcaaactcattctccctccagttttgttcaattrctgacgaggggttgcattcctttggaggagaagaaacattctggtttttggaattttcagcctttctgctctggtttcttcccaactttgtggttttgtctacctttggcctttgatgttggtggcctatggatggggttttggtgtggctatcctgtttgttgatgttgatgatattcctttctgtttgttagttctccttctaacaggcaggcacctcagctacagatctgttggagtttgctggaggtccacttcagacactgtttgtctgggtatcactagcggaggcagcagaacagcaaatattgctgcctgatccttcccctgtaagcttcatcccagaggggcacca

SEQ ID NO: 433490 - DNA, 482 bp, Homo sapiens
tttttagcttccttgtgatgggttagaacatgctcctttagctcagagaagtttgttattacccaacttctgaagcctacttctgtcaattcatcaaactcattctccctccagttttgttcaattgctgaygaggggttgcattcctttggaggagaagaaacattctggtttttggaattttcagcctttctgctctggtttcttcccaactttgtggttttgtctacctttggcctttgatgttggtggcctatggatggggttttggtgtggctatcctgtttgttgatgttgatgatattcctttctgtttgttagttctccttctaacaggcaggcacctcagctacagatctgttggagtttgctggaggtccacttcagacactgtttgtctgggtatcactagcggaggcagcagaacagcaaatattgctgcctgatccttcccctgtaagcttcatcccagaggggcacca

SEQ ID NO: 433491 - DNA, 630 bp, Homo sapiens
caaacatgtatatatacacacatgttcctaccccctccacacacttctcttatttctatacttggaaaatgtattataaaactgaatttatgtggatacttttgtctattggtcaaagccactacccaatgaccacacgttataacaccsccatcacctcaaggattctcatagttttctctctagtttcgtcagggttgaccttggggttgggaccagcagctcacttgtccaggactgtaatattctgattatcgttttgatattaatttatagctaaactgaaatgtagttagaaactatatgttgcatggtttcaaccattttttgggaaaattttttggtgtattttaaaataatatgttttctataatttttggttttagcattttttgaacattattaggtcaagtttgctgattatgttttcaaatattccatatctctactgactttttatgtattcactttttcagttactgagagctttgttgaaaatataatgattttggatttgtctatttttctttcagtttggttaacttttgttttatattagatgcctacaaatttagaattttataacttcctcttgaatctaaccttctattatcattaaatttctatctt

SEQ ID NO: 433492 - DNA, 575 bp, Homo sapiens
gtggtggtaacaatgacattttgatggaaaagtagtagtttcattaatgtgtatatttcattttcctttaaagcgaactcctcaataatattggtgttgggaagtaggatctgtcttattgagtgccttaggaaactcaaggaataaaatggagagaaggtgagggtgatatgatttgaccagtagtttactcaaatttctgccattctaygaaatacagtgaattgttgccaatgccctttcagcctgaccacacggaaacatcttttctttcttccttccttccttcttttaatataatgccaaagttatgtcatattaaataaatatatgcagaggtaaataaacaaatatcagctatcaggaaaactggttgcatcccagaaatacgtcttaagcaataggtcgtaaacaatgttataacaaagctgaccaatcaacagaggttccatctcagattcggcagaaccagagaacattcttggcctcagtggcaagtttcatgcgcgtccatgtgaagagaccaccaaacagactttgtgtgagcaataaagcttttaatcacctgggtgcag

SEQ ID NO: 433493 - DNA, 568 bp, Homo sapiens
tttttcttggtagcctggccaatttcctcatttggtacacagcttacaaatatttagggtaacaacatgtccaggttyacctaaaacagtcatggtttactcattttgtgttggggtgatgattaatagtgtcttcttttaccatcaaaagtgtcctgcttagaaaataagttatatgatcacctactctattactcgtccaatgagtatttttatgatacattcataccattttaaagaatatatgtaacctagcaggtgttagtttaaaacaactcaccagcactagctaatctgattcataatcaccatcatcataaaagctaatctgaataacttttccaaaatagttatgacttctgtccttcaaaccacacttttacccatttcctctcataagccacaagccacacttgtgacttgtgtataccagagggattatatctgcggtcagagatagaagtaaattatttgcatagggtccttactctatatctttaccgactttacaggtcaaccttactttgacccattgcccaactcagaaatataattctataagacaaac

SEQ ID NO: 433494 - DNA, 568 bp, Homo sapiens
tgacttgtgtataccagagggattatatctgcggtcagagatagaagtaaattatttgcatagggtccttactctatatctttaccgactttacaggtcaaccttactttgacccattgcccaactcagaaatataattctataagacaaacagcactccaataacttttcagacaaattccttctaaaccatgaccagttctatattaatttgtacatcctattttgtctttgctatccactcttcaactctctcctaaaccactgacgttttttcaactttgattcccaaagagacgattttgaaacatagtttcattggtttcccaaagcacataaaaataatagatctgattaggtgaatycatatttcacaaatacaatgtgtagagtctcatcattgaatatgttaaacacaaaatgatatctgttccaggaaagtttctggccataaagaccacaaactgccttccctttgtctcgattatgtttttccttcattgtactgttctgttatactcttctcagctctttggggcagggagtcagggagttgtttgttcagcag

SEQ ID NO: 433495 - DNA, 605 bp, Homo sapiens
tagaatgcagaaaaacatgatgtttttggtaatcaatccccgaaatcatctccattttctcttcctaattaaatccccaaattttgggtttataggttaaataattaggaagttcttttcctagttcttctctctgccctcccagcttaatatgtcagagcagatgtgtagtcagaagcatgggcttgggaatcagtcatgagttggaaatagaacctatcacttaccagctgtgcgaccttggacttcttacctcagttgtctcatatgctctagaggatarcagagctcatctgaaaggggcattgtggcgattaaatgagatagactgtgtgtatacatctctagcacctggaacagagtaacccaaaataaggcaacaaatctttgtaggtgttcccatgtctctaccattatacatgtcctaactcatctattatcatctgtccaaatgcctgtcctcatcactacatagtagcaacttaaggccaggcacaacacttctttatccatgtagctccagagtctagcctagcagatactagccattcaatacattttttctgaatcaataaaccaatgggtgaatttggtagttttggagc

SEQ ID NO: 433496 - DNA, 483 bp, Homo sapiens
tagattgtgttagtagcaaaacagttgcccatgacattttcagatggaatggaagaagtgatacagctgtgagaaaacacagtgcttactgtgctaaatttatttcatgaacttccagtattaaaaaatactggcaggcagagattttaaaaatgacactgtgcccttcctaaactctggartcacattacttagtatttgtggtaatttccaatcaggacagtcattgtcatcactgtagatattcagacaggtgacaaatgatggtgatatcagattggaacaggaaacagccatggagcatttcccagtgtatctatagggagctgctctatcagcagattcctgattaaggttgggtcgagggcacaacccccctgtgtccgtgtagtcatctcatatgtctttgatttgaggacctttgaagtaaaagctttggtctagcaatgttggcattacaacaatattctgatggaggacagg

SEQ ID NO: 433497 - DNA, 483 bp, Homo sapiens
tagattgtgttagtagcaaaacagttgcccatgacattttcagatggaatggaagaagtgatacagctgtgagaaaacacagtgcttactgtgctaaatttatttcatgaacttccagtattaaaaaatactggcaggcagagattttaaaaatgacactgtgcccttcctaaactctggaatcacattwcttagtatttgtggtaatttccaatcaggacagtcattgtcatcactgtagatattcagacaggtgacaaatgatggtgatatcagattggaacaggaaacagccatggagcatttcccagtgtatctatagggagctgctctatcagcagattcctgattaaggttgggtcgagggcacaacccccctgtgtccgtgtagtcatctcatatgtctttgatttgaggacctttgaagtaaaagctttggtctagcaatgttggcattacaacaatattctgatggaggacagg

SEQ ID NO: 433498 - DNA, 573 bp, Homo sapiens
gaagtagagcaaataacattacaatttttatggtattcataaagtatattttataagcatgtgagtaatgaatcagcccttttggaggtctcaaaacttgtcctacaaagaaaatatggcttatccaatttcgaaaaaatgattgaacttatagaaagggacttgatgcttccagactgtcactccttaartaatattaatcagctagaaagtatgtgctgttaaataatgaacacaaataaaatctatttcatacaaaaattacaacatgcagatttattgattttcaacatactcttattactgtgaataatattactgctgatttcatttgataatcactttgcctacctttgattttgaaatgagagttgggacgtgctaagcagcacgctggtagcatccttcttacctacgtgcactgaagccctggatgcacctatcaatcatgcttctttacctactggtgcgccttacttaagtcaactaagaaataaagcaaaattaactataaaatcacaactcggaagcactatgaaatgcatcattcccaaagaaatttttaaatggaat

SEQ ID NO: 433499 - DNA, 606 bp, Homo sapiens
tttcaaaaactttagaattgtttctaaagttcccaaaaagaggcttccagttagaacggaataagtgggaccagaccagtccttctactgtaaacaattataagactggagaaaaaatatgaagctactgctttcagacagtggaaaacagcacaaaaaaaaactcacaaggtgagccctacgattacccagctctctgtctaggaacattttcagaccttgaacagagacctagagtcaagtaaaacagagcgggaagaaatcagaatttaggacactgcagagtagggaactgtgcagagagggtctcccagaaatccacaagggagtgtccagtgagcagagaggctgcacatacctatatcaagaccacctaagccttacgcagcagctgctatggagttgagaaaacagagatactagacagtgtaccgtgctaggggaaaaaaacaatgctgaggactctcaagttttagggctgccagaatttaaagatctcattactaatggcattcagctgatgtaccaaaaggttcgcccttaaaaataaggartaagtatataactaaaataagacctactacagatctctcctaaaaagccaca

SEQ ID NO: 433500 - DNA, 579 bp, Homo sapiens
cttctttacaaggcagcaggaaggagaagaatcagcactcagtgaagggggaagccccttataaaaccatcagatctggtgagaactaactcactatcacaagaacagaatgggggaaaccgcccccatgattcaattatctccaactggtccctcccacagtgcatggggattatgggaackacaattcaagatgagatttgggtggggacaaagccaaaccatatcattccacccgtgaccactcccaaatctcatgtcctcatatctcaaaacacaatcatgcccttccaaccatcccgcaaagttgtaactcattccagcattaacacaaaagtccaagtccaaagtttcatttgagacaaggcaagtcttttccacctaagaggccataaaatcaaaagcaagttagttacttcctagatacaatgggaacacagccattgggtaaatacatctgttctaaatgggagaagttggccaaaaagaaggggctacaggccctgtgcaagtccaaaatccaacatggcagtcattaaacattaaagttccaaaatgatctcctttgactgaatgtct

SEQ ID NO: 433501 - DNA, 579 bp, Homo sapiens
cttctttacaaggcagcaggaaggagaagaatcagcactcagtgaagggggaagccccttataaaaccatcagatctggtgagaactaactcactatcacaagaacagaatgggggaaaccgcccccatgattcaattatctccaactggtccctcccacagtgcatggggattatgggaactacaattcaagatgagatttgggtggggacaaagccaaaccatatcattccacccgtgaccactcccaaatctcatgtcctcatatctcaaaacacaatcatgcccttccaaccatcccgcaaagttgtaactcattccagcattaacacaaaagtccaagtccaaagtttcatttgagacaaggcaagtcttttccacctaagaggccataaaatcaaaagcaagttagttacttcctagatacaatgggaacacagccattgggtaaatacatctgttctaaatgggagaagttggccaaaaagaaggggctacaggccctgygcaagtccaaaatccaacatggcagtcattaaacattaaagttccaaaatgatctcctttgactgaatgtct

SEQ ID NO: 433502 - DNA, 552 bp, Homo sapiens
tatataacttatgaacaatatttatcctcaaacttcagagatggcataacataaaaaaatccatattagcaaattacagaaaaaataaaaaaatctaattgtcattctttaacagatatagaaaaagtaattaatacatctcaacatacctaatttttaaaatttttcttcaacttttattttagcttcaagggcacatgttcaggtttatacatgtgtaaattgcatgtcactgggatttggtatataaatgatttcatcacccaggtagtaaacaaagtagtttactaccaataggtagttttttgaatctcatactgctctcaccctccccacacaagtagaccctggtgtctattgtaccctgttttgtatccatgcgtactcaatgtttaggtcccacttatatgtgagaacatgtggtatttgatcttctgttcctgtgttagtttccttaggataatgrcctccagcttcacccatgttgctgcaaaggacactatttcatttttttggggtgtgtagtatttcattatgtatatgtatcacatt

SEQ ID NO: 433503 - DNA, 307 bp, Homo sapiens
tattataattattattgtcattataagtaatctatattgagccttactgcattaagccaaatactgtgctaaatgcctcatttgcattatgttttcaattttttcaaggaccacctcagttgaattccattattgtgtgccaggcacttgctaaagtgtttcactaattatatttctttcatttatttttccaacaatccaaggatttggctactattattctcattttcacgtcaggacacagaagttttgtaaacttaaatraatttcccaaagtgccaaactcctcagtggtaggacccaggat

SEQ ID NO: 433504 - DNA, 567 bp, Homo sapiens
tatggccagggatccagggatacccatctcccaaggcctgccatgctcctttaggtggctttggcctttgttagtggtaggacctagatagagcagggctgtcttgcctatgggacagggtcagtgtgttctgagcacccgtctctctgctgggcactcctagagtccctccctgcccatgcatgtttgcagtacagcctcaaatgaccaactggggtgcttcctcgtggccaccatagttctgttaatggcaaactctgcctaactatcagagcgcttcagcagatgagcccctgccaccatgcacccacactcagcttcccctcatggctttgccagtgtgcactcacccagtgtctccccttagcacatttccagcatggacctctctaccctgctgccactggcgcatgcacttgtgcacaaacctcaccaccacagcaccagccctgccaccatgtgcacatgagtgagtgtagacccattgccaccacctcaatatagtgcttttgccagcascccccatcagattgttgttgccaacagaccaggaatgcctcagcccct

SEQ ID NO: 433505 - DNA, 591 bp, Homo sapiens
tgggcattgtttcagaggcccagaagatgaagaggaacaggtgaagcagaaactttgatgctgtcttcaattgactgaattaaactgtagaggaaagacttctacttacagtacatcaaatctgctgttttagaccaagtttattattgacataagatgtcaataataaactttaactttataattttgaggctttaacaaggggaactaaacattgataataaattttatcttataacaattttmaaatagtgcatagaataagataactgaaatagaatcaaaagacaaatgaaaaaccagcaagaaaacgcagcacttgcaggaaacaaatagataatttcccaatttaaaaagaacacctacatcagaaaaataaaaaggcaaacaacttaatgttttttaaatgggcaaagggtgtgatcgggtcacttaataacaaaaaagaaatagaaggaactttgtgtttaaaactccctcttaatttaaaaaatccatatccacatgagacataattttgaattatctgaaaggctaaaactaaaacaaataaaaacccagtattgttgacagttgaaaaagcaaagcact

SEQ ID NO: 433506 - DNA, 497 bp, Homo sapiens
tgcagcaacataaaactagtaccaaaggatttctgaaagatattagaatgcaccagtcacctatgaatcagttatgtaatactgtggtctcatcagcaagcccttcatactgactgacttatttgaacaccctgagattgcatagcaccaggaattagctagtatctgggctagcattttggcaaaccttccactgaaagataagaagttcattagtaaactgatcagtgctttatggaggattgtgtggaggactctgaagaatgaggcagcactctgttcagtgatgttactgtgcttctcctcattgatgctcctattccttgcctatacaygctctggaaaaaaaaaaaagtgaaccaaccactccatatcagccctctatttttgtctctgtcatctttcttgttttcatttccacccactccaactcttccctctaattttgaatttccctaaactaggtaagtattaaaatgggtataatcagagtttca

SEQ ID NO: 433507 - DNA, 615 bp, Homo sapiens
aacaaactaacatgccaaaaggaacctaatgaaaacattatgccttcactttgttctctgctttttaactttctgttttttctatttataccttatcgaactccctatgtcttgaaaagttgttgtagttattatttttaattggctcactgtttagtctttctacataggattagagtagtttgcacaccacagttacagtgttatacttttctgcattttttttttattacttactattgccagtgagttttgtaccttcaggtgattacttactgctacttaatgtactttctttctgactgtatttccttgaccatttcttgtaggacaggtctggtattgatgaaatccctcagcttttgtttktctaggaaggtctttatttgtccttcatgtttgaaggatagttttgccagatatactatcctagggtgaaagtttttttcttcagcactttaaatatgtcataccactctttcctggcctgtaaagtttctactggaaagtctgctgccagacatattcaagctcaattgtatgttctttctttcttttctcttgctgcttttaggatcctttatttatacttgagctttgaaagtttgattgttg

SEQ ID NO: 433508 - DNA, 590 bp, Homo sapiens
acacctcaggcatattgttgccacatgcatcagagtatggcccaaaaaatggccacaggaacagagcccatgtaacatgctctttttacaatgttacatgatactcttccataaagagttgaagcctgtttcctcctcttgaatctggtcatgccagtgattacaatggagtaactkcatgacttcttaggctagggcataattggtgatgcagctccttgtctggctatctctcagaacatatgctttttgaaccttaagacaccatggaagaattctggctacaccgaaggcactataccgaagaaactacgtgaaaataaagagaagtatctaaggtaccacaaatattccaatccccagttgtttgagtcctcccatcccaggcaccaaaggttttagattacccctgcttttgctaccatctcactgcaacttaatgagatcctgtgagagagagtaaattgttgttgattcaagccaccaaatttgacaatgattttttttttttttacacagcattagataaacagaacacaatgtctccttctagaatctctacttgttccattggtcaatttgtttattac

SEQ ID NO: 433509 - DNA, 544 bp, Homo sapiens
cttttttacataccgccaactttatcagtacaatgtatgacattgatcagccctctcccagctaatcttcaatgacacctcaggcatattgttgccacatgcatcagagtatggcccaaaaaatggccacaggaacagagcccatgtaacatgctctttttacaatgttacatgatactcttccataaagagttgaagcctgtttcctcctcttgaatctggtcatgccagtgattacaatggagtaacttcatgacttcttaggctagggcataattggtgatgcagctccttgtctggctatctctcagaacatatgctttttgaaccttaagacaccatggaagaattctggctacaccgaaggcactataccgaagaaactacgtgaaaataaagagaagtatctaaggtaycacaaatattccaatccccagttgtttgagtcctcccatcccaggcaccaaaggttttagattacccctgcttttgctaccatctcactgcaacttaatgagatcctgtgagagagagtaaattgttg

SEQ ID NO: 433510 - DNA, 576 bp, Homo sapiens
cattcacgtatataaattcaaagaactgttgaagaaatccacactatacaaaatgaaaacataagcaaaatctgtatatttgtgcattatttttcttggtataccattgcttcttctccattgtatattttaaagcaaaaccattattacaaaacctttagttaaagacaacggagaacagagaggtcacgtcatttgtttaaaggcacacagctaccgacagagctgggatrccaactcaggtcggtttgattctcaaaccccactgtaccacagttgctctctgaatctcaaagaatccattttgttcttgacaggaaatgaaggaaggaaaaaaaagaagaaagaaaataaacaaaggaaaggaagaggaagggagaaagaaaaatgaaataaaggaacgaaagggataagagagggagaggaaggattagtgtgggattagtattctacaggattagaattagcattaaattagtattctccatgtggaaatataatggagataatagtatttgagaagtctgtgtgcagagttatagttactgttatatctgctgtaaagaatgtaaaggt

SEQ ID NO: 433511 - DNA, 523 bp, Homo sapiens
tttatatgaatattgcattaacaatgattctcatcgttccctctcaatgcagtgctcacccatcactctccatttgtaagaagacacagtcattattatgaaagataaatgactttacttagtagtcttaacccatactttggagcagttgattctcataagttttatctgataaactcttcctcttttggatgcttcatgtgctatgataagcattccacttactgaatatttcattgtctccatatgaatcaacttactccctctgactttcagtgctgagcgtatttagcagaactctgtatgtccttgtaatattagtatgttagataagaaacaagactatacaaatatctgaaaaagccagtatagataaggcacagatatcytaatcagaaaatagaatataaatcattgtaaggtaaaagaaaatgtagaatatcaccatacaatattttatttaaccttagttaaagaaatagaagtactatagaaaaaaaagtgcagaaactcaaaacgtggt

SEQ ID NO: 433512 - DNA, 545 bp, Homo sapiens
aaaacagaatatttaaataaaccttttcatcattatttttggaaactctggaatcaaaaatattgcttcaagcttgtttcattcaaaatgtgttaaattcaaagggaaatgtgtgagatagcaagatggggctaagacacgctaaaggagtaggcactggtttttcttcagttcacagagagtaataccagttaccataacttgaataaaaatagcactgtaattaataaaaagaaacgtttctcttggaacctagaatckactatggtttccatcttatgagtgtttgctttgtcagattctaaaacaaaatgtgttacaaaagcagcagtaaagacaaatcaagtgtctacatttaagagctaaacaaaaatttcacatttgtatagtgctttacagtttttaaaagcaattccaaaattattcgtcatcttattggagccttatgataaccatgtgagacagataacatgggtcattttttttttgtaggcagcgtaagtatctttattttccagacagtgttactgaggtccagagacact

SEQ ID NO: 433513 - DNA, 558 bp, Homo sapiens
aagacttgaaagtcaaaattactccttgattcttgggctgcagaatggaagttgtgttagcaggcatgaaaacaacattagtttccttgtacatctccatcagagctctcggttcactaggtatattgccaaaaagcagtaatattttggaagaagtctttttttctgaacagtaggtctcaagagtgggcttaaaatattcagtattcggtgctacaaacagatgggctgttttcaggctttgttgctccattttcagagcacaggcagagtagatttagcataattcttaatggtcctgggattcagaatggtggatsagcattgggttcaacttaaagtcaccaggcacattagcccctaacaagagggtcagcctgtcctttgaagctttgaagccaggcattggccttttcctttccagctatgaaagtcatagatgggatcttctttcagtacaaggcagcttcatctacgtcttcatctgttgtttagtgtagccaccatcaacaattatcttaggtatattttctgtataatttgttgcagcacttactg

SEQ ID NO: 433514 - DNA, 550 bp, Homo sapiens
ttttacataccttctgaagtaaatgacaccctccacattcaaatcaaaagagacagagaagtggcttaaaattcatattaatagttggattcaaaatttaaacattattataaacatagaactgcaacagctgttggcttaaatttgtgtgtagatccacacagtcaactgctctgtgacaaaggagcaatgataattccaggaagaaaaagcaatcctcaacaaatggtgctggaacaactggatattcatatgcaaaaaagattctatacacagatcttaaacatttcaaaaataattaatttaaaatgaatcataaacctaaatttaaagctaaaaactataaaactaatagaagatacyatgggagaaagtctaggtgaccttaggtttggtgatgactttctagatgcaacaccagaagcacaatacatgaaagaaaatattgattaggtgtactttattaaaaataaaaacttctgctctgtgaaagacactgttgggagaatgaaaatacaagccacagattggaagaaaatctttgcaaaat

SEQ ID NO: 433515 - DNA, 606 bp, Homo sapiens
tatactttactcaattgttaaaagctataaatagctcaaaagaaaagtcttcttggctttgaaaaacaaaggatttgcaactttttaaggaaaaaaatcacaaaaggattatttaattcttctagaacatttactccatgcagttcactcctgttctgattgatattcatgaacatttcagctctccatgatagtcctgaaagcttttcttctattttaatgtcacaatctccaaagttatcagaaacctgcatttaagcctacagctgattataaaattaaaacaaaacaattgtctgtggataacaaaatrtctaagggcagccacagtcaaagacacaattgacaaggaaatttgttatttctgtggcacataataatcttatataacaataattattactgataacatatactaagtcatatcagaattataggagttttgcataactttaggacacataccaataatacatttatacaaatacaggtgaaagaaatccaggtattacctttgcattagtgtactattgatgtcaaacccatttgttaataaaacctcatagagaaatctatacacttttattcagtctgaccataagttaa

SEQ ID NO: 433516 - DNA, 365 bp, Homo sapiens
gcaggttctagggcctaataagcaggcaggcacatctggaaggcaaaacagatccctgaaaattaagggtcccatttttataccagatcctggattccatataaggaaggaatcagtccatctcccatgggagtcttacctctcagtggggagtgaggagatcgccatatcttctatgtgggcaagagcatgcgtctctgatccaaacgtgtaaagagatgcatatcccaccttaactgcaagtagtcayccctaaaagtatatttcctacctagtgattatacactaaagcgctctcataacgtgaagtaatttctgatatccacaaaagtcataaacatcagataatgcaatgcaaaacagaa

SEQ ID NO: 433517 - DNA, 600 bp, Homo sapiens
ttcccaaaccttaattcttgacttctgtgtacccacagactcaataccacatggaagctgccaagacttggggcttgcaccctctgaagctatggcttgagctgtaccttggccccttttagccaatagtcatggctggaggggctaggatgcagggcaccaactccctagactgcacacagcaagggagccctgagtckggctcagaaaaccattttttcctcccaggcctctggacctgagaaggcctcacaatcaaggcaaaagacaaaggaggagcaaagtcacatcttacatggcagcaggcaggagagcctgtgcaggggaactcctgttcataaaaccagcagactgatgggaggggcttctgtgaaggtctctaacatggcctggagacattttccccattcccttggttattaacattcggctacttgttacttatgcaaatttctgcagcgggcttaaattttgtcccagaaaatgtgttttcttttctactgtatggtcaggctgcaaatttttcaaacttttatgctctactacctcttgaacactttgccatttataatttcctcccccagatatcctaaatcaact

SEQ ID NO: 433518 - DNA, 600 bp, Homo sapiens
ttcccaaaccttaattcttgacttctgtgtacccacagactcaataccacatggaagctgccaagacttggggcttgcaccctctgaagctatggcttgagctgtaccttggccccttttagccaatagtcatggctggaggggctaggatgcagggcaccaactccctagactgcacacagcaagggagccctgagtctggctcagaaaaccattttttcctccyaggcctctggacctgagaaggcctcacaatcaaggcaaaagacaaaggaggagcaaagtcacatcttacatggcagcaggcaggagagcctgtgcaggggaactcctgttcataaaaccagcagactgatgggaggggcttctgtgaaggtctctaacatggcctggagacattttccccattcccttggttattaacattcggctacttgttacttatgcaaatttctgcagcgggcttaaattttgtcccagaaaatgtgttttcttttctactgtatggtcaggctgcaaatttttcaaacttttatgctctactacctcttgaacactttgccatttataatttcctcccccagatatcctaaatcaact

SEQ ID NO: 433519 - DNA, 606 bp, Homo sapiens
tagttctgcccttctaaggaactctgacttatacagattttggtaccaggagtggttctagtggaacagaataatacagatggagttctttcattggtttttgggtttctggagttggctgctcaatatgattagaccccaaaatgctaaggactctacttttaatagtatgaagaacactgacagtcattggtatgaactgcttagaaagttatgcaaaataaatgcatttgtcactcctgattcatcactcatgagaggcaaggagtttagtgattctgtacataatatctttgaccatatgtggagaaccaaggaacataatgaagctggttggktgctcctaagtttagtggacaaagtgatgaaagaaaatgatgaaatcagtgattctgtctcctggcttcagaagcaggtactgagccatttaatgttgcagctcagggagttaaaaaaggttcaaatagctcgtttacttggttagctgagataaaattaaaagatggcccactgtgagtgagctggaaatgcctgatctccctctgttaaatataaaggaaaggatccaaaggcttagggagattggaatggtggagtggattagtc

SEQ ID NO: 433520 - DNA, 628 bp, Homo sapiens
ccaacactatcatagagctatttttctctctaaattttcaataatgtgggttattaaacgaggttttcaggaatggtggtgaaacatgttgatttttagtgtggtgaggtttttttaatcatctgcttgttacattattattatttttgatgacacttcagaaagtgtccattaattgcttgttggggatttgaaaataatactagctaccagttatgtttctaggtgtagttagggaggtactctatggagaaaacaactgtgttagaatacttttgcttacaagtcacagagaccggyctgaagttggcttaagtgattaataatgatgatgatgatggtaatgctgatgataataatccattttaaagaattttgactcataaactgaaatgtcagagtatctaggaacaagaaggaataaatccagcagcttaaaccttttcatcaagacatgatttttctaatctcttggctcagctttttatctgtacttgctttacatgctttgcattgttgtgtcttttgtctatgcaggcagactccccccatgtcatgacaacagccccagtggtatatcaataagctagcaaccctaacataaagaagtggctcaataaaaatacta

SEQ ID NO: 433521 - DNA, 574 bp, Homo sapiens
aagtcaatacagcatatttagctttccatgagccatttcacgaagtcttccctgatgtctttgtagaaaagagtgagcaatgggggcttgatggaggtatgacagactggttttgtaaccagttgaaagatggtccccaggagtgctaattaatggatcaatgccaaccttgaggacaggggctggatatagcctgtaggctctattgtttgtcctgccctgttcaacatttctatcaatgtcttgaatgaagagtgagagctcatgatcatcaaatatgtaggtgacatgacggtaggaatattttgaatgacagaagcagaattcaaagtcatttgaacagcctggagaaatgaactttgtctaaagtgggaaaatgtagtaatataaaaggaaatccctggaaayagaagctacaatcaattacaaagaatatatatgattacaaatatgtttatgcacgtaggtgtttttgtgtgtgtgtgctgtgtgtgtgtgcctaggtaataacattttggagttttagttgatagtaagaatgaaatattagaataaggtaagatggccacttaac

SEQ ID NO: 433522 - DNA, 587 bp, Homo sapiens
ttgtcataatgtatttttttaaaattcattattgaatgacrtttattaacatttcattttgaagttttacatgttcatgagtttttttttctcacatattcttattgcctagtgttggttttgaggttatgtaatctttaaaaataaacaagttgagaagtgacttccccatttattttactctttgaaagatattgtaagattggaattatttgtttcttagatattttatgtaactttcttgtaaacttatctggtctgttgttttgtttgtgagaatatattaaaatattgtttcaatatcattaatgtttataaggatcattcagattttgtacctctttttgagtcaggactagtaaactatctttttgaggacgagattcctataagtgctttttcaatgtatcagaaactttttattatacacattgccttttatttctattaattattattaaaattgtaggtatgcccccttcttttcttaaccttgctctctatgccttctctctcttttcctctcttctctctctttctcttacacacacacacatacacacgcacacaaacatacttttgtctcc

SEQ ID NO: 433523 - DNA, 433 bp, Homo sapiens
gagagagggcaattgtagcaggagaaagagatgggctcaaatagctgtgagatagcagtgaacaattatttctgtctgggttaaagcctggattagtgtataggagacctcccatgtatagaattctagagtgaaatccccaaaactgcrtcctcaaatgagtttttggtatttggcagaccaccagcttcacagcatatctctggcaacactgtggcttttgagttagccacgggggtttcattcactctcaaagtagaacaagcttattggctatgtgccagaaagtgcaaaaccagatgatatgcatggcataaatttctcaattattagttctgctcatagcaagtaatttaaaaccttattttgatattaaagcaaacatggacaggctgtggtataaaatagggaatttgcatggattttgagatat

SEQ ID NO: 433524 - DNA, 598 bp, Homo sapiens
cataccaaacatttttcttagggtgaaggggggcacaatgatgtaagaaacaagtccctactctcagaaactaacattcaaggttgcactgtatttataaagttcctcacatacagcaatttaacataattacacttaaagcattattagttgatatttatttatttgtttattttgcaaacatttatgggacatttttcatgttttgctaagtactgtaccaggcaacagtgatccacaggtgaatatttcaaacctgctttctgccctaaaacagctggaattctaataaggatgactgtcaattaagaaattcattccagtaggatgtaatgtgttttatgcaagggaagtggaatttgctagggatgatttggcaagagagtttcatctgcattgggctacataaaagttcactcagaggaattatakttaagctgaacagataggagttggtcagatagaaagaatagaaaactgtttcagctggagggatagtatcagagaggctgagaagtgagcggaagcaggacttattctagtgcgtaaaagaaactgataatggttagtatacaccagaaggagcagaatgtgaaaa

SEQ ID NO: 433525 - DNA, 586 bp, Homo sapiens
cagagggaatggcaaggataggtgtgctttagaatgtcagtctaactacttaatacttaataacacgcacacacatatgcctatgtgtatggataaacatacttgcacaaacacctagaaagaaaaccgcatcttcatatataggctgataaagccacaaaccacagacacataaactggcatatatgtatgcaaaacactcatgtgaatgtacttgcttgtaaacacacagatacaaacttgcatttggatagacatayacaggaagcacacatccataaacaaatgcatttgtacatacgtgggtaaacacagacacacagacattgggaaacaaaagctcacgtaccatgcatgcagattcaagaactcatataaacacaggcaaatacagatacaaatacatgtgaaaggacatttgacaaatacccctccacacactcttttctcagtagcaatcttgaagaggaagggagaaaggacaaagagcatttatgcattggagtttctatctgtcatcactcaaataactttctagtgggtaaaacaaaagaggggaaaaatcaatttctgatagaagttcaag

SEQ ID NO: 433526 - DNA, 586 bp, Homo sapiens
cagagggaatggcaaggataggtgtgctttagaatgtcagtctaactacttaatacttaataacacgcacacacatatgcctatgtgtatggataaacatacttgcacaaacacctagaaagaaaaccgcatcttcatatataggctgataaagccacaaaccacagacacataaactggcatatatgtatgcaaaacactcatgtgaatgtacttgcttgtaaacacacagatacaaacttgcatttggatagacatatacaggaagcacacatcsataaacaaatgcatttgtacatacgtgggtaaacacagacacacagacattgggaaacaaaagctcacgtaccatgcatgcagattcaagaactcatataaacacaggcaaatacagatacaaatacatgtgaaaggacatttgacaaatacccctccacacactcttttctcagtagcaatcttgaagaggaagggagaaaggacaaagagcatttatgcattggagtttctatctgtcatcactcaaataactttctagtgggtaaaacaaaagaggggaaaaatcaatttctgatagaagttcaag

SEQ ID NO: 433527 - DNA, 625 bp, Homo sapiens
ttttttctctgtaatttattacctttgcagtaatatataattcaattattaatgtgttattgctagtctctcctactagcatttaagagtgctgttttgttgacttgtgggtctccaatacttagaaaaatgcttaaaaccaagttgaccgtcaataaacttttgggaattgaatgaacgataaatgaatgaataaataaataaacaaataaggttaatttgatgtggtttgggctcttagcaagaacaatctgaattaaaggactagtctgccaatgtacaaataattcatcaatcttcttaagtatcttcactaaaacccaatttccctgtcattattcaagcatagcatatgcagtgaaattcaaactactatgcattagtacaatcctatcatattgtatctaatgtctacaggttaaatatatttgggaaacagtttagtgaccacaggaagatgcctcctctcaaggtactattttatttgaggattcagattacagaaaagggamtctcttaacgaccattattaacacaatctaggtttttgccatgcctaatttttcctcaaataaccccaaatgtagagttctagaaagctttttgttaaatatcttcttatgtt

SEQ ID NO: 433528 - DNA, 601 bp, Homo sapiens
aaatggtggggataactgtaacacttggatttttaataaaaaagaaatgttagcaaagagatgaaaccacatgagcagaagagttaaagcttgtatgatatctagaggttttcagatagcttgtagtggagaattaagtataattacaaaatactttgtcagtcagtacctgtcatttggtgccctaaaaagtatgtttccttgtttattataaagaataaaaattaaacccawctaagtagacacccccatcttaattttgcaaagatatacaagaggtggatttaggtattatcccatttaacatgccaggggattgaagctgagatttgccaatttactgaaggactcagagttgtctaacagcagatccaagacccaaatcttcacacttgactccaatcttctaaccactttttttccacctgtctttattgctcaaaactttcctattaatatttaaatatataggatgataggtgtggcaaatgtacaaatgtcctttgcaagcacaatagtggaaaaagacatagtatgttttaatttcatacataaagagctgaaagcagtcaacgatatcattctgttgagtcattaaagc

SEQ ID NO: 433529 - DNA, 544 bp, Homo sapiens
cttctctcttccctcctgggaagaggtcaggtctgctgcttggaaaccattctccaacctcttagctattctccacccactaaagctgtttatcagcttcggtcagaaaatcaaatttttttctacccatatttttctctaattactttctccagtcctcttatagactcccagaatactgaattaatcttatcaaaaatcattccaggaatagctgaaggagttgtgggtgttagcacatgctaaaacaactcgaactcttcaatttccccaaaaawggaagagaatttgctctgtgaaacccatggaagacagagccaggaactgtagattttatttttttaagtaaaatataatttcagattaagacaggacatttcactttaagctgccctaaataagtataggctgacgatcatgagtgagctccaggtctcagggattatttaagagccatcacagaaatgatgcctgagtagagtagacggttggattaaagcgtctgtaagtttccttctattctaaaaccaactggttccatgaa

SEQ ID NO: 433530 - DNA, 347 bp, Homo sapiens
tttcaacatgaggtttggaggggtcaaatatcaaaactatagcactaagaacatttgcatacaattgaaaaataatgaatgtttagtttttcagtacatttttcttcctctatctctgaaatcatatgaatgcaataggctttttagccagaaagagttcatgtaccaatggggatgtgcatacagttttaagtgttcatttaaagtatcataaatctcatctatgtagtatacaccagtgccccccaaamtttcatacgtaataactacttgtaaatcttgttaaaatgaagatattataattcagtgttttgaggtggggcttaaaggtctgggtcattagtaag

SEQ ID NO: 433531 - DNA, 621 bp, Homo sapiens
tccttgtctgtcttcaacctggcttttctcatgatagtaaggttggccataacaccttacagcctcatattgatatactacagagtccagaraaaggagaaaagtttgttctgtcttccagttttgtaagaaaaaatatgattcaccctgcaatggcaggcttaatttggacactgaactgaaaaacaaaacactgtgacccagaaccactgggaaccacaagcgaaacttgggactactggagaggggagacataaaagctgagaaggcatctaaaatgcctgttatttccatgacatcagaattaatcgaaaataaaacaatggagaaaggttataggagactaagctcagagggcgtgcatgaagggttttgaagtctgtgcttagaagtctctgggttagtctcttcctagaatttctctggaacactggcactagatgatcctgtatcagcagtaattaatttttttcatccattcatctatccatcttcatccatctatccatccattcgtctgtcatccatttagcatatatatggtgggcatctatttaagcaatagactttgacaagtactgacgctacataggtgtataaggtactgccatgccccaggga

SEQ ID NO: 433532 - DNA, 536 bp, Homo sapiens
attcaaccaagtctaagatgacctatgtgcacattaaagtgtgaggaaccctgtcatactgtgatgattgaaacagctgatgaatgggaatcatgctattcccgctgaattttattattattttattattgagtcgttggtagctccttgtggtccttgtagtcctcttattcttcactccatatttagaaataagatttcatcagcctatggaaatgtaccagaatctgtaattcattgcttgctaattagtctgaaaggtaatttttatgtaggagttagtgttcctaaatattaatgagcaattagaattctattctgaaaacagaygatattttgtgttgagggtgagcagagggaggtgaggaataaaaggatacacaagtaaacatggttatatattggggttactatgtgggcttgtatttctttaagcctgacacctggcaatttgaacaaaagtaagccaaccagcactagggtgaccgtcataaacaaatgaatcacctaccagaaaaagaaaacaaactaataaa

SEQ ID NO: 433533 - DNA, 536 bp, Homo sapiens
attcaaccaagtctaagatgacctatgtgcacattaaagtgtgaggaaccctgtcatactgtgatgattgaaacagctgatgaatgggaatcatgctattcccgctgaattttattattattttattattgagtcgttggtagctccttgtggtccttgtagtcctcttattcttcactccatatttagaaataagatttcatcagcctatggaaatgtaccagaatctgtaattcattgcttgctaattagtctgaaaggtaatttttatgtaggagttagtgttcctaaatattaatgagcaattagaattctattctgaaaacagacgatattttgtgttgagggtgagcagagggaggtgaggaataaaaggatacacaagtaaacatggttatatattggggttactaygtgggcttgtatttctttaagcctgacacctggcaatttgaacaaaagtaagccaaccagcactagggtgaccgtcataaacaaatgaatcacctaccagaaaaagaaaacaaactaataaa

SEQ ID NO: 433534 - DNA, 536 bp, Homo sapiens
attcaaccaagtctaagatgacctatgtgcacattaaagtgtgaggaaccctgtcatactgtgatgattgaaacagctgatgaatgggaatcatgctattcccgctgaattttattattattttattattgagtcgttggtagctccttgtggtccttgtagtcctcttattcttcactccatatttagaaataagatttcatcagcctatggaaatgtaccagaatctgtaattcattgcttgctaattagtctgaaaggtaatttttatgtaggagttagtgttcctaaatattaatgagcaattagaattctattctgaaaacagacgatattttgtgttgagggtgagcagagggaggtgaggaataaaaggatacacaagtaaacatggttatatattggggttactatgygggcttgtatttctttaagcctgacacctggcaatttgaacaaaagtaagccaaccagcactagggtgaccgtcataaacaaatgaatcacctaccagaaaaagaaaacaaactaataaa

SEQ ID NO: 433535 - DNA, 551 bp, Homo sapiens
agaatctgtaattcattgcttgctaattagtctgaaaggtaatttttatgtaggagttagtgttcctaaatattaatgagcaattagaattctattctgaaaacagacgatattttgtgttgagggtgagcagagggaggtgaggaataaaaggatacacaagtaaacatggttatatattggggttactatgtgggcttgtatttctttaagcctgacacctggcaatttgaacaaaagtaagccaaccagcactagggtgaccgtcataaacaaatgaatcacctaccagaaaaagaaaacaaactaataaaactctccaaagcagaaatcaagcaaatggcaggctctgttgtcactggagaaaagcctagaatgrtattttagcctgagagatcccaaagcagcattgattagtatgcattcttcagaatttagtggagtaaaatagatattacttaacagttttgtggccaagtgaactgagaaaaggctgggagaaaatcaagaggttagtgatttgcgcaattttaattttttacaataggtca

SEQ ID NO: 433536 - DNA, 617 bp, Homo sapiens
cttgttacttcaaacttgaatgctgtgtttccatagagaacagtaaaacaatagtttccctgttctgttttggctcctatctctctaaagaagttctgcaaatggattttcctctcggcctttcaaactaaatgccaagagtcctataatgaggctgaaaatgtgaccatattgcccagaaggagctaactgtgctgtcctcttttgcaaaagcagctgaataaattgagtatattagagacacaaatttctaggacttgtaaggattctgtcaaaaatrtgtaacagggatgtattactcttgccctgagaacttcaacttttgcacttcctgactttgctgtggctaaaattgaaataccaaagtggtattccccaaagtgtttgaatttaatagcattaatgactaggcccctacaagtctataaattcttatttgaaaattcagctattctatttgtactttctgtgagtgcttgacttttagtttcctacctgtaaacttttcaaaaagcaaataacctcacctcagacatcaagtccttgtaaggagtgagtgagcagccctacctccctaaagaaacagctatactcaggagaagtcttgtggtttaaat

SEQ ID NO: 433537 - DNA, 561 bp, Homo sapiens
ttttaaactggcccagactttttgtaactccaagtgaccacaagtttataggatcttgctcaggtatcattaaggaacaggaaaatggtatttgacagggcatggttgaaggccataactggaaaaattaaacaaatgaaactatttcatgttttcaacactgagttcaaactatccaatctcctaactagagcagaaaaaaagcagtttgctgaacctttagcaagagagttcttcaggcatttgatttatctttgggtgaactttgctggcttttatcagtggccaaggtgacaagacagtttataaaaagcaagactcaagacacacccttggtgctgtagactcagttgcctttcttcttccaygctccatcctcctccccacctccaattttttaagagtcaagagagaaaaggattaaaaacttattttttgaaagtcatttttctgcagcttcaaaggactttttagacatttggacaaatcgtttttaaaatttcaaggatactttttaataaaactgagtgattgaaaaaaaaaacaccaccctcatttcct

SEQ ID NO: 433538 - DNA, 542 bp, Homo sapiens
agtgctccgagcaaatgggtttgtgatgacattgttatcatgatcatcatcttcttcatcatcagcttacaacgaatttataacaccaaaatacatggctctgataagaaaagcaacaggaaacatttttattgaaaaactctcataaatagggaatatagcatggctagaagggactccattagtctagatatttacaaagtcttcatgaaatactttaaaataaatgatcctaatgaaaarcattggaagcacgtaaaattttaaaaattgaaaatgtttaatttccaaattacaataaatgtttttaaaagttaatattgtttttccttcaataataatgatgatcggctgggcacggtggctcacgcctgtaatcccagcactttgggaggctgaggcggatggatcacctgaggctgggagttcgagaccagcctgactgacatggagaaaccccgtctctactaaaaacacaaaattagccgggtgtggtggtgcataccaggaggatgaggcaggagaatcacttgaacctggga

SEQ ID NO: 433539 - DNA, 590 bp, Homo sapiens
cctgttaattatccttcgtcagtttaattcacagaccccagccactgaatctaagagggtaaagaaacagttatttttttcctcccctacattaagcaaatgaataataggaagaaatgctcaaaagtgacatctgacttatgatttaaataaataactaaaatttgggatacttaaaagaaactactctgtttttcctcatatgtcccatttccctgaaacattaaaaaaattctccataacatagtcttcctgtatgttgcaaaaaatatagaacaaaaaaaactcaggctaaagaaaaaggtgaaatgtaygtcatatcacagagccacttagttctaagaccatgggtgctgagaaacttcaaaggaaatggaacaactgaaatctaattctaactttgaactcagttaacataagaagagtcccttttcctccctttacttattttatgtctgctttgatgggcagtgaaaaggaatctactggctgaaattaaaatggtacaatctaatatatggtagctggctgttatcaaaggtggtggagaacagatgcaggaagttacaaaggaaaagtccagaatttca

SEQ ID NO: 433540 - DNA, 453 bp, Homo sapiens
attaaaatggtacaatctaatatatggtagctggctgttatcaaaggtggtggagaacagatgcaggaagttacaaaggaaaagtccagaatttcaccctgagtaaatcccatcatagcacctcagaagacctggctttatgtcctggtttcaccakgtttaagccagatggatgtatcccaactcaactgcagattcttcatccatgaaatggggataggattccttgccatcttttacaatgttgtgagaattcaatgtgaaagtatttttaaactgtaagtcactttatacaaataaagcattattaaattccatcaacagataaaacaataaacagctctaaaagagatttttcttcttttcctaaatccctatgcaagtgacattaacgtaaacattcactgtggtacataatgtcagagataatggtaaaacaatgctaaatgacat

SEQ ID NO: 433541 - DNA, 453 bp, Homo sapiens
attaaaatggtacaatctaatatatggtagctggctgttatcaaaggtggtggagaacagatgcaggaagttacaaaggaaaagtccagaatttcaccctgagtaaatcccatcatagcacctcagaagacctggctttatgtcctggtttcaccatgtttaagccagatggatgtatcccaactcaactgcagattcttcatccatgaaatggggataggattccttgccatcttttacaatgttgtgagaattcaatgtgaaagtatttttaaactgtaagtcactttatacaaataaagcattattaaattccatcaacagataaaacaataaacagctctaaaagagatttttcttcttttcctaaatccctatgcaagtgacattaacgtaaacattcactgtggtacataatgtcagrgataatggtaaaacaatgctaaatgacat

SEQ ID NO: 433542 - DNA, 622 bp, Homo sapiens
ctcacatagatgtcccggaaccagctggatatagatggagctgaagtgcaagggttcttggctgcatatgtaaatttggaagttatcagcttatttgagctttgcataaggataaaatcatccagaaaacatgtcgagggcttaggtctagcacttggcatttgagatggtcttactctagctgctacatgttggaagagacagcgatgcactggagcaacttatgatacaggaattggctagaaggatggaatggagagatgaagtctattccaataggaatgtgctgtgtggaggctttgactcctctgaacttccagagcagagctgagaccaactgggggaaattcatggagggaacttcaagcttagtatacaggagaccaaatgaatgactagagtgccacagcacacagacactgccctagaaagtaggtaggttcccagtgggaggacacagggaagtggaggttaaaacagggtttctgtagtaggtggggagcataattgggtggatttcmctgcttctttcaactctccgatctggggatacattgtgtactgcagtagcccaaaatgcagcaaaattccaggataacagaaaataattggactgtctcta

SEQ ID NO: 433543 - DNA, 627 bp, Homo sapiens
ttaggaagttggagaccaattctaagcaccgggaaccttgtgatggaatgggattttgtgcagctgggattttgacaatgggattttgacaataccacaccacatatcagatggtggcagtgtatgtgatatgttctgtgtaatcatttccaggacacaagggtggcaggggcagttagttgtctgccgttgcctccttggtaacaggaccctgatgcttggctgggacratggcacctagaaaaggattgcatttctcaacctcccttgcaattaggtgtagccatgtaattatctggagactaaccaatgagatataagtgatcagttgtacaggacttcaggaaaatatctttaaaaagagagggtaagaacatcttcttcctgttctccttcctcctgcctagaatgtagagtaaatggatggtgctgcagcagccattttgaaccataaggtgacttggaggctggaagtccactctagcctactagattataaagcctgtaggggacttggtccctgattatatgaatttcccattcaagctctaactgcctaagttgacttcatttacatgacagaaaaaaaaacccttgtgtgtttatgcctcagtgatgggagttgga

SEQ ID NO: 433544 - DNA, 497 bp, Homo sapiens
gctatttaattgtatgagttcttcatatatttttgaggttaacctcttatttgatatacagtttgcaagtattgcctcccatttcaaggttgtcttttcattttgtttattgtttcctttactgtgcaaaaacatcagtttttttgtaatcctacttgtttatttttgcctttttttttttttgcctgtgctttaggtatcatatgctaaaaaaccattgccaagaagaccaaagttgaggatcttatttccctatgttttcttctaggtgtttgatggtttcaggttttatgtttaaatccttaattcattttgaattgatttttgtgtatgatataagataaggacccaatttcacttgtttttgcaygtggatatccaattttcccaataccatttattgaacagagtaccttttccctctggtgtgttgttggagtctttgtcaaaaattagttgaccctatatgcatcagtttccttctgggctttctattc

SEQ ID NO: 433545 - DNA, 585 bp, Homo sapiens
aaatgggaggagttgttcttggataacacctccttggaggcttggaaaggtttgggctctgtcctggcatctctgttggcatccagaaggagagggtgtgcttactgcccagaagttttcttagaatcaggggtcctgtcctcatgcttaccttcttggccccctaaactcctccaggactcaagggtagagggaccccccccaaaacactgtgctttgtggccacaagagggctcacggctcatagactttgcatccaataaatcttccaggttggctcttgacagtttcattgaatggggccccatcctgcaatgttggagattgctatttaattatgcacgatcattggacaattatgagcacttctataatagctcaacattaattttrgcatcttaattttataaatgtttaaatgtgttgctcatgcagagctattcaaatgcagatgattaaatcaaattactgcgtttataattttctagaggtttttccttggaaattaaatctcatcattaaaagtttccctttgttgtcacccttggtcagccgcttggttcttagtcacagtgctaattgtgc

SEQ ID NO: 433546 - DNA, 538 bp, Homo sapiens
aacattaaggaaacgagagttacacattttaaaggcagggcatgggggctgcaagaggtgaggggccttggagagggggtggggtggaagaagagctgagatctgcctaggagtggtccacccttcttactcttccctgcccctatcctgcctgttctccttgccaccccgtttccctccccaactctttctcttcctatctttccttagttgagaagaatctggctggaaatacctagtgaaaggacyatttctgcattctagggatcttcagagagaggaatgtagatgtttctagttagtagtaggctagtgggaggaagagtttgagtaggcagtcacatattttgaacaagatggattcagtctacaatccttgcctagttaccctctgagctgccgagctggaatacctcttcctgtcttagaattctcatctgtgactcactgacaatctttttccgttttttgtttttttttgagacagagtcttgttctgtcacccaggctggagtgcagtggtgtgatctcggctcac

SEQ ID NO: 433547 - DNA, 538 bp, Homo sapiens
aacattaaggaaacgagagttacacattttaaaggcagggcatgggggctgcaagaggtgaggggccttggagagggggtggggtggaagaagagctgagatctgcctaggagtggtccacccttcttactcttccctgcccctatcctgcctgttctccttgccaccccgtttccctccccaactctttctcttcctatctttccttagttgagaagaatctggctggaaatacctagtgaaaggaccrtttctgcattctagggatcttcagagagaggaatgtagatgtttctagttagtagtaggctagtgggaggaagagtttgagtaggcagtcacatattttgaacaagatggattcagtctacaatccttgcctagttaccctctgagctgccgagctggaatacctcttcctgtcttagaattctcatctgtgactcactgacaatctttttccgttttttgtttttttttgagacagagtcttgttctgtcacccaggctggagtgcagtggtgtgatctcggctcac

SEQ ID NO: 433548 - DNA, 538 bp, Homo sapiens
aacattaaggaaacgagagttacacattttaaaggcagggcatgggggctgcaagaggtgaggggccttggagagggggtggggtggaagaagagctgagatctgcctaggagtggtccacccttcttactcttccctgcccctatcctgcctgttctccttgccaccccgtttccctccccaactctttctcttcctatctttccttagttgagaagaatctggctggaaatacctagtgaaaggaccatttctgcattctagggatctycagagagaggaatgtagatgtttctagttagtagtaggctagtgggaggaagagtttgagtaggcagtcacatattttgaacaagatggattcagtctacaatccttgcctagttaccctctgagctgccgagctggaatacctcttcctgtcttagaattctcatctgtgactcactgacaatctttttccgttttttgtttttttttgagacagagtcttgttctgtcacccaggctggagtgcagtggtgtgatctcggctcac

SEQ ID NO: 433549 - DNA, 538 bp, Homo sapiens
aacattaaggaaacgagagttacacattttaaaggcagggcatgggggctgcaagaggtgaggggccttggagagggggtggggtggaagaagagctgagatctgcctaggagtggtccacccttcttactcttccctgcccctatcctgcctgttctccttgccaccccgtttccctccccaactctttctcttcctatctttccttagttgagaagaatctggctggaaatacctagtgaaaggaccatttctgcattctagggatcttcagagagaggaatgtagatgtttctagttagtagtaggctagtgggaggaagagtttgagtaggcagtcacatattttgaacaagatggattcagtctacaatccttgcctagttaccctctgagctgccragctggaatacctcttcctgtcttagaattctcatctgtgactcactgacaatctttttccgttttttgtttttttttgagacagagtcttgttctgtcacccaggctggagtgcagtggtgtgatctcggctcac

SEQ ID NO: 433550 - DNA, 550 bp, Homo sapiens
gtttgctgagagtttgacacaaaagcccttcagacaagtgttgtttggctgcttatggtagattaagaacaagatcctttgtttccaaaagaaatcaatgtttgttcttaagttcaaagaaaaccagctgttctaaggacgatatgaggacctggacttcattccagccgccaattatctgcaaacacagcagaagcaaaacccatgtctacctagcatggagaattagtcttaggagatccctcagtccagaactcccctacccagtcactcaagtccagcctatgaaattgattttttaaggaaaaaaaagagtgtttatatcaaaatgggagtccacttaggtcaccccctctgaggagcagtcacatcaactactaggcttcttattagctactaagaaatccagaaaacagcatcggtgktttttctaagtggttatggcactcccttcaagccaatcactaacctgtcatttaaaaaaaggagaaaataaatgaaaataccaccatcaaagcctacagactgggtagaattccatgtctgccag

SEQ ID NO: 433551 - DNA, 550 bp, Homo sapiens
gtttgctgagagtttgacacaaaagcccttcagacaagtgttgtttggctgcttatggtagattaagaacaagatcctttgtttccaaaagaaatcaatgtttgttcttaagttcaaagaaaaccagctgttctaaggacgatatgaggacctggacttcattccagccgccaattatctgcaaacacagcagaagcaaaacccatgtctacctagcatggagaattagtcttaggagatccctcagtccagaactcccctacccagtcactcaagtccagcctatgaaattgattttttaaggaaaaaaaagagtgtttatatcaaaatgggagtccacttaggtcaccccctctgaggagcagtcacatcaactactaggcttcttattagctactaagaaatccagaaaacagcatcggtgttttttctaagtggttatggcactcccttcaagccaatcactaacctgtcatttaaaaaaaggagaaaawaaatgaaaataccaccatcaaagcctacagactgggtagaattccatgtctgccag

SEQ ID NO: 433552 - DNA, 600 bp, Homo sapiens
ccttttaaaatacttctcatcaagtgctgttgcaccaataatgatggtaagagtaatgataccagtgacaaacatatcttgagtgtttgtcatatactatgcactgttcagcctttgcatgcattattaatttactgggtaacaccctatatatcaggtcttatcgttcctattttgcagaaaaggaaactgagatttacagaggttaaatgacttgcygaaggtcacataagcagtaaattgtagaggcaggatttgattccatataagctcttaaaaatctaactcatgacaagaaatttccatgaaatttttactatggttgtgtactaggtttgcctattttttaaagaccagattttttgaacttgaaggtctttattcaaacacagattgctgggccctatttcacagtttctaatttagtaggcctagggtggctcagagaatatggatttctaaagagttcttgggtgatgcccatcctactggtccagagacctcaagttaagaaccaccatcctagatccctattaactgctgatcgtgtgttgattggaaatattcaaccataaaggcttggttaatttagacccaact

SEQ ID NO: 433553 - DNA, 600 bp, Homo sapiens
ccttttaaaatacttctcatcaagtgctgttgcaccaataatgatggtaagagtaatgataccagtgacaaacatatcttgagtgtttgtcatatactatgcactgttcagcctttgcatgcattattaatttactgggtaacaccctatatatcaggtcttatcgttcctattttgcagaaaaggaaactgagatttacagaggttaaatgacttgctgaaggtcacataagcagtaaattgtagaggcaggatttgattccatataagctcttaaaaatctaactcatgacaagaaatttccatgaaatttttactatggttgtgtactaggtttgyctattttttaaagaccagattttttgaacttgaaggtctttattcaaacacagattgctgggccctatttcacagtttctaatttagtaggcctagggtggctcagagaatatggatttctaaagagttcttgggtgatgcccatcctactggtccagagacctcaagttaagaaccaccatcctagatccctattaactgctgatcgtgtgttgattggaaatattcaaccataaaggcttggttaatttagacccaact

SEQ ID NO: 433554 - DNA, 533 bp, Homo sapiens
gctgctcagcctgttttgcttctaaactgtggccttggcaaacaccttactgtatcaacacacactgggtgcagagacagaaagagcacgggtctgcctggcrtagtgcctgcctgtttgaatgaatgaatgcatgaatgaatgtaatttcaagtcttgtatctatcacctgccagccttgaccttcagcaggtttctttgcatctcattcattcacccaacagatatttattgattgcctcctgggtgccaggcacaaaattaagttatgaggatcacaaggtgaaaaagacagcatctgttcttaagaaattccagtctggtaaggagggatccttccaagagagtaactggctctgtatactgaggagcaaattataggtgtgctcactccctttatctcttgttttctcagactggtggcttgtggcttgcaggactgcccccctctgctttctgtcttagctaaagtggtaaggcctgttagatcacacactccattctgtgactattgccagagacctgtatcaaaa

SEQ ID NO: 433555 - DNA, 533 bp, Homo sapiens
gctgctcagcctgttttgcttctaaactgtggccttggcaaacaccttactgtatcaacacacactgggtgcagagacagaaagagcacgggtctgcctggcgtagtgcctgcctgtttgaatgaatgaatgcatgaatgaatgtaatttcaagtcttgtatctatcacctgccagccttgaccttcagcaggtttctttgcatctcattcattcacccaacagatatttattgattgcctcctgggtgccaggcacaaaattaagttatgaggatcacaaggtgaaaaagacagcatctgttcttaagaaattccagtctggtaaggagggatccttccaagagagtaactggctstgtatactgaggagcaaattataggtgtgctcactccctttatctcttgttttctcagactggtggcttgtggcttgcaggactgcccccctctgctttctgtcttagctaaagtggtaaggcctgttagatcacacactccattctgtgactattgccagagacctgtatcaaaa

SEQ ID NO: 433556 - DNA, 486 bp, Homo sapiens
tacttatccttttgtgatttggcttctttcacttaccataatgtcttcaaagttcgcccacgttgctgcatatgtcaggatttccttcctttttaaggttgattgatatttcattgtatgtgtgtgtgtgtgtgtgtgtgtgtgtatgtatatatatatatatrtgtgtgtgtgtgtgtgtgtgtatatatatacataaaacttctttctcacctcccccttcccagtctgttctgatattctagagctggcaagtggctgttgggttgcttgagtgacactcagcaggagacgagctgagcgaatggttaaactcccagaatcactggctaagctcttaacatttctggaattttctcatgtagttcattgatttataagtcctcacatggactcttacaagtagaagtttaacacatcctgtaggtgatttttttttcaaatttcagttgattgagacctaaaaattccattggatgatttgaa

SEQ ID NO: 433557 - DNA, 486 bp, Homo sapiens
tacttatccttttgtgatttggcttctttcacttaccataatgtcttcaaagttcgcccacgttgctgcatatgtcaggatttccttcctttttaaggttgattgatatttcattgtatgtgtgtgtgtgtgtgtgtgtgtgtgtatgtatatatatatatatatgtgtgtgtgtgtgtgtgtrtatatatatacataaaacttctttctcacctcccccttcccagtctgttctgatattctagagctggcaagtggctgttgggttgcttgagtgacactcagcaggagacgagctgagcgaatggttaaactcccagaatcactggctaagctcttaacatttctggaattttctcatgtagttcattgatttataagtcctcacatggactcttacaagtagaagtttaacacatcctgtaggtgatttttttttcaaatttcagttgattgagacctaaaaattccattggatgatttgaa

SEQ ID NO: 433558 - DNA, 543 bp, Homo sapiens
attgatatttcattgtatgtgtgtgtgtgtgtgtgtgtgtgtgtatgtatatatatatatatatgtgtgtgtgtgtgtgtgtgtatatatatacataaaacttctttctcacctcccccttcccagtctgttctgatattctagagctggcaagtggctgttgggttgcttgagtgacactcagcaggagacgagctgagcgaatggttaaactcccagaatcactggctaagctcttaacatttctggaattttctcatgtagttcattgatttakaagtcctcacatggactcttacaagtagaagtttaacacatcctgtaggtgatttttttttcaaatttcagttgattgagacctaaaaattccattggatgatttgaaaccacagaagaggatgattctgttgatgctgatgggattggagagggtaatattattgtcagcttcaggcttttgcattaaatgttgctccctgtgtgttccaattgctttgtttccagtgagtaatcttagggtcggctaaaccaaggtagagtgga

SEQ ID NO: 433559 - DNA, 543 bp, Homo sapiens
attgatatttcattgtatgtgtgtgtgtgtgtgtgtgtgtgtgtatgtatatatatatatatatgtgtgtgtgtgtgtgtgtgtatatatatacataaaacttctttctcacctcccccttcccagtctgttctgatattctagagctggcaagtggctgttgggttgcttgagtgacactcagcaggagacgagctgagcgaatggttaaactcccagaatcactggctaagctcttaacatttctggaattttctcatgtagttcattgatttataagtcctcacatgkactcttacaagtagaagtttaacacatcctgtaggtgatttttttttcaaatttcagttgattgagacctaaaaattccattggatgatttgaaaccacagaagaggatgattctgttgatgctgatgggattggagagggtaatattattgtcagcttcaggcttttgcattaaatgttgctccctgtgtgttccaattgctttgtttccagtgagtaatcttagggtcggctaaaccaaggtagagtgga

SEQ ID NO: 433560 - DNA, 611 bp, Homo sapiens
ggtaaatgtatacctgtgtaacaaacctgcacattctgcacatgtatcacaaaacttccaggcaaatttaaaaaaaagaaaatctactcttaagtaaacccaacaagttttctggctggcctaatattaaattatctgcatttgcttaataaaaaaaaaaagaaaaaaatgcctgtttgaatagaatattgcgctgaatcatttggttctcaagtgctataggcacttggaggtattacaataaattaggaggtcatctatcatttccgtctccattggaggaytgtgatgccaatatccaggctgtactgcaaaattccaatatcgtggaacacctggctgttctctaatttgaggagagaagccgatcacctctgcacaaacacattccatttccatagacaattcagcagcatagatggaaacgcttcaggacacatcccaggacttgcaccatcagccaagctctgcgttcacctccctgaaaagcaatcatcctggtgttcattatctagaactttctaagaatggaccattttattttagaaaagaatggcaacaagagttaagatcaaagtttaaccagtatttaacatacctttccctcaacc

SEQ ID NO: 433561 - DNA, 596 bp, Homo sapiens
cctggggagatgagtcattttttttttttttttgtggagagagacttcattacagacagtattttgaaatgccagacttcaggggcaccctggatgggcccactgccctgctcaaggccacgtccttcctctttcatcatgttcagaggcccttgctaggttgaatattttgatagacagggttcagatacctggctggacctgattccaagtctgatcatggtaggaaatctctattattcaattggaactgttttaaaaagtgtcatctaatgcagctggggcagtcctggaattgctgctgatgaagttttaagggggtcatargtaatttgatgtgataattataaaagcagagattcttgactttttttttctatgaagctttctgagaataacatgaaaaactatggacttatgagaaatataaacaaataccccaaactttacaagcaatttcttggggcttcatgtagcccctaaaatcccagcattgtacatacatcatgattcgtgaaccccatagctttgagagtcatatttggagaaattgattagtatcaggtcagctaaggcaagctttattcccaggaggg

SEQ ID NO: 433562 - DNA, 577 bp, Homo sapiens
acttgggttccccttctgaggctgatatggtttgrctctgcatccccacccaaatctcatgttgaattgtaatccccacatactgaaggaggggcatggttggaggtaactgaatcatggggtgagacttccccctcgttattcttgtgatacagttctcatgagatctggttgtttgaaagtgagtggcacttcccccttcactctctctctcccctgctgccaggtgacgatgtgctcgcttcccctttgcccttctgctatgactgtaagtttccaggagcctccccagccatgctccctgtacagtggaaccatgagctagttaaacctcttttctttataaattacccagtcttaggtagttttttatagcaatgtgagaacgaactgatatagaggctaacctcctttacatggaggtttcttctttgttgtattatgtatttttttatttctatctggtttatcttttgcataattatttttttctcttctgctttgctgattggtactctttgaagctcttcaacctgtatatggatttatgtttatgtttttattcttttcagtagtg

SEQ ID NO: 433563 - DNA, 602 bp, Homo sapiens
ttagtttctgtttctgatttgcagctgataatccgataaggccttgaaaggagatagtcaccttgttaaaattgtatgtaaagtaagatcactcttatttaatatttaggtttagcctgagtgtctggacagctgcagggttcaggtgctggaggtttctacctgcctagacctttttgattactggctggttcttagagagggacagttttgacggttgagtacctggtgcatgaggttttaccattcttgttactgagtgtgttgcccccttgagtacaatagcagaacatcttctgactaatccagtagttacaggttgaataaggagtgcatccaaggattattggctgtggatgtgcatctggtgcaggctggggaggctgtccagggccatgcctyaggaccctgaatctgacctcctttgtccaaggttttgatcagcaacttggataaagacatagaagccagccttatcaaatttgcgaatgacagaagaccgagatggaaagctaatatattgaataatagaatcaggattcataaaaatcttgacagagaggatgcatctgaaactaacaaggtaaatcctaacaggatta

SEQ ID NO: 433564 - DNA, 584 bp, Homo sapiens
ggggtgaatttgtgcttttataaggaacccattcctgcaataatggcattaattcattcaacggggcaaagcccttatggcctaattacctcttaaagttcccatgtcttaatatgctgcattagggatcaagtttgttgcattggggatcacctcttaatactgttgcattggggaccaacacatgaactttgggggacacattcgaaccataaaaatggaagaataatgttcccccagggatgtccacatcctcattcctggagcctgtgaacgtataaccttacayggccaagggaattaaggttacaaatgtaattaaggttctattcagatgaccctgagatggagagattattctggattagctggtgggcccagtgtaatcacatgagtccttaaaagtggaaaagaagaggcagaagaggaggtcagagagatgcaatgtgtacaggactcaacctgccattgctagctttgaagatgaagggaccacaaagcaaggaatgagggcagcctctagatgctggaaaaggcaaggaagtagattctattctagagcttccagaaaggaatgcagcttt

SEQ ID NO: 433565 - DNA, 545 bp, Homo sapiens
actttgggcagggcaagaaacctctttgagactcagcttccctctctggaaattggagataacagtgcctacttttcacttgtaaggtttgagataagatgtaagaagtgtctagcagcttcttggcaggtaagaagcactcagtaaattgatcagctgatccttccctccctccctacttccttttgtccctccaggtgcctctgaagatgacrtctcatttactgcatgaataaggagcggttcaggcagctgtcatgtatcaaatccaattctcagtgagtgcagcagggctgatatagctccatcagttgggatagatgatgaagaacgcaaggtttgcaagttgatctttcgttggagaattggtggtgatagcggtggtggacagggacacattgaccacacagatgctgtggaccagttcgtcttaatgaaccacttggcgaatgagtacccagcaaagtccaggctccctgagaatagacatgcatttgttcacaggggagcagacttcagagagtgggaccaaggggccctggtga

SEQ ID NO: 433566 - DNA, 615 bp, Homo sapiens
cttcaccatggtccccggtgcttagtacagggcatagcactgtgtaggtgctcagcaagttcttagaataaatgattgagaagtggatgaaagaatgagtggggaaaggaagggatgatctgaatggttaaaggctttcttctgctctcaggcagcatctgtctattttcattcactctagtcttctggagaataagctggtaggcgtagagatgagtggrcattttgatccagtgaggggtattgaagacccctcaaatcacatgtggcacctatggtaaggctaatttttatatttttagtagagatggggttttatcatattggccaggctggtcttgaactcctgacctcaagtgatctgcccatctaggcctcccaaagtgctgggattacaggggtgagcaactgtgcctgtcctagttatgcattttaaataataaagcgcagctttgtgaagaaccacaggtattgctgtgtactagatttcataaaaatgtgttttctttttcttctcaaattatgttggggtttatatattaagtctcaacaaaagcaaaacaggatcctcatgtagcccaagagctgaagcctacaacatgcatgctggaggct

SEQ ID NO: 433567 - DNA, 615 bp, Homo sapiens
cttcaccatggtccccggtgcttagtacagggcatagcactgtgtaggtgctcagcaagttcttagaataaatgattgagaagtggatgaaagaatgagtggggaaaggaagggatgatctgaatggttaaaggctttcttctgctctcaggcagcatctgtctattttcattcactctagtcttctggagaataagctggtaggcgtagagatgagtggacattttgatccagtgaggggtattgaagacccctcaaatcacatgtggcacctatggtaaggctaatttttatatttttagtagagatggggttttatcatattggccaggctggtcttgaactcctgacctcaagtgatctgcccatctaggcctcccaaagtgctgggattacaggggtgagcaactgtgcctgtcctagttatgcattttaaataataaagcgcagctttgtgaagaaccacaggtattgctgtgtactagayttcataaaaatgtgttttctttttcttctcaaattatgttggggtttatatattaagtctcaacaaaagcaaaacaggatcctcatgtagcccaagagctgaagcctacaacatgcatgctggaggct

SEQ ID NO: 433568 - DNA, 566 bp, Homo sapiens
tttaagtcatgttgagctatggaaacagaattaaccaacaagagcatgggagtgagagagagagagagagaaaggaatagggagagagagagagagaatgtgtgagtgtgtgtgtgtgtgtgtgtgtgtgtatgtgcaggtgagcatatgtgagtgtagtttttatctgtcatgagtctagatgctgccccatctagccctagtctggggatcctcctagggggtaggaccatattttaatttgatgccaaggcggttaaaggcctggagagcccccagtgatgccacgtgtgcctctggaattgcatctgctgcttgtaggtgaagattcaggtgaccaaaaaaaggtagtcggtggtgcttttgtgatttagcagtgaaagagccactggcagccacggtttgcctaaaggggaggggtgtgtggttttctgttatatttygctttcagatcactccaactttagttttcttcctgcttttcattcttagtcaatatcagattctcctttacctcttttccattttggttaattttagtggattatccctgcatcttaaataat

SEQ ID NO: 433569 - DNA, 585 bp, Homo sapiens
aaatttaaaataagttttatatacagcatgaggaaggggtcaagcttactttttttcccgcttttttgttcagaatttcaaatatcattgattttaatctttccatttgccaaaaaattaccttgacacctttttttaaaaggtgtgggtctatttcttgactctattctgttttattgatctatttatctgtccttaaccacattggcttgatcactataactttataagaactcttgaaattgggtactgtcagtacttcaaatgtatccccctttctgaaaattgttcggctatcctaggtcctttggattttcatataaattttataatcagctttccaagttctacatacagaatctaaataggattwtgttgaatctatacttaaatttagggataatcaatatcttaacaatattggataattcaactcatgaatatggtatactttccacttatttaagtcttatttagctttttagcaatgttttgcagtttgaaaaatataggtttcacagtttttgtttattaattcctaagtacctataaatggtactttaaaagtctctattttctaattgc

SEQ ID NO: 433570 - DNA, 332 bp, Homo sapiens
agaatgcaataatcgaacaagtacctttcagtggggaaataaactggactgaaggatttgtagcttcctctagtgttkcattagacaaaagtgcattccagtaggtacctgtcaggacagtcgctggctctcccatcatctggggacagagatcagtttctgacttctccagaatcacagttccatagggaatggcactgcattatcccatttaatcttccctcacaccctgaaaggtaaggactgaaactcccattctagaaatcaataaactgaggcaaaaagtgaagcaatttgcccaatattgcattattactaagtcatggaaccag

SEQ ID NO: 433571 - DNA, 462 bp, Homo sapiens
agttttaggcactcagtactcataaactccaaaactatatactaagaacctacacaggccaaacgagtaatgcaaatgaattttgaaatatcactggaaaagaacaggactttcacaaataatttgtactttaaaaataaaatataggacgaagaaaagttcatctgcagcctagcaggccaccattttgtgtactcagttctaaactcttctccttccattccacctttgagtataaatcaaaatgattagaaagtcctctcttgcaaacctctgataggatgtgtatacctggtrtgcatttattcagcacattaatctttaggaatgtttgcattttctgcctcaactatacttatgttttctttcttcttagaaaatcacagaatttcagccaaaatttgagggaggtatatgtaagaaggtagcagagcagaacggagaagtggaagactccagtaa

SEQ ID NO: 433572 - DNA, 623 bp, Homo sapiens
aggacatgtgaatcaattgtctctgaattcatttttaaatgactcatggagataatcatctaaataggaaaatatgaagcacttatattttatttcttcatattaaaggtcccttaagaatacctctactcaaataaaatgcaccagtgttaatgttttctggaacatatttaattcagtagtagtttagttgacttatctctcatctctatgaaatttaatgtcttttcttattcttcaggacaaaacttttacttgaatgcattgtttcaggtgtatcagttgaaatacaaatagaactgttgctatatataygacatttatagcatcaaaaataagatccagttcttctgcatatattaaaaaaactgattcaaaaatcagtaggtttggttgaatatatggggacataataaggtcttgaatgtagttgcagtgctctactccatattatcttataattctgaagttacacatctttctaaagatgtaaggacaatgtattatgtactgaatatttatctgagagcacactgacttaatatgttctttcaagtctactcttggaatttctttccacattgaaatgtaaggcttgattagcgcatagaaagtatacattt

SEQ ID NO: 433573 - DNA, 623 bp, Homo sapiens
aggacatgtgaatcaattgtctctgaattcatttttaaatgactcatggagataatcatctaaataggaaaatatgaagcacttatattttatttcttcatattaaaggtcccttaagaatacctctactcaaataaaatgcaccagtgttaatgttttctggaacatatttaattcagtagtagtttagttgacttatctctcatctctatgaaatttaatgtcttttcttattcttcaggacaaaacttttacttgaatgcattgtttcaggtgtatcagttgaaatacaaatagaactgttgctatatatacgacatttatagcatcaaaaataagatccagttcttctgcatatattaaaaaaactgattcaaaaatcagtaggtttggttgaatatatggggacataataaggtcttgaatgtagttgcagtgctctactccatwttatcttataattctgaagttacacatctttctaaagatgtaaggacaatgtattatgtactgaatatttatctgagagcacactgacttaatatgttctttcaagtctactcttggaatttctttccacattgaaatgtaaggcttgattagcgcatagaaagtatacattt

SEQ ID NO: 433574 - DNA, 623 bp, Homo sapiens
aggacatgtgaatcaattgtctctgaattcatttttaaatgactcatggagataatcatctaaataggaaaatatgaagcacttatattttatttcttcatattaaaggtcccttaagaatacctctactcaaataaaatgcaccagtgttaatgttttctggaacatatttaattcagtagtagtttagttgacttatctctcatctctatgaaatttaatgtcttttcttattcttcaggacaaaacttttacttgaatgcattgtttcaggtgtatcagttgaaatacaaatagaactgttgctatatatacgacatttatagcatcaaaaataagatccagttcttctgcatatattaaaaaaactgattcaaaaatcagtaggtttggttgaatatatggggacataataaggtcttgaatgtagttgcagtgctctactccatattatcttataattctgaagttacacatctttctaaagatgtaaggacaatgtattatgtactgaatatttatctgagagcacactracttaatatgttctttcaagtctactcttggaatttctttccacattgaaatgtaaggcttgattagcgcatagaaagtatacattt

SEQ ID NO: 433575 - DNA, 564 bp, Homo sapiens
gagctttgttatttgcctatttggactaatttatttaatcatatcattaaaggcattcattcttacttaattgagcaaaggtcttgttttaaaaaatatattctggccaggcgcagtggctcaagcctgtaatttcagcattttgggagaccaaggagggtggatcacctgaggtcaggagttcaagacaaacctggccaacatggtgaaaccccatctctactaaaaatgcaaaaaattagcagggcatggtggcgggcacctgtaatcccagctactcaggaggctgaggctggagaattgcttgaacctgggaggtggaggttacagtgagccgagattgtgccattgtactccagcctgggtgayaagggtgaaactccatctcaaaaaataaataaataaatacatataaataaataaataataaaaatatatccttaatgtatgcaaggcactaccctagaaactgtgttccagtgtgtaagacatgtgcattagacaggtctgtggcctcgaataggactccactcagattgttcaaccacagagacttgaaggaag

SEQ ID NO: 433576 - DNA, 564 bp, Homo sapiens
gagctttgttatttgcctatttggactaatttatttaatcatatcattaaaggcattcattcttacttaattgagcaaaggtcttgttttaaaaaatatattctggccaggcgcagtggctcaagcctgtaatttcagcattttgggagaccaaggagggtggatcacctgaggtcaggagttcaagacaaacctggccaacatggtgaaaccccatctctactaaaaatgcaaaaaattagcagggcatggtggcgggcacctgtaatcccagctactcaggaggctgaggctggagaattgcttgaacctgggaggtggaggttacagtgagccgagattgtgccattgtactccagcctgggtgacaagggtgaaactccatctcaaaaaataaataaataaatacmtataaataaataaataataaaaatatatccttaatgtatgcaaggcactaccctagaaactgtgttccagtgtgtaagacatgtgcattagacaggtctgtggcctcgaataggactccactcagattgttcaaccacagagacttgaaggaag

SEQ ID NO: 433577 - DNA, 546 bp, Homo sapiens
attgtggatcttgaaaagtaagtaggggttatcttggccaaaagaattcatggccagaatgatatgaaatatgtggggagccagggagggaactttttgtaaagaaaatagcatgtcctaaaggagatgagaccacaggagctcttctgcagggtataataatttgtgttctggctgcagcgtttggctggacttgtcacaagtgtgtgaaccagaggaactccatcttgagtaggggcagggtaaaatgaggccrgacctactggtctgcattcccagatggttaaggcattctaagtcacaggatgagataggaggtcagcacaagatacaggtcataaagaccttgctgataaaataggttgcagtaaagaagctggccaaaacccagcaaaaccaagatagccacaacagtagcctccggtcgtcctcactgctacactcccaccagcaccatgacagtttacaaatgccatggcaatgtcaggaagttaccctatatggtctaaaaagggggatgcatgaataatacaccacttgtttagc

SEQ ID NO: 433578 - DNA, 590 bp, Homo sapiens
tattttggataaaatacctaaaatgaaattgttgtggcatgtgatactggtttaattgtgtaggaaactggtaaacatttccaacgtggctatatcactttgcattctttcaacaatgtataagtgttccaattagtggctctccatccttgcaaagacttgctattgccagtccttcaactttcagccattctagtgtgtgtatagtgggatatcacatgtggttttaaattgcacttcattaataactagtgaagctgagcattttttatgtatttgtttgccatttgtatacattcatcggtgaaatttctcttcaaatattttgcccattttaattaggttttttgtcttcctgttgagttgtaagtggatggttaattgctccagaacaatttattttaaaaaaattatttctccagcttaaaagaaagtcaattagacatacacgactgactatttttggagtttatattcccttccattgggctatttgtctatccytatgtcattactacactatttgactacttcagctttaaaaaatctcaaaatcaggtagttaataatcttcaactttgctctatttt

SEQ ID NO: 433579 - DNA, 634 bp, Homo sapiens
tcatcagtgacttctgaagactgactgaatatagaaaatacctgcacacccatccttctatgcatcatatcattgtttcttcctctttatcatgaaagatcctttatagttaaaggtgatgcatctgtatcctcagggtaccaaggcataggcagcctgtgcaagggaggatttttgttcttgttgaaataaaacattgtattctaaagcagaggcgttttgcaacctcattcttaaaacaaaatgcttaacattactcactagttaagtaattttatggccctcccccaataaatcttgtacatgaaccctcaggaaggtgcacatcccgtggtttatggtgcctctggcacactgccaacaccccagtttgaaaagccaggcattcaaccraacttgcgaacgccagcccttgcatataattacaggaacctgtgaaagtgatcaccggcagctcaggggctccaagcttccgcaagttctgaatcccttagcaagccggaaagatctgctggcgctgccgtagggaaaggttagcatcctaaattatggcctttcaattttttttcaactttgcaaatattttatcttctcatccttagtgaaaaagatagaagtgcacagttgctgtttt

SEQ ID NO: 433580 - DNA, 593 bp, Homo sapiens
ttttgataatgagacatccttgctgcaaaatagaaagaagagagtgagcctgggtggagagaagaagatggaggataaataatttacatacaaaatgtagagaaatttcatagcagaagtggttgtgtcccaaaaataacaccatttggaaaattacataaaaggaagcatagctttttctaagacatctattatgacaataacaaagaactggctttcttatgtttaaataattttatttttttctatagtatatatttgtatcgttttcttgggctaacatatcaaagtaccacagaaattaatttcaacaacagaaattaattttcccacaattctggaggctagaagcctgaaatagataaagggttagcagggctggtttctcctgagacctctcttctaggctggacaaggccatctttggcctatgcttccctctgtgtcctgaactcctcttcttacagggacaccagccatatcagattagggcccaccttaattacccctatttaamcttaattacttcttcaaagaccttatcttcaaatacagtcacattcagaagtactggagttacaacttcatcatat

SEQ ID NO: 433581 - DNA, 472 bp, Homo sapiens
catttttctcatagattccctccagtgtaatcctaacagagcaaacagagtgagcctgttaaaacataagtcaaatcatgtcatgtttctgctcaaaaccttgaaatggctttggtctgcaataacatatagggtcccacatgtctcggtgacccccttattacttctcttatgtcatttgtatgacttcgtcaatcactatattccaattatgctggcctagctgatgtttcttgaatatgccaaatatcctccccacttagggcttttgctctagytattccccagtcttagaatggtcttctccaagatatccgttgacttattcctttgcctccttcaagtctgcttgaatgccaccttccttattatgcttattctaaccttcaggtttattttaaccactttctgtcatctttccctggaattttctttctccctcaaaccacctcaatttttttcatatcattaa

SEQ ID NO: 433582 - DNA, 634 bp, Homo sapiens
gctcatataagaaaaatgagagagttgtaacactcacagttaatggcatgggcaaatttaatgtaagagggcaaaagtattttgagaaaagatatttagaacatagcggatttccataggaaacagtgaaaagattggtgtaggtacgggtgaggaagagcatatcagagtgagaaagggaatmagaaaggttagtgcttgtgtgtggtggaggcatcccacagttatgcagactttagatgataaagatagaaggtctgtatagaacaaactgatctcagtgcaaatcgtatcaggacctggttcctatagccatcacctcgggtcttgactggctacaaagacattgaaattggcatatccaacattccatttcctacttaatctgtgcttgcaggtatatggacatatctgttaccttcatcaattctcttaagcttctcattctctcccagaaatttacacatctagaatccaaaccaagaagaaaaattcaaattgtgctgattgaaaaatttacaaaagcaaaatattgatatcccttgcatgtgcatctatccagtgccttttactcagctagacccctcctatagacaggaccagtaagaggaagctctgtgcgtcatcccagctt

SEQ ID NO: 433583 - DNA, 634 bp, Homo sapiens
gctcatataagaaaaatgagagagttgtaacactcacagttaatggcatgggcaaatttaatgtaagagggcaaaagtattttgagaaaagatatttagaacatagcggatttccataggaaacagtgaaaagattggtgtaggtacgggtgaggaagagcatatcagagtgagaaagggaataagaaaggttagtgcttgtgtgtggtggaggcatcccacakttatgcagactttagatgataaagatagaaggtctgtatagaacaaactgatctcagtgcaaatcgtatcaggacctggttcctatagccatcacctcgggtcttgactggctacaaagacattgaaattggcatatccaacattccatttcctacttaatctgtgcttgcaggtatatggacatatctgttaccttcatcaattctcttaagcttctcattctctcccagaaatttacacatctagaatccaaaccaagaagaaaaattcaaattgtgctgattgaaaaatttacaaaagcaaaatattgatatcccttgcatgtgcatctatccagtgccttttactcagctagacccctcctatagacaggaccagtaagaggaagctctgtgcgtcatcccagctt

SEQ ID NO: 433584 - DNA, 504 bp, Homo sapiens
agtatagactacatgtggatcttgaagatccaccccctgtgtaacagtaaacagatagccttctcctccctgggggtcatatgggaggaggcctactggagagtaagaactttcattgtcatccagtggtatgaggtcatatccactgatgtcagtaaagatcacgtggaagctgtaactcacacataaaacaataatgagggggattcccacttgggtgtcaatggagggcragaagcctatacctctacttccacctggctgtaaagatgtagcaccccaccctttccttgccagagaagtaacagaaagtcaagataagatccagagactcataatatagtatgaaaatgctccggtttcaggagattatgtatcatacaaagaaatgaggaagtttcaaattgagtaaaaagacaattgatgccaatagcaagatgatagaaatttagagttatctgacaaagatttttaaacagccaagataaatatacatcaacaatc

SEQ ID NO: 433585 - DNA, 442 bp, Homo sapiens
taagtgagttaagcaacttgtaaagtaaacatacaaaactccgttgcatttatatatactagcaacaaatacagggacactgaaattagaatataatgccatttacaacaactcaaagaaagagataaatacttaagagccataaaccattaaatggaacatagaaggtacacacttaaatgctgaagagtttagtatagtcygaaatacaaatataaccatgaatatctatatagatataaagtggcgttacataaattttgtttaacactaattccaagagattgccacaaaagagggcatgtgctaggtgaataggtgaacatccaagataatttgggaaactctcaatattatacctccgtcttttaaaattggtcctcatatgagcaaatcagagctttataaaattctgtagtaaaatcccactttaatgcattcc

SEQ ID NO: 433586 - DNA, 554 bp, Homo sapiens
ttagccttgcaaagatcaagcgttccaagaatcatgggcaamaattgcgaggcttaataggacagcatctgaagtcccaaaatgtcacttccaccacattttactgctcaagtcactaaatgtcttagtgtttctataaaggaataactgaggctggataatttataagaaaaataaactaatttggcttagagttctacagactgtacaagaagcaaggcaccagcatgggcttcagactgcatatactcatgacagaaggagaagggctattaaacctgtgcagaaatcacctgataggagaggaagcaagagagagatgggggagatgccaggctcttttaaaaaacctactgtcatggaaactaatagagcaagaactctcatattgctatgaggatcagcaccaagtcatttgtgagggatcctaccccatgacatgccttccattaggtcacacctccaacaccagggatcatatttcaacatgaggtttgtaggggacaaaaattcatactgttcccagaccaaactgaggatcgggctgctgtttc

SEQ ID NO: 433587 - DNA, 554 bp, Homo sapiens
ttagccttgcaaagatcaagcgttccaagaatcatgggcaaaaattgcgaggcttaataggacagcatctgaagtcccaaaatgtcacttccaccacattttactgctcaagtcactaaatgtcttagtgtttctataaaggaatamctgaggctggataatttataagaaaaataaactaatttggcttagagttctacagactgtacaagaagcaaggcaccagcatgggcttcagactgcatatactcatgacagaaggagaagggctattaaacctgtgcagaaatcacctgataggagaggaagcaagagagagatgggggagatgccaggctcttttaaaaaacctactgtcatggaaactaatagagcaagaactctcatattgctatgaggatcagcaccaagtcatttgtgagggatcctaccccatgacatgccttccattaggtcacacctccaacaccagggatcatatttcaacatgaggtttgtaggggacaaaaattcatactgttcccagaccaaactgaggatcgggctgctgtttc

SEQ ID NO: 433588 - DNA, 554 bp, Homo sapiens
ttagccttgcaaagatcaagcgttccaagaatcatgggcaaaaattgcgaggcttaataggacagcatctgaagtcccaaaatgtcacttccaccacattttactgctcaagtcactaaatgtcttagtgtttctataaaggaataactgaggctggataatttataagaaaaataaactaatttggcttagagttctacagactrtacaagaagcaaggcaccagcatgggcttcagactgcatatactcatgacagaaggagaagggctattaaacctgtgcagaaatcacctgataggagaggaagcaagagagagatgggggagatgccaggctcttttaaaaaacctactgtcatggaaactaatagagcaagaactctcatattgctatgaggatcagcaccaagtcatttgtgagggatcctaccccatgacatgccttccattaggtcacacctccaacaccagggatcatatttcaacatgaggtttgtaggggacaaaaattcatactgttcccagaccaaactgaggatcgggctgctgtttc

SEQ ID NO: 433589 - DNA, 569 bp, Homo sapiens
ggcgtgggtgcaaatctattttagacttggcctttaaaatgttttttaaattgaatgattaagtggtgatgaaccagaaaaaataccttgaaattgatcccatttattaattagtttgcacatgtaaaggtctttctataaatagtcagaagactagagaaaattgttcttcttgaatggagaaatgactttcaaactaacctttttttcactatagaaataatgcttataaatgcacttattaccatccaatactctgcttcttccaatatacatatagagtcctataaaggggtttgtgtcttaaaagtttatacttggtctacgttaacaagccaactgtagagwacaactccatagagaggaatggattgaagaaacatacagaatgtgtactattgtcttgaaaatatagctttgcagtgaacattgtagaagtgtttggaaaagcaatgctttagagaatttgagatatcgggaattcaattaaagagcctgaagagcaaacaggtgaggaaatttgtgaggtaagatgaagcattgtttatgatttagttcatgttggagta

SEQ ID NO: 433590 - DNA, 583 bp, Homo sapiens
ctaaactacattctagagtttgtgtttgacttccatatgcaccgaattctaaatgtacatttattttgcctgggtatatgatcaatcattagtgcctttacaagataaatatcttctgcccttaatttctttagaggaaaccaaaggcaggaaattaatactttttgwtctataagctaatgaatgtgtgtgacacattggaaactttaatgttcttagtagccttatccagtagggatgatgaactcagtttttaatatagaaacaagcttagaggggtaaataacttgcccaagttcataaattgtatagttgcaaggccagggtttttctgacttgaaacccacgctgtttccacgacaatgtggtgcatccttggaaacagtggttgcaacatcttcaggtttagacaataaagtattcatactacacctttgattgccagagaaatctatatcaattgatttttttaaattatgcatgcatttttataagttctttctctcatttgtgaacttaacaatgcatttcagttttactaataaagtgctattttttagttgaaattatgaaaattgaattt

SEQ ID NO: 433591 - DNA, 589 bp, Homo sapiens
ttgtagaagacatttgttaattggaaacaatctagatcaacagatatttgaarcatccaatccatccggtcaaaatgtaaatggcacaaatattctctacagttatttaggatattggcaagaacacttacaaaatacccagtttttagtaaactttgtccaccatgtctacatgttggattttcttctacaggaaaaagagaagtatcaagttttagggattcacaaaatcagatctgtatttagagggataattccagtggcattgtaaagattagtttattgaaaggagttacccaaatcagggagagaatttttgaagttattgtcagagcaaggtgaggattggaaagcaacagagttggaaaagaggaagacagtggggaagtaggcggatgtgtatagaaagaagctggctggccattaaccaattggataataggggttagggagacagacatgactctaagcattctaacttggagaaattagtgaatagtactataacttcagtgaatagtgaggatttactatattgttcatccctttgttcctaatattatttgaacatattagctgtattcaaaga

SEQ ID NO: 433592 - DNA, 583 bp, Homo sapiens
cttcctaattaatttattttcttctgtcttacaatttttatcacaatacagttttcatttggctggaatacttccttaaagatttttaaaaatatgatttttaaaaatattgcctactgttattgaaccttttattgcaaaagtatcacatggtctttcagtgcagaaaataattttctgctcaaacctttctttcttagaaaggtttcaatagtctcatgtgtctattgtctatgtcttatctttcatctcataatttgyaattcaatactcttttactccacactcaagtataatttctgaagttggatttaagatcagtaattctgactgaagccatacccattccattatttcctcatttttctcagggatttatctttgtgttttcgattctgcaaagtcctttatttctatttcttggttttcttttgtgagtcagcctggatccaatcaacaaaatttttaatgccattatctttcaattaccactgagattgaacaatagacatttcaagttctcttctacctcctccattacaatgtcagtgggagacacttgatctatctgtgccaatcaatc

SEQ ID NO: 433593 - DNA, 583 bp, Homo sapiens
cttcctaattaatttattttcttctgtcttacaatttttatcacaatacagttttcatttggctggaatacttccttaaagatttttaaaaatatgatttttaaaaatattgcctactgttattgaaccttttattgcaaaagtatcacatggtctttcagtgcagaaaataattttctgctcaaacctttctttcttagaaaggtttcaatagtctcatgtgtctattgtctatgtcttatctttcatctcataatttgtaattcaataytcttttactccacactcaagtataatttctgaagttggatttaagatcagtaattctgactgaagccatacccattccattatttcctcatttttctcagggatttatctttgtgttttcgattctgcaaagtcctttatttctatttcttggttttcttttgtgagtcagcctggatccaatcaacaaaatttttaatgccattatctttcaattaccactgagattgaacaatagacatttcaagttctcttctacctcctccattacaatgtcagtgggagacacttgatctatctgtgccaatcaatc

SEQ ID NO: 433594 - DNA, 583 bp, Homo sapiens
cttcctaattaatttattttcttctgtcttacaatttttatcacaatacagttttcatttggctggaatacttccttaaagatttttaaaaatatgatttttaaaaatattgcctactgttattgaaccttttattgcaaaagtatcacatggtctttcagtgcagaaaataattttctgctcaaacctttctttcttagaaaggtttcaatagtctcatgtgtctattgtctatgtcttatctttcatctcataatttgtaattcaatactcttttactccacactcaagtataatttctgaagttggatttaagatcagtrattctgactgaagccatacccattccattatttcctcatttttctcagggatttatctttgtgttttcgattctgcaaagtcctttatttctatttcttggttttcttttgtgagtcagcctggatccaatcaacaaaatttttaatgccattatctttcaattaccactgagattgaacaatagacatttcaagttctcttctacctcctccattacaatgtcagtgggagacacttgatctatctgtgccaatcaatc

SEQ ID NO: 433595 - DNA, 531 bp, Homo sapiens
atatttttaccaccaaaaagttgaataagaatggatacatgttttttgttatcctttcaacaatacttctaaacatctggctaaatcctgtgtgcctgttatgtgtaaattcctagactcgagagaaaaaacttgtttcattggtttccctaaaatactcatgcagatactgttgagttttggtgtgctctaaagtttaccatttatatttttaatgccayatagcctgaccctgatattcagattctataatgatgtcatgatcttctgaatgattctcagtagtgtaccaatatcaccagacttgctcaccaccactacccagtcaaaagcatggactcacacaatttaaaggaaatgtttcagtttgaaaatatatatattgtctcctatgcatggggagatttccagataatgtgtttaaatatggctcacatgggtcagtctcccaccagccatgactgtaccatcaggcatgtatggacttgtcctggaacactctgtgtgtcaattaggtagccaggtccacta

SEQ ID NO: 433596 - DNA, 558 bp, Homo sapiens
agtctctcattgcctggtgcaacattccttctagcagctgttggaagtgcaaaaacctggaaggaccatcttgggccaacctggagaattaattaatgttaacgcccctaatcaaggagcaggctttcaacaagccaggcatccatacgacctacaraagtggcccatttaaaacctgctccacttactcacaaaagcagaagcacatgaaattagcttagtccagtgcatctcaaactttaatggatatatgaattacctgggggatctttttaaaatgcagattctgattcagtggttctgcagttgagacctgagttctgaacttctattaatcgtctaagtgatgtgaggttgataccatctgtcaatggacttagcccagcattggtctctttccttactattttttaggcaagatcacaattttgccacactggccagatgaaagcccaccttgatttaaaggaaatcatttatagcttgaacttctttcactaacagttcaattcaaattcaacaaacatttactgagaactaacttctttcttacagttc

SEQ ID NO: 433597 - DNA, 520 bp, Homo sapiens
ttccttgtgtgactctctgtcacacacaatcacttgggagacctgtacaacatggcctgaccattgccaagtgacatgaaaataatcccttaatctataactggtgggcagaaaccagcacttggggccctgctttctctgtcactgactctgtcaayccttgtcccaactctccctcaaggctactcccctacttccttcagcccaagggaataaaaaagcttatatactaccaagtacaaaatgaaccctaaaagaaactacctaccaaataatcaacgtagaatatttgctcaatgtagaatgggtactccatataaattcagcccgatcaaaggatatttacaaatagagtttattaaatatagaatataatcctgaatatcaataatagaaaattttacttagatccttttcaaaatgtctctgcatataagcatttgtcatgaaacattttataaataagttaaatggctgaatatatgtacttttcatattctcatagctttgtaatatttga

SEQ ID NO: 433598 - DNA, 472 bp, Homo sapiens
ctgtgaaactgggacttaagctcctgggaaaccctcagaggagcatgtcaactgtgttttagagtgatctgctcaggacatggaacaggagtctatttgctggctctgcttccagggggtcaaaggtttccccagatatgttaactcatttgtgcttgaaggttccagcaggtgtagaatggctgagcasattcctgctggtatgacaagtgctgttggcagagaagccctggatgggagataagaaacatattgtgcagtagaggtgagatatcagagtacatcttagcacaaatggttgtttcaataaaggttggagtaaaatgttagatctaaagtatgtgaggctgagtagaatatgtgttgatatataaggtaagaatcaagttgtctgatgtaactgaagggcatattgtagtatagagagaacactggggcacaaaacttacagagaaaatcttaaaagttaggt

SEQ ID NO: 433599 - DNA, 574 bp, Homo sapiens
cagatatttggactcatctccttttcatctacacacactcttgctgtctccggtctcctggctttaaataccacctatatgtcacagacttccacttttctgttttcattctacccaagattctttccaactctttccaaactgataagtccaaccgcctccttcacatttccactacttcatgyaataaagacttctctcacaccacacatccaattctgaactcttgattgcctcctgccccaaatctattccttcagcaacctaatcagtcttaagggacggcaactcaattcttctaattgttcatggcaaaaacctttgagttatctttaccttaattttctcactcatgccttacctccaataaatcaggaaatccttttcagtctagcttcaaaatatttctagaatgtaatcacttttcagcacctccactattgccatcatgatttgagttgacatcatttttcacctgatttgctgtaatagtttcatttcttttattctttgttatagactgaagtgtgtccccaccaaattcatgtgttgaagccctaactccccaatgtga

SEQ ID NO: 433600 - DNA, 574 bp, Homo sapiens
cagatatttggactcatctccttttcatctacacacactcttgctgtctccggtctcctggctttaaataccacctatatgtcacagacttccacttttctgttttcattctacccaagattctttccaactctttccaaactgataagtccaaccgcctccttcacatttccactacttcatgcaataaagacttctctcacaccacacatccaattctgaactcttgattgcctcctgccccaaatctattccttcagcaacctaatcagtcttaagggacggcaactcaattcttctaattgttcatggcaaaaacctttgagttatctttaccttaattttctcactcatgccttacctccaataaatcaggaaatccttttcagtctagcttcraaatatttctagaatgtaatcacttttcagcacctccactattgccatcatgatttgagttgacatcatttttcacctgatttgctgtaatagtttcatttcttttattctttgttatagactgaagtgtgtccccaccaaattcatgtgttgaagccctaactccccaatgtga

SEQ ID NO: 433601 - DNA, 610 bp, Homo sapiens
taatttgccacttacagaggtgactgtgcgtttttttttkttgttttttttttttgccagtctgatgtaccctgaagacttttggtttgggaacttgaggaggtcacaggataggataaaattcattttactgaagtatactggttatgaaaattgcttgttccagtgggcgatttcactacttcatttacagcgtaagtgctcattgtgttcccactggctgggatctgacccttatatttctcattttccttctgaaatgtgggtcagctgtgttgtcagattcctcttctcctgtaaaacattttatttttaaatatttgacactgcagccttctaaaagaacaggttaaaaaaaatgtcctgctggatggcatttatgactcagagaagtatcattgccactgacctcacaactcttcttaaatagtcagagaagggcaacaaaattgtcaattaggcttacagggaacagcattcagcccaactcaactcgtgcttggcagcataatcatgcagatcttgcttcggcacgagaagcctttcaagcctataataacgagggttcaacaaatttgaacttcctctctcaacagcagatttagaagct

SEQ ID NO: 433602 - DNA, 645 bp, Homo sapiens
aaaacccttggggtaggatcatttgtggttcaaatacttctgggatcaaaaaaaatgttattgcactgtggctgagagtgactctatgaaagtctttgtaaatgtttgcacaaacactaaaatgtttatacaaataaagtaatattagagactactgtatatttcatttcttgctcctgagaaatagtctagcttctgccttcccagaactttaaaatgcttataaattattttgctttatttcatgaagttgtattctcacagatatttttttctactctggtctccaaaccaaacattaacgccttcctagttttaagattcagaagtgttgactgctgcctccaaatcccagaaatgcaaagtaatttggatgcttgagatttaacaaagctttgggtaacctctgtttaactttcctgacrtgctgaaagatatttctcaaattctctctctaaagagactcccctaacagctcaagccccttctgcaaacagttcagctccaggaatatattaaaaggcccagttttttaggttcctttagttttctttatatgtcctaaggcaaaaatctttaaccatttcctttgaggtggggcttactgttcttcttttactcttcctagtactcacttccgtgtct

SEQ ID NO: 433603 - DNA, 557 bp, Homo sapiens
tgcattagcatcacataggaacctaatggaaatacagaatttcaggtctcatctcagacctagtgaatctgagtctgcatttcagcaagaacccagatgacgtgcatgcacattacagtttgagaagcactgtcctaggacatacttttggaggctcgattgggtaaaaagcccctggacccagctagactgaagtgtgattgatttgttggtcatgtgacatcagatggctatccctgaccagaagtgttccaaggaatcttttaggtgtttagtgacaaaaagtttattccactcaatggatttttaaaacaattactggaygactctcccttataaaaaagagagaggaaaatgaagtccattattgatttggagttattacagaatatcacgtgcaagcaagggaaggcagagatgtctggcatacttctctgttgggtgggcaccattggaggggtaaaggagtagaatttacagaaacatggaaaggcaagtttttacttttgtaaatatttgccaactaggaagtcagagaagcctggaggaggcatgtg

SEQ ID NO: 433604 - DNA, 586 bp, Homo sapiens
atggcacatgcctgaagtcccaggtactcgagagactgaggcagaggatcgctttatgtgatttttcatgtcttgatatctcttaaatctagagggctacaaaaagataacaaatttaaagaaataaacatttggcacaaataaactattgttttcaagatgtagggsaaggatgcagtattctaaccatttctttcaaaagtggactgtgaagcttaggaaactgactcaggaataattcgtcttctttgagagtctgtgtggctgacccaggtgcctcgaatctattccaggatggctgcattctgaagaattttccagcatggagccagcccagtgtgcatgttttgatggaattatgtacaatcctggtggtaacaattgaatagcctcttgaatgacacagaatgaacctcactgcaaggagcaaatgttatccaattgatgcagtaatgtgacaaataagcttctttccaacttaggtaacaattgccacatgttattcttcatctttgattttcccagggtacatgtacagggtgtgcaggcttgttacataggtaaacatgtgccatggtgctttgct

SEQ ID NO: 433605 - DNA, 537 bp, Homo sapiens
atgatgggactaaaactataaaggagtaagtaaggcaaagattttggtttggtaggtaggctaagataaaatgattaaagcatcgggttcaagctagagagaaactgtgggaaaaaaaaggagaccacacaaagcatgactagtttttattgatgagacattctttcaattctcccttcctcctgatttttctctttgtcttgttttcctcagataaaattcctttgttgaaatctccacattttctattccatttcctctttctttaacactctactcagtattaaaactactctcaaatatggacatactcatgtctaaatcacaaacatgtagataatgcaaataaaactccatggaagctacacatataaattctgattcctcattgaaatacrtgccttgatgcaacagtgatgatagaacacctagccaagccaaactcattttactcttaagatggtagtctcaaaatcacacatggggaggtgagtataggcataaagctcacagaacccgaatataacaaggatgtat

SEQ ID NO: 433606 - DNA, 513 bp, Homo sapiens
tcgattatattttctgatggagacaattcaggaagtctttggagtttcatttctattttgagtattcctaatgcatacatacatgtatatgcataaatacactgattttatgtttatatgcatatatatttatgtgtatatatatatatatatgtgtgtataggtgagtgtgatatatgtacatattattttagcttgcaataatgatacatgagccacatctcagacatttcaagttcagttattgtcatgaaatttatcaaagatgctcatgatgggagttttaattagcctatctaatyaaacttgagccagcacaatctattcttatattttcccattcatattttactaatactgcatttctatcactggcctatagtgatatcactgttgggtatacatggagcctgcacattcagcttctgtctttaatcatctctatactaatttaacactccaaacattttttttttaattttttttattatactttaagttttagggtacatg

SEQ ID NO: 433607 - DNA, 513 bp, Homo sapiens
tcgattatattttctgatggagacaattcaggaagtctttggagtttcatttctattttgagtattcctaatgcatacatacatgtatatgcataaatacactgattttatgtttatatgcatatatatttatgtgtatatatatatatatatgtgtgtataggtgagtgtgatatatgtacatattattttagcttgcaataatgatacatgagccacatctcagacatttcaagttcagttattgtcatgaaatttatcaaagatgctcatgatgggagttttaattagcctatctaattaaacttgagccagcacaatctattcttatattttcccattcatatttyactaatactgcatttctatcactggcctatagtgatatcactgttgggtatacatggagcctgcacattcagcttctgtctttaatcatctctatactaatttaacactccaaacattttttttttaattttttttattatactttaagttttagggtacatg

SEQ ID NO: 433608 - DNA, 573 bp, Homo sapiens
aaagagatattatccacagattattgtaggtattcttaatttcattctggggtcaggccagctacatatttataacatattgttttgtgataataaagattgcttttaccacatttttttcaggagaatggcattgacatcattaggggacataataaaaarcataataagaaacagcaatcattagcagggctatccctagggataattgagggcattttcacttttatcaagcataaaggagatctcataacactgtttcccttacaaaaattttctctcccttaaggaactgtgatccaatttctttttttggaaaacagcttacaactattaactagaatttttggtatacatgcttgtgtactaaccttacttctggctttatttatttatttatttatttatttatttatttatttatttgagatggagttttactcttgtggcccaggctggagtgcaatggcgcgatctcggctcactgcaacctctgcctcctaggttcaagtgattctcctgcctcagcctcccgagtagttggaattacaggcatgcgccaccacacccagc

SEQ ID NO: 433609 - DNA, 566 bp, Homo sapiens
cccacaatacttaaatgatataaaaaacacagctttttaagtatgcaaaagagttaattaacaattatattttaataagtgttatattctagtttcagatgaagaagctatataataaaatagtttagtartttctttcaaacctatgcaaaaaatattttcccattaagaaaaaaagcagacatactacataaaaagttaaacaaaagagactttaagccaaaataaaactcagaaatttatattcttcatgtttatatttaatttaactcaagaattttattttaaaaatgagatactccataaactaacacaaaatataattattatattttgagcactttctatgtgccagacacagaacagattggctcatttagtcttcacagtgaccctacgaaataggtactcattttacagataagaaaactgagacataagaaagttatataatctacctaaggtctcacagctgatagggaatgggatagttttccaagccaagcaacctggccctagagcctgtccttaaccaccaggctgtgtcacttgactaacacctaaag

SEQ ID NO: 433610 - DNA, 566 bp, Homo sapiens
cccacaatacttaaatgatataaaaaacacagctttttaagtatgcaaaagagttaattaacaattatattttaataagtgttatattctagtttcagatgaagaagctatataataaaatagtttagtagtttctttcaaacctatgcaaaaaatattttcccattaagaaaaaaagcagacatactacataaaaagttaaacaaaagagactttaagccaaaataaaactcagwaatttatattcttcatgtttatatttaatttaactcaagaattttattttaaaaatgagatactccataaactaacacaaaatataattattatattttgagcactttctatgtgccagacacagaacagattggctcatttagtcttcacagtgaccctacgaaataggtactcattttacagataagaaaactgagacataagaaagttatataatctacctaaggtctcacagctgatagggaatgggatagttttccaagccaagcaacctggccctagagcctgtccttaaccaccaggctgtgtcacttgactaacacctaaag

SEQ ID NO: 433611 - DNA, 566 bp, Homo sapiens
cccacaatacttaaatgatataaaaaacacagctttttaagtatgcaaaagagttaattaacaattatattttaataagtgttatattctagtttcagatgaagaagctatataataaaatagtttagtagtttctttcaaacctatgcaaaaaatattttcccattaagaaaaaaagcagacatactacataaaaagttaaacaaaagagactttaagccaaaataaaactcagaaatttatattcttcatgtttatatttaatttaactcaagaattttattttaaaaatgagatactccataaactaacacaaaatataattattatattttgagcactttctatgtgccagacacagaacagattggctcatttagtcttcacagtgaccctrcgaaataggtactcattttacagataagaaaactgagacataagaaagttatataatctacctaaggtctcacagctgatagggaatgggatagttttccaagccaagcaacctggccctagagcctgtccttaaccaccaggctgtgtcacttgactaacacctaaag

SEQ ID NO: 433612 - DNA, 547 bp, Homo sapiens
acagcacataaattatgagacgttttgcaaactgggggaaaatatacctaattttattggccatgaaaattatttcttccaagaatagtgatatagaaaatgtttctgtcttttttaaatgccttgcctggtgtagaactactttcttaattcttaatctgggcatttcagaaggatattttgtcattatgaggccaggcatgaaaaatcctaagtctgtttaagccattttataatgccaaatatataccttaagcctaaacatcttttacttttaagatatatttttacattggaggattttgttattatctacttcatgtatgaattgaatatttgttggactgttaaataataatagttatcactgattaagtatttacttattccaggctctctgtgaagtatattacatgcattgatcatctaattccccgagactttaaggaggtgtaattagcttctcctttagtagatgaagaaactgagccccaggctaaatttccaaaagtacgtagmcagcaagtgctgagatttgaaccaatgt

SEQ ID NO: 433613 - DNA, 604 bp, Homo sapiens
gcaggtagatctatcttcaggttaattttcagtctttacctttgtgctgacttttccaaatggtctacaatttacatgtcttttgtgtttatgtgaatgcttccagagtacagtcatcagcatcctgaacttcctaaatgcctgtcgcaagaaattttatgactcctacaacctcttaggtgaaaaagttttcagaaagataaaaaaattcagccagattcagcttccagggctcccatttcatctgaagcttgtctttctttgaaagtggtttgaataatagtttatcttatactgtggactaaggcttagatacccartacaaaatctaccttacacctgtcagaggatgattgtcaacaggccagtatgtactggctaaataaattaatataggaagaccctgatgcttgacaaatatagtgtgggaaatacatatagtgtatatgtatatatatatatacacacacacacacacacacaatatatatagtatatatagtatatctatattatatatatatagtatatatattttactaaggccttatagtcactaaaaactgaattatgttttaatagaggtataatacagtagtatttg

SEQ ID NO: 433614 - DNA, 604 bp, Homo sapiens
gcaggtagatctatcttcaggttaattttcagtctttacctttgtgctgacttttccaaatggtctacaatttacatgtcttttgtgtttatgtgaatgcttccagagtacagtcatcagcatcctgaacttcctaaatgcctgtcgcaagaaattttatgactcctacaacctcttaggtgaaaaagttttcagaaagataaaaaaattcagccagattcagcttccagggctcccatttcatctgaagcttgtctttctttgaaagtggtttgaataatagtttatcttatactgtggactaaggcttagatacccaatayaaaatctaccttacacctgtcagaggatgattgtcaacaggccagtatgtactggctaaataaattaatataggaagaccctgatgcttgacaaatatagtgtgggaaatacatatagtgtatatgtatatatatatatacacacacacacacacacacaatatatatagtatatatagtatatctatattatatatatatagtatatatattttactaaggccttatagtcactaaaaactgaattatgttttaatagaggtataatacagtagtatttg

SEQ ID NO: 433615 - DNA, 604 bp, Homo sapiens
gcaggtagatctatcttcaggttaattttcagtctttacctttgtgctgacttttccaaatggtctacaatttacatgtcttttgtgtttatgtgaatgcttccagagtacagtcatcagcatcctgaacttcctaaatgcctgtcgcaagaaattttatgactcctacaacctcttaggtgaaaaagttttcagaaagataaaaaaattcagccagattcagcttccagggctcccatttcatctgaagcttgtctttctttgaaagtggtttgaataatagtttatcttatactgtggactaaggcttagatacccaatacaaaatctaccttacacctgtcagaggatgattgtcaacaggccagtatgtactggctaaataaattaatataggaagaccctgatgcttgacaaatatagtgtgggaaatacatatagtgtatatgtatatatatatayacacacacacacacacacacaatatatatagtatatatagtatatctatattatatatatatagtatatatattttactaaggccttatagtcactaaaaactgaattatgttttaatagaggtataatacagtagtatttg

SEQ ID NO: 433616 - DNA, 561 bp, Homo sapiens
gatgagaaatttattggaaagcccttgggagcagagagaattgttaggaaggctggagaaccaggcttggaagaggcaaggaacaaagggaatcaaggcagtaaccccttctgggtcatgcctcagcacaggcttgttggcacatggttgcccctgaacattccacattgccctggcactcagcagtggccttaccaccactggacactggtttccctcactgctacatcgccatgggcccctgaacaaagggaaccatactgycactggaacatatctgagctgccctggcttgtttgcgcacctcactctaaattcacagtccctggaagagcccacaatgggtcaagctttgaccacatggtccctctgtagctgctaaggggcaaaaaaagcaatcatggtcttttcagctttcctggtagaaggtagagccctgctttacggccacacttacacagcaccaggttcctcagacatgggagggaggtttagatcataggtaccctctgccttagtctgctcaggctgccataactaaattccaaagactgggtggct

SEQ ID NO: 433617 - DNA, 568 bp, Homo sapiens
caaacatgggataataaaagtccataatttttttcagttccttcaacattcagttctggcaaagcccagaattacaaacttcattacagtgaggattgtgcctttactatattcatctttatatctctctcctccccacaatacacataacaaagctttgcatatactgatattcaatgggaaccaaatggaaataaaattgaacttggagactgtactgaagaagtagcttctataatcagagtcgacttgccctttctcccagtcattggtaagcattgctgtaaatcttcttgtgawcaggattcagccttggctttatatcagtcacacaatgaaaaccaatctggccaaggctggtgtgtctgaattaatcctgtgttgtcagggaacatgcatttcctcttttctttcttattgacaagagatctctggctatttgcaaaggagagtctttgagttacagcttctgcaatttctgacacatgtcgtgatgctataccattgtaagtggacaatcttgctcaattgagaggtttagtgaaaggctatactgggggctgagcaa

SEQ ID NO: 433618 - DNA, 592 bp, Homo sapiens
tacaaatgaccaataaacacataaaaaatgctcaacattataagccatamggaaaatgtaaatcaaagccgtaatgaaatacatcacaaccactaggatggttagaatcaaaaagtcaaacagtaagtgctggcaggtatatggagaaactgaaatcttcatatactcctgatgggaatgtaaaatgatgcagccactttggaaaaaaagctggttgttccttcaaatggtttaatgtacatttactatatgacccagcatatacctaagagtttctttctagtatatacctaagagaaattaaaacatattttcatgcaaaaacctttatacaaatgtttacaatgccattattcatcatggccaaaaagtgatgtgggctgtcagaaaacaataccccaaaatgaatggtatcagaagcagctctctctgacctcctgccctcctgtttctgactcttccttctcacctgaggttagccatagaaactggaattcctcttccccaagacaggtcatagaaaccagaaatccctttcccctataaaaagctaaaagccagccataaaacctaaaaatattactgtaacttt

SEQ ID NO: 433619 - DNA, 644 bp, Homo sapiens
cttctcacctcagcctcccaagtagctgggacttggccaataaacacataaaaacatgctcaacattactagccataagggaaatgcaaatcaaagccataatgaaatacttcacaaccaccaggatggctagaatcaraaagtcaaatagtaagtgctggcaggtctatggagaaattaaaaccatcacatacccctgatggaaatataaaatggtgcagctacaccctgatctgcttttttttttctttcctccgtcattttcagcaaactttcagtgagcaaaagggagatttcttttggcttctgcagtggaaacaacccaaatgtccatgaactgatgaatgaataaataaaatgtggtatatccatacaatggaatattatgtggcaataaaaataaatgaagtggaggagggggtagagcaagatagccaaatcgaaggctctaccaacagtcccccactgcaaggacaccaatttaacaactatctacacaaaaaagggccttcataagaataaaaaatcaagtgagtacagtacctggttttaacatctaccattgaaagaggcattgaagagggtaggaaagagtcctgaattgccagtgccaccccttcccctatcccacagtagtggctatg

SEQ ID NO: 433620 - DNA, 644 bp, Homo sapiens
cttctcacctcagcctcccaagtagctgggacttggccaataaacacataaaaacatgctcaacattactagccataagggaaatgcaaatcaaagccataatgaaatacttcacaaccaccaggatggctagaatcagaaagtcaaatagtaagtgctggcaggtctatggagaaattaaaaccatcayatacccctgatggaaatataaaatggtgcagctacaccctgatctgcttttttttttctttcctccgtcattttcagcaaactttcagtgagcaaaagggagatttcttttggcttctgcagtggaaacaacccaaatgtccatgaactgatgaatgaataaataaaatgtggtatatccatacaatggaatattatgtggcaataaaaataaatgaagtggaggagggggtagagcaagatagccaaatcgaaggctctaccaacagtcccccactgcaaggacaccaatttaacaactatctacacaaaaaagggccttcataagaataaaaaatcaagtgagtacagtacctggttttaacatctaccattgaaagaggcattgaagagggtaggaaagagtcctgaattgccagtgccaccccttcccctatcccacagtagtggctatg

SEQ ID NO: 433621 - DNA, 644 bp, Homo sapiens
cttctcacctcagcctcccaagtagctgggacttggccaataaacacataaaaacatgctcaacattactagccataagggaaatgcaaatcaaagccataatgaaatacttcacaaccaccaggatggctagaatcagaaagtcaaatagtaagtgctggcaggtctatggagaaattaaaaccatcacatacccctgatggaaatataaaatggtgcagctacaccctgatctgcttttttttttctttcctccgtcattttcagcaaactttcagtgagcaaaagggagatttcttttggcttctgcagtggaaacaacccaaaygtccatgaactgatgaatgaataaataaaatgtggtatatccatacaatggaatattatgtggcaataaaaataaatgaagtggaggagggggtagagcaagatagccaaatcgaaggctctaccaacagtcccccactgcaaggacaccaatttaacaactatctacacaaaaaagggccttcataagaataaaaaatcaagtgagtacagtacctggttttaacatctaccattgaaagaggcattgaagagggtaggaaagagtcctgaattgccagtgccaccccttcccctatcccacagtagtggctatg

SEQ ID NO: 433622 - DNA, 627 bp, Homo sapiens
tggagctccaacatgttgggcagcagactttacagtggaaattttacaggccaggagagaggcatgacatatttaaagtgctgaaggaaaataacttttaccctggaatagtatatccagtgaaattatccttcagccatgaagaagaaataaagacttycccagacaaacaaaagctgagggattttattatcaacaccagagctgtcctacaagaaatgccaaagggagtacttcaattggaaagaaaaagacattagtgagcaataagaaatcatctgaaggtacaaaactcactactaatagtaagtaaacagaaaaacaatattataacactataactgtagtatataaactcctcttaagtagaaagactaaatgatgaaacaatcaaaaacaataacttcaacaacttttcaagacatagacagtaaaataagatataagtagaaaaaaaacaaaaaattaaacagttgggggagggggatgaaattaaggtatagaattttttttagctttctttttaattgtttgtttatgcaaaaagtgttaagttgttattaacttaaaataatgggttataagatagtatttggaatcctcatagtcacctcaaattaaaaaaca

SEQ ID NO: 433623 - DNA, 627 bp, Homo sapiens
tggagctccaacatgttgggcagcagactttacagtggaaattttacaggccaggagagaggcatgacatatttaaagtgctgaaggaaaataacttttaccctggaatagtatatccagtgaaattatccttcagccatgaagaagaaataaagactttcccagacaaacaaaagctgagggattttattatcaacaccagagctgtcctacaagaaatgccaaagggagtacttcaattggaaagaaaaagacattagtgagcaataagaaatcatctgaaggtacaaaactcactactaayagtaagtaaacagaaaaacaatattataacactataactgtagtatataaactcctcttaagtagaaagactaaatgatgaaacaatcaaaaacaataacttcaacaacttttcaagacatagacagtaaaataagatataagtagaaaaaaaacaaaaaattaaacagttgggggagggggatgaaattaaggtatagaattttttttagctttctttttaattgtttgtttatgcaaaaagtgttaagttgttattaacttaaaataatgggttataagatagtatttggaatcctcatagtcacctcaaattaaaaaaca

SEQ ID NO: 433624 - DNA, 592 bp, Homo sapiens
accagtttgttcatccattcattgtttgaaggatatttgggttatttccaactttgaaccagtatgaatagagctgttataatcattcatacatgggtattttatatggcataacttttccatttctctaggatgtaaacacctaagagtagaatcattgggtcacatggtaagagtacattttactttgtaagatacagccaaaactgtttcccgaagtggctgcaccrttttatatcatgaccatgtattagtcagctcaggctcccataacacagtataccacagactggtgtcttaaatagcagaagtttattttttttcacagttctgaagtctgggagtccaagttcaaggttctgcccaatttggattctgacgagggctctcttcctggcttgcagacagctaccttctaggtgtatcctcacaagtggagaaagaaagagagagctgcctggtgtctcttcttaagagataatagtcccgttggatcaggcaacacccttatgaattcattcaaccttaatttcttccttggaggccccaaccatctccaaatacagccatattggcattagggcttcatcat

SEQ ID NO: 433625 - DNA, 476 bp, Homo sapiens
ttacctattgttcaaggcacatttctttcctcctcctcctcctcttcttcttctcctctttctcatcctccttctccttctcctcttcctcctccttctccccctctccctcccccctcctcccacctcagctgggattacaggcacacaccaccatgcctggctaagttttgtatttttagtagggatggggtttcaccacgttggccaggctggcctcgaactcctgacctcaagtgatccaccagyctcagcctgtcaaagtgctgggattacaggcgtgagccaccacacccagccttaaggcacatttcttatttcacctcttccatgaaacattttttattactaataactcgttaacacatcttcacttatctcctcaatggtattccataacaccctttccttctgtccctctattcgattatttcctccttcaggatgaagtctgtgtctcattcacttttgcattt

SEQ ID NO: 433626 - DNA, 557 bp, Homo sapiens
ccacagtgaaaggagtgatgaagttaggaataatactaggtcctgtcaacccctgagattctaggaatttctctaactttcaagaaattctttggaatgtttttagaagttttttttccttggaaaccaagatgcaagagatatcatttggtagagctgccactatccacttggttctgggagacctttaagaaatttaatggaggaaggaaagatgaaataagcaggagagaaagaaaattttaaaataaaagtcaccaaaaatatcccttagcatagtgaacataagctttcatttagtaagagtctctttgggtcagatccctgttctcatctttagttcctgtagttcaagtggggctgatccttctgtatcataatcaacttgaaccccagtcttcatgtttcctgctgktggtgccattgtgtaagtatagctggtctgttgaattaactggactcctttggatgcaagcacaaagtaactccatttttctcaagataactcctttaaatctactcccctaacttataccacatcccccacctctggatcc

SEQ ID NO: 433627 - DNA, 591 bp, Homo sapiens
ctctttgggtcagatccctgttctcatctttagttcctgtagttcaagtggggctgatccttctgtatcataatcaacttgaaccccagtcttcatgtttcctgctggtggtgccattgtgtaagtatagctggtctgttgaattaactggactcctttggatgcaagcacaaagtaactccatttttctcaagataactcctttaaatctactcccctaacttataccacatcccccacctctggatccaaaccaaataccacctctgactccaggcagaggctccatgacacaagccagagtcctccttaggacttttttgggaattattgtgaaaatggcactctcttttcttagatggtttcctgcggatgatacaagcctagagttactctaagcttattttccattttgtgggaaattattgtccaagaaaaagtctatctaraaaaaaacaattctcaggtagcaaaaaaagtaaagcatcttgatgtcaacctcctctttttctactctgcttacaaaatatccacgagtcacctgaaatagctttgagtttggatttcttcattacctgggagatagatgat

SEQ ID NO: 433628 - DNA, 466 bp, Homo sapiens
atttggggatatgcaggtatgatgaaatgtctttattttcttacctaactctctactctttctgatcactcactagccttcatctagctgctccagaatttgagctactaaacaaatgtgacayaggacatatggcagaatgtcttactcaactggtgtaggccttaaagccctctgagtatggaggattccaagtggttggtctacctctttgtggttttatgggttcctgttgcagacccctctcctgtaaataccttaatatatgtgatgttttcaagttggacacttataagtccatcctcagtctcttattttccatggttcatccactgtggaacacttgttgcctttcctgacattcttcgagtgaaattcctttcacaatgaccaatctaatttcctctaactgggtctacagttggtgcacggaaaacatactttcatggctccagggaagtctgcc

SEQ ID NO: 433629 - DNA, 466 bp, Homo sapiens
atttggggatatgcaggtatgatgaaatgtctttattttcttacctaactctctactctttctgatcactcactagccttcatctagctgctccagaatttgagctactaaacaaatgtgacataggacatatggcagaatgkcttactcaactggtgtaggccttaaagccctctgagtatggaggattccaagtggttggtctacctctttgtggttttatgggttcctgttgcagacccctctcctgtaaataccttaatatatgtgatgttttcaagttggacacttataagtccatcctcagtctcttattttccatggttcatccactgtggaacacttgttgcctttcctgacattcttcgagtgaaattcctttcacaatgaccaatctaatttcctctaactgggtctacagttggtgcacggaaaacatactttcatggctccagggaagtctgcc

SEQ ID NO: 433630 - DNA, 550 bp, Homo sapiens
aaataatcagggataaagaggggcattgcataatgataaaggggtcaattctccaagaagacatgacaatccttaatgcatatgtacctaaaaacagagtttaaaaaaaygtgagacaaaatctgataaaaatgcaagaagaaataattgaattaactataatagttggtacagttggagaatttaatactgtctttaggtaattgacagatctagcaagcagaaaatcataaggatgtaatgaaccaaacagcaccatctatcagctggatctaactgacattcaactatagtagaattcacatttttttcaagctcacaagaaacagtgaccaaaacagaccaaatactgggccataaagtataggccattagtatgtgtgagatgcagcaaaaacagtacttagagggaaatatatagtaatgaatatttatattagaaaaaatctaagatcaataatctaggcttctaccttaagaaattagaaaaaagatgagtacattaaatccagagtagggaaaagaaaagaaataagagatttggcatata

SEQ ID NO: 433631 - DNA, 615 bp, Homo sapiens
aacatggaaattatacttaacaataatttattgtatatttcaaaatagctagaagagaagaatcgcaatgttcccaacacaaaaaaagataaatatttgaggtgatggatatcccagttaccctgatttgacctctgcacattgtatacaggtatcaaaatagcacatgtacccccaaaatatgtacaactattatacatccataaaagtggtaggggttgtcttcatcrccaatctcatcatcatcatcaccaccactgccattaccaccatcagcaccataatcatcatcacatcacaataaaatgtgcgttgatggaaaatattgaacatacaaagataaatgaagcctggttagataaaaaggttaattgtggaatccacaagagaatctccctatttgttggagaatctgctaaaagaccaccttcttcaggatgctttcttaggcacctctgtcctgatattgatgacttaccttctcctggtcccgtctgcctttgtgctgtcatggcccacagtgacccagaggtcagccacttcatctctttatgttctgctacacaattccactcacacacattagtttatgaaagattttgtaatagaaaaaga

SEQ ID NO: 433632 - DNA, 542 bp, Homo sapiens
tctgtaaagaaatcctctttaccagcacacctccaccagttatgtcmccatttatatcctggaagtaacaatggtctatgatataccagactggatttcgtgtcaccccttagcaaattgtgcatatatgtttatgcaccactcttaaaaatgtgtgagcagttaacaaacaccaattatcttaattttagggcttcatctgacacaaaggctaggataggataactccaatttgaacatcccgtttcattggcatataaaaatctactaggggaaaagaaaatccaccaggattctctcagcaaaacttagacaggagtatagatatcaattatgttctttgcatatacagtaattgacacagtttggatgtttgtaccctccaaatctcatttagagatgcaattcccagtgttggaggtgaggcctggtgggaggtgtttgggttatgggggcagatccctcatgaatggcttgatgccctccccatagtaatgagttcacctaagatctgattatttaaaaaggagcctggcacatct

SEQ ID NO: 433633 - DNA, 542 bp, Homo sapiens
tctgtaaagaaatcctctttaccagcacacctccaccagttatgtccccatttatatcctggaagtaacaatggtctatgatataccagactggatttcgtgtcaccccttagcaaattgtgcatatatgtttatgcaccactcttaaaaatgtgtgagcagttaacaaacaccaattatcttaattttagggcttcatctgacacaaaggctaggataggataactccaatttgaacatcccgtttcattggcatataaaaatctactaggggaaaagaaaatccaccaggattctctcagcaaaacttagacaggagtatagatatcaattatgttctttgcatatacagtaattgacacagtttggatgtttgtaccctccaaatctcatttagagatgcaattcccagtgttggaggtgaggcctggtgggaggtgtttgggttatgggggcagatccctcatgaatggcttgatgccctccscatagtaatgagttcacctaagatctgattatttaaaaaggagcctggcacatct

SEQ ID NO: 433634 - DNA, 554 bp, Homo sapiens
gatgtctgaactccttttacctggtagtagtgaccagcatatcactactacctcttccaaccctctttcaactaacttcttctgtcttctagaaagcagatatctctagtgttgagggataatctttgaggttgccttaggctccctctgagaaacaacactcaaaacagccacttatattcttgccatatttgcacagcaaacttatttaggctacagacatataggtatcagacaagaagaacagaaatctatgctactcaagaattgtcccatgcttctctgaggatgcccatttgcttaccaattactgtaacagttgctcatataaactactaactggaatcraagatggtgaagagtgtgaataaattttgaaagactttcactgaccaaaacttttaattgaatgcgacttaaaatggacatatatttatagaagctctcattctgagcattggaatatgatggacttcaaatccttcaatcaactttatgcataaaaagcgaatttgtttagtcagttgatgaaagccgtgagtttcatgatgtct

SEQ ID NO: 433635 - DNA, 599 bp, Homo sapiens
ttatttttagaccctgatgtgtgtgcctggagccckctgtgagaattcctcaaatcttacgtggcagcaggagttttggggttgcccagctgcataggggttttagctgttccttagataaactttcagaaaatcatcctgttttcaatcctacccaacaggtgcttccaatttctgcttgtttctaggatcctgggatgaaaattggctttcactgtaggaagttacgcttcaatattgctgctctgataatagttgccatttaactatttgctttcatctttcaaaatgtgttaactcttctcgtccattttcatctcttctccttttatcactgctcttgttataaaaattttatatctttaaatcttctttattcttttaattttataatagtggaatttcaggatgtagcagagaaaaacaaatatatcttatctaacatattccactgaattccttctatagcatttctaagtccctgagaaactatgatgctgagttaagtatgattcaaggtcattaaagccatttaatactgtagctaatgagcaaaatgtaagatagacattgggctcaataaaggcaaacaatcatag

SEQ ID NO: 433636 - DNA, 617 bp, Homo sapiens
caatggagcacaaggtggttaacacatcttgaaagtaagtccatggcaggaaaataaacttttgtttatagcactttgtaggtaactatctgttctatttccctagatcaggggatggcacactacaagaggcaggcctagacactgcctgttttttaaataaagttttatttgaacacagcgatgccaatttttatttttatttacatattgtttatgactacttttgtgctaaaacagaagagttgagtagcccacggagctgaaaatatttgttatttgtctctacagaaaaagtttataaaccccaaattggaatatcttacgtattcctattccatagtagttggttcacaaatgcctccaattaatccactcatgtgtcttgtgttgaaatctgtctgatatggaccacatagtagcttcatgtgtarggaacataagattgaatcttgtagcaaagtacccttttccctttttccaaattttaaatgatagcaatctgaatttgatattgtagaaaccaaactataaatttaaaaatcacaatttctaggctgtccgtgaggactgtgattctgaaggtaaatcttattcccttttattaacaaaacagc

SEQ ID NO: 433637 - DNA, 617 bp, Homo sapiens
caatggagcacaaggtggttaacacatcttgaaagtaagtccatggcaggaaaataaacttttgtttatagcactttgtaggtaactatctgttctatttccctagatcaggggatggcacactacaagaggcaggcctagacactgcctgttttttaaataaagttttatttgaacacagcgatgccaatttttatttttatttacatattgtttatgactacttttgtgctaaaacagaagagttgagtagcccacggagctgaaaatatttgttatttgtctctacagaaaaagtttataaaccccaaattggaatatcttacgtattcctattccatagtagttggttcacaaatgcctccaattaatccactcatgtgtcttgtgttgaaatctgtctgatatggaccacatagtagcttcatgtgtaaggaacataagattgaatcttgtagcaaagtacccttttccctttttccaaattttaaatgatagcaatmtgaatttgatattgtagaaaccaaactataaatttaaaaatcacaatttctaggctgtccgtgaggactgtgattctgaaggtaaatcttattcccttttattaacaaaacagc

SEQ ID NO: 433638 - DNA, 617 bp, Homo sapiens
caatggagcacaaggtggttaacacatcttgaaagtaagtccatggcaggaaaataaacttttgtttatagcactttgtaggtaactatctgttctatttccctagatcaggggatggcacactacaagaggcaggcctagacactgcctgttttttaaataaagttttatttgaacacagcgatgccaatttttatttttatttacatattgtttatgactacttttgtgctaaaacagaagagttgagtagcccacggagctgaaaatatttgttatttgtctctacagaaaaagtttataaaccccaaattggaatatcttacgtattcctattccatagtagttggttcacaaatgcctccaattaatccactcatgtgtcttgtgttgaaatctgtctgatatggaccacatagtagcttcatgtgtaaggaacataagattgaatcttgtagcaaagtacccttttccctttttccaaattttaaatgatagcaatctgaatttgrtattgtagaaaccaaactataaatttaaaaatcacaatttctaggctgtccgtgaggactgtgattctgaaggtaaatcttattcccttttattaacaaaacagc

SEQ ID NO: 433639 - DNA, 265 bp, Homo sapiens
ctccctaactcaagatgatacattccctaggagagacagggacagaaataaggcctgggctgtttcaggcagttcttccctrtctcaggttattgcattcccagaaatctctactgttactcttgagaaatataaggaagaacagggagagaactgggtcattctaaagctgctggagaactgtcctgtaggtttatcagttcagtattcctgtcattattgtacaggtgaggaaactgagactcacattcagttacttgtccaa

SEQ ID NO: 433640 - DNA, 635 bp, Homo sapiens
aaattggagaatgtccctggcaccaccctgctgagttctaccaagtctggtttgaatgaaatgaaaagtcaaagtacagatatgttccattttcattggaagcgaaaaggtttttttccttcagttgtttctttttccctccagaaaaatcttatcctttaaaaaaaaaaagctaatactataccggggtccacattagtcctctcctttcagtaaatataattttgaccaatattatcctggatatttcattgtcttgtcaacaaaaacatggtaattggtattaatgtcygaaaatcaaagcctttcggaaatgataggcttgatttagtaccactggcatggctctcattaaatcagcaaagtctgtgtagtacaaatgtgcagattcctttattcatcactgtaagaacctcagggagcctcactgaaaatgcacatgacagatcaggtgggtacggctgcagcccaaataaagacaaaatagaaaatgcgagcaacatcatataaaatttacctcacagaagtcagcaagtaatcattacttaagtaaattatgctttttacataatcggaaatgttctgtatttaagagtcttggagggacaaatacacattgcactaaatatttgagg

SEQ ID NO: 433641 - DNA, 635 bp, Homo sapiens
aaattggagaatgtccctggcaccaccctgctgagttctaccaagtctggtttgaatgaaatgaaaagtcaaagtacagatatgttccattttcattggaagcgaaaaggtttttttccttcagttgtttctttttccctccagaaaaatcttatcctttaaaaaaaaaaagctaatactataccggggtccacattagtcctctcctttcagtaaatataattttgaccaatattatcctggatatttcattgtcttgtcaacaaaaacatggtaattggtattaatgtccgaaaatcaaagcctttcggaaatgataggcttgatttagtaccactggcatggctctcattaaatcagcaaagtctgtgtagtacaaatgtgcagattcctttattcatcactgtaagaacctcagggagcctcactgaaaatgcacatgacagatcaggtgggtacggctgcagcccaaataaagacaaaatagaaaatgcgagcaacatcatataaaatttacctcacagaagtcagyaagtaatcattacttaagtaaattatgctttttacataatcggaaatgttctgtatttaagagtcttggagggacaaatacacattgcactaaatatttgagg

SEQ ID NO: 433642 - DNA, 602 bp, Homo sapiens
gagaattaacactgtaatggatgatttcaaccargttatgataattaaaataacttaccttttaattatgtgctatagcttaaaaaatacctgcagaatcatcatctcatttgattcttacagcaaccagatgaagtacatagaattggtattctcataattatgaaattagccttcacggagaaaaagcaaatgaaaatatttagaaacagcagtgctgtaatatcctcacatccagtttacaattcttgaaagaagtagtactgatgttgagatttctatttttaaaaatacttcagagcatatttctcctttgccctcacctcacttagttaaaaaggataagagctaagtgcaattgtctgaagccatcaacagcagagctaaaatgcactccaaattcgtgactgtcatcttacagtcacgtgttgcttaatgacatgactacatttcgagaaatgcatcgtttggtgattttgtctttgtgcaaacatcttagagcatacttacacaaacctagatggtatagcctactacaaacctagatggtatatcctactacaaacctaggctgtatggtgtagcctattactcctagtcta

SEQ ID NO: 433643 - DNA, 524 bp, Homo sapiens
tggcgtgtgcctgcagtcccagccactctggaggctgaggtgggaggatcacttgagcccaggaggttgaggatgtagtgagtgtgatggcaccactgcactccagcctgggcaacagagtgagaccctatcctaaaacaaaacaaaacaaaattaaatttttaaaaaaagtgagatatttaacatgacttgattccaggacctggcagagatctataaatgatggcgaaatgatgtaaagtaagtgaaaaagaatgaaggtatggtttacatttggggkgggggaaaaaagagatacgcttcccattgctctgttgttttatctaaatccacttcctcatatagctttttccgaatatgaagatagactacattgttaggatgagaaatgtaggaactataacaagaaaaccccaaaaattaccataattttggaaaatttgcttaatcttttaggcttcattttcctaatctttaaaataatgataagcatagtatctattagaatcaataattacaatgtt

SEQ ID NO: 433644 - DNA, 570 bp, Homo sapiens
tactagcataaaataacagctcaataaatgatccccccatcccgccctcttcttcctctccccgtccacttcctcctcctcctccttctttcttcatcaccatcatyattttttaattaaagctacaattacacacatgatcagcatgacgatttgctgcctaataacctaactgtcgggatgctccactgaatttgtcatttcctgtcagccattccttctctcagcattggtttctttgaaaagaaaaaagcattcagtaaagatttcttagtcttctttatcaaaagataccaagatttctatatgctgttttgttatcctgtgaaatttctaggaatctcattttaagactcttattgtaaattgacatgtgcgtagtcatttcaatttaataatcattggagacaagatggtaattaactctacagcctacttattattttaactaatagcataaccatgtttatgtttaacttcttcaggttcatgtaagaactaaagtaaccagtgcctttttatctgatgctacaggcacaggtttattttgcaagcatttattttgttggg

SEQ ID NO: 433645 - DNA, 540 bp, Homo sapiens
ccgttctcacactgctatgaagaaacacctgcgactcagtaattaataaagaggtttaattggctcacggttctgtaggctgtataggaagcatgatgctggccatctgctcagcttccgagaagtcctcaggaagcttacartcatggtggaaggcaaagtagaagctggctcctcttacatggccagagcaagagcaagacagggaggagtgaggtgctacacacttttcaataaccagatctcctgagaactcactcagcatcacaagaacagcaccaaggggactgtgctaaaccattcatgaaggatccactcccacaatccaatcacttcccaccaggccctagctccaacactgaggattacaattgaacatgagatttgggtgggaacacagatccaaatgataacagttagcaaatgctgttgatgtggagggtattgagaatgcataatgaacatggcactttatttgctatatagttgtaagaacactctggaactcacagcttactgattctggggatggtgctgggt

SEQ ID NO: 433646 - DNA, 540 bp, Homo sapiens
ccgttctcacactgctatgaagaaacacctgcgactcagtaattaataaagaggtttaattggctcacggttctgtaggctgtataggaagcatgatgctggccatctgctcagcttccgagaagtcctcaggaagcttacagtcatggtggaaggcaaagtagaagctggctcctcttacatggccagagcaagagcaagacagggaggagtgaggtgctacacacttttcaataaccagatctcctgagaactcactcagcatcacaagaacagcaccaaggggactgtgctaaaccattcatgaaggatccactcccacaatccaatcacttcccaccaggccctagctccaacactgaggattacaattgaacatgagatttgggtgggaacacagatccaaatgatarcagttagcaaatgctgttgatgtggagggtattgagaatgcataatgaacatggcactttatttgctatatagttgtaagaacactctggaactcacagcttactgattctggggatggtgctgggt

SEQ ID NO: 433647 - DNA, 549 bp, Homo sapiens
cttctgtgaagtttctaactggttaccgtagatctattctcgtcctcaaaatccagacttcatgctcttacccaagtaatagtcacatctgtcactgccttgctcargtaggttaagaagcctgagcatattccacagagcaaacccatgcttccttacatcaaagccaagctttccacaacccagcttcatactatcatggcctgagatatccacgtgctccatactttcaatagaagagccttcactatttcacagctgtgcaatctatatcccttaccttggacatgactggtatttctgcccaaaatggctttgcacttccatatcagcctactgaaaccctatatgtcctttagtgccctgctaagatgtcattttcagattccagggagtacttccagattccctgtcagaaacaaattccttcttcttcaattccactcatgttactctctctagatttctattgttatttttcacattacacattacaattagcagtgtatatacatcttctttaagttttgatatttaagttcctagagg

SEQ ID NO: 433648 - DNA, 549 bp, Homo sapiens
cttctgtgaagtttctaactggttaccgtagatctattctcgtcctcaaaatccagacttcatgctcttacccaagtaatagtcacatctgtcactgccttgctcaagtaggttaagaagcctgagcatattccacagagcaaacccatgcttccttacatcaaagccaagctttccacaacccagcttcatactatcatggcctgagatatccacgtgctccatactttcaatagaagagccttcactatttcacarctgtgcaatctatatcccttaccttggacatgactggtatttctgcccaaaatggctttgcacttccatatcagcctactgaaaccctatatgtcctttagtgccctgctaagatgtcattttcagattccagggagtacttccagattccctgtcagaaacaaattccttcttcttcaattccactcatgttactctctctagatttctattgttatttttcacattacacattacaattagcagtgtatatacatcttctttaagttttgatatttaagttcctagagg

SEQ ID NO: 433649 - DNA, 573 bp, Homo sapiens
aagctcacactctcacctagtttcattcctgaaattgctcatccagagaaggtctcagccaggaggactatggcaagtgtgaaatgatctaaaaagtccagaggcttatacctgatgctgtgcatcaggcttatacctaatgccctgctgaataacatcagataagatttggttggcttttattttatttaaaaaaatttgtatgttaatttttgtttagataatatatttacatagttcaaaactctaaagatacaaggagatagsgaaaaagttatccacccactctgttccctatccacttaattccccactcatgtagctaccaattttatcaagttttcgaatgagaagcagttattaggtgataggtagagagagagttctttaatcccaactctctgattttggaacacaaggacagcaaaaaggcagtttggagaaatgttttccaaatatgtctttgttacttgttttttccatttttaacagtgggtagctattctctatgagtgcattttggaaactggataaatttttcaaggatgctgctttgttaacttgtcaagattt

SEQ ID NO: 433650 - DNA, 594 bp, Homo sapiens
caatctgggaccgagaaaatggcaatgttaagtaataaasatgctgtgagatactccatagagacactcttgccctttaagacagaagaagtgatggatttagcaatatagctaggagagatgaactatggaattgcagactctaccccttaggctagcagcatggaaatctcctattacatgctaatgcagtactattgcattgctgtggttgggggtataaggttgccattttaatttaaatgctcagacctcaatctaagatttattggggctttcacggtaagcaacaagttcaggaatgaatattcttttgttttggaaaaagtttcttttgatgattgactatattacacaagtgttttcctttccacttaagagtttcattttttatattctctcataactttgtgcaatgaaagaaaattgtttggttgagtcctgtagaactatgaatacactagggttttttgattcctatgtgatttttccagaactagtgtaaatttactctgtataaccccaggcaatctatctagcagaggcacacttcttttcaagatattgctcaataactaactcaggcatgacgtc

SEQ ID NO: 433651 - DNA, 626 bp, Homo sapiens
tttgaacggtgctgctttattctttatttattctataaattcagcattttgagcttcttgattatcaaagactttcaccttctcccttcatcagctattcattctcatgatcatgtcctgtatcatgctgagcacaaagcaggtgtttaaaaaatgtctattagctgaataaataataaatttataaatttataaataaataacaaattaataaataatgaagaaattacagaataaaagaagagtagctatgaagagaataggaattcaaaaagtgagaagtgagaggcaatgaggggagcctatgcttaggtcaaggctctacstaagtgttgctggaggtggcattttacattgggggtggatgctcagctacaaccctatttgaaatacatcaagtaacatatgtaattttgattcagctagaataaagttgagctcaatatttctataaatctgtctttcaagattaatttcacagcctttaaatatctgtcaaccaggactcttctgactccatgtcatggagactcttagagactctgagagttttttattgtgacttctgagtagtgtgataaaatcttatgctgtcccactttgtgggatacactgaacggaaggac

SEQ ID NO: 433652 - DNA, 626 bp, Homo sapiens
tttgaacggtgctgctttattctttatttattctataaattcagcattttgagcttcttgattatcaaagactttcaccttctcccttcatcagctattcattctcatgatcatgtcctgtatcatgctgagcacaaagcaggtgtttaaaaaatgtctattagctgaataaataataaatttataaatttataaataaataacaaattaataaataatgaagaaattacagaataaaagaagagtagctatgaagagaataggaattcaaaaagtgagaagtgagaggcaatgaggggagcctatgcttaggtcaaggctctacgtaagtgttgctggaggtggcattttacattgggggtggatgctcagctacaaccctatttgaaatacatcaagtaacatatgtaattttgattcagctagaataaagktgagctcaatatttctataaatctgtctttcaagattaatttcacagcctttaaatatctgtcaaccaggactcttctgactccatgtcatggagactcttagagactctgagagttttttattgtgacttctgagtagtgtgataaaatcttatgctgtcccactttgtgggatacactgaacggaaggac

SEQ ID NO: 433653 - DNA, 566 bp, Homo sapiens
atctttgaagtataatattggtcttacccttgaatgaatatttgagctactattatgtagtatagtttttctgtgagtctaagttatacattctctgagggttgatactgtgtctgatccagatttgtttgtatcatgcacaatgtcttacccctaagagacactcaagatatatttgttgaatgaataaatgaaggggctgaatcaactttactccaaataaatacattgctcctttaaaaaaaaaaagttttataatactctttagtgaatttcatgaagtgttcaaaagcatgrcctcttactttttgagatttcctggctatgttcctttcccatatgtttattctgaccatttcaatttatttgcccctatgatccctgttttgatcaatttggattctactcccaaaagaatcatctgattggggaattttcctggaaggagatttggctgattattttgagagttcatagagcagaatactccaaatttcagaaagtctggtaaacactgtactcaatcaccagttggatccttcaaaacctcctacaagtttccgctg

SEQ ID NO: 433654 - DNA, 578 bp, Homo sapiens
tgtttattttgctataacagaatacctgtacctggtttgtaatgaacagaaatttatttggctcacggtctggaggctgggaagtctaaaactgaggggctgcatctggtgaggggtgtcttgctgtgtcatcccatggtggaagagcaaagagatcttagcaaactaagagactgaatttgcagacccaggctcttttaaaattggcattaatccattcacgaaggtagagccctcatgacctaaacaccttctgttaagctccacctcccaacactgatacatcggggattaagtttccaacwcatgctttttggaggacacattcaaacgacagcacttgtagcagagctggtatttgaacccaggtctttctatattgggtacaaatataaaaagtgatgtgacaccaattcaattactattgaacgttcttggaaagaagtacattttgtctgaaccatgccaggatgccaaatgatcattttcacttgaaaattgagtttttgtttaatctggcgaccttttgataaatattataatttttaataaaacaatatttcaacaaagtttcaaga

SEQ ID NO: 433655 - DNA, 470 bp, Homo sapiens
ataataagaccaggcacagtggcccacgcctgtaatcccagtgctttgggtggctaaggcaggaggatcatgtgagctcaggagttggaggctgcagtgaaccatgatctttccttttcattgtactccagcctgggggacagagtgagaacctgtctaaaaaaaaaaaaaaaaaaaaaaaaaaaaaaaaaaaaaagataactaaaaagataactgggtaggaaagtaaatgtaattggataggctactgggtggggaatttaatttcttgcactggacagtaggtatccacaaatacttgtttatttattccttgtaaccctaactatgtctgaagyatttattttattgttatttttctactcctgtgacagattatgaaatgttttatttttaaaaggaccaatgggtaaagggggatatttaacaaattaggaaaatttgtcttttggaagaaaacacaaattaga

SEQ ID NO: 433656 - DNA, 595 bp, Homo sapiens
tctttctgatcaatgggctctgataaattaattaggagccagtgaatgattgtccatgctctttcctctgttgcagacacctgtgtctagaaagacggaacgccaagttttgcagcgggaactcatttggtaagactgtcccctctgataatgtgcgaggcagaatgtgtacccaatgaatgtgtgtctctagtgtgagakctcgcaaagcaggtatttatctgtgctggtcgctatgggctgtatttgataaggaattataagaaaaacagttctgaaaagtattatctgtttgccagcaagaatgaaaggaaatagttcagatatttggggtcttgaatgagttaaaccagtaattgctttcaatcctaaatggtaaaagagaaaatgttaaaagactttaaaattgagctggttcaaaaacaaacaaacaaacaacaacaacaaaaataaataatagatttaaactgaacttttacttataaaaaggaattaatgagataaaaatgccttagggtaaagatcaaactaagggcctgaggcccagtaatcttttcaatcggaaaaatagctcaggtaaaagagcttaagggtt

SEQ ID NO: 433657 - DNA, 605 bp, Homo sapiens
cgagcaaggaaaaaaatgtgtgctcagatactgagatgttagtgtttttgataatatagcctgatctcatacatacatttatcttagaccattctatgctaaatacatacattcacacagacaaacatatgtgcatacatatctaayggattagttaaaagaaaatacatttcaacttttaaacccagaaaatgtaagtaaatatttaacttatctcaagtgaagactttacacataatgtcgtgaaaacaacacaagtgaaaaagtagatctgactacttgcaaataacacttttgaacatcagaaatatcaacaacttaatgaaaattaatgacatgctgggggaaaacatttttgcaatagagggtttatgtcctaatatataagaggctcttaaaaatgagtatcttaaaatatcagcatcacacacacacacacacacacacacacacacacacagacaaagaatataaacataattcttccaatttataaaaacagaaatacagacagatatcttccaaagccatcagaatttgaaccagtgatgaggagcacatttgctttcctgcccaattaacagtcatagaagatcacctgaact

SEQ ID NO: 433658 - DNA, 516 bp, Homo sapiens
tgcccccactcccaggatgagttgcatttattaataaaatagatgcaatcagatgaaaacaatctcttgttcccaccaaccccatatacccacctacatttgtagaccccatctgccttttcttgctttggggttcctcttctgtcaaaggacccctgtccactaattttttttattcagttattattgggtgcaagggtaattgcagtttttgccattgaaagtaatggcaaaactacaattactttggcaccaacctaataatatatgcccagttaccccctcctctgccctrtactatcaccagttgtctactagatcatttctattggcttaaaaacatgccttgatattgtctgtcttaaaagtgtatgcgtgtgtgcgtgtttgtatagtacatactttcgaccttgacttcatacccctctccaaatactgtttattttctgtgctcccctgacagttccactccttaaaagaactgttcatatttattatttctactttctcacttcc

SEQ ID NO: 433659 - DNA, 363 bp, Homo sapiens
cctctcctgggaccaggacatctgacagtttaggtgatgtctcagtattcatgcctccttagttcttttaaggatctgtgtcctgaaaagaagagacactataaaaagggctctctctctttctccctctctctctctcattccctgccccacaaccatttcactaccatgtgaagacacaatgagatggcagccatctacaaatgaagaatacagcccacactagaaytggaatcaacccgtaccttgatcttgagacttttcagtctccagatctgtgagaaatttatttctggggtttaagccacccagtctgtagtattttgttctggcagcttgagctgattaatgcaagggtgatga

SEQ ID NO: 433660 - DNA, 606 bp, Homo sapiens
gagaaatatgggccaattttaataccatccaatgttttcctgattgtatcaaagataaatctgaacagtcaggttgttctagttagatctaaatgaggaccatatattgtatttagtcattatatttcctaaagttttttttttaatcccacaaatagcatcctgatcttattttgtgtatgccattgatttgttggagaaaatgtgtcatccaccttgctgaatcctccacattctgagtgtggctgcttgctrctggaggattccatcttgggccagtggaaaccatcttcacattggatcttgtttcctactgacgtgcaagtggtattgagagacgatcaaggatctggagtgctcattgttattggttttcaatacttctaggcatttttaagaaaacagagctaaatatacatgtgtgtacaagaaaaaagtgagtttctagtgatatttacaatcaaatttaagatagcattgttttacttaattttgttgattgaaggtattatctcttgtaatgaaaaatagtagtttttaatttaattaatgtacttattcataaaatagttttgaaataggtattaatataatatccctactaac

SEQ ID NO: 433661 - DNA, 606 bp, Homo sapiens
gagaaatatgggccaattttaataccatccaatgttttcctgattgtatcaaagataaatctgaacagtcaggttgttctagttagatctaaatgaggaccatatattgtatttagtcattatatttcctaaagttttttttttaatcccacaaatagcatcctgatcttattttgtgtatgccattgatttgttggagaaaatgtgtcatccaccttgctgaatcctccacattctgagtgtggctgcttgctactggaggattccatcttgggccagtggaaaccatcttcacattggatcttgtttcctactgacgtgcaagtggtattgagagacgatcaaggatctggagtgctcattgttattggttttcaatacttctaggcatttttaagaaaacagagctaaatatacatgtgtgtacaagaaaaaartgagtttctagtgatatttacaatcaaatttaagatagcattgttttacttaattttgttgattgaaggtattatctcttgtaatgaaaaatagtagtttttaatttaattaatgtacttattcataaaatagttttgaaataggtattaatataatatccctactaac

SEQ ID NO: 433662 - DNA, 606 bp, Homo sapiens
gagaaatatgggccaattttaataccatccaatgttttcctgattgtatcaaagataaatctgaacagtcaggttgttctagttagatctaaatgaggaccatatattgtatttagtcattatatttcctaaagttttttttttaatcccacaaatagcatcctgatcttattttgtgtatgccattgatttgttggagaaaatgtgtcatccaccttgctgaatcctccacattctgagtgtggctgcttgctactggaggattccatcttgggccagtggaaaccatcttcacattggatcttgtttcctactgacgtgcaagtggtattgagagacgatcaaggatctggagtgctcattgttattggttttcaatacttctaggcatttttaagaaaacagagctaaatatacatgtgtgtacaagaaaaaagtgagtttctagtgatatttacaatcaaatttaagatagcattgttttacytaattttgttgattgaaggtattatctcttgtaatgaaaaatagtagtttttaatttaattaatgtacttattcataaaatagttttgaaataggtattaatataatatccctactaac

SEQ ID NO: 433663 - DNA, 559 bp, Homo sapiens
gtgggttatgtgcagatgtgcaaaaaaaaatcaggcataaaataaactgttaataaatgtaattattccactgtttccccttgtatgtcttctcctcagggaactatgaaaaagccagatgctgatctgggaaatgtcccagaattattcttttgaaaaatattaacactccattacaaaaggtcttgcggagaattatattgaaactcagttcctgatgactataaatatwtagaagcagcaacacattggagcaaaacttgcgatttgagggtgagcattatgcaattgattaggaaaaatgtgagctttgaaattgtctttaagtataattctacttccaacggtacagataggccttttcctgtgattggaggtgtaagcactttctgaaaactccctctcactagttaaacataagagaggtgctgttggtatagttcttggcatggggtaactgcccaagtcacactgctccttctgggacagctggcaccgttggtagtaaatgccactgttgctgcgcacctcagatcccatgtaaactgtggtaccatct

SEQ ID NO: 433664 - DNA, 516 bp, Homo sapiens
tgagtcatttcatcctcaaagcaaattayaaagtaagcactactattacctacattttgcagatgagggaactgcaccttgcccaaagtcattctgctattaataaatagaagagaatgaaggagacaaatatatgcagcctaactctgtaaagtcaagagagagaacttgggacaaaactgcagtgcaattggccctttccaggagacagaaagtcactaaataccaatgtcagggcaaatacatgtatcagggcccgtcagggcatcttcttcaacattccagctactatgagaatatggtaatgttaatgccattgtattctaatcattcagatatatgcatgttccagagaaataccagaaaataaaataacagatttctgagttaggccacctgtgctgttttaacctgcaatatggctttaatggctaattgttaatttccactttaatagatctacttactgagaccttacttcttactcttccctttccttgatgtaccctgtcttct

SEQ ID NO: 433665 - DNA, 393 bp, Homo sapiens
cagtcataatgaatccagatggcactttcccctgactttcaacccctgagacgtcaactagatgactgaccactccaaagcctgaaggttaaacaccctgcaagaatgggtcccaataagtcagaccaacctcctatttccatatgggaacatctcttcctgaaccttaagagaaaacaaaacctgggatggccaattagtgtgactgtcccaggagacacagatttagggctcagtttctgtgacggatgcgagaaacctcgaattggatctgaaaaggacatgaagtgaatagagctttggcacttcacagagtgattatccctgcagtgcaaggaggtaacctttctgctkctacatcctgacatttgcatggaggcaaatgcatcactg

SEQ ID NO: 433666 - DNA, 604 bp, Homo sapiens
acagcagcgacaaggagagcccaaatgctcttcttcatcttctccctctgtctctttgttttcctatctcccactctctctcccaaagaccccagaagcgccccttgcttcacctgttcctcttaatgggataattaaagattaggacaaagagatgagaccttcacaagctgaaagagatagagattctagacagtcataatgaatccagatggcactttcccctgactttcaacccctgagacgtcaactagatgactgaccactccaaagcctgaaggttaaacaccctgcaagaatgggtcccaataagtcagaccaacctcctatttccatatgggaacatctcttcctgaaccttaagagaaaacaaaacctgggatggccaattagtgtgactgtcccaggagacacagatttagggctcagtttctgtgacggatgcgagaaacctcgaattggatctgaaaaggacatgaagtgaatagagctttggcacttcacagagtgattatccctgcagtgcaaggaggtaacctttctgctgstacatcctgacatttgcatggaggcaaatgcatcactggtaattgcacctgagtgt

SEQ ID NO: 433667 - DNA, 537 bp, Homo sapiens
taaattaaaccaagtctatatctagactcagtaaatcttcaaataacaaaaagtgataaaaaaatcttataaacaactcctatacccccaccttccatccaaaattatatactactaaacatttgtcagacaatataagaaaagaacattgtagaccaatcccgtttatgatcatagataaaaaaaatagcacatcaaatatactaaaccatgttcttaatgagtgaaaaatagtttaatttcaatatrtcgatatactcatatgagacaatattaactgagttcatacaaaccaaaatgataaataaatgtagaaaaatatgtaaaaaactcaatcccaattcatgatgctaatttttagcagtctgttgaaacaaaaaccttccttaaccttacaaatggtatctgccactgcattgaaaggaacatcatatttaatggcgagaggttagaagcattctctagggtcagggctagtacaaggatatctgtttttactcctactattcaacattttattaaagggttcagacaatg

SEQ ID NO: 433668 - DNA, 537 bp, Homo sapiens
taaattaaaccaagtctatatctagactcagtaaatcttcaaataacaaaaagtgataaaaaaatcttataaacaactcctatacccccaccttccatccaaaattatatactactaaacatttgtcagacaatataagaaaagaacattgtagaccaatcccgtttatgatcatagataaaaaaaatagcacatcaaatatactaaaccatgttcttaatgagtgaaaaatagtttaatttcaatatgtcgatataytcatatgagacaatattaactgagttcatacaaaccaaaatgataaataaatgtagaaaaatatgtaaaaaactcaatcccaattcatgatgctaatttttagcagtctgttgaaacaaaaaccttccttaaccttacaaatggtatctgccactgcattgaaaggaacatcatatttaatggcgagaggttagaagcattctctagggtcagggctagtacaaggatatctgtttttactcctactattcaacattttattaaagggttcagacaatg

SEQ ID NO: 433669 - DNA, 602 bp, Homo sapiens
tcatacaaaccaaaatgataaataaatgtagaaaaatatgtaaaaaactcaatcccaattcatgatgctaatttttagcagtctgttgaaacaaaaaccttccttaaccttacaaatggtatctgccactgcattgaaaggaacatcatatttaatggcgagaggttagaagcattctctagggtcagggctagtacaaggatatctgtttttactcctactattcaacattttattaaagggttcagacaatgtaatatgacagaaaaagaaagaaatttttttaaaggtaggggtataagaattataaaggatgaaataaaattaaattttgtttcaagtgatatgattatttataaataaaattaattttaaaaaattggaatcagcactactagtgttctgaaaatttgcagaattaaatctcaaaacagaaattttgatacttagcatttttatgtaacagcaacaaccaattagagaatataatggtctcatcctcaatagtaacaacaacatctaaggcaggggtgtccagtcttwtggcttccctgggccacattggaagaagaagaattgtcttgggccacacatgaaataca

SEQ ID NO: 433670 - DNA, 498 bp, Homo sapiens
aattcactatagtactgtaatacaaagggaacttctatggaagtaaacaaattctccatgggtggagttaacagatgggaaaattgagtctaacttggtcaccttgaataaaacagtgaaagttggaggaaagtaaatgcacattatctttggaaggtatgctaggaaagaactatgtttagattcatgaacagatagtgatattctatacaaaggaacatttttatccaactgcactacacatatttttaaactattgcaagaattagaaatgatactgttaaaatatgcctctggctaatagcaaaatggactccctatggataactgagaggcacaaagttaaaacagaggaaggcagctatgctctgagagagagttcacaggccatggctgggtgaggaagcgtagtcaagtactctgtgctctcagaaagatgctgtaaaaatttaaaggaccttcctttctacartcagccaaaccagtttctattttaag

SEQ ID NO: 433671 - DNA, 554 bp, Homo sapiens
cagtgatcctcctgctgggtatccacccagaggcartgaagtcattatttgaaaaagatatttgcacacgcatgcttatagcagcacaactcacaattgcacaatcacagaaccaacccaaatgcccatcagtcaacaagtggataaaggaactttggtatatatacgtgatggaatactgctcggccataaaaaggaatgaattaacagcatttgcagtgacctggatgagattggagactattattctaagtgcagtaactcaggaatggaaaaccaagcatcatatgttctcactgacatgtggaagctaaagctatgaggacacaaagacataagaatgatacgatggagtttagggacctgggggcaagagtgggggttgagcaagggataaaatactacaaacatggggcagtatatactgctcgggtgatgggtgcaccaaaatctcacaaatcaccactaaggaacttattcatgtaaccaaataccacctgtaccccaataacttatagaaaaataaaaattaaaaattttaaggtgaatggtaa

SEQ ID NO: 433672 - DNA, 581 bp, Homo sapiens
ttggcataaccaaatgtcacagtttgtcagagacagttctcattatacctaattgacagggtacttattaatatacaccaytgcagttttcagtctctcctattctacttaaaattatttttaactaatcctatgaatagaaaaatttggaatctggagcagtgccttgaaaggtaagaatagagtgagttaaattaaattgtactttattaaattactgcatcaaatattgtattttactgtagtttacgtactaaaaaatgtaaggcactctcagccacgtaactggatgattagtaacttctgctaaaaatgacaatggtaaaacagaaatttctatagttgcatgattactttatgtacctatctgagctaacatgctttcctacagaaacttcagttctagtgtatttctgtatttggatctgttaaggaaggcattatccatatttatctggaggagggggagtgtaacaataattggagtcagcactgttcactggacaaaagtcagtgctgtttactgctcatttccatgggttagctctgggaacatcagttagaaacttgactccagaaaa

SEQ ID NO: 433673 - DNA, 581 bp, Homo sapiens
ttggcataaccaaatgtcacagtttgtcagagacagttctcattatacctaattgacagggtacttattaatatacaccattgcagttttcagtctctcctattctacttaaaattatttttaactaatcctatgaatagaaaaatttggaatctggagcagtgccttgaaaggtaagaatagagtgagttaaattaaattgtactttattaaattactgcatcaaatattgtattttactgtagtttacgtactaaaaaatgtaaggcactctcagccacgtaactggatgattagtaacttctgctaaaaatgacaatggtaaaacagaaatttctatagttgcatgattactttatgtacctatctgagctaacatgctttcctacagaaacttcagttctagtgtatttctgtatttggatctgttaaggaaggcattatccatatttatctggaggagggggagtgtaacaataattggagtcagcaytgttcactggacaaaagtcagtgctgtttactgctcatttccatgggttagctctgggaacatcagttagaaacttgactccagaaaa

SEQ ID NO: 433674 - DNA, 528 bp, Homo sapiens
gagcctgtctgacttgatcacataccagactcttcaccttacttattcatttacttgtactaatcatttagcttggaagaccacaaaccatttttaataatcttttattcatcctttaaaattcagtgccctagattttatttcctctctgaaatcttacctctactctcttaagtaaattgagtctctcctccagtggcttgctcctacctttgttctctcagcyacctcatcgtaaagcagtttatcaggtcataacttgcccctctgagaatttgagctctttaagggaaggacaccatcttttgctgacatttgcttacttaatacagtaaattcatagagcagatgccacacagatatttgttgaataaatgattgaattaatttaaaatactatatagtttaaatttacttttgcagaatatatttgaaattaacatatatatttatttacttgtttcttatttgtattctttgtcctctagctgcaacactatcctctctgtgtttctggaggggcaaaaa

SEQ ID NO: 433675 - DNA, 571 bp, Homo sapiens
gagctcctcttttgcctcctagcagcgggactgacagccggtgtaagtaataaatctttctttgactatttcaaaggataaccatcctgaattttgacattcaaacttaacttttgaagaaacattttccacaccatagtggtgttgttataattatatatatacatacatttatacccttctctataattaaataagcttcaaaatagttcatgaaagaaaagaagtaatcagtaaattattacaaaatgcttagaagtgaaacatatgttcgccatttattttatttcaaatgtaaaatgtggctaaagagaatgtagaggtgaataaataacttttattaaggttaatttttaatgatattcagcttatagagtcattatttgctgtaacaatttctgtcaaaagtttgctcttaataaytttcttataatataagaccaggaccagtttttggtgccacaagtgatactgtgtatacaaatttcccaagttgggaacattaagatccaaaagttatactcttccattactcttgattattcttttctgccttcacacagtagaataa

SEQ ID NO: 433676 - DNA, 408 bp, Homo sapiens
gtaggcatagtgaactggtcaaaaagacttacyggccaggcgcaatggctcacacctgtaatcccagcactttgggaggccaatgtgggcgaatcacctgaggtcaggagtttgagaccagcctgaccaacatggagaaaccccgtctttacaaaaaatacaaaattagccgggcatggtggcgcatgcctgtaatcccagctactcgggaggctgaggccgggaggcagaggttgtggtgagccaagatggcgccattgcactccagcctgggcagcaagagcgaaactccatctcaaaaaaaaaaaaaaaaaaaaaaaaaggacttacctactaccacagagcaaattaatgttggccctattatcagaattcaaatctcagttgccagctcaatgctcaagctag

SEQ ID NO: 433677 - DNA, 597 bp, Homo sapiens
ccttgccacagatctgtttatcctcactgcctatctgtgagtaataaatttgttttgcctgacatcttgagtgaatatcytgtttcattcgactcatatgctgggtttatgtgaaacctctggcagctgggtttgtgcaaaacctggcagattaaggaaccttaacagaaattggtgacgtgtttagagtcctcctctggggttgatactggtgcatgaggtgttcccctcctgggaatcagtacgttgccaaatgaactgtttttatctcagcctcttgtattgtttttggctatttcacagttctatcccatttgttgcctgtgtcagttcattccaaggtgctgtcaaaaagaagctaactgatcatgtttacatcttcccaccactcccggctctcagagctttagctactggcacctaatatgatacagcattcgaatcttattagattcagaattacatggcctgttaatttcagagagctggtgctgttaactggaatttgcagtgatagaacctcttcaacaaaatatttacctcacttaatatgcctgaaagattgattttccttccctgacaaggacactatcacca

SEQ ID NO: 433678 - DNA, 543 bp, Homo sapiens
cattatgttattatatgtgtcatttagtgatgatctttttgttgttatttacactttagaagaatcttgtatcctattgtttcctatgttatttctacctcttttgatgtatattctctaaaaaattattttttaatctctaaaaaaaagaaagatactagaatgtcaggagaacgaatttctcttgtcaaatataaaaataattccagactatcataacaatgtaaaagtccagttggttcttattaatcattaacttattgtttgtgcaaaaacctttagcaccctgagaatcctaatataagcaataaaataggaaatatttaataaatataacttaatcattgttctatatctttgtaaatgaattcagtaattgcagtggcattttctaacaaggagaattcaaccaatccatttttataaagtgaaaataggcrtcagggtaaaatagcacacgttgattaactacttaatacaccattggctttacaaggcctaacagaggagtactttcaaatgacagtgcttaaataaaaaaaa

SEQ ID NO: 433679 - DNA, 579 bp, Homo sapiens
agatatattagataaggataatttattcacagtttggttttcttggtggaaaagatgttttcagccatataagtgagatagscccacggtaataattacatacattactaaaagcttctagctcttcggcaaagcgcctacatagaaacagaaggtttttggatgaccagtttgaaaactgtccaatttctagccatgtctatggctataaaattatacttattattctttctgtagttagaaatgtggagagatttatttccacacacactaacctaaggttgacagcaaatatcataatgcaacttaaggatgtaagcattatgaaacaccaatggagcctgaagagtttgaataaatgtcatgctccccgaattaagcctatcctcatctaagaaagcaaactaggggagttccaattgcagccactggatatgatagttgcatacgttttctataatttccagtaattgttaccctcaaaacaaaaagtgggcatctgttgaataccaaacatatgggcacgtagccacatccaagaccaactgcaatgtcaacttctagttcgtgccaaatagt

SEQ ID NO: 433680 - DNA, 547 bp, Homo sapiens
tttttagcacctcacttttccctttctgtgaccttttccaatgatcatctttatcgccaggcacagaattttctctcacctactgtgttttccaastctctaggagacactgagctgatatactcattcatgctttagagatcaaagaatgactccttgtagctatatttctattaaaaacaacaaacacacttcaaagattagggactgtattaatattcatttattaggatcttcttggtttctttcaaataatattattagaactctaactgtaatgcctctttggaagactaacttctactgagattttaagataacagtaaagggcagcctctgaaggatattttttttcaggtaacatttcataggatgttattttgaatattgggtattagcttctttgttgtttgtaggtgattggagaacagaatcagggctcgacgggctcaataaataataccgtcttatttttccctccccattctacccaggtatagaagcagttcagagatagacataaatcaggacagatatagaaaatatt

SEQ ID NO: 433681 - DNA, 490 bp, Homo sapiens
agcccagttaactggagagacccagttacagtcagtggcatctctgcacagtatcagatctccccaaagagggcctgtccccaaattacagaatggagaagcctctttgggcgggctggctgttgtaaaatagtggaagaagaatagagccaaggtacccatgctgagttcctgctcctaagtttaccaatcagaaaattcacaccttttcttctggggaaaatgtgggaggaggaaagaaagggggtcaagaaggtttttcttttgtttttttgttttttgtttttgtttttttaartgaatatcccttaacaataagagatatatgttcttccctgacattttacagctttattctcttaatccagtaacttaaccataggtccaacatctgttttttaaaagcttacatctttttgtccctctctgcctgattcttctgtctaactcatttagttctgaacctgggcaggaaacaggggacctgttt

SEQ ID NO: 433682 - DNA, 586 bp, Homo sapiens
  misc_feature (1)...(586): n = A,T,C or G
tttttcactcccttgggattttattgaatttatagatttcatttagggaggaaattgacatctttacaatgtagagtcttcctattcaagaagaagatgatatctctacattyatgtgagtcttcttttatctccctcagtagttttatagttnttttcattacagtttctgcacattcttattgcttattttctgttttagttgttgccgttagatctatacaatttatttatatttttatttaacagcgttaggtattctgtatagtttcttagtatttgggattttcaagttatatgatacatcaaaaatcatttttccaatctttccaatatttatgcttcaattttattgtttaaaaaattgcaatgtgaatgatagcaccatttacatatatctttcccttctttctgattttaatgaaatggcacagatatgttgttttatcctttagcatcatgactgtgtcaagaacatgtagaattaagcctatgatttataatctatataatatggaaatcctattttcattaaaaacatatatagtgtatacacattatataaatatattttacatacattatg

SEQ ID NO: 433683 - DNA, 586 bp, Homo sapiens
  misc_feature (1)...(586): n = A,T,C or G
tttttcactcccttgggattttattgaatttatagatttcatttagggaggaaattgacatctttacaatgtagagtcttcctattcaagaagaagatgatatctctacattcatgtgagtcttcttttatctccctcagtagttttatagttnttttcattacagtttctgcacattcttattgcttattttctgttttagttgttgccgttagatctatacaatttatttatatttttatttaacagcrttaggtattctgtatagtttcttagtatttgggattttcaagttatatgatacatcaaaaatcatttttccaatctttccaatatttatgcttcaattttattgtttaaaaaattgcaatgtgaatgatagcaccatttacatatatctttcccttctttctgattttaatgaaatggcacagatatgttgttttatcctttagcatcatgactgtgtcaagaacatgtagaattaagcctatgatttataatctatataatatggaaatcctattttcattaaaaacatatatagtgtatacacattatataaatatattttacatacattatg

SEQ ID NO: 433684 - DNA, 553 bp, Homo sapiens
agagagaaaaaggaagagctcatgacaaaggcaaatgtaggaaaacagcaaggcccagaagcaatctctgttttgcctttgacataggagtaaaaagcgaagctgagagaaaacaagcacagaaaggggctgctcacctagaaaccaggtggacagtggtgtaccttctggctcctggtatttcgtatatcaaacctcaagtctagtcacatatacgtataaattatgaagactttcttgtgttttctcatttctaaatctttgtatttttccttattgatctattgccaatgccttttactacttttctttgatttacaatagacatttctttctttttcttttttttttctttttttgagacggagtttcaccatgatgcccaggctggagtgcaacggtgtgacctcacctcactgcaaactctgcctccccagttcaagcaattctcctaccccagcstcccaagtagctggaactacaggcatgtgccaccatactcggctaattttcatatttttaatagagaaggggttttaccatattggccagg

SEQ ID NO: 433685 - DNA, 658 bp, Homo sapiens
agttgtttaaaaagcaaatagatggtcccacccagatataataaatcagaggctggggcccagaaacttgtgttttagtaatctctttgggtgctttgagaaccactccaatttaactttcaggtttcatgagcaggacattgaggaatacatctgggcttgaggatgtcttccagtgattctctagttgagcacatcatcaaaatagacatttctataccatgtataaagcatcttccagagcattactttgaggaatccaagttctttgtctgcattttaaatcaaatgctttgggccrggcacagtgactcatgcctgtaatcccagcactttgggaggccgaggcaggtggatcacttgaggccaggaattcgagaccagcctggccagcatggtgaaaccccatctctactaaaaaacaaacaaacaaacaaaaacaaatgaatgctttagattttatttcatttttagaaatttagtttcataataactatgatcttcctaagagtagctataaatacagtaattttggaagatatagcttttagttaggtaaaccaatcatcgtctcattttaaatctgccttttagataagaatttagtttagacataaaggttttgagccttgcaattatatctatatagtaattattt

SEQ ID NO: 433686 - DNA, 488 bp, Homo sapiens
tgcttcgtaaataatggggtaataccgattattttcaatttcaaaacacgatcataasttcaatgtaagagagagtgagttctttatatattataatctctgcaagtatggtgttcattttggtcgctgaatttttctttttttgtttgttttacagcttcctaaccagtgtctcttattctcttccaattgtgcttatggttgcctgggttgtatttatagctgcctttgtaaaaaagcttgtctatgagaaagacctccggcttcatgaggtatgttgaaaatcacttcttgttatgaataagtcctgttcatagaacaattactatgattttcatcatgcctttataaacttcagaaagcctaacttatcccttgtgaattaaacagaaagaaaaaccttttacaaatcacaaaagcagctgataaggcaatattttattttctcaaaaagtgacataaaagtcacttaataagtgcttttgaaa

SEQ ID NO: 433687 - DNA, 555 bp, Homo sapiens
tcacactagaataatcttgtgactgtcatcctaaatgtagtgctatagagctatatatttttgacatgcaaataacatcatagtatgtaattcacttttttcaaaggcagattttaagacagttggtttataataaaacccattttgttaaaaatatttacatgtatatctgtgacaaacttctggaaggatatacaccaaaatatcaatagtgcttatatctgtgtggagaaataatattctttttcttctttttgcttatctgtagtttctaattattttttacaatgaatattaatcatggatrtatattgagaaacaaaggagggaagagatggaggaaagaagaaaatggcagcaattgaaggtctaccaactttgtgtccatgacaaatgcttgggtggcttaagtacaagcacatttccttgctacacatgaacaacacattttgtccatatgcagatatcacactcttaagttttgagatattcatattggaactgaggccaattgtcatcaaaagtcatgccttaaacctctccaagttggtataa

SEQ ID NO: 433688 - DNA, 584 bp, Homo sapiens
ggacatttgaaagctgctagaatcaatcccaaagaaagacatggagagcaatgaaatttattgtgaaataagatttttataaaaatctctgccaaactatccttaaagacttttctaactatttgtataactgttgctttgtgtcagagaaatatatcaaactgaaaataaaaagtaacctctgatcaactaagagtgaagatagattaagcaatctgtctatacttgctaataaacttaaacatgcaaaaatctattttgctgaagccgttgacagagggcttgaacacagaaactatattattcatttagtgacagatcattatgtagatattatttttccttttttaaaaaatgcattagttaaatatcaattcattatgttttcctttgttgaaggtatttattttagtctctaaatttattaatttttaaatttttaagtgacrtgactatatatgaaattcaataaaagataaatcttcactgttttcatcactttcacagccactatgattagttttatttcataattattaaaaataattttgtcatatacaggagggaggtgtcaaagaaaaaga

SEQ ID NO: 433689 - DNA, 562 bp, Homo sapiens
ccacgtgtaggtgaggacatggagtaattattaaccctcacacacctcaggtggaaatgtgaactagtacaacactttggaaaaccacttggaagtttatttaaaagttaaaaatacacgtaccaaatgactcaactatttcactgctagttaattacccaagaaaatgaaaacatgtctgcaaatactcatattcaaatgttcatagtagctatttataatagctaacaactggaaacaaggcaagcgctcaactcttgaatggattaaacgaactgtggcatatccatacaatggaattccactcatcgataaaaaggaatgaactactgatattaaactatgtgygaatctcaaaagcattatgataaggaaaaggaaatggtcataaaagactacagactgtgtgtatctgctgtttcttgctgtcccattcacatttagcatacatgatgccccatgagcacagaattcaggtagacccacaatgcatgggaatacgacatgactgaaagaatgtacaaggtaagtgcataatctgtacagctaaatacatgggaca

SEQ ID NO: 433690 - DNA, 562 bp, Homo sapiens
ccacgtgtaggtgaggacatggagtaattattaaccctcacacacctcaggtggaaatgtgaactagtacaacactttggaaaaccacttggaagtttatttaaaagttaaaaatacacgtaccaaatgactcaactatttcactgctagttaattacccaagaaaatgaaaacatgtctgcaaatactcatattcaaatgttcatagtagctatttataatagctaacaactggaaacaaggcaagcgctcaactcttgaatggattaaacgaactgtggcatatccatacaatggaattccactcatcgataaaaaggaatgaactactgatattaaactatgtgcgaatctcaaaagcattatgataaggaaaaggaaatggtcataaaagactacagactgtgtgtatctgctgtttcttgctgtcccattcacatttagcatacatgatgccccatgagcacagaattcaggtagacccacartgcatgggaatacgacatgactgaaagaatgtacaaggtaagtgcataatctgtacagctaaatacatgggaca

SEQ ID NO: 433691 - DNA, 556 bp, Homo sapiens
gtcctcttatgaataagtaatacacattcccaagtagaacttgtactaccgctttggctgctctgaaatctttttagttttctccaacattgtatcatatatttaaaataaccagttgtgggctgggcttggtggctcatgcctgtaatcccagcactctgggaggccaaggcaggcagatcacctgaggtcaggagtttgagaccagcctggccaacatggcaaaaccccgtctctactaaaagtacaaaaattagccgggcgtggtggcgggtgcctgtaatctcagctattcaggaggctgaggcagaagaatcgcttgaatccagcagacggaggttgcagtgagccgagatagtgccactgcactccagcctgagcaacaagagcgagattctgtctcaaaaaaaaaaaaaaaaaamcaacaaaaaactagttgtgatggcaaaataaatgagatgttgacaacaattccacagaaatgattctgcctgactcctttcccctttctaatggtagcactctttccctcttaggagtaatgggaaggtttgac

SEQ ID NO: 433692 - DNA, 567 bp, Homo sapiens
ttggtaactgggttctcagaggtattgaatgaattctttagaactcaataaagtccacacatataacctgttaaaagacagaaagaaatggcctgttgtggatgttcaggtaccctattctgtaacyatttcttaaatgtttcagtaaaaataataagaaagtatacacactgacttatactgtataaatggtaccttatttgtcttacataatttattaaagaactaagaaagttcagataaaaatactggtataagaagcaaaaaggatgaagaatgataaagattattctaacatcaaaaagaacattcaaataagagcaaaaaaaccagatcatacccaaagtattaacttctgttttgaggtcatacaagtgaggtggccctaaagctctctcatcattagctttaggataaatctgcctctacttagaagctccatccaatctccaacacaaggtgacctaaaatcattccagcacagagaattctggcctttttttttttttaactagtttcctctaggtagaatatgtgagtttggtaaaatctaattacaacttcctt

SEQ ID NO: 433693 - DNA, 567 bp, Homo sapiens
ttggtaactgggttctcagaggtattgaatgaattctttagaactcaataaagtccacacatataacctgttaaaagacagaaagaaatggcctgttgtggatgttcaggtaccctattctgtaactatttcttaaatgtttcagtaaaaataataagaaagtatacacactgacttatactgtataaatggtaccttatttgtcttacataatttattaaagaactaagaaagttcagataaaaatactggtataagaagcaaaaaggatgaagaatgataaagattattctaacatcaaaaagaacattcaaataagagcaaaaaaaccagatcatacccaaagtattaacttctgttttgaggtcatacaagtgaggtggccctaaagctctctcatcattagctttaggataaatctgcctctacttagaagctccatccaatctccaacacaaggtgacctaaaatcattccagcacagagaattytggcctttttttttttttaactagtttcctctaggtagaatatgtgagtttggtaaaatctaattacaacttcctt

SEQ ID NO: 433694 - DNA, 628 bp, Homo sapiens
agattcattgagctatatatttacatatgtagtgcactttacaatatgttgtactccaatgaaaaaaatatatatcttccataaacaaacagtagtttagagaagaaatgaaaaggycccctgcatattcaaaaacttgttcaattttattcataataagagatgcaaattcagccatatattgtgataccacttcttacctaccagataggcaaagagcctatacatattggatatattctgttggacaggctgtggggaaacaggaccactcctatgttgccagtgacaacgtcaaatggtataatacctatgaaggtgagcttggtgatatctaggaaatttacacagccatttaccattgatccagcaatcacacttctagcaatctacttctaatacatactgtcataacgtgaaattactttttatgctgaatagcttttgtttgccactccagatctcttctccacccttccccactctgctctgagcctgagagactgaactttttgacctacgtcaatggtcagcaaacattttccgtaaagggccagaaggataactgagggccatataatctctaactactaaactgctgttatagtgtgaaaggtgaaagcatgca

SEQ ID NO: 433695 - DNA, 483 bp, Homo sapiens
ttcataaccgcaaaaatacggaaccagcctaaatgcccatcgaccatgaacaagtcgataaataaaatgtggtgtatatacaccatggaatactacttagccataaaaaggaatgaaatgatggcatctgcagcaacctagatggaagcggaggccattattctaagtgaagtaactcaagaacggaaagccaaatatcgcatgttctcacttaaaagtgggaactaagctatgaggacacaaaggcataagaatgatataatggactttgcgaactcggagggaagggggtgagggataaaagactacatgagtgtataccgctcaggtgatgggtgcaccaaaatctcagagattaccactgaagaacttatccatgtaaccaaaactaccttttctgcaamaaatattgaaatttaaaaaaagacagatagaaaaaaaatagcatttagaatacattctttaaaaatcaacatgtagact

SEQ ID NO: 433696 - DNA, 353 bp, Homo sapiens
tgtcaggtgaaggtaagaggatggaagcctagttggtcattcccatctttacctaggtcagcatttgctgtttgtctagaagtcgatcaataaggaagacagcatactgtgcagaaggctgtctggatcatttttctattttttgagacagggtctcactctgttatccaggctggagtgcaatggcacgatcaagcctcactgcagtctcagcatcctgggcttaggtgatcttcccattgcaacctcttgagaagctaggactacagatgtgcaccacaattcccagctaatgttattattattwttttttttttaagagtcagggttttgccatgttgcccaggctggtg

SEQ ID NO: 433697 - DNA, 601 bp, Homo sapiens
ctgctgtcactccactgctctgaggaggaagaggggaggctaggcactctcatgcactcctgggagggtccctatcaccctgccatgggctgccggtgagaccaagatgtgagtggaccacattccccacagcttcttccccatgctgctggcctaagagggaccctccccgctctggtcccaggcataaagtgctattttgagaggttaatgctaggttgcgccttgccctttcgggctgacstggctgcagctgccacttggctgaggagggacaggaaaaccaggctctcctatgcatacctaagacaacaggcttttttgagactgagacttgagtgtactgtaactccccacagtttcttgcccatgctgttcatttgagagggaacctaccctctcagtcacaggccaacagctggcaccattttgagagtttaaagctgggctatgcgcttgcccttgggcgacacggctgcaactgccacccagctgggagaggaacagcagagaccaagcttctctaagcacacttaggaaaatacccactgccctgctatcggtggctgtaaaactagggactagccccctccgacccatc

SEQ ID NO: 433698 - DNA, 568 bp, Homo sapiens
tacatacacctactatgtacccattaaaaattaaaaattaaaaaaawttttaaaacaatcacactatccaaagcaatctacaggttcaatgcaattcttttcaaaatactaatgtcattttttcacagaattacaaaaaacaattctaaaattcatatggaataaaaaaagaacctaaatagccaaaagaatcctaagcaaaaagaaaaaagctagaggcattacactgtctgacctaaaactatacaaggttacagcaaccaaaacagcatgtattagtattaaaatagatacacagatcaatggaacagaatagagaacctagaaataaagccatatacttaacagcaaactgatctttgaaaagtcaacaagcacattcactgggaaaaagacatccttttcaataaatggttctaggaaaactggactgccatatgcagacgaataaaagatccctatcactcactgtatacaaaaatcaacccaagaccaattaaagacatgaatataagacctgaaactcatgactaagacctcaggcaacaaaaataaaaatagacaaatg

SEQ ID NO: 433699 - DNA, 568 bp, Homo sapiens
tacatacacctactatgtacccattaaaaattaaaaattaaaaaaaattttaaaacaatcacactatccaaagcaatctacaggttcaatgcaattcttttcaaaatactaatgtcattttttcacagaattacaaaaaacaattctaaaattcatatggaataaaaaaagaacctaaatagccaaaagaatcctaagcaaaaagaaaaaagctagaggcattacactgtctgacytaaaactatacaaggttacagcaaccaaaacagcatgtattagtattaaaatagatacacagatcaatggaacagaatagagaacctagaaataaagccatatacttaacagcaaactgatctttgaaaagtcaacaagcacattcactgggaaaaagacatccttttcaataaatggttctaggaaaactggactgccatatgcagacgaataaaagatccctatcactcactgtatacaaaaatcaacccaagaccaattaaagacatgaatataagacctgaaactcatgactaagacctcaggcaacaaaaataaaaatagacaaatg

SEQ ID NO: 433700 - DNA, 568 bp, Homo sapiens
tacatacacctactatgtacccattaaaaattaaaaattaaaaaaaattttaaaacaatcacactatccaaagcaatctacaggttcaatgcaattcttttcaaaatactaatgtcattttttcacagaattacaaaaaacaattctaaaattcatatggaataaaaaaagaacctaaatagccaaaagaatcctaagcaaaaagaaaaaagctagaggcattacactgtctgacctaaaaytatacaaggttacagcaaccaaaacagcatgtattagtattaaaatagatacacagatcaatggaacagaatagagaacctagaaataaagccatatacttaacagcaaactgatctttgaaaagtcaacaagcacattcactgggaaaaagacatccttttcaataaatggttctaggaaaactggactgccatatgcagacgaataaaagatccctatcactcactgtatacaaaaatcaacccaagaccaattaaagacatgaatataagacctgaaactcatgactaagacctcaggcaacaaaaataaaaatagacaaatg

SEQ ID NO: 433701 - DNA, 568 bp, Homo sapiens
tacatacacctactatgtacccattaaaaattaaaaattaaaaaaaattttaaaacaatcacactatccaaagcaatctacaggttcaatgcaattcttttcaaaatactaatgtcattttttcacagaattacaaaaaacaattctaaaattcatatggaataaaaaaagaacctaaatagccaaaagaatcctaagcaaaaagaaaaaagctagaggcattacactgtctgacctaaaactatacaaggttacagcaaccaaaacagcatgtattagtattaaaatagatacacagatcaatggaacagaatagagaacctagaaataaagccatatacttaacagcaaactgatctttgaaaagtcaacaagcacattcactgggaaaaagacatccttttcaataaatggttctaggaaaactggactgccatatgcagacgaataaaagatccctatcactcactgtatacaaaaatcaacccaagaccaattaaagwcatgaatataagacctgaaactcatgactaagacctcaggcaacaaaaataaaaatagacaaatg

SEQ ID NO: 433702 - DNA, 547 bp, Homo sapiens
cccagtagtcacaaacattccaggtgtcacctaataacaggtaggatttattgagcacttcctatgtgccagacactgtgcaaagtgctttctttttcatttaattaaaaaatttaagacagcacccaggctggagtgcagtggctcgatcgcagcgtactgcagcctcaaccccctgggctcaaaagatcctcccacgtcagcctcccaagtaactgggactacaggtgtgtgmcaccatgcccggccaattttttttctttttctttttctttttttttttttaatagagacagggcctcactgtattgccctggctggtctcaaactcctgggctcaagtgatcctcctgcctcagcctcccaaagtgctgggattacaagcatgagccactgcgcctggcccaaagtgctttcttaactgtattgactcatctttttgtcacaacagggctatagtaggtgttataattatccctattttacaaacagggtatcgaggctcctaaagtaagggttggaactgagacttgaacccagacaatcc

SEQ ID NO: 433703 - DNA, 618 bp, Homo sapiens
gaaactggataattcagatttttttacctagcatctagggaattggagatactgacttaaaggatataattattttttaaaatagggcttctaggctgggcacggtggctcatacctgtaatcccagccctttgggattccgaggcaggcagatcacctgaggtcgggrgtttgagaacagcctggccaacatggtgaaaccctttgtctactacaaaaatacaaaaattagccgggcatgttgtggtgcacgcctgtagtcccagctactcgggaggctgaggcacgagaactgtttgaacccgggaggcagaggttacagtgaactgacattgcaccactgcactccagcctgggctacagagaaaaaaaaaatacagcttctagtttagtgaagaaaagggcaatttgagggagagaaaaggaactgcgttctgtgtgaaaggacagagaagcctggtgatcagagaataagatcccaaggcacttcactggggctgacattcagggagcctcctggaagaatcatttcaaaagcaattgcagtcaaaacagattttgagagcactcttagacccagaaatgtatagttgtctgcatgtaagtgctaaggctaat

SEQ ID NO: 433704 - DNA, 530 bp, Homo sapiens
agcatcatgaatggcagtctcaaagaatgttcaaaattaatgttcaaaataaagcaactaggtcacagatcacagcgtatcatgctggaatattctaaagaaggatactgcatttctcttccctctggctgtgtgctcacttttcacatgcacttcttggtttcattttgtttatagctgattttacagccctgctcatcattaaaactgtttccatctgaattcacagactcaaaaactttcccaggagscttattttcataaattcacttagaaagagctcatgttaagttttatatatcattttaaaaatctaaagttaaaaccccacataaaattacatcttccatttaaaactttattaaagataattttccttagtaaatactgccaggcccatgttacctcatttgtttggaaacaatttgtaagcaaagaaataaacaggaagatatttatttttatctgtctagtcatacctgaatagggactctcttgacagccaaatttcattctgtttcacagttttc

SEQ ID NO: 433705 - DNA, 607 bp, Homo sapiens
cttcattcttttaatagcaagtgtgtcttcttccataggccagaaaactgtctttgaatctttattactgcatatgtaacaggatgctgattgtaatttggggatatttttagacttgtggctaagacctatagctgagaaattaaatgcacaaaatacttcactttaaaattccaagacccaccagccctgagggacagcctattctgcaccagaattactgaggagtgacagatcagataacttgatctaacagataccaacaacaaacyacctgttgctgtctctatccctatgcccgtggatggaagagggtaaggagagaggaaaatgtcttttggggaaaggaataggctctttcccttctgaattcaaaccgctagagacaggtgattaaaaagaattacccaaaactacactgacagcttacaagaaggaaaaaccagcactgtatctcaccagtggatgtctgcttaagcagtgatcttggcttgttatgtagcaagagagtaggggaaatgagagtaggtgagattagacaaagtgaaaaacttccaggaaggaaaaggttaagacagcagcctcccttttttttccagcttttgga

SEQ ID NO: 433706 - DNA, 607 bp, Homo sapiens
cttcattcttttaatagcaagtgtgtcttcttccataggccagaaaactgtctttgaatctttattactgcatatgtaacaggatgctgattgtaatttggggatatttttagacttgtggctaagacctatagctgagaaattaaatgcacaaaatacttcactttaaaattccaagacccaccagccctgagggacagcctattctgcaccagaattactgaggagtgacagatcagataacttgatctaacagataccaacaacaaactacytgttgctgtctctatccctatgcccgtggatggaagagggtaaggagagaggaaaatgtcttttggggaaaggaataggctctttcccttctgaattcaaaccgctagagacaggtgattaaaaagaattacccaaaactacactgacagcttacaagaaggaaaaaccagcactgtatctcaccagtggatgtctgcttaagcagtgatcttggcttgttatgtagcaagagagtaggggaaatgagagtaggtgagattagacaaagtgaaaaacttccaggaaggaaaaggttaagacagcagcctcccttttttttccagcttttgga

SEQ ID NO: 433707 - DNA, 607 bp, Homo sapiens
cttcattcttttaatagcaagtgtgtcttcttccataggccagaaaactgtctttgaatctttattactgcatatgtaacaggatgctgattgtaatttggggatatttttagacttgtggctaagacctatagctgagaaattaaatgcacaaaatacttcactttaaaattccaagacccaccagccctgagggacagcctattctgcaccagaattactgaggagtgacagatcagataacttgatctaacagataccaacaacaaactacctgttgctgtctctatccctatgcccgtggatggaagagggtaaggagagaggaaaatgtcttttggggaaaggaataggctctttcccttctgaattcaaaccgctagagacaggtgattaaaaagaattacccaaaactacactgacagcttacaagaaggaaaaaccagcactgtatctcaccagtggatgtctgcttaagcagtgatcttggcttgttatgtagcaagagagtaggggaaatgagagtrggtgagattagacaaagtgaaaaacttccaggaaggaaaaggttaagacagcagcctcccttttttttccagcttttgga

SEQ ID NO: 433708 - DNA, 537 bp, Homo sapiens
tttgcctggttttgaaccttaaaaaaaaatacattatacatatttttaagccttgcttctttagcccaacttayatttgtaaactacagttatgttgagtgtgtcataaactatttttattgttctatactctgatattgtaatggcaaaaaccacaattaatgtatgcagcctactgatgatgagcatttgagcttttcaaactattaatggtgcttttatgactatttacatacacgtacttgggtgggcatggacatgattttctctagggcacttatctaggctaggtcatagggtatgcctacccacatgttacgtatattaaggccaaagtgctttccaaaggggttgcaccatggcattatgtaattttaaaaataaatattttatattcgcttcataaataaaattactacgagtctatgtaagatatttaaaaatacagactagagtttttatgcagatgctttactatagtccatctaatcttgaggaatgatagaaagttatcagaaatgtgtaagcaaatttgtc

SEQ ID NO: 433709 - DNA, 577 bp, Homo sapiens
gttgagtacttgtgctattttgaatgttagctacattgtagaataaccagccagagaggtaagtcatatgtgtaaagctgtaggaggcaaagaaaagatttaagataaaataaggatatgtgaaacacaaatgaaaggatggattagatgttcaacaatatattgagtgaatggtatttaaagtttgagcaawaggacatatccttactattttttaatggattagaccattagagatacagtgtccatctatggctaagaaggacatctgtagccacacaaactggaataagcctataaagcttctttttctttcctttttaagatataagatcatcaacagaaaataaagaaacccccttatgtctgagggatgtatgctttcaaagtacattgagagcatactgtgtgttactttttggccttccagcaatttgctagtggaagagtctgctaaatgattaaatcccgtatgtccaacttagaagctttttggttcagggtaggtagcatattcctctcgcaccaagtggctcccgaactttattgtaaggtctagtgcttcctatagaaacag

SEQ ID NO: 433710 - DNA, 625 bp, Homo sapiens
ttataaataaaattgtatatgagacttattctgaagctttttaaaaacataaataccwttgaggtcctccaaaattatgggtgatagatctggtatcgttgatacacaggcatatttacattttggtgccctatcaggtaattctcatgtgttttcaagtattatatccattgttccatatactaaatctctgttgactttgcttaggtttgtattaactctttggtgatcttattatctctaagctaaatttattatagcttagagaaagaacattatttcttcaaaatgaagagattataggaaaagaaaatacaggctttgttctgtagagtatgaggaattaattattacttgatgatagaaacacctaagaaggtaaactttgttagactgtaaggacaaagatattccaataatttgtttcctctttccttggtaactgaaccttgatttcatcttagagacccataccgaaactttcagcccatgtgggatgagtagaccttgatcaaaccttgattcaagagcagatatgtggtgttgggcaaaataaatcagagtaccccattcttctcaccagaagtgatgatctcagtggcatgcatgtgatctaaatatggcc

SEQ ID NO: 433711 - DNA, 626 bp, Homo sapiens
ttgctaaaatatgagtttccatgagcacatacatgtgtatgacagagagggagagagagatttgagttggtagattatgaatgcagctaagaaatttgcaatttaactacttcctcarggaatcttgaggcaggtattcctcagaccacacagtttagaatgtcctttgcaaaatcctgtatgacagaagtctggagatttttatacagggacatcatacaatgaggcttctaatagaatcttgatgacaaactgcaacatgtaaaaagacagacttatacttaatcagaaccagttgcatagaaagccctaggctttttaaagttacattaaaaaaagaacatagggcctcaatcactaaactcaaattggatttgtaactccaggactgttagaaaaacagctttttcatctgcacctgttatggtggagatgattctagaatgagcagagtgaatccaagaaagtatttttcttcatgaaggaaacaaatagtgctctaggcaactgtggttgatggatgtgatagcagatcctttcttagcatcctcaccttataaaattaatagatcctcacttttaaacatattatagaaaatggaaaagagaatcaaacgaacaaaatc

SEQ ID NO: 433712 - DNA, 626 bp, Homo sapiens
ttgctaaaatatgagtttccatgagcacatacatgtgtatgacagagagggagagagagatttgagttggtagattatgaatgcagctaagaaatttgcaatttaactacttcctcagggaatcttgaggcaggtattcctcagaccacacagtttagaatgtcctttgcaaaatcctgtatgacagaagtctggagatttttatacagggacatcatacaatgaggcttctaatagaatcttgatgacaaactgcaacatgtaaaaagacagacttatacttaatcagaaccagttgcatagaaagccctaggctttttaaagttacattaaaaaaagaayatagggcctcaatcactaaactcaaattggatttgtaactccaggactgttagaaaaacagctttttcatctgcacctgttatggtggagatgattctagaatgagcagagtgaatccaagaaagtatttttcttcatgaaggaaacaaatagtgctctaggcaactgtggttgatggatgtgatagcagatcctttcttagcatcctcaccttataaaattaatagatcctcacttttaaacatattatagaaaatggaaaagagaatcaaacgaacaaaatc

SEQ ID NO: 433713 - DNA, 626 bp, Homo sapiens
ttgctaaaatatgagtttccatgagcacatacatgtgtatgacagagagggagagagagatttgagttggtagattatgaatgcagctaagaaatttgcaatttaactacttcctcagggaatcttgaggcaggtattcctcagaccacacagtttagaatgtcctttgcaaaatcctgtatgacagaagtctggagatttttatacagggacatcatacaatgaggcttctaatagaatcttgatgacaaactgcaacatgtaaaaagacagacttatacttaatcagaaccagttgcatagaaagccctaggctttttaaagttacattaaaaaaagaacatagggcctcaatcactaaactcaaattggatttgtaactccaggactgttagaaaaacagctttttcatctgyacctgttatggtggagatgattctagaatgagcagagtgaatccaagaaagtatttttcttcatgaaggaaacaaatagtgctctaggcaactgtggttgatggatgtgatagcagatcctttcttagcatcctcaccttataaaattaatagatcctcacttttaaacatattatagaaaatggaaaagagaatcaaacgaacaaaatc

SEQ ID NO: 433714 - DNA, 616 bp, Homo sapiens
aaaacaaacaaacaaaaaagtatgtctaatttgtttgccactattcaactagggtcttgcaaatagcactaggtttgacatacaacatgattcgaagaagatggtgatgtaagatgtttacattttagtcatctaagaaaataaaggaagaaagagaaggaaaaagggagataacttgaagaggaggagggctggaagagaaaaagaccttgtgtaaataaggagatttgagtgcttgtttcagcccagatattaaacagttaagttattttgaagcaagtgctactctggtggaacagtgaatttaatcatctgaactctgaagttctttscagattttatacttcttaaccttaatttgcaatataggtacatatgcaccaaacacatgtatgatatatatgattcctgatacaatttaaagtatatcaatgccaagttttataaaagtattcaaatactatatgagaaattacaagatagcattcttctcattgagagtaaagaactgtgtaattcttaacactccatacagttacaaaatatcttgagagcttggaaggcagtctcagttccagtatttacctacagtattacagaacctgctactataaag

SEQ ID NO: 433715 - DNA, 546 bp, Homo sapiens
atacttattacatccattagagtttaatgtggagaaacaagctgagcagaaatgtgagctcacgttaaagggcctggaagtgttacagaaaaacattttcagaagggatttcctttctatgtcattaagaacagaaaggctggaccacttcagtgtataaagagttaaattgtgtgtgggggaggggtgtgtgtgtacacacaggagaaggaggtacaggttaggagaaatggtaatgccaattcctcaaaaacattttcacttttgctataagattcgctatttgaatatgcttgtttaactactcctaagagaaatcttgttcctarccaagaaaggtaatgtcatatcaacataaatattcagccatacatagaatttgctgatctggtaatcagggacaaggatactggttagatataacagtatctgttactgttactatttctgttactgtcttcctaagacatatcaagataattgctttttgtgcttcagtaagattctatgcatactatttcacttgctgcattattttataactac

SEQ ID NO: 433716 - DNA, 489 bp, Homo sapiens
aacagcatttggatggcatgaatctaatggaatcagtaatatccatgcatctgttgaaaaccaatcaacccgtttaagatttcaaattacgatctgaaatgtgaaaatgattggtagattatcaaactcactgggctggacagagcaatatgtcagcacctttgcccacgtccacagcctgaaagcttttgaaggtaagcagcgccgtcatcattttggcattstattttagtctaagcctacatcagaagcctgccagggctcagtgctgataacaaagcactatcgcttttcaaagtgacagagcacagtgacatatcaacactaagacttaaacgaaaagccccttctcatttaactgggaatctgctgaagctgtattcagcccagcactcgttttcaattaaaactttcttgtcgcaagagaaaagtttggcatatccttttcaacgacagttatggaagtgagtggaaagggtagtgtagtgt

SEQ ID NO: 433717 - DNA, 596 bp, Homo sapiens
gttgaaacagccagagactatccagaacaagggacatttasacagaagttgagaaaagaagtggcaataacacatataaagtgggacttgaaagaggagacttccagatggattattttttaaaatcctgtggtaaaaaatatgttttattagtttattaatattaggttatattactgcatttgtcgatttggtgacaggaagttgagataaaatctcctcttttggtttctacttcctctgtgccaccagtaaatgaaatcatctacttaaagggaaaagttatgggccctgaagtattaagtataggtgagaaagtatgaaatataagtagtgacattggttccacttaccgctgggatgcaaaacgttgccataaatttttgttcctatcctaatactaagaacaatagataagctaaaagactgtagatttcttttttatttttaacttatcagatagctgaagatattaaaaaaacaactaaaaaggactaaatagaaaacaaatacctcgttctaggagcaactatatctgtagttactttcataccttgctgagtgacaggaagaggagaaatacacggtagacctca

SEQ ID NO: 433718 - DNA, 590 bp, Homo sapiens
aacttctaattcaaattccttgaaacaattgtaataatcttaacctgtgttgtatatgcagaaatatactttaaaagttaaaattattaatttttgggtttctgtaaagtattacttttatactcaatgcattaataactatatttctctatatttactttctaatttttgataaacattgatacttttatagttgtgaagtaggaaggaaacttcaagtaatgactctgctcataaaatgttaaagttctccctaaaacacttaatttgggatttttaacttttagaagcaaattaggtggtaaattcaggatcaactttctgkgatgttgaatcataaagtataagttagagacaaagcagaccatgagtcttcttatgtaatgttaacaagcataaactttatccttaacatgatgagtgaagtgtttcttcctaatatagaaaattcttttttaggctacgggaagattctactcacactagtgaaaatatagtagcattgtcaaaatttgttaggtggatataatgtatagatgtagatgtgtaggagataggtgctttaaaatttcagtcatataacaaaatgc

SEQ ID NO: 433719 - DNA, 532 bp, Homo sapiens
cagcaagggcaccaattttaccctcaaagtgtggaaagtccattgccgagagaggtcaagtagatataaaaaatataaaataatcagtctaatggaaatatgttgaaggtcaatgggaaaakgaaagcgcacataggtcacctgaagattcatgaaatactgcataaggagtgtggcatttgagctgaaatttgaaggaatgaaggaatagcagtaccttttctgtcagtcaaaggtgtgtgagtgggtcttggtcaaaggaaaaatgcagagatgattgattgtgggtgggaggttctgctaggggtgggattgttgtgttattgagagaacaggatgggtgaaggcaccagattgagagcaaagaacataggtatgccggtctcatggatggtaacagagcagcaaaactgagggagaaaccccattctgtacatttttatacagaaattattctcttgaagatgaaaagtcactaaagaattttgagaagagatgtggatgtaaacaataacaattgcctacttcctaa

SEQ ID NO: 433720 - DNA, 495 bp, Homo sapiens
gactgtttcccaatactagcccaatgcttagtacatacagatgcttagtgggttttgttgaataaaataatgggtatctacaataaggagttgtgaataaaagagagaaaaaggcaaagacactggggaaagtcagttgagaaaatgcactatgcccactttctcattttgctaggtaatggccattatacmgagtttaaagtcaattcattttcttaattcttactctgtcattgtcatcatctgcagcgagtaataatagtaataatcctctaactatctgcacatgtatcaacacagatgatacgctagtcatttgcgaatgttataagtgtaatgaaattaaaaccattgattaaatggcacaataatttctacagagcagaggggaaaaaaaaaaggtatttaaagggaagaactgagccacaaagtaaagcttactttaaaatatacatttgagtttcaagtttaaaaagtcagtcaccaaagatttgt

SEQ ID NO: 433721 - DNA, 581 bp, Homo sapiens
attttccacattttcacagaagagactgaaagccaacaattgcctgaataaactacaaaaaaatcttactatcaatatgttgtaaagttaaaattgaacctgaagttaactaaattcagaatcccagttaagtcacataccaggataggataatattagtagacaccatttaccaaacatataatgtatgtaagatcctggtctcagtatttttatgtattaattcatttaattctgataattatatttttactttatagataaaactgagctataagtatattgttctttatcatacacatttttaatccaaggagtcttgcttcagagcctatgctcttagtcattacatctctatatgatagttaatcattgtacggyattcttacaagtgctatttcaatgcacatatattcatttattcttttcagttttaggagtcaagtaattatatatttattatgagtctaatatcatcttagtgggctggtcctcattaataactacagttaacatttactgaacacatactaagtgccaagaagtgtgtcaaagtctttaagttcatctcatttaatctc

SEQ ID NO: 433722 - DNA, 581 bp, Homo sapiens
attttccacattttcacagaagagactgaaagccaacaattgcctgaataaactacaaaaaaatcttactatcaatatgttgtaaagttaaaattgaacctgaagttaactaaattcagaatcccagttaagtcacataccaggataggataatattagtagacaccatttaccaaacatataatgtatgtaagatcctggtctcagtatttttatgtattaattcatttaattctgataattatatttttactttatagataaaactgagctataagtatattgttctttatcatacacatttttaatccaaggagtcttgcttcagagcctatgctcttagtcattacatctctatatgatagttaatcattgtacggcattcttacaagtgctatttcaatgcacatatattcatttattcttttcagttttaggagtcaagtaattatayatttattatgagtctaatatcatcttagtgggctggtcctcattaataactacagttaacatttactgaacacatactaagtgccaagaagtgtgtcaaagtctttaagttcatctcatttaatctc

SEQ ID NO: 433723 - DNA, 550 bp, Homo sapiens
atttattccacaaatatttactaaacaattatttaccagccactactatactataatgtgaggttaaagtcacaaataagacaaaaaccataatagatttgatattctggttactaatgtttaataactgtatattttattgccacttcaaaagctactagacattgtacaattgcattctataatctcttccgggatttttcttttggtattccaaaatctagcttgagaagttttatataagtttgagtgggtttaacactatggcagaaacttstagttatccctcaacatccatcttactttacttattttttgctaggttcatgaccacttggaataagacaaccatccttagtctcaatgccataagattaagttctggcaaaaggacacatgtagacgttgggtaagcaaagtctaaacagtgtcagtgaatgttaagaggcatgttcctctttgtccctccgtccctaagtaaaatttctggttagaatgcagaattaatgcctggagctccagcagtcatatatcataagaggccacccca

SEQ ID NO: 433724 - DNA, 587 bp, Homo sapiens
aacacttgctatgaaataactggagaatcattttcttcactaatttaaaatacaccaataaakcatataaaatcttaggtaaatttatggccttttgcctaaattatatcttgttccatttccatgctgtagatgagtttgtgtgaatgaggcctagataaaatctattgcgaaacaaattcaaacaaaacaaaaataatgcaaaacaaaatcaaacaaaacaaaatatagaacacactgtcgttgtgtttcttcctccatgtatgcttatatgttcatatacaatatgaaaaataattgaagagcaaactcccagtctgtccagtgtgggtggaggttgacattgaggaaaacattatttaacagtaggagaaggtaataaaaacaggaaattatttaatttgggagaggatttgagcatcgagcaaatcaatctgaaatttctcctctagccaactctgttaagttgatactcctttcgtcattccctactcctacaaggaagtgccaatttcctggtatctacagtggattttttccccatagcctacaagcaaacagatgaacaattcatgtaggtgaagatt

SEQ ID NO: 433725 - DNA, 587 bp, Homo sapiens
aacacttgctatgaaataactggagaatcattttcttcactaatttaaaatacaccaataaagcatataaaatcttaggtaaatttatggccttttgcctaaattatatcttgttccatttccatgctgtagatgagtttgtgtgaatgaggcctagataaaatctattgcgaaacaaattcaaacaaaacaaaaataatgcaaaacaaaatcaaacaaaacaaaatatagaacacactgtcgttgtgtttcttcctccatgtatgcttatatgttcatatacaatatgaaaaataattgaagagcaaactcccagtctgtccagtgtgggtggaggttgacattgaggaaaacattatttaacagtaggagaaggtaataaaaacaggaaattatttaatttgggagaggatttgrgcatcgagcaaatcaatctgaaatttctcctctagccaactctgttaagttgatactcctttcgtcattccctactcctacaaggaagtgccaatttcctggtatctacagtggattttttccccatagcctacaagcaaacagatgaacaattcatgtaggtgaagatt

SEQ ID NO: 433726 - DNA, 438 bp, Homo sapiens
tatattcctttttatttttaaataatacgtacctatctttttttcattattacaaaaaatagatatacaagcattcttttgttgtgatggagtcmtatttcacatgttgtttctctagtgttactctatcttattcccgtctggataaaagatcttgaaatgttctttcatggagatgaaactgctttcctcctggtcttcttctttataatgaggcctacgatgccagtcataactggtttattatctattccctcaagctatgtctatgtgaatgattcagcaaccacatattataaaattctaaataatttgaataagaaacaacttatgatcctggataaaattatttttttaagataagcaaattggctgctatattttgaaagattaggttgtgttacaaaatacactagtaaaagagtaagaaaaaaaaag

SEQ ID NO: 433727 - DNA, 438 bp, Homo sapiens
tatattcctttttatttttaaataatacgtacctatctttttttcattattacaaaaaatagatatacaagcattcttttgttgtgatggagtcatatttcacatgttgtttctctagtgttactctatcttattcccstctggataaaagatcttgaaatgttctttcatggagatgaaactgctttcctcctggtcttcttctttataatgaggcctacgatgccagtcataactggtttattatctattccctcaagctatgtctatgtgaatgattcagcaaccacatattataaaattctaaataatttgaataagaaacaacttatgatcctggataaaattatttttttaagataagcaaattggctgctatattttgaaagattaggttgtgttacaaaatacactagtaaaagagtaagaaaaaaaaag

SEQ ID NO: 433728 - DNA, 438 bp, Homo sapiens
tatattcctttttatttttaaataatacgtacctatctttttttcattattacaaaaaatagatatacaagcattcttttgttgtgatggagtcatatttcacatgttgtttctctagtgttactctatcttattcccgtctggataaaagatcttgaaatgttctttcatggagatgaaactgctttcctcctggtcttcttctttataatgaggcctacgatgccagtcataactggtttattatctattccctcaagctatgtctatgkgaatgattcagcaaccacatattataaaattctaaataatttgaataagaaacaacttatgatcctggataaaattatttttttaagataagcaaattggctgctatattttgaaagattaggttgtgttacaaaatacactagtaaaagagtaagaaaaaaaaag

SEQ ID NO: 433729 - DNA, 583 bp, Homo sapiens
tgagccttagtttcattaaaatgagcaatataccgcagatttcatatgaccactgtgaggattgaatgagctatagtgcaagtygactgcacagggcctgcaagaatgaagggctccaaacggggtggggacaggagtgggagtgatttgtcttgtgaaaaagaacctgaagacctcaagaacgcctgccaatctcagaatctcccttattctgtgaaaaagtttaaatgggatcataactttaaattataattagtttcaatgtttttagacagcattactttgagatttatgaaataatgagagtttaaaccttaatgataaaattttctgtgtatatctggaatattactttcattatctgttataattacatatgaataattacataaagagaaaattgtggaattatctctaaagagtttctagtatttactgttacattgatatgtgtgtgtatatttagcttcttcattatcatttctgactattttaaaataaaccaacttggctcacattttcacattagtggtctaggagggaagtgaattccttttcaaagcttaaaattactacatgatta

SEQ ID NO: 433730 - DNA, 542 bp, Homo sapiens
aaaagaaagtgttgctttttagtaattttatacacacacacacacacacacacacacacacacacacacacacacacacacacaccaggcttctcaggctgacagtgactatatttcttttcttctctcagtaattatattacataattactgaattatattaatatatgtatataattctattctataattatatatgtatataattctaattctaattatatacacatatataaggtataattatatgtaattatactttttaataattctataattgtatatgcaaataattttaattatatacacatatataaagtgtaatcatatgtaattatactttttagtaattatgtgtatacacatatgtgtgtataaatgtataattatatatctatatattattatatattaatatctatatattatatagatatatacactgtatttttgtcctttttctataatcaacaaaagacagagtaacagaccaatatagaaaatagggcacattttaattggawggcacaaacatatgacaa

SEQ ID NO: 433731 - DNA, 604 bp, Homo sapiens
aactgactaactaactaactaaataaataaaatgagactgaaaaagagaattggccagggtaatctgatgtattacgagtaaactttggaagagattatctgtttctcacagcatgaaatataaagaccctttccaggcaacacagtttgaaggagagactagagactatgtagttaactaaacttcagtctgattctggctctgccacttaaaatctgcaagaatatgatgccttagtcctctgagtctcattttccttcacctgcatagtgaaattaatctgtractttatatttaaggtgggtttctagtagacaagttataattgggtcttgtttgtttatccactttgacagtctttgtcttttaattgatgtatttagactattcacatttaaagtgattgatatagttggattaatagcgatcatatttgtacatattttctatttctttcctttgtttgctcattcattcttacttttttctttctctcttttctttgcttttttgtcttccacttctctggttttaattaggcaatttatatgattctactttttcttctcttggcatattaattatacttcttttttaagtacg

SEQ ID NO: 433732 - DNA, 194 bp, Homo sapiens
tgctgagtcatttatattcagtttttgaaatctttccagaaaagacactaaaaactttggtataaatattttacatctatctcaaattttattcaatggaaaagataagattaccttcagattttaattamgtctagaaaaataaaagccctaaggggtaaaatgcaagtctctaatctgcttattacaaaatg

SEQ ID NO: 433733 - DNA, 530 bp, Homo sapiens
  misc_feature (1)...(530): n = A,T,C or G
agctctctacttttctctaaatgttgctgtaaacctaaaactgctctaagaaatanagcatatatatatatatatatatatgtgtgtgtgtgtgtgtgtgtgtgtgtgtgtgtgtgcgcgcgcgcgtgtgtgtgtgtgtgtatatatatatacacacatatatatgagggttttttttgaaaaaggagtttatgtgctttagaaaaagattaatcctacattgttgttcagaaataacggaaagtaaatgaaactcgcagaaagaaatgggtaraaagctactgtaattgtctagataaggattcataacattttaaattaggatgtcatcagtagactacaatagaatacccatgggaaatagaagaaacaatcagatttgcccactgactaaatgctgacctgtttggggcaaggtcccattgaatgatcatgaaacttgaggaaaaccggatccaactccataattctcgagtgatgaagagtcactttaagctgatctttgtttacctttcagtttcatcttctat

SEQ ID NO: 433734 - DNA, 620 bp, Homo sapiens
tatgttatttccctgagaataagaaaaggctatcatcatggaattttatttcaggcatggaacccatatattgcatccaaacacagtttgtgagtgactacaagccaataaatayagcatctcacaaggagtaacaagggcagaaagtgtggcgtctgtgagattaactgagaaattacagaagagagagttgtcctttgtctgtaaggatactgacttcaggaatacgtgctatcttataacacagttgtttctcagcctcaaagttagaccaacaatctattatccaccagggagcctagctctgtttagctttagcaaaatgaggctcgcagccattacacaatggtatcaatgcagaaaacgtgtaatttgaagttcacagaaacttttatgtctaaagacacaaagtcccttcagttgagctcatcttcagccttagagcttgactggattttgaaggaaacaaatcagtttgataattctgatcatgcatttctagaattgtcttcatattcatgtgatgaagtgctttactctccattaatgagctcacttcttaatgagtctagcctccctttccctcagagctcctctaggaatcttagccatgtggttaa

SEQ ID NO: 433735 - DNA, 620 bp, Homo sapiens
tatgttatttccctgagaataagaaaaggctatcatcatggaattttatttcaggcatggaacccatatattgcatccaaacacagtttgtgagtgactacaagccaataaatatagcatctcacaaggagtaacaagggcagaaagtgtggcgtctgtgagattaactgagaaattacagaagagagagttgtcctttgtctgtaaggatactgacttcaggaatacgtgctatcttataacacagttgtttctcagcctcaaagttagaccaacaatctattatccaccagggagcctagctctgtttagctttagcaaaatgaggctcgcagccattacacaatggtatcaatgcagaaaacgtgtaatttgaagttcacagaaacttttatgtctaaagacacaaagtcccttcagttgagctcatcttcagccttagagcttgactggattttgaaggaaacaaatcagtttgataattctgatcatgcatttctagaattgtcttcatattcatgtgatgaagtgctttactctccattaatgagctcacttcttaatgagyctagcctccctttccctcagagctcctctaggaatcttagccatgtggttaa

SEQ ID NO: 433736 - DNA, 594 bp, Homo sapiens
gatcatgcatttctagaattgtcttcatattcatgtgatgaagtgctttactctccattaatgagctcacttcttaatgagtctagcctccctttccctcagagctcctctaggaatcttagccatgtggttaagcagtaacatctgctacccatttttagatcctcttaatgggactttttcagcscttaacaatagaataaggtcatttcatatgtagcctcagtcttccaaagattgtttaagggtatttttgaactatttatttgtttaaaaaaaaaagctgtagtttttcctcagatttagatatgggatgaatggggaatgctgtgaatcaaatttgggataattttatcttcttgtcagggaatagcttcatgttttatcttctcacaaaatctataatgagagagctgtttagttcaagtctggtataggtcattaattactactatcacagggaggattttttcatccaagtccaacttgttggaaaactgtttttttcacaggtcactgccctgactctggcctccctggactcatacatgcctggatatggagagcctgtgctccacgtgatgtctgctactg

SEQ ID NO: 433737 - DNA, 531 bp, Homo sapiens
tactgtaacttttctatgcttagatacacaaatacttcccattgtgttacaactggctctggctacaatattcaatacagtaacatgctgtacagatttgtagcctaggagcaataggttgtatcacacaggtttatggaaacacactttatgacgttcacacaatggtgaaatcggcccttttctcagaatgtatccctgttgttaagagatgcatgactgtacattgtgtwgatcaatgtatgtgaaaattatactcatttgttaagttccagaatatgtgtttgatttccccaagcagaaataatctctcctctttttgtgtttcctcacagttttttacatttgactttttactctacatatggatgaattgtactatatcatctactactttttttagccctttgcttatctctgtatctacagtgaaggctgggttaattgaatgacacagactagaattgaagtaaagcatttttttctagtaaattctacaatctttggtccttattgtataaatgtggtcat

SEQ ID NO: 433738 - DNA, 531 bp, Homo sapiens
tactgtaacttttctatgcttagatacacaaatacttcccattgtgttacaactggctctggctacaatattcaatacagtaacatgctgtacagatttgtagcctaggagcaataggttgtatcacacaggtttatggaaacacactttatgacgttcacacaatggtgaaatcggcccttttctcagaatgtatccctgttgttaagagatgcatgactgtacattgtgtasatcaatgtatgtgaaaattatactcatttgttaagttccagaatatgtgtttgatttccccaagcagaaataatctctcctctttttgtgtttcctcacagttttttacatttgactttttactctacatatggatgaattgtactatatcatctactactttttttagccctttgcttatctctgtatctacagtgaaggctgggttaattgaatgacacagactagaattgaagtaaagcatttttttctagtaaattctacaatctttggtccttattgtataaatgtggtcat

SEQ ID NO: 433739 - DNA, 531 bp, Homo sapiens
tactgtaacttttctatgcttagatacacaaatacttcccattgtgttacaactggctctggctacaatattcaatacagtaacatgctgtacagatttgtagcctaggagcaataggttgtatcacacaggtttatggaaacacactttatgacgttcacacaatggtgaaatcggcccttttctcagaatgtatccctgttgttaagagatgcatgactgtacattgtgtagatcaatgtatgtgaaaattatactcatttgttaagttccagaatatgtgtttgayttccccaagcagaaataatctctcctctttttgtgtttcctcacagttttttacatttgactttttactctacatatggatgaattgtactatatcatctactactttttttagccctttgcttatctctgtatctacagtgaaggctgggttaattgaatgacacagactagaattgaagtaaagcatttttttctagtaaattctacaatctttggtccttattgtataaatgtggtcat

SEQ ID NO: 433740 - DNA, 525 bp, Homo sapiens
tatgtgaaaattatactcatttgttaagttccagaatatgtgtttgatttccccaagcagaaataatctctcctctttttgtgtttcctcacagttttttacatttgactttttactctacatatggatgaattgtactatatcatctactactttttttagccctttgcttatctctgtatctacagkgaaggctgggttaattgaatgacacagactagaattgaagtaaagcatttttttctagtaaattctacaatctttggtccttattgtataaatgtggtcatagaaaagatacctttctcactatggttaacctacattaaaaaaaactaagaaggagcaccgtgtttagttactgacacctaatcctttgtttttcttagacttaggtcagcagaaatatgaagcctggtaagactgcctgtatttccaggttttgtaaccctggtttattcatcaaactattgtgaactttggcccaatcatgttcttttgcagcctgtatatttgtttatcatt

SEQ ID NO: 433741 - DNA, 525 bp, Homo sapiens
tatgtgaaaattatactcatttgttaagttccagaatatgtgtttgatttccccaagcagaaataatctctcctctttttgtgtttcctcacagttttttacatttgactttttactctacatatggatgaattgtactatatcatctactactttttttagccctttgcttatctctgtatctacagtgaaggctgggttaattgaaygacacagactagaattgaagtaaagcatttttttctagtaaattctacaatctttggtccttattgtataaatgtggtcatagaaaagatacctttctcactatggttaacctacattaaaaaaaactaagaaggagcaccgtgtttagttactgacacctaatcctttgtttttcttagacttaggtcagcagaaatatgaagcctggtaagactgcctgtatttccaggttttgtaaccctggtttattcatcaaactattgtgaactttggcccaatcatgttcttttgcagcctgtatatttgtttatcatt

SEQ ID NO: 433742 - DNA, 525 bp, Homo sapiens
tatgtgaaaattatactcatttgttaagttccagaatatgtgtttgatttccccaagcagaaataatctctcctctttttgtgtttcctcacagttttttacatttgactttttactctacatatggatgaattgtactatatcatctactactttttttagccctttgcttatctctgtatctacagtgaaggctgggttaattgaatgacacagactagaattgaagtaaagcatttttytctagtaaattctacaatctttggtccttattgtataaatgtggtcatagaaaagatacctttctcactatggttaacctacattaaaaaaaactaagaaggagcaccgtgtttagttactgacacctaatcctttgtttttcttagacttaggtcagcagaaatatgaagcctggtaagactgcctgtatttccaggttttgtaaccctggtttattcatcaaactattgtgaactttggcccaatcatgttcttttgcagcctgtatatttgtttatcatt

SEQ ID NO: 433743 - DNA, 575 bp, Homo sapiens
tgaaaaaaaaaattctaagagtttaaatgctaagagttcaaatgcaatactacgtaaaataaatcacaagtcagrcttcagacagaatgcggacatcaggaaaaatgggtaaaatatttacctttgtatactagaatctctatttccctatttgtaattactgcaccctgcactccctattagagatacttatgttaatttaccctgccctagttaaaagccatttgaagattctttgagtgctacattcaaaaggaaatacattctattattgaaaatctatatagctaaggatattccatttcatagttagatatttgtggtaagcccttgatcatcatacatatcatttttgggccattatttgattaggtatacaaaaataataatttagttcctagaggaattaatatgactttttaaagtattcataactaaaaataggtcttaaactctggaaaaatttgatcaacaaataaagccagtgtcatcattcttgatttcttgatgcacttgagagggcatcaagttgaatttgaagaccacttacctgtgtgattcagagaagcggcagt

SEQ ID NO: 433744 - DNA, 575 bp, Homo sapiens
tgaaaaaaaaaattctaagagtttaaatgctaagagttcaaatgcaatactacgtaaaataaatcacaagtcaggcttcagacagaatgcggacatcaggaaaaatgggtaaaatatttacctttgtatactagaatctctatttccctatttgtaattactgcacccygcactccctattagagatacttatgttaatttaccctgccctagttaaaagccatttgaagattctttgagtgctacattcaaaaggaaatacattctattattgaaaatctatatagctaaggatattccatttcatagttagatatttgtggtaagcccttgatcatcatacatatcatttttgggccattatttgattaggtatacaaaaataataatttagttcctagaggaattaatatgactttttaaagtattcataactaaaaataggtcttaaactctggaaaaatttgatcaacaaataaagccagtgtcatcattcttgatttcttgatgcacttgagagggcatcaagttgaatttgaagaccacttacctgtgtgattcagagaagcggcagt

SEQ ID NO: 433745 - DNA, 575 bp, Homo sapiens
tgaaaaaaaaaattctaagagtttaaatgctaagagttcaaatgcaatactacgtaaaataaatcacaagtcaggcttcagacagaatgcggacatcaggaaaaatgggtaaaatatttacctttgtatactagaatctctatttccctatttgtaattactgcaccctgcactccctattagagatacttatgttaatttaccctgccctagttaaaagccatttkaagattctttgagtgctacattcaaaaggaaatacattctattattgaaaatctatatagctaaggatattccatttcatagttagatatttgtggtaagcccttgatcatcatacatatcatttttgggccattatttgattaggtatacaaaaataataatttagttcctagaggaattaatatgactttttaaagtattcataactaaaaataggtcttaaactctggaaaaatttgatcaacaaataaagccagtgtcatcattcttgatttcttgatgcacttgagagggcatcaagttgaatttgaagaccacttacctgtgtgattcagagaagcggcagt

SEQ ID NO: 433746 - DNA, 575 bp, Homo sapiens
tgaaaaaaaaaattctaagagtttaaatgctaagagttcaaatgcaatactacgtaaaataaatcacaagtcaggcttcagacagaatgcggacatcaggaaaaatgggtaaaatatttacctttgtatactagaatctctatttccctatttgtaattactgcaccctgcactccctattagagatacttatgttaatttaccctgccctagttaaaagccatttgaagattctttgagtgctacattcaaaaggaaatacattctattattgaaaatctatatagctaaggatattccatttcatagttagatatttgtggtaagcccttgatcatcatacatatcatttttgggccattatttgattaggtatacaaaaataataatttagttcctagaggaattaatatgactttttaaagtattcataactaaaaataggtcttaaactctggaaaaatttgatcaacaaataaagmcagtgtcatcattcttgatttcttgatgcacttgagagggcatcaagttgaatttgaagaccacttacctgtgtgattcagagaagcggcagt

SEQ ID NO: 433747 - DNA, 542 bp, Homo sapiens
ctttaaaaaacccttggagattatttctaccaagatagccaaacacatgtgaatattaaaaattaactttgaacttttattgtttattgtaatattgccattacttattttcttccccattaatatkttatagcccacccattctgtgaaccaacccagaaaaaaaaaatctactctaggcaaaccacgtgcgcttatctaacaatacaagcaaggataaaagattcagacaaaactcccactaaaacatgaaactgttaaaaatcataaaacttgtgaaagttttgtgtgtatgtgtgtgtgtgtttatgtgtatcaacaaaatacatctgctttaaaaatttctcctggattcacagtaaacattcataattccaaaaaaagaagcattcccatttgcattgcttaatgaagacaaaaatatattttttatttcagaaacctgtatgtagatcaactatacactaacaaagttattcgttaagattaaaggaaaataggttatttagtttttgttataatgataattgcttcaaatgttt

SEQ ID NO: 433748 - DNA, 542 bp, Homo sapiens
ctttaaaaaacccttggagattatttctaccaagatagccaaacacatgtgaatattaaaaattaactttgaacttttattgtttattgtaatattgccattacttattttcttccccattaatatgttatascccacccattctgtgaaccaacccagaaaaaaaaaatctactctaggcaaaccacgtgcgcttatctaacaatacaagcaaggataaaagattcagacaaaactcccactaaaacatgaaactgttaaaaatcataaaacttgtgaaagttttgtgtgtatgtgtgtgtgtgtttatgtgtatcaacaaaatacatctgctttaaaaatttctcctggattcacagtaaacattcataattccaaaaaaagaagcattcccatttgcattgcttaatgaagacaaaaatatattttttatttcagaaacctgtatgtagatcaactatacactaacaaagttattcgttaagattaaaggaaaataggttatttagtttttgttataatgataattgcttcaaatgttt

SEQ ID NO: 433749 - DNA, 542 bp, Homo sapiens
ctttaaaaaacccttggagattatttctaccaagatagccaaacacatgtgaatattaaaaattaactttgaacttttattgtttattgtaatattgccattacttattttcttccccattaatatgttatagcccacccattctgtgaaccaacccagaaaaaaaaaatctactctaggcaaaccacgtgygcttatctaacaatacaagcaaggataaaagattcagacaaaactcccactaaaacatgaaactgttaaaaatcataaaacttgtgaaagttttgtgtgtatgtgtgtgtgtgtttatgtgtatcaacaaaatacatctgctttaaaaatttctcctggattcacagtaaacattcataattccaaaaaaagaagcattcccatttgcattgcttaatgaagacaaaaatatattttttatttcagaaacctgtatgtagatcaactatacactaacaaagttattcgttaagattaaaggaaaataggttatttagtttttgttataatgataattgcttcaaatgttt

SEQ ID NO: 433750 - DNA, 542 bp, Homo sapiens
ctttaaaaaacccttggagattatttctaccaagatagccaaacacatgtgaatattaaaaattaactttgaacttttattgtttattgtaatattgccattacttattttcttccccattaatatgttatagcccacccattctgtgaaccaacccagaaaaaaaaaatctactctaggcaaaccacgtgcgcttatctaacaatacaagcaaggataaaagattcagacaaaactcccactaaaacatgaaactgttaaaaatcataaaacttgtgaaagttttgtgtgtatgtgtgtgtgtgtttatgtgtatcaacaaaatacatctgctttaaaaatttctcctggattcacagtaaacattcataattccaaaaaaagaagcattcccatttgcattgcttaatgaagacaaaaatatattttttatttcagaaacctgtatgtagatcaactatacacyaacaaagttattcgttaagattaaaggaaaataggttatttagtttttgttataatgataattgcttcaaatgttt

SEQ ID NO: 433751 - DNA, 546 bp, Homo sapiens
ttgtcagcgaaaccttcaatcttaactattcatacttgcctgattcttatccttccacttgcagcttatatttccagtggggacttgtgtcagccctggcccttgaggcagtgtgctggaatgaggagtggcaagagcctgcttattaactagtcatgacaatatccacccacgctgtgacttcatttctgcttccttggaagggatggtgagtgggtgggtatggctctagggctgtctgcctaagaaatgtaaagctaaactattattctaaacctgaaaaatgcagcaggtagtatttttcatatttttattatgaaaatgttcaatatacaacaaagttgaatcatcttctttacacaccacctagatgctatcactaatatttagcaaagttttttttcttatttcttctaaaaaaatcggaatacatatgcagaacgtgcaggtttggtacataggtatacgtgtgycatggcggtttgctgcacctattgatgcatcctctaagttcctgcccctcatcccccaaccctcaacaggtcc

SEQ ID NO: 433752 - DNA, 438 bp, Homo sapiens
taggtcaatgctcggtaagtatttttttagtaaagaaattaacattagatgaaattattgatagtccaaagagcagagatttatagcactgacaacagacaaaagaaatgatagtcatctgcttacttttccacatagaagttattctttttttcttctcatatcctctatttgaccgctcaaatactctccatcttgcctgaaacaaaaaaagatgtgaatataacataatagtagaaaactttcatgttcgatccccctttgttctacttccctgtgttgtggcagtgaaattggacagaatctctatgaggcaatgtgtcacaaatggcaggaatacaatacttaatacaccaycatctctctctgacttatagacacaaacacacacacacacacacaaagaaacccatggtatagtagatagtgtttcatgtg

SEQ ID NO: 433753 - DNA, 438 bp, Homo sapiens
taggtcaatgctcggtaagtatttttttagtaaagaaattaacattagatgaaattattgatagtccaaagagcagagatttatagcactgacaacagacaaaagaaatgatagtcatctgcttacttttccacatagaagttattctttttttcttctcatatcctctatttgaccgctcaaatactctccatcttgcctgaaacaaaaaaagatgtgaatataacataatagtagaaaactttcatgttcgatccccctttgttctacttccctgtgttgtggcagtgaaattggacagaatctctatgaggcaatgtgtcacaaatggcaggaatacaatacttaatacaccaccatctctctctgacttatagacacaaacacacacacacacacacaaagaaacccatrgtatagtagatagtgtttcatgtg

SEQ ID NO: 433754 - DNA, 644 bp, Homo sapiens
attaaaatgcactagaagataataaagaatcaaattttatgaaacatcttgctctatctawccactattgttatccacatttttccccaaaaaacaactaaagtttaccctgtgaagcctttttttgaattttctagcttatagattcctctcttaggcactgtctatttaaatcacatctttatcaattagtatatatctttgcctttttaattaaaaaaaaatatacaacctacttctccgattagtttataagtctcttgctcaaggtccatatattattccttctcatatcttcaaagccagatgctttgttttgcacaatgaaggtactactcattttttccagattatcataaaaatgatgacaattgttaatgaagtatgaattcacagaacaaagcagaacaaagcaaccacaaagacaacagctggtaccactgaattcactttactgtgagatccagcagcgtgataattatgtcattttcatgttttatctcttgtttttgtcctaacatgatgcctgacacatattagatatgtcaatttttgacaaaggaagaagagtagaaagggagagagaattgaaggaagggagaaatgaatctgggtattaacaaatggactggaatataagacaa

SEQ ID NO: 433755 - DNA, 644 bp, Homo sapiens
attaaaatgcactagaagataataaagaatcaaattttatgaaacatcttgctctatctatccactattgttatccacatttttccccaaaaaacaactaaagtttaccctgtgaagcctttttttgaattttctagcttatagattcctctcttaggcactgtctatttaaatcacatctttatcaattagyatatatctttgcctttttaattaaaaaaaaatatacaacctacttctccgattagtttataagtctcttgctcaaggtccatatattattccttctcatatcttcaaagccagatgctttgttttgcacaatgaaggtactactcattttttccagattatcataaaaatgatgacaattgttaatgaagtatgaattcacagaacaaagcagaacaaagcaaccacaaagacaacagctggtaccactgaattcactttactgtgagatccagcagcgtgataattatgtcattttcatgttttatctcttgtttttgtcctaacatgatgcctgacacatattagatatgtcaatttttgacaaaggaagaagagtagaaagggagagagaattgaaggaagggagaaatgaatctgggtattaacaaatggactggaatataagacaa

SEQ ID NO: 433756 - DNA, 644 bp, Homo sapiens
attaaaatgcactagaagataataaagaatcaaattttatgaaacatcttgctctatctatccactattgttatccacatttttccccaaaaaacaactaaagtttaccctgtgaagcctttttttgaattttctagcttatagattcctctcttaggcactgtctatttaaatcacatctttatcaattagtatatatctttgcctttttaattaaaaaaaaatatacaacctacttctccgattagtttayaagtctcttgctcaaggtccatatattattccttctcatatcttcaaagccagatgctttgttttgcacaatgaaggtactactcattttttccagattatcataaaaatgatgacaattgttaatgaagtatgaattcacagaacaaagcagaacaaagcaaccacaaagacaacagctggtaccactgaattcactttactgtgagatccagcagcgtgataattatgtcattttcatgttttatctcttgtttttgtcctaacatgatgcctgacacatattagatatgtcaatttttgacaaaggaagaagagtagaaagggagagagaattgaaggaagggagaaatgaatctgggtattaacaaatggactggaatataagacaa

SEQ ID NO: 433757 - DNA, 530 bp, Homo sapiens
attaactatgggagagatataaagcagatttgtcttgaagtacccagagaatgaccatattatgggtactttatagagttaggtattttatatttagtatacatttaatattaacaaagggtatatagaaaactctttataattataatacagagttgttgggtaatgatatttttacttgttaaacactcaggattccccttcaaaaatacactagttaatttacttcttcaaggttagaaaaaaaaaccacacctgttaaaaagtcacatataagcattaaacaataaagactttcctttatcgcaaaggagttataacaatctatttacaaataatacacatttgtcttttcagcattctattattctcctaaatcatctctagcacaaaaccaaracttaaagagagacagatgtgtgtttctgctccaatttatacacagctgtcaaatgagatgggttaccattgtaacagagtgatcatttctgtatgcataaaactgacagatgtttacctctatcagaaag

SEQ ID NO: 433758 - DNA, 556 bp, Homo sapiens
ttcatcacattcattttcctgggttcttatgagaattaagcagtacaaaatagtgctcaatacaacctttcataaaattgtgctcaatacatagcagcttcccttgtagccagtactttttcagtttctcccacattattttatcatagtgatttatgctactctgatgtgmaagtgttttctgattataaaaaaggcccctgttgatttatcaagtgaatatgaccagtaactatctttcttaatattttcaggacctaattacagtatttatcttttatataagatgcatatactcaatatgtctcatgatcacaaagtattctcattgaatcatgcatacttctgaaagaaaatcacatacatacacacacgcagagaacgaggctagttaatagcttaagaaggctaattttcaaatgtagagtaatgctcttaagctgtaagactaggatctacagttctaatatggagggttcttgagttttaactaccaaataatgtcagctaattcatgtatgtctttgcatagaatttttgtgttctttttaaaatg

SEQ ID NO: 433759 - DNA, 606 bp, Homo sapiens
tctgccaaataaaaagaaaagtatgaaacaaaaagaagattccagttatctcatattattcacagcctcatgtctaaactacacctccaagaccccacatcactctayagtgttatgatttgaagtctgtctcccacaaaagatatcctgaaatcctgaccctatggtacctcagaatgtaaccttatatggggaatggggttgttgcagttataatttgctaaattaattcaatatggtgggtgtgcgtgtaagaagacagaaatttagacacagacacagaggtaaaatagccatgtaaagacagaggcagcgattggagatatgcgagcacaagccaaggaatgctgggcctcccagaagctggaagaggcaaggaggaatccttccctagaggctttggagggagcatggacctgcccacatcttgattttggacttctaacctacagaactataagacactaaattgctgttgcatggtactttgttatggcaaccctaggaaactaacatacacgtttcacaagttcactattcttcctgctttctgaccttgggactcatattcctaattatggctttgcctaacccttagacttaaaa

SEQ ID NO: 433760 - DNA, 631 bp, Homo sapiens
caaatactgattttgcagtctgtgattcatagcagaagaggtgtcccatttttctatattgacacacgataatttgacatttgttttttactgaccaatttctagctagatatttcatctataaactgcacttagccagccttatgctgaactttgtaagggttttgtaataataaactgttcttgactgaaacacaagcctttcataattacatgccacagtgcaattcttatgcaacgagcttgtgtttttccaaatttaggaccaagcatgtagttttatcagttagctgggatttggtcttgttttcccttgattctgtaagtggtagttctaactttgaaatgggtcatctaacttataactattttcttcatttctttttaaaagggagaaatagcatgcaaatttctggcatgttgatagaaagttcagcattttttccctgacatgaaatatttcatttagaatgcgtatgtttcctctaygtataaggtttcctagagtcagatatgataaaaacaaactctgagatgtatatacctatgttcctacaagtgtaaaacctgaatgatgtctctggaaatggagcctcggagtgaccaggaacacaaatacttatatgtcaca

SEQ ID NO: 433761 - DNA, 565 bp, Homo sapiens
gtcatctgtgtataggaaaggctggggcaggagaccttgatcattctttatcagccttgacttttttaaataaaaatttttaaaaagcaggtgatgcttctggaaacctcggtgaagaatgatttatttcagaatgtataacactaaagcagaagttcattcttaatgtgttctcctattatatagaagtatktagacttctaatctggggaaaagagaaaaaaggacatggctttcaaatagaaacttagcaaaatgagtaagaagagtcattaagcactttgattaaataagtaaattacacatggaaatacactctggcattcttttttatttatgctccaaaatataggcttctggcatgttgtaaaatgtatttctccattgttatttctttctggtcttcagatttactcagacttttgccactatatctgctaaaaactgaatagaatattaccacaagatggcacctttgaacatatttcaaaatgttgattatgaacatcaaatgcctccaactgaaatgaacagtgaagacacctgttattccttttctggtttt

SEQ ID NO: 433762 - DNA, 534 bp, Homo sapiens
ctgactgaagaattctgcttttacctcataaatcttcccccaaatttcctgctctccaattatttttcctcctctttacatggaatctttttatgctatatttctacttagaatacttctatgatagacattttggtttcaccaattagcagagaatttcaaattcstcctctaaacctagtttgtttattggtttgctttccttttctttacatgttcatgtaattaagatggctttagtagtcacagcttgcacaagaaaggttgactcacctgcccgtgtgaaaacatctttcagatttaagaagagtcccaagggagcatcccgagtttattgctctttgcaggctataagctctccttaagtgatctcaaccattttcatacttttaattaccttccctaggctaataattcctgaatctctatatttagccttagacactgccatgagcttcaatttcacatatttaattgctggctagagaaatccatttgactagctctcgagactttcaaattccaaatacccaa

SEQ ID NO: 433763 - DNA, 575 bp, Homo sapiens
actatttacttgccatgagctcttgggcacgtcacttcacttctgtagacctctgtgaatttgatgagctggttagagaaaatgatccctccctaagtcctttgaaaaaaacgaccacaaagcaacagcattttctactagcttggagataaggaaagttgcaacagtgggcctcaaaaagagaaaataatttcattaaattaacttcacagttgcttttgatttgcttcaaagtaggctaggagatttctatcactccgacaggaatgctggaaattatttctatcattctatcgtttagttattatagagttctatcatttagtgattgttattttttaggttggacaaaaatttaaggacaacccttargtacataatggagaagctggaaagtggaagtcatcttgatgagtttgcaaaatagatgaaaagataaaatggaaaagatgacaaaccaacaggtcaggggatgcctgataccgtatcacaaagatcagacatacgtgtggagactaacaggtaaaactattttccacaagaaaatttcttgtacaaggaattaagaatgttgc

SEQ ID NO: 433764 - DNA, 577 bp, Homo sapiens
ctgaaactgggatttatgttgagagtctctaaggtccctgataatttgtcgcatttgttgttgttttttggagaatatttcatcactactcaaatgatggtcctctggtctggtggaagcttcgtaagctttgaagccagataaaccagggtttcagacaagtctagagcaagtcaggatatcaataagacccaayaggatgtagggctgcctgtctagggagacatttagcttatcttccccggcaaaaaggcttgtcccgctctctgtggccctcattctagtcatggctttttcactcactagtgtgtggcactgaacaagttatagaaccactttgagactcagctttcttgttaacataggaataagagcatctccattaaggcattttaagaattcagtgaaataatataagaaaaacaactattacatagatattcaaaaacagtaaggatgctggcagtaatgagcattacatcaatgacatgggttccgttgatcttacaaaagcagccctacatggataatgtggatttgggactgatgaaggcctagatatcttctccaccagact

SEQ ID NO: 433765 - DNA, 570 bp, Homo sapiens
tgaggcttctggtaaatccacctttgcctgagttgagggactggactcaaacagacacaggaagagtgcccatcataaaagaaaaaaaaaccagaaaagaagggtttggatgccagtagttaatagacttgattcttctcattacttatattttctcagtgcaataaaaagcaaggatatctgttaagagggtgacagtgggaggctgttggagttttgcatggagagaagggatgaaatagtcattctgcaaagtaagagtgagcggactgggattcttacgaatcctgctagaagtagggtagagcgagaccagtctgagcagctcaaagacggcttgagcactttataaagcagcatctgccttatcaccagaggtacctgccttataacaggtattcaagtagcaatggaaagtcagaccaaatgatcctactagtccttcttcttcttttgtgattctgtgatttttatagcaaagcaacctgatgscctccagtatatcagacaaaattattccatagcatcttcattcgcaagcgagtaagatccatcccacgaaataatgat

SEQ ID NO: 433766 - DNA, 484 bp, Homo sapiens
gttttattattattattattattattatttatatatwtttttttttacaatctcaatctcagtcttcatgaggtggtcctgagaagcccactgtacagatcttcacatctgaggctcagatagggaagaggataggaatttatgccacccaaccctgggtggcaggaccaagaattatgccagatgtcactggcagctgccacagcagtaatggcacctcctaaggcagagcactctggagaggtttaatgttcgctggctaatttaatccctcccactgcacctcaaagtggatcctgggatccccattttgtagatgagctaactaaggctctgtgagaagcaatcaccagctcaaagtcataaaaccagtaaaggctgaagctgagctctggcctcaggtctgcctggtattcaacctccagatgctgccttaggatacttcagccttcaaattcacacaggaggagcccaggattagtgg

SEQ ID NO: 433767 - DNA, 566 bp, Homo sapiens
gcacagagcctggcatgagagtaaaacctaaccccatagcagtaattatcatgtgaggatcagttcccagcttacctgattggtatagattgaatcaaaaacaagaagtttgatgtggtagggatggaggtggagggcaaggagttatccatttggaagtcctgattttgtggctatgtttgcccctaattgttgtgcgaccttggcaattcttcccatctctgggcttttgtctctccaaatgtagaagagaaatggaacctcaaagatcaacataatttcctcttacatgtctaaaagataatacctcaatttccttgggaacacactgtgaacgttttaacaatcctaaatattctactggacaaatactgcagcctctttytaatgtcccttaactccctgagtttcatggacctatgaatttttcatccttgcttcttaaaaacaacaaggtccctcctcctctgatgaccacagaacaattcttggttgtgtcaattgtttacaaaaacatcatttttttttttttttttttttttagctgagagcagtagctcacacct

SEQ ID NO: 433768 - DNA, 524 bp, Homo sapiens
tgatcccaatcagattaaaatttacctatgtaaattcatgtcaacagttctggggataagcatatcaaactgctaagaaatatgtactttggggtgggctggaagtttggagactgaaagagatttctgcctttttattctgaaaatacttcttaaaaaatggtggcttaaaacaatagactcacaggacatgaagattggaaggggccttatagggcagaggtggtgcagaaccttccacaggcagtattaggttctttgcatatatttcttacctatatctcataacaaaccccaacaggtaaggttcaacaatgccactttacaaacaaggacattaaggttcagactcaaacaaagcccgcctaaatctcaaccttgtccccttctttccaaggttataacagtamaattctaaccaaaattttattttttagataggactttgagacctgttcaggctcagccagaagtctggaagtccttcctgtgctgtctcttctaatcacttctaacatctggag

SEQ ID NO: 433769 - DNA, 582 bp, Homo sapiens
ggaggaactttgcttaacaactattaattgaaaacctactatgtgccagtcactgttttagctcctggagacaaagtagtaaacaagagataaaatccagtaattacataattaaatgagatggttttatacttattagactaattataattatggtttactgagtgcttaactatgacagctcctgtgcatgtataatttcatttaatcttcacaatggtgctacaatcacttctaattctacatgaaagagcataggctcagagaaattgagtggcttgccaaagatcacatgwctagatgtggccagaggtcagcaatgacatcagatctgtcttgactgagcctggaaccacaatacctaagtttcaatctcaacaacctcacttaccagatatgtgaccttggacagttactgagccactctgtgctttttttaaaaaaaaaaaacataaaatgggaatcataatagtaacatcgcttgtagaattgttatgagaattgaatgagctaatgtacccaaagcacttagaacagtcatggtacgtagaaagtcattagtaaatgttagctgctattatt

SEQ ID NO: 433770 - DNA, 556 bp, Homo sapiens
catcactgattaaaatgccttcccaccatgagaccccaccggccaactccccgctccccttcccatgccatcgtcctaaacaacatcaataataaaacatactcacaaaaattaatttacaaaaaccacaataacaaaaaaaaaaaggtcagccctcttggaaattaaattttgcctgagaagaatttgtaattacaaatgcatgagagagttcttcaagacatttgagactggcgccaggaagagtgacggagaaagtaggttataaatggcctttgtcaagctgcagaaaggttataaaactgctgcattttgtgcttaaaaaatcaattttccatgtgagtgaagtgctgtacatattaatacaagctcagaggaagcccctgcttgtctctgaacattcactgtcagacaagagggcacctggtcacagggtcatttggagccgtttgtgagtactggggcctggcttcagtctgtttgcagactcgcrgagcatgttgaaaagaatgactgattttctgaccaggtaacaggagacacctgggcagggtat

SEQ ID NO: 433771 - DNA, 591 bp, Homo sapiens
tgatctaacctccttactttagaagtgacgcccagaaagttaaaggacatcaccccatattcctcagcacatgagygaagaacgtgaagccaggcttcccttgccccagcttggtgttctctgtccactacactcacttcccttcaggttaaagcattttgcaaacttacatatcctatagtctctctccccaagatgatttgctgatgggaaactgaggatcagaaaggtgagggtacttgaccaacatcacacagcaaattaaaggcaagatttgatccacgcctgtgggaaaggcttcctaagtacatgaagtgggtttaccagttaccatcattccttcctctatcatggacttcaggtactgtgcctttgaggatgagtaggggcagatgagatctagccatcgtttgaaattacttgtatattattagtatttcaattagtttgttgcttactgtctgtctcctccaccaaaatgtaaatgttataatagtatggaccatgtggcttgtcctaagccatctggcacacagttggtacttgttatttgctgaacgaattggtggagtgctagaaatgacatttagt

SEQ ID NO: 433772 - DNA, 591 bp, Homo sapiens
tgatctaacctccttactttagaagtgacgcccagaaagttaaaggacatcaccccatattcctcagcacatgagcgaagaacrtgaagccaggcttcccttgccccagcttggtgttctctgtccactacactcacttcccttcaggttaaagcattttgcaaacttacatatcctatagtctctctccccaagatgatttgctgatgggaaactgaggatcagaaaggtgagggtacttgaccaacatcacacagcaaattaaaggcaagatttgatccacgcctgtgggaaaggcttcctaagtacatgaagtgggtttaccagttaccatcattccttcctctatcatggacttcaggtactgtgcctttgaggatgagtaggggcagatgagatctagccatcgtttgaaattacttgtatattattagtatttcaattagtttgttgcttactgtctgtctcctccaccaaaatgtaaatgttataatagtatggaccatgtggcttgtcctaagccatctggcacacagttggtacttgttatttgctgaacgaattggtggagtgctagaaatgacatttagt

SEQ ID NO: 433773 - DNA, 591 bp, Homo sapiens
tgatctaacctccttactttagaagtgacgcccagaaagttaaaggacatcaccccatattcctcagcacatgagcgaagaacgtgaagccaggcttcccttgccccagcttggtgttctctgtccactacactcacttcccttcaggttaaagcattttgcaaayttacatatcctatagtctctctccccaagatgatttgctgatgggaaactgaggatcagaaaggtgagggtacttgaccaacatcacacagcaaattaaaggcaagatttgatccacgcctgtgggaaaggcttcctaagtacatgaagtgggtttaccagttaccatcattccttcctctatcatggacttcaggtactgtgcctttgaggatgagtaggggcagatgagatctagccatcgtttgaaattacttgtatattattagtatttcaattagtttgttgcttactgtctgtctcctccaccaaaatgtaaatgttataatagtatggaccatgtggcttgtcctaagccatctggcacacagttggtacttgttatttgctgaacgaattggtggagtgctagaaatgacatttagt

SEQ ID NO: 433774 - DNA, 591 bp, Homo sapiens
tgatctaacctccttactttagaagtgacgcccagaaagttaaaggacatcaccccatattcctcagcacatgagcgaagaacgtgaagccaggcttcccttgccccagcttggtgttctctgtccactacactcacttcccttcaggttaaagcattttgcaaacttacatatcctatagtctctctccccaagatgatttgctgatgggaaactgaggatcagaaaggtgagggtacttgaccaacatcacacagcaaattaaaggcaagatttgatccaygcctgtgggaaaggcttcctaagtacatgaagtgggtttaccagttaccatcattccttcctctatcatggacttcaggtactgtgcctttgaggatgagtaggggcagatgagatctagccatcgtttgaaattacttgtatattattagtatttcaattagtttgttgcttactgtctgtctcctccaccaaaatgtaaatgttataatagtatggaccatgtggcttgtcctaagccatctggcacacagttggtacttgttatttgctgaacgaattggtggagtgctagaaatgacatttagt

SEQ ID NO: 433775 - DNA, 572 bp, Homo sapiens
gctgcttttgaatttctgacccttaaaaattgtgtgggataataaatactttttgttttaagtgacttgatttttgagataatttgttacacagcaatagctaactaatatagtgaaataaatgtatgcagtacttagcacagtgatcaacaaatagttctgctgttataggtatttgyaaagagcttagaatctggtttgagagataaatatacacatctatcagagaacgttagttatagaacaaacataaaaaagtatggtaaaatttgtttgggaaaataaaaactctgcaaactaggcaatattgaaacagggaggttttagtcttttctcctcctctaggaagggaatcctgtaggaaggaagttcctacaggaagagaaaagagacatctaatgtactagaagaggaagactagaattcattaccaggcactgtcacttgcttgcctcgtgaccttggacaagtccttgaaactatttgggactgttttctttctataaatagaggagccagtttggagacaagaatatgaggactaaagtcaggcctgaattccaaggaaagat

SEQ ID NO: 433776 - DNA, 457 bp, Homo sapiens
caggtagtatgtccctcctccatggagaggaaccagaataataagtagatacacacattycaaacagattgtctagaagagaatgctaggattcaacaggggagaaatgagaagcaccagaagtaagtaagcagagactttgaggcagcttttccagtcagaaaccaactgagagctggaaggggctcccagatgtggggaaacagtaagagagaaacccccagggttccaaaatggggttttacaccttggctgtgagagaaactctcaacctactggggcctttggcctgacatacgaagtgcctaaagtttgcataaaaccattgccacagaatgagaacccaaataaaatcccacaggcatctgaacctggagtagacacagctgggcactattttgagagccaaaatactggggatctacagatatggctgctgctgccctgttctaaagag

SEQ ID NO: 433777 - DNA, 627 bp, Homo sapiens
aatattcaccaaacacctacctactcagtgctaagcaaatgttttaggagctgaaaatgtagtagtaaacaagacagacaagacctttctctcatagaatttacattctagagaagagacaaataattaacaagtaaacaaacaaaatgattattttgtagagtaaaaaaatgaataaagataaaagtataatatgataaaaagttaacgaggatggggtgaaagcagcataaatttagcttaaaaatagggtagacagacttcttccactttagccttctttttcaaaagaagttttggccattatagttcctttgccgttcgtttaaattccagaaaaatcttgtctatacttataaaaatcatgccgaggttttgataggaattatattaaacctttatatcaattcgaggcatgtggacatctttattatcttgtgctatccaattcgtgaatacgtatrtctttccttgtgattagatcttctttgatttctttcacgagtattttaaagttttactaaagctaaacgtggcccatgcatattttgtcagatttgcatctgagtatttcattactttttagggattgcaaatgatactgtattttttatatattttgtcaga

SEQ ID NO: 433778 - DNA, 673 bp, Homo sapiens
caactccaggtcttaattatattaatgaagaccaattctgatttttttcttgcccaaattactatctgaggggtctggggagtcatgccctacaaatcataaattctcatcagatgggtttatttaatcctatacattgtgacttactktccaatctggctctggcataacatgagacaaggaagaaaaggcaaaatactttatcccaaaacacgtttcttgacatattttgaaatggccctgcaaagctgttctttgtagggaaaattttgcatctgtaaagaatgtctattaacatagctacatctttttctttcagaccctcccaatcctaaagagattaactaaaatctgaataggaaacatttgttgtctatagtctctaagggcagccactaaaagacgtcaaaggaactttggtctccacaatctttatcttaaccagaacatccctatatccctatagtctggaaccaacaacccgctgcccccaaaagcatttgtaaaatgtataaaacaaagctgctccctgaccaccttgggtacatgttttcaggaccttctgagggctgtgtcacaggccgtggtcactcatatttggctcagaataaatcttttcaaatattttacagagtttggctcttctcattgacatgtatttatttattttaga
